United States Patent Application Publication US 2025/0304994 A1 - sequence listing, part 3

SEQ ID NO: 18999 - DNA, 637 bp, synthetic construct
  source 1..637: mol_type = other DNA
acttagaagcttcacacaatcacgaccaatagtaggcgtggcgcgccagtcacgtcttggtcaggcacttctgttcccccggactgagtatcaatagactgctcacgcggttgaaggagaaaacgttcgttatccggctaactacttcgagaaacctagtagcaccatgaaagttgcggagtgtttcgctcagcacttcccccgtgtagatcaggtcgatgagtcactgtaaaccccacgggcgaccgtgacagtggctgcgttggcggcctgcccatggggtaacccatgggacgctctaatacagacatggtgtgaagagtctattgagctagttagtagtcctccggcccctgaatgcggctaatcctaactgcggagcacgcaccctcaacccagggggcggcgtgtcgtaatgggtaactctgcagcggaaccgactactttgggtgtccgtgtttctttttattccttactggctgcttatggtgacaattgaaaagttgttaccatatagctattggattggccatccggtgtctaacagagctattgtttacctatttattggatacgtccctcttaatctcaaggctactcaaactcttaattatatattgctccttaactgtaagaa

SEQ ID NO: 19000 - DNA, 637 bp, synthetic construct
  source 1..637: mol_type = other DNA
acttagaagcttcacacaatcacgaccaatagtaggcgtggcgcgccagtcacgtcttggtcaagcacttctgttcccccggactgagtatcaatagactgctcacgcggttgaaggagaaaacgttcgttacccggctaactacttcgagaaacctagtagcaccgtgaaagttgcggagtgtttcgctcagcacttcccccgtgtagatcaggtcgatgagtcactgtaaaccccacgggcgaccgtgacagtggttgcgttggcggcctgcccatggggtaacccatgggacgctctaatacagacatggtgtgaagagtctattgagctagttagtagtcctccggcccctgaatgcggctaatcctaactgcggagcacgcaccctcaacccagggggcggcgtgtcgtaatgggtaactctgcagcggaaccgactactttgggtgtccgtgtttctttttattccttactggctgcttatggtgacaattgaaaagttgttaccatatagctattggattggccatccggtgtctaacagagctattgtttacctatttattggatacgtccctcttaatctcaaggctattcaaactcttaattatatattgctccttaactgtaagaa

SEQ ID NO: 19001 - DNA, 637 bp, synthetic construct
  source 1..637: mol_type = other DNA
acttagaagcttcacacaatcacgaccaatagtaggcgtggcgcgccagtcacgtcttggtcaagcacttctgttcccccggactgagtatcaatagactgctcacgcggttgaaggagaaaacgttcgttatccggctaactacttcgagaaacctagtagcaccgtgaaagttgcggagtgtttcgctcagcacttcccccgtgtagatcaggtcgatgagtcactgtaaaccccacgggcgaccgtgacagtggctgcgttggcggcctgcccatggggtaacccatgggacgctctaatacagacatggtgtgaagagtctattgagctagttagtagtcctccggcccctgaatgcggctaatcctaactgcggagcacgcaccctcaacccagggggcggcgtgtcgtaatgggtaactctgcagcggaaccgactactttgggtgtccgtgtttctttttattccttactggctgcttatggtgacaattgaaaagttgttaccatatagctattggattggccatccggtgtctaacagagctattgtttacctatttattggatacgtccctcttaatctcaaggccattcaaactcttaattatatattgctccttaactgtaagaa

SEQ ID NO: 19002 - DNA, 637 bp, synthetic construct
  source 1..637: mol_type = other DNA
acttagaagcttcacacaatcacgaccaatagtaggcgtggcgcgccagtcacgtcttggtcaagcacttctgttcccccggactgagtatcaatagactgctcacgcggttgaaggagaaaacgttcgttatccggctaactacttcgagaaacctagtagcaccgtgaaagttgcggagtgtttcgctcagcacttcccccgtgtagatcaggtcgatgagtcactgtaaaccccacgggcgaccgtgacagtggctgcgttggcggcctgcccatggggtaacccatgggacgctctaatacagacatggtgtgaagagtctattgagctagttagtagtcctccggcccctgaatgcggctaatcctaactgcggagcacgcaccctcaacccagggggcggcgtgtcgtaatgggtaactctgcagcggaaccgactactttgggtgtccgtgtttctttttattccttactggctgcttatggtgacaattgaaaagttgttaccatatagctattggattggccatccggtgtctaacagagctattgtttacctatttattggatacgtccctcttaatctcaaggctattcaaactcttaattatatattgctccttaactgtaagaa

SEQ ID NO: 19003 - DNA, 637 bp, synthetic construct
  source 1..637: mol_type = other DNA
acttagaagctttacacaatcacgaccagtagcgggcatggcgcaccagccacgtcttggtcaagcacttctgtatccccggactgagtatcaatagactgctcacgcggttgaaggagaaaacgttcgttatccggctaactacttcgagaaacctagtagcaccgtgaaagttgcggagtgtttcgctcagcacttcccccgtgtagatcaggtcgatgagtcactgtaaaccccacgggcgaccgtgacagtggctgcgttggcggcctgcccatggggtaacccatgggacgctctaatacagacacggtgtgaagagtctattgagctagttagtagtcctccggcccctgaatgcggctaatcctaactgcggagcacgcaccctcaacccagggggcggcgtgtcgtaatgggtaactctgcagcggaaccgactactttgggtgtccgtgtttccttttattccttattggctgcttatggtgacaattgaaaagttgttaccatatagctactggattggccatccggtgtctaacagagctattgtttacctatttattggatacgtccctcttaatctcaaggccattcaaactcttgattacatattgctccttaactgtaagaa

SEQ ID NO: 19004 - DNA, 636 bp, synthetic construct
  source 1..636: mol_type = other DNA
acttaaagcttcacacaatcacgaccaatagtaggcgtggcgcgccagtcacgtcttggtcaagcacttctgttcccccggactgagtatcaatagactgctcacgcggttgaaggagaaaacgttcgttatccggctaactacttcgagaaacctagtagcaccgtgaaagttgcggagtgtttcgctcagcacttcccccgtgtagatcaggtcgatgagtcactgtaaaccccacgggcgaccgtgacagtggctgcgttggcggcctgcccatggggtaacccatgggacgctctaatacagacatggtgtgaagagtctattgagctagttagtagtcctccggcccctgaatgcggctaatcctaactgcggagcacgcaccctcaacccagggggcggcgtgtcgtaatgggtaactctgcagcggaaccgactactttgggtgtccgtgtttccttttattccttactggctgcttatggtgacaattgaaaagttgttaccatatagctattggattggccatccggtgtctaatagagctattgtttacctatttattggatacgtccctcttaatctcaaggccattcaaactcttaagtatatatggctccttaactgtaagaa

SEQ ID NO: 19005 - DNA, 636 bp, synthetic construct
  source 1..636: mol_type = other DNA
acttagaagcttcacacaatcacgaccaatagtaggcgtggcgcgccagccacgtcttggtcaagcacttctgttccccggactgagtatcaatagactgctcacgcggttgaaggagaaaacgttcgttatccggctaactacttcgagaaacctagtagcaccgtgaaagttgcggagtgtttcgctcagcacttcccccgtgtagatcaggtcgatgagtcactgtaaaccccacgggcgaccgtgacagtggctgcgttggcggcctgcccatggggtaacccatgggacgctctaatacagacatggtgtgaagagtctattgagctagttagtagtcctccggcccctgaatgcggctaatcctaactgcggagcacgcaccctcaacccagggggcggcgtgtcgtaatgggtaactctgcagcggaaccgactactttgggtgtccgtgtttccttttattccttactggctgcttatggtgacaattgaaaagttgttaccatatagctattggattggccatccggtgtctaacagagctattgtttacctatttattggatacgtccctcttaatctcaaggccattcaaactcttaattatatattgctccttaactgtaagaa

SEQ ID NO: 19006 - DNA, 637 bp, synthetic construct
  source 1..637: mol_type = other DNA
acttagaagctttacacaatcacgaccagtagtgggcgtggcgcgccagccacgtcttggtcaagtacttctgtatccccggactgagtatcaatagactgctcacgcggttgaaggagaaaacgttcgttacccggctaactacttcgagaaacctagtagcaccgtgaaagttgcggagtgtttcgctcaacacttcccccgtgtagatcaggtcgatgagtcactgtaaaccccacgggcgaccgtgacagtggctgcgttggcggcctgcccatggggcaacccatgggacgctctaatacagacatggtgtgaagagtctattgagctagttagtagtcctccggcccctgaatgcggctaatcctaactgcggagcacgcaccctcaacccagggggcggcgtgtcgtaatgggtaactctgcagcggaaccgactactttgggtgtccgtgtttccttttattccttattggctgcttatggtgacaattgaaaagttgttaccatatagctattggattggccatccggtgtctaacagagctattgtttacctatttattggatacatccctctcaatctcaaggccattcaaactcttgattatatattgctccttaactgtaagaa

SEQ ID NO: 19007 - DNA, 616 bp, synthetic construct
  source 1..616: mol_type = other DNA
atcaatagcaggcataacgctccagttatgtcttgatcaagcacttctgtttccccggactgagtatcaatagactgctcgcgcggttgaaggagaaaacgttcgttacccggctaactacttcggaaaacctagtaacaccatgaaagttgcggagagcttcgttcagcacttccccagtgtagatcaggtcgatgagtcaccgctttccccacgggcgaccgtggcggtggctgcgttggcggcctgcccatggggtaacccatggggcgctctaatatggacatggtgcgaagagtctactgagctagttagtagtcctccggcccctgaatgcggctaatcccaactgcggagcacacgcccacaagccagcgggtagtgtgtcgtaacgggtaactctgcagcggaaccgactactttgggtgtccgtgtttccttttatctttatattggctgcttatggtgacaattaaagaattgttgccatatagctattggattggccatccggtgtgtaacagagcaattgtttacttattcattggttttgtaccattaaccttgaagtctgtggccactcttaattatatcttgaccctcaatacagcaagat

SEQ ID NO: 19008 - DNA, 616 bp, synthetic construct
  source 1..616: mol_type = other DNA
atcaatagcaggcataacattccagttatgtcttgatcaagcacttctgtttccccgggctgagtatcaatagactgctcacgcggttgaaggagaaaacgctcgttatccggctaactacttcggaaagcctagtaacaccatgaaggttgcggagagcttcgttcagcacttccccagtgtagatcaggtcgatgagtcaccgcattccccacgggcgaccgtggcggtggctgcgttggcggcctgcccatggggtaacccatggggcgctctaatacggacatggtgcgaagagtctactgagctagttagtagtcctccggcccctgaatgcggctaatcccaactgcggagcacacgcccacaagccagcgggtggtgtgtcgtaacgggcaactctgcagcggaaccgactactttgggtgtccgtgtttccttttatctttatactggctgcttatggtgacaattaaagagttgttaccatatagctattggattggccatccggtgtgtaacagagcaattgtttacctattcattggttttgtaccattaaccttgaagtctgtgaccacccttaattatatcttgaccctcaacacagtaaaac

SEQ ID NO: 19009 - DNA, 616 bp, synthetic construct
  source 1..616: mol_type = other DNA
atcaatagcaggcataacactccagttatgtctcgatcaagcacttctgtttccccggactgagtatcaatagactgctcacgcggttgaaggagaaaacgttcgttatccggctaactacttcggaaaacccagtaacaccatgaaagttgcggagagcttcgttcagcactttcccagtgtagatcaggtcgatgagtcaccgcattccccacgggcgaccgtggcggtggctgcgttggcggcctgcccatggggtaacccatggggcgctctaatacggacatggtgcgaagagtctactgagctagttagtagtcctccggcccctgaatgcggctaatcccaactgcggagcacacgcccacaagccagcgggtagtgtgtcgtaacgggtaactctgcagcggaaccgactactttgggtgtccgtgtttccttttatctttatattggctgcttatggtgacaattaaagaattgttgccatatagctattggattggccatccggtgtgtaacagagcaattgtttacttattcattggttttgtaccattaaccttgaagtctgtggccactcttaattatatcttgaccctcaatacagcaagat

SEQ ID NO: 19010 - DNA, 616 bp, synthetic construct
  source 1..616: mol_type = other DNA
atcaatagcaggcataacgctccagttatgtcttgatcaagcacttctgtttccccggaccgagtatcaatagactgctcacgcggttgaaggagaaaacgttcgttatccggctaactacttcggaaaacctagtagcaccatgaaagttgcggagagcttcgctcagcacttccccagtgtagatcaggtcgatgagtcaccgcattccccacgggtgaccgtggcggtggctgcgttggcggcctgcccacggggtaacccgtggggcgctctaatacggacatggtgcgaagagtctactgagctagttagtagtcctccggcccctgaatgcggctaatcccaactgcggagcacacacccacaagccagtgggtagtgtgtcgtaacgggcaactctgcagcggaaccgactactttgggtgtccgtgtttccttttatctttatattggctgcttatggtgacaattaaagagttgttaccatatagctattggattggccatccggtgtgtaacagagcaattgtttacctatttattggttttgtaccattaaccttgaagtctgtgatcacccttaattatattttgaccctcaacacagcaaaac

SEQ ID NO: 19011 - DNA, 616 bp, synthetic construct
  source 1..616: mol_type = other DNA
atcaatagcaggcataacgctccagttatgtctcgatcaagcacttctgtttccccggactgagtatcaatagactgcttacgcggttgaaggagaaaacgttcgttatccggctaactacttcggaaaacctagtaacaccatagaagttgcggggagcttcgttcagcacttccccagtgtagatcaggtcgatgagtcaccgcattccccacgggcgaccgtggcggtggctgcgttggcggcctgcccatggggtaacccgtggggcgctctaatacggacatggtgcgaagagtctactgagctagttagtagtcctccggcccctgaatgcggctaatcctaactgcggagcacacgcccacaatccagcgggtagtgtgtcgtaacgggcaactctgcagcggaaccgactactttgggtgtccgtgtttccttttatttttgtattggctgcttatggtgacaattaaagagttgttaccatattgctattggattggccatccggtgtgtaacagagcaattgtctacttatttattggttttgtaccaataactttgaagtctgtgaccactctcaattatatcttgaccctcaatacagtcaaac

SEQ ID NO: 19012 - DNA, 616 bp, synthetic construct
  source 1..616: mol_type = other DNA
atcaatagcaggcataacactccagttatgtcttgatcaagcactcctgtttccccggactgagtatcaatagactgctcacgcggttgaaggagaaaacgttcgttatccggctaactacttcggaaaacctagtagcaccatgaaagttgcggagggcttcgttcagcacttccccagtgtagatcaggtcgatgagtcaccgcattccccacgggcgaccgtggcggtggctgcgttggcggcctgcccatggggtgacccatggggcgctctaatacggacatggtgcgaagagtctactgagctagttagtagtcctccggcccctgaatgcggctaatcccaactgcggagcacacgcccaaaagccagtgggtagtgtgtcgtaacgggcaactctgcagcggaaccgactactttgggtgtccgtgtttccttttatctttacattggctgcatatggtgacaattgaagagttgttaccatattgctattggattggccatccggtgtgtaacagagcaattgtttacctgtttattggctttgtaccattaaccttgaagtctgtgaccaccctcaattatatcttgaccctcaacgcagtgaaac

SEQ ID NO: 19013 - DNA, 616 bp, synthetic construct
  source 1..616: mol_type = other DNA
atcaatagcaggcataacactccagttatgtctcgatcaagcacttctgtttccccggactgagtatcaatagactgctcacgcggttgaaggagaaaacgttcgttatccggctaactacttcggaaaacccagtaacaccatgaaagttgcggagagcttcgttcagcactttcccagtgtagatcaggtcgatgagtcaccgcattccccacgggcgaccgtggcggtggctgcgttggcggcctgcccatggggtaacccatggggcgctctaatacggacatggtgcgaagagtctactgagctagttagtagtcctccggcccctgaatgcggctaatcccaactgcggagcacacgcccacaagccagcgggtagtgtgtcgtaacgggtaactctgcagcggaaccgactactttgggtgtccgtgtttccttttatctttatattggctgcttatggtgacaatcaaagagttgttaccatatagctattggattggccatccggtgtgcaacagagcaattgtttacctatttattggttttgtaccattaaccttgaagtctgtgaccacccttaattatatcctgaccctcaacacagctaaac

SEQ ID NO: 19014 - DNA, 616 bp, synthetic construct
  source 1..616: mol_type = other DNA
atcaatagcaggcataacactccagttatgtctcgatcaagcacttctgtttccccggactgagtatcaatagactgctcacgcggttgaaggagaaaacgttcgttatccggctaactacttcggaaaacccagtaacaccatgaaagttgcggagagcttcgttcagcactttcccagtgtagatcaggtcgatgagtcaccgcattccccacgggcgaccgtggcggtggctgcgttggcggcctgcccatggggtaacccatggggcgctctaatacggacatggtgcgaagagtctactgagctagttagtagtcctccggcccctgaatgcggctaatcccaactgcggagcacacgcccacaagccagcgggtagtgtgtcgtaacgggcaactctgcagcggaaccgactactttgggtgtccgtgtttccttttatctttatactggctgcttatggtgacaattaaagagttgttgccatatagctattggattggccatccggtgtgtaacagagcgattgtttacttattcattggttttgtaccattaaccttgaagtctgtgaccactctcaattatatcttgaccctcaatacagcaaaac

SEQ ID NO: 19015 - DNA, 616 bp, synthetic construct
  source 1..616: mol_type = other DNA
atcaatagcaggcataacgctccagttatgtcttgatcaagcacttctgtttccccggactgagtatcaatagactgctcgcgcggttgaaggagaaaacgttcgttacccggctaactacttcggaaaacctagtaacaccatgaaagttgcggagagcttcgttcagcacttccccagtgtagatcaggtcgatgagtcaccgctttccccacgggcgaccgtggcggtggctgcgttggcggcctgcccatggggtaacccatggggcgctctaatacggacatggtgcgaagagtctactgagctagttagtagtcctccggcccctgaatgcggctaatcccaactgcggagcacacgcccacaagccagcgggtagtgtgtcgtaacgggcaactctgcagcggaaccgactactttgggtgtccgtgtttccttttatctttatactggctgcttatggtgacaattaaagagttgttaccatatagctattggattggccatccggtgtgtaacagagcaattgtttacctattcattggttttgtaccattaaccttgaagtctgtgaccacccttaattatattttgaccctcaacacagcaaaat

SEQ ID NO: 19016 - DNA, 616 bp, synthetic construct
  source 1..616: mol_type = other DNA
atcaatagcaggcataacactccagttatgtctcgatcaagcacttctgtttccccggactgagtatcaatagactgctcacgcggttgagggagaaaacgttcgttatccggctaactacttcggaaaacccagtaacaccatgaaagttgcggagagcttcgttcagcactcccccagtgtagatcaggtcgatgagtcaccgcattccccacgggcgaccgtggcggtggctgcgttggcggcctgcccatggggtaacccatggggcgctctaatacggacatggtgcgaagagtctactgagctagttagtagtcctccggcccctgaatgcggctaatcccaactgcggagcacacgcccacaagccagcgggtagtgtgtcgtaacgggcaactctgcagcggaaccgactactttgggtgtccgtgtttccttttatctttatattggctgcttatggtgacaattaaagagttgttaccatatagctattggattggccatccggtgtgtaacagagcaattatttacctatttattggttacgtgccactaactttgaagtctgtgaccacccttaattatattttgattcttaacacagcaagac

SEQ ID NO: 19017 - DNA, 616 bp, synthetic construct
  source 1..616: mol_type = other DNA
atcaatagcaggcatgacgcaccagtcatgtctcgatcaagcacttctgtttccccggactgagtatcaatagactgctcgcgcggttgaaggagaaaacgttcgttatccggctaactacttcggaaaacctagtaacaccatgaaagttgcggagagcttcgttcagcacttccccagtgtagatcaggtcgatgagtcaccgcattccccacgggcgaccgtggcggtggctgcgttggcggcctgcccatgaggtaactcatggggcgctctaatacagacatggtgcgaagagtctactgagctagttagtagtcctccggcccctgaatgcggctaatcctaactgcggagcacatgcccacaagccagcgggtagtgtgtcgtaacgggcaactctgcagcggaaccgactactttgggtgtccgtgtttccttttatctttatattggctgcttatggtgacaattaaagaattgttgccatatagctattggattggccatccggtgtgtaacagagcaattgtttacttattcattggttttgtaccattaaccttgaagtctgtggccactcttaattatatcttgaccctcaatacagcaagat

SEQ ID NO: 19018 - DNA, 616 bp, synthetic construct
  source 1..616: mol_type = other DNA
atcaatagcaggcatgacgcaccagtcatgtctcgatcaagcacttctgtttccccggactgagtatcaatagactgctcgcgcggttgaaggagaaaacgttcgttatccggctaactacttcggaaaacctagtaacaccatgaaagttgcggagagcttcgttcagcacttccccagtgtagatcaggtcgatgagtcaccgcattccccacgggcgaccgtggcggtggctgcgttggcggcctgcccatgaggtaactcatggggcgctctaatacggacatggtgcgaagagtctactgagctagttagtagtcctccggcccctgaatgcggctaatcctaactgcggagcacatgcccacaagccagcgggtagtgtgtcgtaacgggcaactctgcagcggaaccgactactttgggtgtccgtgtttccttttatctttatattggctgcttatggtgacaattaaagagttgttaccatatagctattggattggccatccggtgtgtaacagagcaattatctacctatttattggttacgtgccactaactttgaagtctgtgaccacccttaattatattttgattcttaacacagcaagac

SEQ ID NO: 19019 - DNA, 616 bp, synthetic construct
  source 1..616: mol_type = other DNA
atcaatagcaggcatgacgcaccagtcatgtctcgatcaagcacttctgtttccccggactgagtatcaatagactgctcgcgcggttgaaggagaaaacgttcgttatccggctaactacttcggaaaacctagtaacaccatgaaagttgcggagagcttcgttcagcacttccccagtgtagatcaggtcgatgagtcaccgcattccccacgggcgaccgtggcggtggctgcgttggcggcctgcccatgaggtaactcatggggcgctctaatacggacatggtgcgaagagtctactgagctagttagtagtcctccggcccctgaatgcggctaatcctaactgcggagcacatgcccacaagccagcgggtagtgtgtcgtaacgggcaactctgcagcggaaccgactactttgggtgtccgtgtttccttttatctttatattggctgcttatggtgacaattaaagagttgttaccatatagctattggattggccatccggtgtgtaacagagcaattatttacctatttattggttacgtgccactaactttgaagtctgtgaccacccttaattatattttgattcttaacacagcaagac

SEQ ID NO: 19020 - DNA, 616 bp, synthetic construct
  source 1..616: mol_type = other DNA
atcaatagcaggcataacactccagttatgtctcgatcaagcacttctgtttccccggactgagtatcaataaacggctcacgcggttgaaggaaaaaacgttcgttatccggctaactacttcggaaaacccagtaacaccatgaaagttgcggaaagcttcgttcagcacttccccagtgtaaatcaggtcaatgagtccccgcattccccacgggcgaccgtggcggtggctgcgttggcggcctgcccatggggtaacccatggggcgctctaatacggacatggggcgaaaagtctactgagctagttagtagtcctccggcccctgaatgcggctaatcccaactgcggagcacacgcccacaagccagcgggtggtgtgtcgtaacgggtaactctgcagcggaaccgactactttgggtgtccgtgtttccttttatctttacattggctgcttatggtgacaattaaagaattgttgccatatagctattggattggccatccggtgtgtaacagagcgattgtttacttattcattggttttgtaccattaaccttgaagtctgtgaccactcttaattatatcttgaccctcaatacagcaaaac

SEQ ID NO: 19021 - DNA, 616 bp, synthetic construct
  source 1..616: mol_type = other DNA
atcaatagcaggcataacgctccagttatgtcttgatcaagcacttctgtttccccggaccgagtatcaatagactgctcgcgcggttgaaggagaaaacgttcgttatccggctaactacttcgggaaacctagtagcatcatgaaagttgcggagagcttcgttcagcacttccccagtgtagatcaggtcgatgagtcaccgcattccccacgggcgaccgtggcggtggctgcgttggcggcctgcccatggggtaacccatggggcgctctaatacggacatggtgcgaagagtctactgagctagttagtagtcctccggcccctgaatgcggctaatcccaactgcggagcacacgcccacaagccagcgggtagtgtgtcgtaacgggcaactctgcagcggaaccgactactttgggtgtccgtgtttccttttatctttatattggctgcttatggtgacaattaaagagttgttaccatatagctattggattggccatccggtgtgcaacagagcaattgtttacctatttattggttttgtaccattaaccttgaagtctgtgatcacccttaattatatcttgaccctcaacacaactaaac

SEQ ID NO: 19022 - DNA, 616 bp, synthetic construct
  source 1..616: mol_type = other DNA
atcaatagcaggcataccgctccagttatgtcttgatcaagcacttctgtttccccggaccgagtatcaatagactgctcgcgcggttgaaggaaaaaacgttcgttatccggctaactacttcgggaaacctagtaacaccatgaaagttgcggaaagcttcgttcagcacttccccagtgtagatcaggtcgatgagtcaccgcattccccacgggcgaccgtggcggtggctgcgttggcggcctgcccatggggtaacccatggggcgctctaatacggacatggtgcgaagagtctactgagctagttagtagtcctccggcccctgaatgcggctaatcccaactgcggagcacacgcccacaaaccagcgggtagtgtgtcgtaacgggcaactctgcagcggaaccgactactttgggtgtccgtgtttccttttatctatatattggctgcttatggtgacaattgaagagttgttaccatatagctattggattggccatccggtgtgcaacagagcaattgtttacctatttattggttttgtaccattaaccttgaagtctgtgaccacccttaattatattttgaccctcaacacagctaaac

SEQ ID NO: 19023 - DNA, 616 bp, synthetic construct
  source 1..616: mol_type = other DNA
acgaccagtagtgggcgtggcgcgccagtcacgtcttggtcaagcacttctgttcccccggactgagtaccaatagactgctcacgcggttgaaggagaaaacgttcgttatccggctaactacttcgagaaacctagtagcaccgtgaaagttgcggagtgtttcgctcagcacttcccccgtgtagatcaggtcgatgagtcactgtaaaccccacgggcgaccgtgacagtggctgcgttggcggcctgcccatggggtaacccgtgggacgctctaatacagacacggtgtgaagagtctattgagctagttagtagtcctccggcccctgaatgcggctaatcctaactgcggagcgcgcaccctcaatccagggggcggcgcgtcgtaatgggtaactctgcagcggaaccgactactttgggtgtccgtgtttccttttattccttattggctgcttatggtgacaattgaaaggttgttgccatatagctattggattggccatccggtgaccaacagagctattatttacctgtttattggatacgtccctcttaatctcaaggccattcaaactcttgattatatattactccttaactgtaagaa

SEQ ID NO: 19024 - DNA, 563 bp, synthetic construct
  source 1..563: mol_type = other DNA
tccccggactgagtatcaatagactgcttacgcggttgaaggagaaaacgttcgttacccggctaactacttcgagaaacttagtaacaccatcgaagctgcagggtgtttcgctcagcacttcccccgtgtagatcaggccgatgagtcaccgcaatccccacgggcgaccgtggcggtggctgcgttggcggcctgcctatggggcaacccataggacgccctaaagtggacatggtgcgaagagtctattgagctagttagtagtcctccggcccctgaatgcggctaatcctaactgcggagcacacaccctcaagccagagggtggtgtgtcgtaacgggtaactctgcagcggaaccgactactttgggtgtccgtgtttccttttattctcactgtggctgcttatggtgacaattcaagaattgttaccatatagctattggattggccatccggtgtctaacagagctattgtgtacttatttgttgggtacgttccattatcttacacatcccttaacacattacattttattgtgaagctaaatacaagaag

SEQ ID NO: 19025 - DNA, 616 bp, synthetic construct
  source 1..616: mol_type = other DNA
cgaccaatagtaggcgtggcgcgccagtcacgtcttggtcaagcacttctgttcccccggactgagtatcaatagactgctcacgcggttgaaggagaaaacgttcgttatcccggctaactacttcgagaaacctagtagcaccgtgaaagttgcggagtgtttcgctcagcacttcccccgtgtagatcaggtcgatgagtcactgtaaaccccacgggcgaccgtgacagtggctgcgttggcggcctgcccatggggtaacccatgggacgctctaatacagacatggtgtgaagagtctattgagctagttagtagtcctccggcccctgaatgcggctaatcctaactgcggagcacgcaccctcaacccagggggcggcgtgtcgtaatgggtaactctgcagcggaaccgactactttgggtgtccgtgtttccttttattccttactggctgcttatggtgacaattgaaaagttgttaccatatagctattggattggccatccggtgtctaacagagctattgtttacctatttattggatacgtccctcttaatctcaaggccattcaaactcttaattatatattgctccttaactgtaagaa

SEQ ID NO: 19026 - DNA, 615 bp, synthetic construct
  source 1..615: mol_type = other DNA
cgaccaatagtaggcgtggcgcgccagtcacgtcttggtcaagcacttctgttcccccggactgagtatcaatagactgctcacgcggttgaaggagaaaacgttcgttatccggctaactacttcgagaaacctagtagcaccgtgaaagttgcggagtgtttcgctcagcacttcccccgtgtagatcaggtcgatgagtcactgtaaaccccacgggcgaccgtgacagtggctgcgttggcggcctgcccatgggataacccatgggacgctctaatacagacatggtgtgaagagtctattgagctagttagtagtcctccggcccctgaatgcggctaatcctaactgcggagcacgcaccctcaacccagggggcggcgtgtcgtaatgggtaactctgcagcggaaccgactactttgggtgtccgtgtttccttttattccttactggctgcttatggtgacaattgaaaagttgttaccatatagctattggattggccatccggtgtctaacagagctattgtttacttatttattggatacgtccctcttaatctcaaggccattcaaactcttaattatatattgctccttaactgtaagaa

SEQ ID NO: 19027 - DNA, 615 bp, synthetic construct
  source 1..615: mol_type = other DNA
cgaccaatagtaggcgtggcgcgccagtcacgtcttggtcaagcacttctgttcccccggactgagtatcaatagactgctcacgcggttgaaggagaaaacgttcgttatccggctaactacttcgagaaacctagtagcaccgtgaaagttgcggagtgtttcgctcagcacttcccccgtgtagatcaggtcgatgagtcactgtaaaccccacgggcgaccgtgacagtggctgcgttggcggcctgcccatggggtaacccatgggacgctctaatacagacatggtgtgaagagtctattgagctagttagtagtcctccggcccctgaatgcggctaatcctaactgcggagcacgcaccctcaacccagggggcggcgtgtcgtaatgggtaactctgcagcggaaccgactactttgggtgtccgtgtttccttttattccttactggctgcttatggtgacaattgaaaagttgttaccatatagctattggattggccatccggtgtctaacagagctattgtttacttatttattggatacgtccctcttaatctcaaggccattcaaactcttaattatatattgctccttaactgtaagaa

SEQ ID NO: 19028 - DNA, 615 bp, synthetic construct
  source 1..615: mol_type = other DNA
cgaccaatagtaggcgtggcgcgccagtcacgtcttggtcaggcacttctgttcccccggactgagtatcaatagactgctcacgcggttgaaggagaaaacgttcgttatccggctaactacttcgagaaacctagtagcaccatgaaagttgcggagtgtttcgctcagcacttcccccgtgtagatcaggtcgatgagtcactgtaaaccccacgggcgaccgtgacagtggctgcgttggcggcctgcccatggggtaacccatgggacgctctaatacagacatggtgtgaagagtctattgagctagttagtagtcctccggcccctgaatgcggctaatcctaactgcggagcacgcaccctcaacccagggggcggcgtgtcgtaatgggtaactctgcagcggaaccgactactttgggtgtccgtgtttctttttattccttactggctgcttatggtgacaattgaaaagttgttaccatatagctattggattggccatccggtgtctaacagagctattgtttacctatttattggatacgtccctcttaatctcaaggctactcaaactcttaattatatattgctccttaactgtaagaa

SEQ ID NO: 19029 - DNA, 615 bp, synthetic construct
  source 1..615: mol_type = other DNA
cgaccaatagtaggcgtggcgcgccagtcacgtcttggtcaagcacttctgttcccccggactgagtatcaatagactgctcacgcggttgaaggagaaaacgttcgttatccggctaactacttcgagaaacctagtagcaccgtgaaagttgcagagtgtttcgctcagcacttcccccgtgtagatcaggtcgatgagtcactgtaaaccccacgggcgaccgtgacagtggctgcgttggcggcctgcccatggggtaacccatgggacgctctaatacagacatggtgtgaagagtctattgagctagttagtagtcctccggcccctgaatgcggctaatcctaactgcggagcacgcaccctcaacccagggggcggcgtgtcgtaatgggtaactctgcagcggaaccgactactttgggtgtccgtgtttctttttattccttactggctgcttatggtgacaattgaaaagttgttaccatatagctattggattggccatccggtgtctaacagagctattgtttacctatttattggatacgtccctcttaatctcaaggccattcaaactcttaattatatattgctccttaactgtaagaa

SEQ ID NO: 19030 - DNA, 615 bp, synthetic construct
  source 1..615: mol_type = other DNA
cgaccagtagtgggcgtggcgcgccagccacgtcttggtcaagcacttctgtatccccggactgagtatcaatagactgctcacgcggttgaaggagaaaacgttcgttacccgactaactacttcgagaaacctagtagcaccgtgaaagttgcggagtgtttcgctcagcacttcccccgtgtagatcaggtcgatgagtcactgtaaaccccacgggcgaccgtgacagtggctgcgttggcggcctgcccatggggcaacccgtgggacgctctgatacagacatggtgtgaagagtctattgagctagttagtagtcctccggcccctgaatgcggctaatcctaactgcggagcacgcaccctcaacccagggggcggcgtgtcgtaatgggtaactctgcagcggaaccgactactttgggtgtccgtgtttccttttattccttactggctgcttatggtgacaattgaagagttgttaccatatagctattggattggccatccggtgtctaacagagctattgtttatctatttattggatacatccctcttaatctcaagtccattcaaactcttgattatatattgctccttaactgtaagaa

SEQ ID NO: 19031 - DNA, 615 bp, synthetic construct
  source 1..615: mol_type = other DNA
cgaccagtagtgggcgtggcgcgccagtcacgtcttgatcaaacacttctgtatccccggactgagtatcaatagactgctcacgcggttgaaggagaaaacgttcgttatccggctaactacttcgagaaacctagtagcaccgtgaaagttgcggagtgtttcgctcagcacttcccccgtgtagatcaggtcgatgagtcactgtaaaccccacgggcgaccgtgacagtggctgcgttggcggcctgcccatggggtaacccatgggacgctctaatacagacatggtgtgaagagtctattgagctagttagtagtcctccggcccctgaatgcggctaatcctaactgcggagcacgcaccctcaacccagggggcggcgtgtcgtaatgggtaactctgcagcggaaccgactactttgggtgtccgtgtttccttttattccttattggctgcttatggtgacaattgaaaagttgttaccatatagctattggattggccatccggtgtctaacagagctattatttacctatttattggatacgtccctcttgatttcaaggccattcaaactcttgattatatattgctccttaactgcaagaa

SEQ ID NO: 19032 - DNA, 615 bp, synthetic construct
  source 1..615: mol_type = other DNA
cgaccaatagtgggcgtgacgcaccagtcacgtcttggtcaagcacttctgtctccccggaccgagtatcaatagactgcttacgcggttgaaggagaaaacgttcgttacccggctaactacttcgagaaacctagtagcaccatgaaagttgcagagtgtttcgctcagcacttcccccgtgtagatcaggtcgatgagccactgtaaaccccacgggcgaccgtgacagtggctgcgttggcggcctgcccatggggcaacccgtgggacgctctaatacagacatggcgtgaagagtctattgagctagttagtaatcctccggcccctgaatgcggctaatcctaactgcggagcacgcaccctcaatccagggggtagtgtgtcgtaacgggtaactctgcagcggaaccgactactttgggtgtccgtgtttccttttattccttactggctgcttatggtgacaatcaaagagttgttaccatatagctattggattggccatccggtgtccaacagagctattgtctacctgttcattggatacgtccctctcaattacaagactttccaaactcttaactacatactgctactcaatcataagaa

SEQ ID NO: 19033 - DNA, 615 bp, synthetic construct
  source 1..615: mol_type = other DNA
cgaccaatagtgggcgtgacgcaccagtcacgtcttggtcaagcacttctgtttccccggaccgagtatcaataaactgcttacgcggttgaaggagaaagcgttcgttacccggctaactacttcaagaaacctagtagcaccatgaaagtcgcagagtgtttcgctcagcacttcccccgtgtagatcaggtcgatgagccactgtgaaccccacgggcgaccgtgacagtggctgcgttggcggcctgcccatggggcaacccgtgggacgctctaatacagacatggtgtgaagagtctattgagctagttagtaatcctccggcccctgaatgcggctaatcctaactgcggagcacgcaccctcaatccagggggcggtgtgtcgtaacgggtaactctgcagcggaaccgactactttgggtgtccgtgtttccttttataccttactggctgcttatggtgacaatcaaagagttgttaccatatagctattggattggccatccggtgtctaacagagctattgtctacctgttcattggatacgtccctctcaattacaagactttccaaactcttaactacatactgctacttaatcataagaa

SEQ ID NO: 19034 - DNA, 614 bp, synthetic construct
  source 1..614: mol_type = other DNA
cgaccaatagtgggcgtgacgcaccagtcacgtcttggtcaagcacttctgtttcccggaccgagtatcaatagactgcttacgcggttgaaggagaaaacgttcgttacccggctaactacttcgagaaacctagtagcaccgtgaaagttgcagagtgtttcgctcagcacttcccccgtgtagatcaggtcgatgagccactgtaaaccccacgggcgaccgtgacagtggctgcgttggcggcctgcccatggggcaacccgtgggacgctctaatacagacatggtgtgaagagtctattgagctagttagtaatcctccggcccctgaatgcggctaatcctaactgcggagcacgcacccccaatccagggggcagtgtgtcgtaacgggtaactctgcagcggaaccgactactttgggtgtccgtgtttccttttattccttactggctgcttatggtgacaatcaaagagttgttaccatatagctattggattggccatccggtgtctaacagagctattgtctacctgttcattggatacgtccctctcaattacaagactttccgaactcttaactacatactgctactcaatcacaagaa

SEQ ID NO: 19035 - DNA, 614 bp, synthetic construct
  source 1..614: mol_type = other DNA
cgaccaatagtaggcgtggcgcgccagtcacgtctcggtcaagcacttctgttccccggactgagtatcaatagactgcttacgcggttgaaggagaaaacgttcgttatccggctaactacttcgagaaacctagtagcaccgtgaaagttgcggagcgtttcgctcagcacttcccccgtgtagatcaggccgatgagtcactgtaaaccccacgggcgaccgtgacagtggctgcgttggcggcctgcccatggggtaacccatgggacgctctaatacagacatggtgtgaagagtctattgagctagttagtagtcctccggcccctgaatgcggctaatcctaactgcggagcacgcaccctcaacccagggggcggcgtgtcgtaatgggtaactctgcagcggaaccgactactttgggtgtccgtgtttccttttattccttactggctgcttatggtgacaattgaaaagttgttaccatatagctattggattggccatccggtgtctaacagagctattgtttacctatttactggatacgtccctcttaatctcaaggccattcaaactcttaattatatattgctccttaattgtaagaa

SEQ ID NO: 19036 - DNA, 614 bp, synthetic construct
  source 1..614: mol_type = other DNA
cgaccaatagtaggcgtggcgcgccagtcacgtctcggtcaagcacttctgttccccggactgagtatcaatagactgcttacgcggttgaaggagaaaacgttcgttatccggctaactacttcgagaaacctagtagcaccgtgaaagttgcggagtgtttcgctcagcacttcccccgtgtagatcaggtcgatgagtcactgtaaaccccacgggcgaccgtgacagtggctgcgttggcggcctgcccatggggtaacccatgggacgctctaatacagacatggtgtgaagagtctattgagctagttagtagtcctccggcccctgaatgcggctaatcctaactgcggagcacgcaccctcaacccagggggcggcgtgtcgtaatgggtaactctgcagcggaaccgactactttgggtgtccgtgtttccttttattccttactggctgcttatggtgacaattgaaaagttgttaccatatagctattggattggccatccggtgtctaacagagctattgtttacctatttactggatacgtccctcttaatctcaaggccattcaaactcttaattatatattgctccttaactgtaagaa

SEQ ID NO: 19037 - DNA, 614 bp, synthetic construct
  source 1..614: mol_type = other DNA
cgaccaatagtaggcgtggcgcgccagtcacgtctcggtcaagcacttctgttccccggactgagtatcaatagactgcttacgcggttgaaggagaaaacgttcgttatccggctaactacttcgagaaacctagtagcaccgtgaaagttgcggagtgtttcgctcagcacttcccccgtgtagatcaggtcgatgagtcactgtaaaccccacgggcgaccgtgacagtggctgcgttggcggcctgcccatggggtaacccatgggacgctctaatacagacatggtgtgaagagtctattgagctagttagtagtcctccggcccctgaatgcggctaatcctaactgcggagcacgcaccctcaacccagggggcggcgtgtcgtaatgggtaactctgcagcggaaccgactactttgggtgtccgtgtttccttttattccttactggctgcttatggtgacaattgaaaagttgttaccatatagctattggattggccatccggtgtctaacagagctattgtttacctatttactggatacgtccctcttaatctcaaggccattcaaactcttaattgtatattgctccttaactgtaagaa

SEQ ID NO: 19038 - DNA, 391 bp, synthetic construct
  source 1..391: mol_type = other DNA
gtggcggtggctgcgttggcggcctgcctatggggcaacccataggacgccctaaagtggacatggtgcgaagagtctattgagctagttagtagtcctccggcccctgaatgcggctaatcctaactgcggagcacataccctcaagccagagggtggtgtgtcgtaacgggtaactctgcagcggaaccgactactttgggtgtccgtgtttccttttattcttactgtggctgcttatggtgacaattcaagaattgttaccatatagctattggattggccatccagtgtctaacagagctattgtgtacttatttgttgggtacgttccattatcttacacatcccttgacacattacattttattgtgaagctaaatacaagaag

SEQ ID NO: 19039 - DNA, 391 bp, synthetic construct
  source 1..391: mol_type = other DNA
gtggcggtggctgcgttggcggcctgcctatggggcaacccataggacgccctaaagtggacatggtgcgaagagtctattgagctagttagtagtcctccggcccctgaatgcggctaatcctaactgcggagcacataccctcaagccagagggtggtgtgtcgtaacgggtaactctgcagcggaaccgactactttgggtgtccgtgtttccttttattcttactgtggctgcttatggtgacaattcaagaattgttaccatatagctattggattggccatccggtgtctaacagagctattgtgtacttatttgtcgggtacgttccattatcttacacatcccttaacacattacattttattgtgaagctaaatacaagaag

SEQ ID NO: 19040 - DNA, 292 bp, synthetic construct
  source 1..292: mol_type = other DNA
ccggcccctgaatgcggctaatcctaactgcggagcacgcgccctcaatccagtgggtagtgtgtcgtaatgggcaactctgcagcggaaccgactactttgggtgtccgtgtttccatttattcttatattggctgcttatggtgacaattgaaagattgttaccatatagctattggattggccatccggtatcgaatagagcagttatctatcagtttgttggattcatcccgttgagtgtgcagcagtatcgcactttgcttttaatagtgagactgaatagtacaaa

SEQ ID NO: 19041 - DNA, 813 bp, synthetic construct
  source 1..813: mol_type = other DNA
ttaaaacagcctgtgggttgttcccacccacagggcccactgggcgctagtacactggtatgccagcaccttggtatcacggtaccattgtgcgtcagtacctttgtacgcctgttttatattcccttccccatatgtaaccttagaagtttaagtaaacaaagaccaataggagtccaacatccagttggatcgcggtcaagcacttctgtttccccggacctagtagtgataggctgtacccacggccgaagatgaacccgtccgttatccggccagctacttcgagaagcctagtagcatcaaagatctgtcttggcgtttcgctcagcgcgttccccccgcgtagatcgggctgatgggtctccgcataccccacgggcgaccgtggcggaggccgcgtggcggcccgcctatggcgaaagccataggacgccatttcagtgacagggtgtgaagagcctattgagctagttggtagtcctccggcccctgaatgcggctaatcctaaccacggagcgtccaccagcaaaccagctgggagggcgtcgtaacgggtaactctgtggcggaaccgactactttgggtgtccgtgtttccttttgatcctatattggctgcttatggtgacaacgataagttgttatcataaagcttttgggttggccacctggaaaaagttatcagtgtttgatattgttcggctttcacgcctaccaataaaacaagctttatatttgttaatttcattttatccatccaaggatatcactgaatttcatttacaactcttgcttacactgtcaacaag

SEQ ID NO: 19042 - DNA, 842 bp, synthetic construct
  source 1..842: mol_type = other DNA
tttgtcgacggtacctaatacgactcactatattaaaacagcctgtgggttgtacccacccacagggcccactgggcgctagtacactggtatgatagtaccatggtattacggtaccatggtatgccagtacctttgtacgcctgttttatactccctccccatgtaactttagaagtctaagcaaacaaagaccaatagaagtccaacatccagttggattgcggtcaagcacttctgtttccccggacctagtagtgataggctgtacccacggccgaagatgaacccgtccgttatccggccagctacttcgagaagcctagtagcatcaaagatctgtcttggcgtttcgctcagcgcgttccccccgcgtagatcgggctgatgggtctccgcattccccacgggcgaccgtggcggaggccgcgtggcggcccgcctatggcgaaagccataggacgccatttcagtgacagggtgtgaagagcctattgagctagttggtagtcctccggcccctgaatgcggctaatcctaaccacggagcgtccaccagcaaaccagctggcagggcgtcgtaacgggtaactctgtggcggaaccgactactttgggtgtccgtgtttccttttgatcctattgtggctgcttatggtgacaacttacagttgttatcataaagcttttggattggccatccggaaagagttaacagtttgttcgctcgctgctttatcaaaacttccattgaggaaagcattttacttgttaattgcattttataaacttgaccagatatcaagtgcacacttagagttgctaatacaattacatcaaac

SEQ ID NO: 19043 - DNA, 813 bp, synthetic construct
  source 1..813: mol_type = other DNA
tttaaaacagcctgtgggttgttcccactcacagggcccattgggcgccagtactctggtatgtcagtactctggtatcacggtaccaccgtacgccagtacctttgtacgcctgttttatatccccttcccaaatgtaactttagaagcacaactaagtaaagaccaataggagtccaacatccagttggattacggtcaagcacttctgtttccccggacctagtagtgataggctgtacccacggccgaagatgaacccgtccgttatccggccagctacttcgagaagcctagtaacaccaaagatctgtcttggcgtttcgctcagcgcgttccccccgcgtagatcgggctgatgggtctccgcataccccacgggcgaccgtggcggaggccgcgtggcggcccgcctatggcgaaagccataggacgccatttcagtgacagggtgtgaagagcctattgagctagttggtagtcctccggcccctgaatgcggctaatcctaaccacggagcactcgccaacaaaccagttggtagggtgtcgtaacgggtaactctgtggcggaaccgactactttgggtgtccgtgtttccttttgatcctatgttggctgcttatggtgacaacgataagttgttatcataaagcttttgggttggccacctggaaaaagttatcagtgtttgatattgttcggctttcacgcctaccaacaaaacaagctttatattacttgatttccttttatccaaaagaggaaatttttgaatttcatcttcaattgctcctgtcgttaacagcaaa

SEQ ID NO: 19044 - DNA, 815 bp, synthetic construct
  source 1..815: mol_type = other DNA
gggtgtgtttggcttatttgggttgatcccacccaaagggcccactgggcgccagtacactggtacgacagtaccttggtatcacggtaccattgtacgccagtacctttgtacgcctgttttatatcccttccccacatgtaaccttagaagtttaatgaacaagaccaataggagtccaacatccagttggattgcggtcaagcacttctgtttccccggacctagtagtgataggctgtacccacggccgaagatgaacccgtccgttatccggccagctacttcgagaagcctagtaacatcaaagatctgtcttggcgtttcgctcagcgcgttccccccgcgtagatcgggctgatgggtctccgcataccccacgggcgaccgtggcggaggccgcgtggcggcctgcctatggcgaaagccataggacgccatttcagtgacagggtgtgaagagcctattgagctagttggtagtcctccggcccctgaatgcggctaatcctaaccacggagcatccaccagcaatccagctgggagggtgtcgtaacgggtaactctgtggcggaaccgactactttgggtgtccgtgtttccttttgatcctattttggctgcttatggtgacaacgataagttgttatcataaagcttttgggttggccacctggaaaaagttatcagtgtttgatattgttcggctttcacgcctaccaataaaacaatccttatattacttaatttccttttatccaaaggaggaaattactgaatttcacctccagttactcctaacattatcatcaaa

SEQ ID NO: 19045 - DNA, 813 bp, synthetic construct
  source 1..813: mol_type = other DNA
ttaaaacagcctgtgggttgttcccacccacagggcccactgggcgccagtacactggtatgtcagtacctcggtaccacggtaccgttgtacgccagtacctttgtacgcctgttttatattccctcccccaaatgtaactttagaagcttaagtaaccaaagaccaataggagtccaacatccagttggattgcggtcaagcacttctgtttccccggacctagtagtgataggctgtacccacggccgaagatgaacccgtccgttatccggccagctacttcgagaagcctagtagcatcaaagatctgtcttggcgtttcgctcagcgcgttccccccgcgtagatcgggtcgatgggtctccgcataccccacgggcgaccgtggcggaggccgcgtggcggcccgcctatggcgaaagccataggacgccatttcagtgacagggtgtgaagagcctattgagctagttggtagtcctccggcccctgaatgcggctaatcctaaccactgagcgtccaccaacaaaccagttgggagggcgtcgtaacgggtaactcggtggcggaaccgactactttgggtgtccgtgtttccttttgatcctatattggctgcttatggtgacaacgataagttgttatcataaagcttttgggttggccacctggaaaaagttatcagtgtttgatattgttcggctttcacgcctgccaataagacaagctttatatttgatagtttcattttatccatctgaggatattactgaatttcatttacaactcttgcttgcactatcgacaag

SEQ ID NO: 19046 - DNA, 813 bp, synthetic construct
  source 1..813: mol_type = other DNA
ttaaaacagcctgtgggttgttcccacccacagggcccactgggcgccagtacactggtacgtcagtacctcggtatcacggtaccgttgtacgtcagtacctttgtacgcctgttttattttccctcccccaaatgtaactttagaagcttaagtaattaaagaccaataggagtccaacatccagttggattgcggtcaagcacttctgtttccccggacctagtagtgataggctgtacccacggccgaagatgaacccgtccgttatccggccagctacttcgagaagcctagtagcatcaaagatctgtcttggcgtttcgctcagcgcgttccccccgcgtagatcgggctgatgggtctccgcataccccacgggcgaccgtggcggaggccgcgtggcggcccgcctatggcgaaagccataggacgccatttcagtgacagggtgtgaagagcctattgagctagttggtagtcctccggcccctgaatgcggctaatcctaaccactgagcgtccaccagcaaaccagctgggagggcgtcgtaacgggtaactcggtggcggaaccgactactttgggtgtccgtgtttccttttgatcctatattggctgcttatggtgacaacgataagttgttatcataaagcttttgggttggccacctggaaaaagttatcagtgtttgatattgttcggctttcacgcctaccaataaaacaagctttatattatttggtttccttttattcaaaggaagaaatttctgaatttcattttcaattgctcctaacattatcagcaaa

SEQ ID NO: 19047 - DNA, 800 bp, synthetic construct
  source 1..800: mol_type = other DNA
gtgggttgttcccactcacagggcccattgggcgccagtactctggtatgtcagtactctggtatcacggtaccaccgtacgccagtacctttgtacgcctgttttatatccccttcccaaatgtaactttagaagcacaactaagtaaagaccaataggagtccaacatccagttggattacggtcaagcacttctgtttccccggacctagtagtgataggctgtacccacggccgaagatgaacccgtccgttatccggccagctacttcgagaagcctagtaacaccaaagatctgtcttggcgtttcgctcagcgcgttccccccgcgtagatcgggctgatgggtctccgcataccccacgggcgaccgtggcggaggccgcgtggcggcccgcctatggcgaaagccataggacgccatttcagtgacagggtgtgaagagcctattgagctagttggtagtcctccggcccctgaatgcggctaatcctaaccacggagcactcgccaacaaaccagttggtagggtgtcgtaacgggtaactctgtggcggaaccgactactttgggtgtccgtgtttccttttgatcctatgttggctgcttatggtgacaacgataagttgttatcataaagcttttgggttggccacctggaaaaagttatcagtgtttgatattgttcggctttcacgcctaccaacaaaacaagctttatattacttgatttccttttatccaaaagaggaaatttttgaatttcatcttcaattgctcctgtcgttaacagcaaa

SEQ ID NO: 19048 - DNA, 805 bp, synthetic construct
  source 1..805: mol_type = other DNA
gccctgtgggttgttcccactcacagggcccactgggcgctagtacactggtatgccagtactctggtattacggtaccactgtacgccagtacctttgtacgcctgttttatatccctttcccaaacgtaaccttagaagtttaagtaaacaaagaccaataggagtccaacatccagttggactgcggtcaagcacttctgtttccccggacctagtagtgataggctgtacccacggccgaagatgaacccgtccgttatccggccagctacttcgagaagcctagtagcatcaaagatctgtcttggtgtttcgctcagcgcgttccccccgcgtagatcgggttgatgggtctccgcatcccccacgggcgaccgtggcggaggccgcgtggcggcccgcctatggcgaaagccataggacgccatttcagtgacagggtgtgaagagcctattgagctagttggtagtcctccggcccctgaatgcggctaatcctaaccacggagcgcccaccagcaaaccagctgggagggcgtcgtaacgggtaactctgtggcggaaccgactactttgggtgtccgtgtttccttttgatcctatattggctgcttatggtgacaacgataagttgttatcataaagcttttgggttggccacctggaaaaagttatcagtgtttgatatcgttcggctttcacgcctgccaataaaacaagctttatatttgttaatctcattttatccatctgaggatattactgaatttcatttacaactcttgctctcactgtcaacaag

SEQ ID NO: 19049 - DNA, 804 bp, synthetic construct
  source 1..804: mol_type = other DNA
cctgtgggttgttcccacccacagggcccactgggcgctagtacactggtatgccagtactctggtattacggtaccactgtacgccagtacctttgtacgcctgttttatatccctttccccaaacgtaaccttagaagtttaagtaaacaaagaccaataggagtccaacatccagttggattgcggtcaagcacttctgtttccccggacctagtagtgataggctgtacccacggccgaagatgaacccgtccgttatccggccagctacttcgagaagcctagtagcatcaaagatctgttttggcgtttcgctcagcgcgttccccccgcgtagatcgggtcgatgggtctccgcatcccccacgggcgaccgtggcggaggccgcgtggcggcccgcctatggcgaaagccataggacgccatttcagtgacagggtgtgaagagcctattgagctagttggtaatcctccggcccctgaatgcggctaatcctaaccacggagcgtccaccagcaagccagctgggagggcgtcgtaacgggtaactctgtggcggaaccgactactttgggtgtccgtgtttccttttgatcctatattggctgcttatggtgacaacgataagttgttatcataaagcttttgggttggccacctggaaaaagttatcagtgtttgatatcgttcggctttcacgcctgccaataaaacaagctttatatttgttaatctcattttatccatctgaggatattactgaatttcatttacaactcttgctctcactgtcaacaag

SEQ ID NO: 19050 - DNA, 813 bp, synthetic construct
  source 1..813: mol_type = other DNA
ttaaaacagcctgtgggttgttcccacccacagggcccactgggcgccagtacactggttcgtcagtacctcggtatcacggtaccgttgtacgtcagtacctttgtacgcctgttttatattccctcccccaaatgtaaccttagaagtttaagtaaccaaagaccaataggagtccaacatccagttggattgcggtcaagcacttctgtttccccggacctagtagtgataggctgtacccacggccgaaaatgaacccgtccgttatccggccagctacttcgagaagcctagtagcatcaaagatctgtcttggcgtttcgctcagcgcgttccccccgcgtaaatcgggtcgatgggtctccgcataccccacgggcgaccgtggcggaggccgcgtggcggcccgcctatggcgaaagccataggacgccatttcagtgacagggtgtgaaaagcctattgagctagttggtagtcctccggcccctgaatgcggctaatcctaaccactgagcgtccaccaacaaaccagttgggagggcgtcgtaacgggtaactcggtggcggaaccgactactttgggtgtccgtgtttccttttgatcctatattggctgcttatggtgacaacgataagttgttatcataaagcttttgggttggccacctggaaaaagttatcagtgtttgatattgttcggctttcacgcctaccaataaaacaagctttatatttgttagtttcattttatccatccaaggatattactgaatttcatctacaactcttgcttgcattatcgacaag

SEQ ID NO: 19051 - DNA, 801 bp, synthetic construct
  source 1..801: mol_type = other DNA
gtgggttgttcccacccacagggcccactgggcgctagtacactggtatgccagtactctggtattacggtaccactgtacgccagtacctttgtacgcctgttttatatccctttccccaaacgtaaccttagaagtttaagtaaacaaagaccaataggagtccaacatccagttggattgcggtcaagcacttctgtttccccggacctagtagtgataggctgtacccacggccgaagatgaacccgtccgttatccggccagctacttcgagaagcctagtagcatcaaagatctgtcttggcgtttcgctcagcgcgttccccccgcgtagatcgggtcgatgggtctccgcatcccccacgggcgaccgtggcggaggccgcgtggcggcccgcctatggcgaaagccataggacgccatttcagtgacagggtgtgaagagcctattgagctagttggtagtcctccggcccctgaatgcggctaatcctaaccacggagcgtccaccagcaaaccagctgggagggcgtcgtaacgggtaactctgtggcggaaccgactactttgggtgtccgtgtttccttttgatcctattgtggctgcttatggtgacaacgataagttgttatcataaagcttttgggttggccacctggaaaaagttatcagtgtttgatatcgttcggctttcacgcctgccaataaaacaagctttatatttgttaatctcattttatccatctgaggatattactgaatttcatttacaactcttgctctcactgtcaacaag

SEQ ID NO: 19052 - DNA, 813 bp, synthetic construct
  source 1..813: mol_type = other DNA
ttaaaacagcctgtgggttgttcccacccacagggcccactgggcgctagtacactggtatgacctaacctcggtattgcggtaccgttgtgttacagtacctttgtacgcctgttttatactcccctccccaaacgtaactttagaagttttaacaaataaagaccactaggagtccaacatccagttggattgcggtcaagcacttctgtttccccggacctagtagtgataggctgtacccacggccgaagatgaacccgtccgttatccggccagctacttcgagaagcctagtaacatcaaagatctgtcttggcgtttcgctcagcgcgttccccccgcgtagatcgggctgatgggtctccgcataccccacgggcgaccgtggcggaggccgcgtggcggcccgcctatggcgaaagccataggacgccatttcagtgacagggtgtgaagagcctattgagctagttggtagccctccggcccctgaatgcggctaatcctaaccacggagcgtccaccagcaagccagctggcagggcgtcgtaacgggtaactctgtggcggaaccgactactttgggtgtccgtgtttccttttgatcctatattggctgcttatggtgacaacgataagttgttatcataaagcttttgggttggccacctggaaaaagttatctgtgtttgatattgttcggctttcacgcctaccaataaaacaagctttatattatttagtttccttttatccaaaggaggaaattactgaattccatcttcaactattgcttacattatcagcaaa

SEQ ID NO: 19053 - DNA, 801 bp, synthetic construct
  source 1..801: mol_type = other DNA
gtgggttgttcccacccacagggcccactgggcgctagtacactggtatgccagtactctggtatcacggtaccactgtacgccagtacctttgtacgcctgttttacatcccctccccataatgcaaccttagaagcttaagtaaacaaagaccaataggagtccaacatccagttggattacggtcaagcacttctgtttccccggacctagtagtgataggctgtacccacggccgaagatgaacccgtccgttatccggccagctacttcgagaagcctagtaacatcaaagatctgtcttggcgtttcgctcagcgcgttccccccgcgtagatcgggtcgatgggtctccgcattccccacgggcgaccgtggcggaggccgcgtggcggcccgcctatggcgaaagccataggacgccatttcagtgacagggtgtgaagagcctattgagctagttggtagtcctccggcccctgaatgcggctaatcctaaccacggagcgtccaccagtgaaccagctgggagggcgtcgtaacgggcaactctgtggcggaaccgactactttgggtgtccgtgtttccttttgatcctatattggctgcttatggtgacaacgataagttgttatcataaagctcttgggttggccacctggaaaaagttatcagtgtttgatattgttcggctttcacgcctaccaataaaacaagctttatatttgttgatttcattttatccatccaaagatattactgagtttcatttacaactcttgcttacactatcggcaaa

SEQ ID NO: 19054 - DNA, 804 bp, synthetic construct
  source 1..804: mol_type = other DNA
aaatagcctatggggcgctcccacccaagggccaacctggcgctagtacactggtacgccagtaccttggtatcacggtaccactgtatgttagtacctttgtatgcctatttgcaccccttcccaaagtaactttagaaacttaaaatacaaagaccaataggagtccaacacccagttggattgcggtcaagcacttctgtttccccggacctagtagtgataggctgtacccacggccgaagatgaacccgtccgttatccggccagctacttcgagaagcctagtagcatcaaagatctgtcttggcgtttcgctcagcgcgttccccccgcgtagatcgggctgatgggtctccgcattccccacgggcgaccgtggcggaggccgcgtggcggcccgcctatggcgaaagccataggacgccatttcagtgacagggtgtgaagagcctattgagctagttggtagtcctccggcccctgaatgcggctaatcctaaccacggagcgtccaccaacaaaccagttggcagggcgtcgtaacgggtaactctgtggcggaaccgactactttgggtgtccgtgtttccttttgatcctatgttggctgcttatggtgacaacgataagttgttatcataaagctcttgggttggccacctggaaaaagttatcagtgtttgatattgttcggcttgcacgcctaccaataaaacaagctctatatttgttaatctcattttatccatctgaggatattactgaattccatttacaactcctgcttacattgtcaacaag

SEQ ID NO: 19055 - DNA, 804 bp, synthetic construct
  source 1..804: mol_type = other DNA
aaatagcctatggggcgctcccacccaagggccaatctggcgctagtacactggtacgccagtaccttggtatcacggtaccactgtacgttagtacctttgtatgcctatttgcatcccttcccaaagtaactttagaaacttaaaatacaaagaccaataggagtccaacacccagttggattgcggtcaagcacttctgtttccccggacctagtagtgataggctgtacccacggccgaagatgaacccgtccgttatccggccagctacttcgagaagcctagtaacatcaaagatctgtcttggcgtttcgctcagcgcgttccccccgcgtagatcgggctgatgggtctccgcataccccacgggcgaccgtggcggaggccgcgtggcggcccgcctatggcgaaagccataggacgccatttcagtgacagggtgtgaagagcctattgagctagttggtagtcctccggcccctgaatgcggctaatcctaaccactgagcgtccaccaacaaaccagttgggagggcgtcgtaacgggtaactctgtggcggaaccgactactttgggtgtccgtgtttccttttgatcctatattggctgcttatggtgacaacgataagttgttatcataaagcttttgggttggccacctggaaaaagttatcagtgtttgatattgttcggctttcacgcctaccaataaaacaagctctatatttgttaatctcattttatccatctgaggatattactgaattccatttacaactcctgctcacattgtcaacaag

SEQ ID NO: 19056 - DNA, 810 bp, synthetic construct
  source 1..810: mol_type = other DNA
taataacagtctatgggttgttcccaccctagagcccactgggcgctagtacactggtacgccagtaccttggtatcacggtatcattgtacgtcagtacctttgtatgcctgttttatgccccttcccccaatgtaactttagaagcttacaaaacaaagaccactaggagtccaacacccagttggattgcggtcaagcacttctgtttccccggacctagtagtgataggctgtacccacggccgaagatgaacccgtccgttatccggccagctacttcgagaagcctagtagcatcaaagatctgtcttggcgtttcgctcagcgcgttccccccgcgtagatcgggctgatgggtctccgcatcccccacgggcgaccgtggcggaggccgcgtggcggcccgcctatggcgaaagccataggacgccatttcagtgacagggtgtgaagagcctattgagctagttggtagtcctccggcccctgaatgcggctaatcctaaccacggagcgtccaccagcaaaccagctggcagggcgtcgtaacgggtaactcggtggcggaaccgactactttgggtgtccgtgtttccttttgatcctatattggctgcttatggtgacaacgataagttgttatcataaagcttttgggttggccacctggaaaaagttatcagtgtttgatattgttcggctttcacgcctaccaataagacaagctctatatttgttaatttcattttatccatctgaggatattactgaatttcatttacaactcctgcttacattgtcaacaag

SEQ ID NO: 19057 - DNA, 797 bp, synthetic construct
  source 1..797: mol_type = other DNA
ggctgttcccacccacagggcccactgggcgccagtacactggtacgtcagtaccttggtattacggtaccattgtacgccagtacctttgtacgcctgttttatatcccttccccaatcgtaaccttagaagcataagtaaacatagaccactaggagtccaacatccagttggattgcggtcaagcacttctgtttccccggacctagtagtgataggctgtacccacggccgaagatgaacccgtccgttatccggccagctacttcgagaagcctagtagcatcaaagatctgtcttggcgtttcgctcagcgcgttccccccgcgtagatcgggctgatgggtctccgcataccccacgggcgaccgtggcggaggccgcgtggcggcccgcctatggcgaaagccataggacgccatttcagtgacagggtgtgaagagcctattgagctagttggtagtcctccggcccctgaatgcggctaatcctaaccacggagcatccgccaacaaaccagttggtagggtgtcgtaacgggtaactctgtggcggaaccgactactttgggtgtccgtgtttccttttgatcctatattggctgcttatggtgacaacgataagttgttatcataaagctcttgggttggccacctggaaaaagttatcagtgtttgatattgttcggctttcacgcctaccaataaaacaagctttatatttgttaatttcattttatccatctgaggatattactgaatttcacttacaactcttgcttacactgtcaacaag

SEQ ID NO: 19058 - DNA, 796 bp, synthetic construct
  source 1..796: mol_type = other DNA
tgttcccacccacagggcccaccgggcgctagtacactggtacgtcagtaccttggtatcacggtaccattgtacgccagtacctttgtacgcctgttttatatccccttcccccatatgtaactttagaagtttaagtaaacaaagaccaataggagtccaatatccagttggattgcggtcaagcacttctgttttcccggacctagtagtgataggctgtacccacggccgaagatgaacccgtccgttatccggccagctacttcgagaagcctagtagcatcaaagatctgtcttggcgtttcgctcagcgcgttccccccgcgtagatcgggctgatgggtctccgcataccccacgggcgaccgtggcggaggccgcgtggcggcccgcctatggcgaaagccataggacgccatttcagtgacagggtgtgaagagcctattgagctagttggtagtcctccggcccctgaatgcggctaatcctaaccactgagcgtccaccaacaaaccagttgggagggcgtcgtaacgggtaactcggtggcggaaccgactactttgggtgtccgtgtttccttttgatcctactgtggctgcttatggtgacaacttacagttgttatcataaagcttttggattggccatccggaaagagttaacagtttgttcgctcattgctttatcaaaacttcctttgaggaaagcaatttatctgttaatttcattttacaaacttgaaagtatatcaagtgctcacttgaatttactcatacaattacatcaaat

SEQ ID NO: 19059 - DNA, 804 bp, synthetic construct
  source 1..804: mol_type = other DNA
aaatagcctatggggcgctcccacccaagggccaacctggcgctagtacactggtacgccagtaccttggtatcacggtaccactgtatgttagtacctttgtatgcctatttgcaccccttcccaaagtaactttagaaacttaaaatacaaagaccaataggagtccaacacccagttggattgcggtcaagcacttctgtttccccggacctagtagtgataggctgtacccacggccgaagatgaacccgtccgttatccggccagctacttcgagaagcctagtaacatcaaagatctgtcttggcgtttcgctcagcgcgttccccccgcgtagatcgggctgatgggtctccgcataccccacgggcgaccgtggcggaggccgcgtggcggcccgcctatggcgaaagccataggacgccatttcagtgacagggtgtgaagagcctattgagctagttggtagtcctccggcccctgaatgcggctaatcctaaccactgagcgtccaccaacaaaccagttgggagggcgtcgtaacgggtaactcggtggcggaaccgactactttgggtgtccgtgtttccttttgatcctatattggctgcttatggtgacaacgataagttgttatcataaagcttttgggttggccacctggaaaaagttatcagtgtttgatattgttcggctttcacgcctgccaataaaacaagctctatatttgttaatctcattttatccatctgaggatattactgaattccatttacaactcctgcttactttgtcaacaag

SEQ ID NO: 19060 - DNA, 797 bp, synthetic construct
  source 1..797: mol_type = other DNA
gttgttcccacccacagggcccactgggcgctagtacactggtatgccagcactttggtatcacggtaccattgtgcgtcagtacctttgtacgcctgttttatactcccttccccacatgtaaccttagaagtttaaacaaacaaggaccaataggagtccaacatccagttggatcgcggtcaagcacttctgtttccccggacctagtagtgataggctgtacccacggccgaagatgaacccgtccgttatccggccagctacttcgagaagcctagtagcatcaaagatctgtcttggcgtttcgctcagcgcgttccccccgcgtagatcgggctgatgggtctccgcataccccacgggcgaccgtggcggaggccgcgtggcggcccgcctatggcgaaagccataggacgccatttcagtgacagggtgtgaagagcctattgagctagttggtagtcctccggcccctgaatgcggctaatcctaaccacggagcgtccaccagcaaaccagctggcagggcgtcgtaacgggtaactctgtggcggaaccgactactttgggtgtccgtgtttccttttgatcctatattggctgcttatggtgacaacgataagttgttatcataaagctcttgggttggccacctggaaaaagttatcagtgtttgatattgttcggctttcacgcctaccaataaaacaagctttatatttgttaatttcattctatccatccaaggatattactgaatttcatttacaactcttgctatcactgtcgacaag

SEQ ID NO: 19061 - DNA, 811 bp, synthetic construct
  source 1..811: mol_type = other DNA
taataacagtctatgggttgttcccaccctagagcccactgggcgctagtacactggtacgccagtaccttggtatcacggtaccattgtacgtcagtacctttgtatgcctgttttatgccccttccccaaatgtaactttagaagcttaagaaaacaaagaccactaggagtccaacacccagttggattgcggtcaagcacttctgtttccccggacctagtagtgataggctgtacccacggccgaagatgaacccgtccgttatccggccagctacttcgagaagcctagtagcatcaaagatctgtcttggcgtttcgctcagcgcgttccccccgcgtagatcgggctgatgggtctccgcatcccccacgggcgaccgtggcggaggccgcgtggcggcccgcctatggcgaaagccataggacgccatttcagtgacagggtgtgaagagcctattgagctagttggtagtcctccggcccctgaatgcggctaatcctaaccactgagcgtccaccaacaaaccagttgggagggcgtcgtaacgggtaactcggtggcggaaccgactactttgggtgtccgtgtttccttttgatcctattttggctgcttatggtgacaacgataagttgttatcataaagcttttgggttggccacctggaaaaagttatcagtgtttgatattgttcggctttcacgcctaccaataaaacaagccctatatttgttaatctcattttatccatctgaggatattactgaatttcatttacaactcctgcttacattgtcaacaag

SEQ ID NO: 19062 - DNA, 811 bp, synthetic construct
  source 1..811: mol_type = other DNA
taataacagtctatgggttgttcccaccctagagcccactgggcgctagtacactggtacgccagtaccttggtatcacggtatcattgtacgtcagtacctttgtatgcctgttttatatcccctccccaaatgtaaccttagaagtttaagcaaacaaagaccagtaggagtccaacatccagttggattgcggtcaagcacttctgtttccccggacctagtagtgataggctgtacccacggccgaagatgaacccgtccgttatccggccagctacttcgagaagcctagtaacatcaaagatctgtcttggcgtttcgctcagcgcgttccccccgcgtagatcgggctgatgggtctccgcataccccacgggcgaccgtggcggaggccgcgtggcggcccgcctatggcgaaagccataggacgccatttcagtgacagggtgtgaagagcctattgagctagttggtagtcctccggcccctgaatgcggctaatcctaaccactgagcgtccaccaacaaaccagttgggagggcgtcgtaacgggtaactcggtggcggaaccgactactttgggtgtccgtgtttccttttgatcctatattggctgcttatggtgacaacgataagttgttatcataaagcttttgggttggccacctggaaaaagttatcagtgtttgatattgttcggctttcacgcctaccaataagacaagctctatatttgttaatctcattttatccatctgaggatattactgaatttcatttacaactcctgcttacattgtcaacaag

SEQ ID NO: 19063 - DNA, 804 bp, synthetic construct
  source 1..804: mol_type = other DNA
aaatagcctatggggcgctcccacccaagggccaacctggcgctagtacactggtacgccagtaccttggtatcacggtaccactgtatgttagtacctttgtatgcctatttgcaccccttcccaaagtaactttagaaacttaaaatacaaagaccaataggagtccaacacccagttggattgcggtcaagcacttctgtttccccggacctagtagtgataggctgtacccacggccgaagatgaacccgtccgttatccggccagctacttcgagaagcctagtaacatcaaagatctgtcttggcgtttcgctcagcgcgttccccccgcgtagatcgggctgatgggtctccgcattccccacgggcgaccgtggcggaggccgcgtggcggcccgcctatggcgaaagccataggacgccatttcagtgacagggtgtgaagagcctattgagctagttggtagtcctccggcccctgaatgcggctaatcctaaccactgagcgtccaccaacaaaccagttgggagggcgtcgtaacgggtaactcggtggcggaaccgactactttgggtgtccgtgtttccttttgatcctatattggctgcttatggtgacaacgataagttgttatcataaagctcttgggttggccacctggaaaaagttatcagtgtttgatattgttcggctttcacgcctgccaataaaacaagctctatatttgttaatctcattttatccatctgaggatattactgaattccatttacaactcctgcttactttgtcaacaag

SEQ ID NO: 19064 - DNA, 813 bp, synthetic construct
  source 1..813: mol_type = other DNA
ttaaaacagcctgtgggttgttcccacccacagggcccaccgggcgctagtacactggtatgccagcaccttggtatcatggtaccattgtgcgttagtacctttgtacgcctgttttatactcccttccccacatgtaaccttagaagtttaaataaacaaagaccaataggggtccaacatccagttggattgcggtcaagcacttctgtttccccggacctagtagtgataggctgtacccacggccgaagatgaacccgtccgttatccggccagctacttcgagaagcctagtagcatcaaagatctgtcttggcgtttcgctcagcgcgttccccccgcgtagatcgggctgatgggtctccgcataccccacgggcgaccgtggcggaggccgcgtggcggcccgcctatggcgaaagccataggacgccatttcagtgacagggtgtgaagagcctattgagctagttggtagtcctccggcccctgaatgcggctaatcctaaccacggagcgtccaccagcaaaccagctgggagggcgtcgtaacgggtaactctgtggcggaaccgactactttgggtgtccgtgtttccttttgatcctatattggctgcttatggtgacaacgataagttgttatcataaagctcttgggttggccacctggaaaaagttatcagtgtttgatattgttcggctttcacgcctaccaataaagcaagctttatatttgttaatttcattttatccatccaaggatattactgaatttcacttacaactcttgcttacactgtcgacaag

SEQ ID NO: 19065 - DNA, 805 bp, synthetic construct
  source 1..805: mol_type = other DNA
aaatagcctatggggcgctcccacccaagggccaacctggcgctagtacactggtacgccagtaccttggtatcacggtaccactgtacgttagtacctttgtatgcctatttgcatcccttcccaaagtaactttagaaacttaagaatacaaagaccaataggagtccaacacccagttggattgcggtcaagcacttctgtttccccggacctagtagtgataggctgtacccacggccgaagatgaacccgtccgttatccggccagctacttcgagaagcctagtagcatcaaagatctgtcttggcgtttcgctcagcgcgttccccccgcgtagatcgggctgatgggtctccgcattccccacgggcgaccgtggcggaggccgcgtggcggcccgcctatggcgaaagccataggacgccatttcagtgacagggtgtgaagagcctattgagctagttggtagtcctccggcccctgaatgcggctaatcctaaccacggagcgtccaccagcaaaccagctggcagggcgtcgtaacgggtaactctgtggcggaaccgactactttgggtgtccgtgtttccttttgatcctatattggctgcttatggtgacaacgataagttgttatcataaagcttttgggttggccacctggaaaaagttatcagtgtttgatattgttcggctttcacgcctaccaataaaacaagctctatatttgttaatctcattttatccatctgaggatattactgaattccatttacaactcctgctcacattgtcaacaag

SEQ ID NO: 19066 - DNA, 797 bp, synthetic construct
  source 1..797: mol_type = other DNA
gttgttcccacccacagggcccactgggcgccagtacactggtatgccagtaccttggtatcacggtaccattgtacgccagtacctttgtacgcctgttttatactccctcccccacatgtaaccttagaagtttaaataaacaaggaccaataggagtccaacacccagttggattgcggtcaagcacttctgtctccccggacctagtagtgataggctgtacccacggccgaagatgaacccgtccgttatccggccagctacttcgagaagcctagtaacatcaaagatctgtcttggcgtttcgctcagcgcgttccccccgcgtagatcgggctgatgggtctccgcataccccacgggcgaccgtggcggaggccgcgtggcggcccgcctatggcgaaagccataggacgccatttcagtgacagggtgtgaagagcctattgagctagttggtagtcctccggcccctgaatgcggctaatcctaaccacggagcgtccaccagcaaaccagctgggagggcgtcgtaacgggtaactctgtggcggaaccgactactttgggtgtccgtgtttccttttgatcctattttggctgcttatggtgacaacgataagttgttatcataaagcttttgggttggccacctggaaaaagttatcagtgtttgacattgttcggctctcacgcctaccaataaaacaagctttatatttgttaatttcattttatccatccaaggatattactgaatttcacttacaactcttgcttacactatcaacaag

SEQ ID NO: 19067 - DNA, 811 bp, synthetic construct
  source 1..811: mol_type = other DNA
taataacagtctatgggttgttcccaccctagagcccactgggcgccagtacactggtacgccagtaccttggtatcacggtaccattgtacgccagtacctttgtacgcctgttttatatcccctccccaaatgtaaccttagaagtttaagcaaacaaagaccagtaggagtccaacatccagttggattgcggtcaagcacttctgtttccccggacctagtagtgataggctgtacccacggccgaagatgaacccgtccgttatccggccagctacttcgagaagcctagtaacatcaaagatctgtcttggcgtttcgctcagcgcgttccccccgcgtagatcgggctgatgggtctccgcataccccacgggcgaccgtggcggaggccgcgtggcggcccgcctatggcgaaagccataggacgccatttcagtgacagggtgtgaagagcctattgagctagttggtagtcctccggcccctgaatgcggctaatcctaaccactgagcgtccaccaacaaaccagttgggagggcgtcgtaacgggtaactcggtggcggaaccgactactttgggtgtccgtgtttccttttgatcctatattggctgcttatggtgacaacgataagttgttatcataaagcttttgggttggccacctggaaaaagttatcagtgtttgatattgttcggctttcacgcctaccaataagacaagctctatatttgttaatttcattttatccatctgaggatattactgaatttcatttacaactcctgcttacattgtcaacaag

SEQ ID NO: 19068 - DNA, 812 bp, synthetic construct
  source 1..812: mol_type = other DNA
ttaaaacagcctgtgggttgttcccacccgcagggcccactgggcgctagtacactggtatgccagtacattagtacgctagtactcttgtatgccagtacctttgtacgcctgttttatactcccctccccatatgtaacattagaagtttaagtaataaagaccaataggagtccaacatccagttggattacggtcaagcacttctgtttccccggacctagtagtgataggctgtacccacggccgaagatgaacccgtccgttatccggccagctacttcgagaagcctagtaacatcaaagatctgtcttggcgtttcgctcagcgcgttccccccgcgtagatcgggctgatgggtctccgcataccccacgggtgaccgtggcggaggccgcgtggcggcccgcctatggcgaaagccataggacgccatttcagtgacagggtgtgaagagcctattgagctagttggtagtcctccggcccctgaatgcggctaatcctaaccacggagcgtccaccaacaatccagttggcagggcgtcgtaacgggtaactctgtggcggaaccgactactttgggtgtccgtgtttccttttgatcctatattggctgcttatggtgacaacgataagttgttatcataaagcttttgggttggccacctggaaaaagttgtcagtgtttgatattgttcggctttcacgcctaccaataaagcaagctttatatttgttagtttcattttatccattaaaggatattaccgaatttcacttacagcttttgctcacattatcagcaaa

SEQ ID NO: 19069 - DNA, 790 bp, synthetic construct
  source 1..790: mol_type = other DNA
ccacccacagggcccactgggcgctagtacactggtatgacagtaccttggtatcacggtaccattgtacgccagtacctttgtacgcctgttttatattcccttcccccaaatgtaaccttagaagtttaaacaataaagaccaataggagtccaacatccagttggattgcggtcaagcacttctgtttccccggacctagtagtgataggctgtacccacggccgaagatgaacccgtccgttatccggccagctacttcgagaagcctagtagcatcaaagatctgtcttggcgtttcgctcagcgcgttccccccgcgtagatcgggctgatgggtctccgcattccccacgggcgaccgtggcggaggccgcgtggcggcccgcctatggcgaaagccataggacgccatttcagtgacagggtgtgaagagcctattgagctagttggtagtcctccggcccctgaatgcggctaatcctaaccactgagcgtccaccagcaaaccagctgggagggcgtcgtaacgggtaactcggtggcggaaccgactactttgggtgtccgtgtttccttttgatcctattttggctgcttatggtgacaacgataagttgttatcataaagcttttgggttggccacctggaaaaagttatcagtgtttgatattgctcggctttcacgcctaccaataaaacaagccttacttttattagtatcattttatccaaccaaggatattactgaatttcatctacaacttttgctcacattgtctgcaaa

SEQ ID NO: 19070 - DNA, 713 bp, synthetic construct
  source 1..713: mol_type = other DNA
tacctttgtacgcctgttttatattccctccccaaatgtaaatttagaagtttaagaaacaaagaccaataggagtccaacaaccagttggattgcggtcaagcacttctgtctccccggacctagtagtgataggctgtacccacggccgaagatgaacccgtccgttatccggccagctacttcgagaagcctagtaacatcaaagatctgtcttggcgtttcgctcagcgcgttccccccgcgtagatcgggtcgatgggtctccgcataccccacgggcgaccgtggcggaggccgcgtggcggcccgcctatggcgaaagccataggacgccatttcagtgacagggtgtgaagagcctattgagctagttggtagtcccccggcccctgaatgtggctaatcctaaccacggagcgtccaccagcaaaccagctggcagggcgtcgtaacgggtaactctgtggcggaaccgactactttgggtgtccgtgtttccttttgatcctatattggctgcttatggtgacaacgataagttgttatcataaagctcttgggttggccacctggaagaagttgtcagtgtttgatattgtccggctttcacgcctaccaacaaaacaagctttatatttgttaatttcattttatccatccaaggatattactgaatttcatttacaactcttgcttacactatcgtcaag

SEQ ID NO: 19071 - DNA, 790 bp, synthetic construct
  source 1..790: mol_type = other DNA
ccacccacagggcccactgggcgccagtacactggtatgacagtaccttggtatcacggtaccattgtacgccagtacctttgtacgcctgttttatattcccttcccccaaatgtaaccttagaagtttaaacaataaagaccaataggagtccaacatccagttggattgcggtcaagcacttctgtttccccggacctagtagtgataggctgtacccacggccgaagatgaacccgtccgttatccggccagctacttcgagaagcctagtagcatcaaagatctgtcttggcgtttcgctcagcgcgttccccccgcgtagatcgggctgatgggtctccgcattccccacgggcgaccgtggcggaggccgcgtggcggcccgcctatggcgaaagccataggacgccatttcagtgacagggtgtgaagagcctattgagctagttggtagtcctccggcccctgaatgcggctaatcctaaccactgagcgtccaccagcaaaccagctgggagggcgtcgtaacgggtaactcggtggcggaaccgactactttgggtgtccgtgtttccttttgatcctattttggctgcttatggtgacaacgataagttgttatcataaagcttttgggttggccacctggaaaaagttatcagtgtttgatattgctcggctttcacgcctaccaataaaacaagccttacttttattagtatcattttatccaaccaaggatattactgaatttcatctacaacttttgctcacattgtctgcaaa

SEQ ID NO: 19072 - DNA, 645 bp, synthetic construct
  source 1..645: mol_type = other DNA
atagggatccaacatccagttgggtcatggtcaagcacttctgtctccccggacctagtagtgataggctgtacccacggccgaagatgaacacgtccgttatccggccaactacttcgagaagcctagtaacatcaaagatctgtcttggcgtttcgctcagcgcgtttcccccgcgtagatcgggctgatgggtctccgcataccccacgggcgaccgtggcggaggccgcgtggcggcccgcctatggcgaaagccataggacgccatttcagtgacagggtgtgaagagcctattgagctagttggtagtcctccggcccctgaatgcggctaatcctaaccacggagcgtccaccagcaaaccagctgggagggcgtcgtaacgggtaactctgtggcggaaccgactactttgggtgtccgtgtttccttttgatcctatattggctgcttatggtgacaacgataagttgttatcataaagcttttgggttggccacctggaaaaagttatcagtgtttgatattgttcggctttcacgcctaccaataaaacaagctttatatttgttagtttcattttatccatccaaggatattactgaatttcatttacaactcttgcttacactagcgacaag

SEQ ID NO: 19073 - DNA, 862 bp, synthetic construct
  source 1..862: mol_type = other DNA
ttaaaagagcctgggggtgactccagcccccaggacccacgtggtgccagcactacttagttacgattatttagtgcgcctcttttatatcccctcccccacccttcccttttccttgaattctttcgtaacaagtgcctcagcatgacgtttgcacggtgtactgtaaccatcaggcaaccagcctgtaaagcaggaagcacttctgtttccccggtgtggatattaggctgttcccacggccgaaaatgaagcatcgttatccccactggtactgcgcgaaagctagtaacaccaatgatttagatggatctttcgctcagcaattgccccgattgtagatcgggcggatggggctcctcgttcctcactggcgacagtggaggagcccgcgtggccgcccgcctaccccgcatggggtaggaggtccagataatgacagggtgtgaagactcaagtgcgctaccagtgcatcctccaggcctctgaatgcggctaatcctaaccccggagcacccgctcacagtccagtaagtagggtgtcgtaacgcgtaagtctgggatggaaccgactactttgagtgacctgtgtttcttttatttttattgaggttgtttatggtgacaaagattggctctatcgtgtatagagtttacaaggtgaaagaggatttttacagacttttgttatcaatcttgtcctatcctacccgcaggggaattgatgatagaagtgcttttagaggtgattcaattgatagctcaaacaactgagaatcttatttatttttatcaaggtctgaatttgaataaagatccagtgaattttacccccacctattagcgaccaaattcacaagca

SEQ ID NO: 19074 - DNA, 443 bp, synthetic construct; identical to SEQ ID NO: 487
  source 1..443: mol_type = other DNA

SEQ ID NO: 19075 - DNA, 326 bp, synthetic construct
  source 1..326: mol_type = other DNA
cggcccctgaatgcggctaatcctaaccacggagcgtccaccaacaatccagttggcagggcgtcgtaacgggtaactctgtggcggaaccgactactttgggtgtccgtgtttccttttgatcctatttggctgcttatggtgacaacgataagttgttatcataaagcttttgggttggccacctggaaaaagttatcagtgtttgatattgttcggctctcacgcctaccaataaagcaagctttatacttgttagtctcattttatccctctaaagagattactgagtttcatttgcaacttctgcttacattatcagcaaa

SEQ ID NO: 19076 - DNA, 313 bp, synthetic construct
  source 1..313: mol_type = other DNA
ggctaatcctaaccacggagcgtccaccagcaaaccagctggcagggcgtcgtaacgggtaactctgtggcggaaccgactactttgggtgtccgtgtttccttttgatcctatattggctgcttatggtgacaacgataagttgttatcataaagctcttgggttggccacctggaagaagttgtcagtgtttgatattgtccggctttcacgcctaccaacaaaacaagctttatatttgttaatttcattttatccatccaaggatattactgaatttcatttacaactcttgcttacactatcgtcaag

SEQ ID NO: 19077 - DNA, 746 bp, synthetic construct; identical to SEQ ID NO: 1129
  source 1..746: mol_type = other DNA

SEQ ID NO: 19078 - DNA, 741 bp, synthetic construct
  source 1..741: mol_type = other DNA
ttaaaacagcctgtgggttgtccccacccacagggcccactgggcgctagcacactggtatcccggtacctttgtgcgcctgttttatataccctcccctcagtaacctagaagttcatcacaaatgatcaatagttagctcaacaaaccagttgagcctagatcaagcacttctgttaccccgggctgagtatcaataagctgttgacacggctgaaggagaaaacgcccgttacccgaccagctacttcggagaacctagtatcaccatagaggttgcgtagcgtttcgctccgcacaaccccagtgtagatcaggtcgatgagtcaccgcgttccccacaggcgactgtggcggtggctgcgttggcggcctgcccatggggttacccatgggacgcttcaatactgacatggtgtgaagagttgactgagctagctggtagtcctccggcccctgaatgcggctaatcctaactgtggagcaagtgcccacaacccagtgggtggcttgtcgtaatgggcaactctgcagcggaaccgactactttgggtgaccgtgtttctctttattcttatattggctgcttatggtgacaatctcagagttgttaccatatagctattggtttggccaaccagtgactaacagagcaattatatatcttttcattggatttatacctataaacaacaccagttataccactttgtgttacattattggcttgaactcgaaaag

SEQ ID NO: 19079 - DNA, 748 bp, synthetic construct; identical to SEQ ID NO: 1181
  source 1..748: mol_type = other DNA

SEQ ID NO: 19080 - DNA, 748 bp, synthetic construct
  source 1..748: mol_type = other DNA
ttaaaacagctctggggttgttcccaccccagaggcccacgtggcggccagtacaccggtatcacggtacccttgtacgcctgttttatactccctttccccgtaacttagaagcaataaaaccaagttcaatagaaagggggtacaaaccagtaccaccacgaacaagcacttctgtttccccggtgaggttgtataaactgtccccacggttgaaaacgactgatccgttatccgctcttgtacttcgagaagcctagtactaccttggaatcttcgatgcgttgcgctcagcactcaaccccggagtgtagcttaggctgatgagtctggacatcccccaccggcgacggtggtccaggctgcgttggcggcctacctgtggcccaaagccacgggacgctagttgtgaacaaggtgcgaagagcctattgagctacatgagagtcctccggcccctgaatgcggctaatcccaaccacggagcaggcgattgcaatccagtaattagcctgtcgtaacgcgtaagtctgtggcggaaccgactactttgggtgtccgtgtttccttttattcttacattggctgcttatggtgacaatcatagattgttatcataaagcgaattggattggccatccagtgagaattagatcgatcatctacctttttgttggatttacacctttgaaaccacacagcttgaatctcatcaaagttgtattgttgatacgacattattatcaca

SEQ ID NO: 19081 - DNA, 742 bp, synthetic construct
  source 1..742: mol_type = other DNA
ttaaaacagctctggggttgcacccaccccagaggcccacgtggcggctagtactccggtattgcggtacccttgtacgcctgttttatactcccttcccgtaacttagacgcacaaaaccaagttcaatagaagggggtacaaaccagtaccaccacgaacaagcacttctgtttccccggtgatgttgtatagactgctcgcgtggttgaaagcgacggatccgttacccgcttatgtacttcgagaagcccagtaccaccttggaatcttcgatgcgttgcgctcagcactcaaccccagagtgtagcttaggctgatgagtctggacatccctcaccggcgacggtggtccaggctgcgttggcggcctacctgtggctaacgccatgggacgctagttgtgaacaaggtgtgaagagcctattgagctacataagaatcctccggcccctgaatgcggctaatcccaacctcggagcaggtggtcacaaaccagtgattggcctgtcgtaacgcgcaagtccgtggcggaaccgactactttgggtgtccgtgtttccttttattttattgtggctgcttatggtgacaatcgcagattgttatcataaagcgaattggattggccatccggtgaaagtgagcttcattatctatctgtttgctggattcgctccattgagtgtgtttattctaagtacaatttcaacagttatttcaatcaggcaattgtatcata

SEQ ID NO: 19082 - DNA, 742 bp, synthetic construct
  source 1..742: mol_type = other DNA
ttaaaacagctctggggttgcacccaccccagaggcccacgtggcggctagtactccggtattgcggtacccttgtacgcctgttttatactcccttcccgtaacttagacgcacaaaaccaagttcaatagaagggggtacaaaccagtaccaccacgaacaagcacttctgtttccccggtgatgttgtatagactgctcgcgtggttgaaagcgacggatccgttatccgcttatgtacttcgagaagcccagtaccacctcggaatcttcgatgcgttgcgctcagcactcaaccccagagtgtagcttaggctgatgagtctggacatccctcaccggtgacggtggtccaggctgcgttggcggcctacctatggctaacgccatgggacgctagttgtgaacaaggtgtgaagagcctattgagctacataagaatcctccggcccctgaatgcggctaatcccaaccgcggagcaggcggtcacaaaccagtgattggcctgtcgtaacgcgcaagtccgtggcggaaccgactactttgggtgtccgtgtttccttttattttattgtggctgcttatggtgacaatcacagattgttatcataaagcgaattggattggccatccggtgaaagtgagattcattatctatctgtttgctggattcgccccattgagtgtgtttactctaagtacaatttcaacagttatttcaatcagacaattgtatcata

SEQ ID NO: 19083 - DNA, 747 bp, synthetic construct
  source 1..747: mol_type = other DNA
tttaaaacagctctggggttgttcccaccccagaggcccacgtggcggctagtacactggtattacggtacccttgtacgcctgttttacacccctttcccccgtaacttagaagctttaaatccaagttcaacagtcagtggtacaacccagtactaccacgaacaagcacttctgttaccccggtgagattgcataggccgtccccacggctaaaagcgattgatccgttatccgctcttgtacttcgagaagcctagtaagaccttgggatcctcgatgcgttgcgctcaacactcaaccccagagtgtagcttgggctgatgagtctggacattcctcaccggtgacggtggtccaggctgcgttggcggcctacctgtggcccaaagccacaggacgctagttgtgaacaaggtgtgaagagcctattgagctacaagagagtcctccggcccctgaatgcggctaatcccaaccacggagcaggcgattgcaatccagcaactagcctgtcgtaacgcgcaagtctgtggcggaaccgactactttgggtgtccgtgtttccttttattacataatggctgcttatggtgacaatcacagattgttgtcataaagcgaattggattggccatccggtgagaattaaaacaattatttacttatttgttggatttgttcctatacacacccaaacaccttgcttgattgaagtaattctgttgataagacaacactattaca

SEQ ID NO: 19084 - DNA, 745 bp, synthetic construct; identical to SEQ ID NO: 1093
  source 1..745: mol_type = other DNA

SEQ ID NO: 19085 - DNA, 747 bp, synthetic construct; identical to SEQ ID NO: 1157
  source 1..747: mol_type = other DNA

SEQ ID NO: 19086 - DNA, 743 bp, synthetic construct
  source 1..743: mol_type = other DNA
ttaaaacagtctgtgggttgttcccactcacagggcccacgtggcgctagcacaccggtatttcggtacccttgtgcgcctgttttatgcacccctagccccacgtaacttagaagggaagcaacaacgatcaacagcaggtgtggcattccagccacatcgtgatcaagcacttctgtctccccggactgagtatcaataagctgctcgcgcggctgaaggagaaaacgttcgttacccggccaattacttcgagaaacccagtaccaccatggaggttgcgcagtgtttcgttccgcacaaccccagtgtagatcaggtcgatgagtcaccgcatcccccacgggcgaccgtggcggtggctgcgttggcggcctgcccatggggtaacccatgggacgcttcaatactgacatggtgtgaagagtctattgagctaattggtagtcctccggcccctgaatgcggctaatcctaactgcggagcagatacccataaaccaatgggcagtctgtcgtaacgggcaactctgcagcggaaccgactactttgggtgtccgtgtttccttttattctttatttggctgcttatggtgacaattgagagattgttgccatatagctattggattggccatccggtgacaaacagagcgatcgtgtacttatttattggttttgtaccacgtgaatttaaagttttacaaaccctaaatctcattattggacttaatacagcaaa

SEQ ID NO: 19087 - DNA, 742 bp, synthetic construct
  source 1..742: mol_type = other DNA
ttaaaacagctctggggttgttcccacccacagggcccactgggcgccagcactctggtatcacggtacctttgtgcgcctgttttatacccccgtccccggttgtaacttagaagtaacactccacgaccgatagtaggtgtggcacgccagccatgtcttggtcaagcacttctgtttccccggattgagtatcaataggctgttcacacggccgaaggagaaaacatccgttatccggccaactacttcgagaaacctagtaccaccatgaaggttgcgcagtgtttcgctccgcacaaccccagtgtagatcaggccgatgagtcaccgctttccccacgggcgaccgtggcggtggctgcgttggcggcctgcccatggggaaatccatgggacgcttcaatactgacatggtgcgaagagtctattgagctagttggtattcctccggcccctgaatgcggctaatcctaactgcggagcagacacccacatgccagtgggcagtctgtcgtaacgggcaactctgcagcggaaccgactactttgggtgtccgtgtttccttttattcttatactggctgcttatggtgacaattgaaagattgttaccatatagctattggattggccatcctgtgactaacagagctattgtatacctatttgttggttttgtaccactgaattacaaggctttaaacaccctcaactttataatactactcaactcgttaaa

SEQ ID NO: 19088 - DNA, 742 bp, synthetic construct
  source 1..742: mol_type = other DNA
ttaaaacagctctggggttgttcccacccacagggcccaccgggcgccagcactctggtatcacggtacctttgtgcgcctgttttatactcccgtccccggttgtaacttagaagtaacactccacgaccgatagtaggtgtggcacgccagccatgtcttggtcaagcacttctgtttccccggattgagtatcaataggctgttcacacggccgaaggagaaaacattcgttatccggccaactacttcgagaaacctagtaccaccatgaaggttgcgcagtgtttcgctccgcacaaccccagtgtagatcaggccgatgagtcaccgctttccccacgggcgaccgtggcggtggctgcgttggcggcctgcccatggggaaatccatgggacgcttcaatactgacatggtgcgaagagtctattgagctagttggtattcctccggcccctgaatgcggctaatcctaactgcggagcagacacccacatgccagtgggcagtctgtcgtaacgggcaactctgcagcggaaccgactactttgggtgtccgtgtttccttttattcttatactggctgcttatggtgacaattgaaagattgttaccatatagctattggattggccatcctgtgactaacagagctattgtatacctatttgttggttttgtaccactgaattacaaggcattaaacaccctcaactttataatactactcaactcattaaa

SEQ ID NO: 19089 - DNA, 751 bp, synthetic construct
  source 1..751: mol_type = other DNA
gaaattaaaacagctctggggttgttcccaccccagaggcccacgtggcggctagtacactggtattacggtacccttgtacgcctgttttacacccctttcccccgtaacttagaagcttttaaattcaagttcaacagtgagtggtacaacccagtactactatgaacaagcacttctgttaccccggtgagattgcataagctgtccccacggctaaaagcgattgatccgttatccgctcttgtacttcgagaagcctagtaaaaccttgggatcctcgatgcgttgcgctcaacactcaaccccagagtgtagcttgggctgatgagtctgggcattcctcaccggcgacggtggtccaggctgcgttggcggcctacctgtggcccaaagccacaggacgctagttgtgaacaaggtgtgaagagcctattgagctacaagagagtcctccggcccctgaatgcggctaatcccaaccacggagcaggtgattgcaacccagcaactagcctgtcgtaacgcgcaagtctgtggcggaaccgactactttgggtgtccgtgtttccttttattacataatggctgcttatggtgacaatcatagattgttgtcataaagcgagttggattggccatccggtgagaattaaaacaattatttacttgtttgttggatttgttcctatacacacccatacaccttgcttgattgaagtaattctgttgataagacaacactattacg

SEQ ID NO: 19090 - DNA, 751 bp, synthetic construct
  source 1..751: mol_type = other DNA
gaaattaaaacagctctggggttgttcccaccccagaggcccacgtggcggttagtacactggtattacggtacccttgtacgcctgttttacacccctttcccccgtaacttagaagcttttaaattcaagttcaacagtgagtggtacaacccagtactactatgaacaagcacttctgttaccccggtgagattgcataagctgtccccacggctaaaagcgattgatccgttatccgctcttgtacttcgagaagcctagtaaaaccttgggatcctcgatgcgttgcgctcaacactcaaccccagagtgtagcttgggctgatgagtctgggcattcctcaccggcgacggtggtccaggctgcgttggcggcctacctgtggcccaaagccacaggacgctagttgtgaacaaggtgtgaagagcctattgagctacaagagagtcctccggcccctgaatgcggctaatcccaaccacggagcaggtgattgcaacccagcaactagcctgtcgtaacgcgcaagtctgtggcggaaccgactactttgggtgtccgtgtttccttttattacataatggctgcttatggtgacaatcatagattgttgtcataaagcgagttggattggccatccggtgagaattaaaacaattatttacttgtttgttggatttgttcctatacacacccatacaccttgcttgattgaagtaattctgttgataagacaacactattacg

SEQ ID NO: 19091 - DNA, 751 bp, synthetic construct
  source 1..751: mol_type = other DNA
gaaattaaaacagctctggggttgttcccaccccagaggcccacgtggcggctagtacactggtattacggtacccttgtacgcctgttttacacccctttcccccgtaacttagaagcttttaaattcaagttcaacagtgagtggtacaacccagtactactatgaacaagcacttctgttaccccggtgagattgcataagctgtccccacggctaaaaacgattgatccgttatccgctcttgtacttcgagaagcctagtaaaaccttgggatcctcgatgcgttgcgctcaacactcaaccccagagtgtagcttgggctgatgagtctgggcattcctcaccggcgacggtggtccaggctgcgttggcggcctacctgtggcccaaagccacaggacgctagttgtgaacaaggtgtgaagagcctattgagctacaagagagtcctccggcccctgaatgcggctaatcccaaccacggagcaggtgattgcaacccagcaactagcctgtcgtaacgcgcaagtctgtggcggaaccgactactttgggtgtccgtgtttccttttattacataatggctgcttatggtgacaatcatagattgttgtcataaagcgagttggattggccatccggtgagaattaaaacaattatttacttgtttgttggatttgttcctatacacacccatacaccttgcttgattgaagtaattctgttgataagacaacactattacg

SEQ ID NO: 19092 - DNA, 750 bp, synthetic construct
  source 1..750: mol_type = other DNA
gaaattaaaacagctctggggttgttcccaccccagaggcccacgtggcggctagtacactggtattacggtacccttgtacgcctgttttacacccctttcccccgtaacttagaagcttcaaatccaagttcaatagtgagtggtacaacccagtactactacgaacaagcacttctgttaccccggtgagattgcataggctgtccccacggctaaaagcgattgatccgttacccgctcttgtacttcgagaagcctagtaaggccttgggatcttcgatgcgttgcgctcaacactcaaccccagagtgtagcttgggctgatgagtctggacattcctcaccggtgacggtggtccaggctgcgttggcggcctacctgtggcccaaagccacaggacgctagttgtgaacaaggtgtgaagagcctattgagctacaagagagtcctccggcccctgaatgcggctaatcccaaccacggagcaggtgattgcaacccagcaactagcctgtcgtaacgcgcaagtctgtggcggaaccgactactttgggtgtccgtgtttccttttattacatgatggctgcttatggtgacaatcacagattgttgtcataaagcgaattggattggccatccggtgagaattaaaacaattatctacttgtttgttggatttcttcctataaacacccaaacaccttgcttgattgaagtaattctgttgataaggcaacactattaca

SEQ ID NO: 19093 - DNA, 750 bp, synthetic construct
  source 1..750: mol_type = other DNA
gaaattaaaacagctctggggttgttcccaccccagaggcccacgtggcggctagtacactggtattacggtacccttgtacgcctgttttacacccctttcccccgtaacttagaagcttcaaatccaagttcaatagtgagtggtacaacccagtactactacgaacaagcacttctgttaccccggtgagattgcataggctgtccccacggctaaaagcgattgatccgttacccgctcttgtacttcgagaagcctagtaagaccttgggatcttcgatgcgttgcgctcaacactcaaccccagagtgtagcttgggctgatgagtctggacattcctcaccggtgacggtggtccaggctgcgttggcggcctacctgtggcccaaagccacaggacgctagttgtgaacaaggtgtgaagagcctattgagctacaagagagtcctccggcccctgaatgcggctaatcccaaccacggagcaggtgattgcaacccagcaactagcctgtcgtaacgcgcaagtctgtggcggaaccgactactttgggtgtccgtgtttccttttattacatgacggctgcttatggtgacaatcacagattgttgtcataaagcgaattggattggccatccggtgagaattaaaacaattatctacttgtttgttggatttcttcctataaacacccaaacaccttgcttgattgaagtaattctgttgataaggcaacactattaca

SEQ ID NO: 19094 - DNA, 747 bp, synthetic construct; identical to SEQ ID NO: 1158
  source 1..747: mol_type = other DNA

SEQ ID NO: 19095 - DNA, 747 bp, synthetic construct
  source 1..747: mol_type = other DNA
ttaaaacagctctggggttgttcccaccccagaggcccacgtggcggctagtacaccggtatcacggtacccttgtacgcctgttttatacacccttccccgtaacttagaagtacaaaactcaagttcaacagaagggggtacaaaccagtaccaccacgaacaagcacttctgtttccccggtgaggttgcatagactgtccccacggttgaaggtgaccgatccgttatccgctcttgtacttcgagaagcccagtaccatcttggaatcttcgatgcgttgcgctcagcactcaaccccagagtgtagcttaggtcgatgagtctggacattccccaccggcgacggtggtccaggctgcgttggcggcctacctgtggcccaaagccacaggacgctagttgtgaacaaggtgtgaagagcctattgagctacaggagagtcctccggcccctgaatgcggctaatcccaaccacggagcaggtgacttcaagccagaggttggcctgtcgtaacgcgtgagtctgtggcggaaccgactactttgggtgtccgtgtttccttgtaatttttacattggctgcttatggtgacaatcatagattgttatcataaagcgaattggattggccatccggtgaagattagatcgattgtttatttgtttgttggatttactccattgtcacactattcagttgacttaatacgtattgtattaataattagaaatttataccata

SEQ ID NO: 19096 - DNA, 747 bp, synthetic construct
  source 1..747: mol_type = other DNA
ttaaaacagctctggggttgttcccaccccagaggcccacgtggcggccagtacaccggtatcgcggtacccttgtacgcctgttttatactcccttcccccgtaacttagaagcatataacacaagttcaatagaagggggtgcaaaccagcaccaccacgaacaagcacttctgtttccccggtgagatcacatagattgttcccacggtcgaaagtgatcaatccgttatccgctcttgtacttcgagaagcctagtatcttcttggaatcttcgatgcgttgcgctcagcactcaaacccagagtgtagcttaggccgatgagtctggacattccccaccggtgacggtggtccaggctgcgttggcggcctacctgtgacccaaagtcacaggacgctagttgtgaacaaggtgagaagagcctattgagctacaagagattcctccggcccctgaatgcggctaatcccaaccatggagcaggtggctgcaaaccagcagacggcctgtcgtaacgcgcaagtccgtggcggaaccgactactttgggtgtccgtgtttcctttattttttattgtggctgcttatggtgacaatcattgattgttatcataaagcgaattggattggccatccagcgataattaaccagatcatttactagtttgttggatttactccactgacattctacacacccaatcttatagaagtggtgaaattaattggacaatttaactaca

SEQ ID NO: 19097 - DNA, 750 bp, synthetic construct
  source 1..750: mol_type = other DNA
gaaattaaaacagctctggggttgttcccaccccagaggcccacgtggcggctagtacactggtattacggtacccttgtacgcctgttttacaccccttcccccgtaacttagaagctttaaaatccaagttcaatagtgagtggtacaacccagtactgctatgaacaagcacttctgttaccccggtgagattgcataagctgtccccacggctaaaagcggttgatccgttatccactcttgtacttcgagaagcctagtaagaccttgggatcctcgatgcgttgcgctcaacactctaccccagagtgtagcttgggctgatgagcctggacattcctcaccggtgacggtggtccaggctgcgttggcggcctacctgtggcccaaagccacaggacgctagttgtgaacaaggtgtgaagagcctattgagctacaagagagtcctccggcccctgaatgcggctaatcccaaccacggagcaggtgattgcaatccagcaactagcctgtcgtaacgcgcaagtctgtggcggaaccgactactttgggtgtccgtgtttccttttattacataatggctgcttatggtgacaatcacagattgttgtcataaagcgaattggattggccatccggtgagaattaaaacgattatttacttgtttgttaaatttgttcctatacacacccatacaccttgcttgattgaagtgattctgttgataagacaacactattacg

SEQ ID NO: 19098 - DNA, 750 bp, synthetic construct; identical to SEQ ID NO: 1204
  source 1..750: mol_type = other DNA

SEQ ID NO: 19099 - DNA, 746 bp, synthetic construct
  source 1..746: mol_type = other DNA
ttaaaacagctctggggttgttcccaccccagaggcccacgtggcggctagtacactggtattacggtacccttgtacgcctgttttataccccttccccccgtaacttagaagctttaaatccaagttcaacagtgagtggtacaacccagtactgctacgaacaagcacttctgttaccccggtgagattgcataggctgtccccacggctaaaagcgattgatccgttacccgctcttgtacttcgagaagcctagtaagaccttgggatcttcgatgcgttgcgctcaacactcaaccccagagtgtagcttaggctgatgagtctggacattcctcaccggcgacggtggtccaggctgcgttggcggcctacctgtggcccaaagccacaggacgctagttgtgaacaaggtgtgaagagcctattgagctacaagagagtcctccggcccctgaatgcggctaatcccaaccacggagcaggtgattgcaacccagcaactagcctgtcgtaacgcgcaagtctgtggcggaaccgactactttgggtgtccgtgtttccttttattacatgatggctgcttatggtgacaatcacagattgttgtcataaagcgaattggattggccatccggtgagaattaaaacaattatctacttgtttgttggatttgttcctataaacacccatacaccttgtttgattgaagtaattctattgataaggcaacactattaca

SEQ ID NO: 19100 - DNA, 749 bp, synthetic construct
  source 1..749: mol_type = other DNA
gaaattaaaacagctctggggttgttcccaccccagaggcccacgtggcggctagtacactggtattacggtacccttgtacgcctgttttacaccccttcccccgtaacttagaagctttaaatccaagttcaatagtgagtggtgcaacccagtactgctatgaacaagcacttctgttaccccggtgagatcgcataagctgtccccacggctaaaagcgattgattcgttatccactcttgtacttcgagaagcctagtaagaccttgggatcctcgatgcgttgcgctcaacactctaccccagagtgtagcttgggctgatgagtctggacattcctcaccggtgacggtggtccaggctgcgttggcggcctacctgtggcccaaagccacaggacgctagttgtgaacaaggtgtgaagagcctattgagctacaagagagtcctccggcccctgaatgcggctaatcccaaccacggagcaggtgattgcaatccagcaactagcctgtcgtaacgcgcaagtctgtggcggaaccgactactttgggtgtccgtgtttccttttattacataatggctgcttatggtgacaatcacagattgttgtcataaagcgaattggattggccatccggtgagaattaaaacgattatttacttgtttgttgaatttgttcctatacacacccatacaccttgtttgattgaagtaattctgttgataagacaacactgttacg

SEQ ID NO: 19101 - DNA, 722 bp, synthetic construct
  source 1..722: mol_type = other DNA
ttcccacccacagggcccattgggcgctagcacactggtattacggtacctttgtgcgcctgttttatgcaccctccccgaatgtaacttagaagctttaccaagatggtcaatagaaggtccagcacaccagttggatcccgaccaagcacttctgttaccccggactgagtatcaataggccgttcgcacggctgaaggagaaaacgttcgttacccggccaattacttcgagaaacccagtaacaccatgaaagttgcgcagcgtttcgctccgcacgaccccggtgtagatcaggtcgatgagtcaccgcgttccccacgggcgaccgtggcggtggctgcgctggcggcctgcccatggggcaacccatgggacgcttcaatactgacatggtgcgaagagtctattgagctaattggtagtcctccggcccctgaatgcggctaatcctaactgcggagcaggtaccctcaagccagagggcagtctgtcgtaacgggcaactctgcagcggaaccgactactttgggtgtccgtgtttccttttattcttgaactggctgcttatggtgacaattgaaagattgttaccatatagctattggattggccatccagtgacaaacagagtgattatatatttgtttgttggttttgttccattaagctacaaggttttaagcacacttaaatttatcttgttactcaactcagcaaa

SEQ ID NO: 19102 - DNA, 741 bp, synthetic construct
  source 1..741: mol_type = other DNA
taaaacagctctggggttgcacccaccccagaggcccacgtggcggctagtactccggtattgcggtacccttgtacgcctgttttatactcccttcccgtaacttagacgcacaaaaccaagttcaatagaagggggtacaaaccagtaccaccacgaacaagcacttctgtttccccggtgatgttgtatagactgcttgcgtggttgaaagcgacggatccgttatccgcttatgtacttcgagaagcccagtaccacctcggaatcttcgatgcgttgcgctcagcactcaaccccagagtgtagcttaggctgatgagtctggacatccctcaccggtgacggtggtccaggctgcgttggcggcctacctatggctaacgccatgggacgctagttgtgaacaaggtgtgaagagcctattgagctacataagaatcctccggcccctgaatgcggctaatcccaacctcggagcaggtggtcacaaaccagtgattggcctgtcgtaacgcgcaagtccgtggcggaaccgactactttgggtgtccgtgtttccttttattttattgtggctgcttatggtgacaatcacagattgttatcataaagcgaattggattggccatccggtgaaagtgagattcattatctatctgtttgctggattcgctccattgagtgtgtttactctaagtacaatttcaacagttatttcaatcagacaattgtatcata

SEQ ID NO: 19103 - DNA, 747 bp, synthetic construct
  source 1..747: mol_type = other DNA
ttaaaacagctctggggttgtacccaccccagaggcccacgtggcggctagcactccggtattacggtacccttgtgcgcctgttttatactcccctcccgcaacttagaagcacgaaaccaagttcaatagaagggggtacaaaccagtaccactacgaacaagcacttctgtttccccggtgacattgcatagactgctcacgcggttgaaagtgatcgatccgttacccgcttgtgtacttcgaaaagcctagtatcgccttggaatcttcgacgcgttgcgctcagcacccgaccccggggtgtagcttaggctgatgagtctggacattcctcaccggtgacggtggtccaggctgcgttggcggcctacctatggctaacgccataggacgttagaagtgaacaaggtgtgaagagcctattgagctacataagagtcctccggcccctgaatgcggctaatcctaaccacggagcaggcggtcgcgaaccagtgactggcttgtcgtaacgcgcaagtctgtggcggaaccgactactttgggtgtccgtgtttcctgttatttttatcatggctgcttatggtgacaatcagagattgttatcataaagcgaattggattggccatccggtgagtgttgtgtcaggtatacaactgtttgttggaaccactgcgttagctttacttctcatttaaccaattaatcaaaaacaatacgaggataaaacaacaatactaca

SEQ ID NO: 19104 - DNA, 747 bp, synthetic construct
  source 1..747: mol_type = other DNA
ttaaaacagctctggggttgtacccaccccagaggcccacgtggcggctagcactccggtattacggtacccttgtgcgcctgttttatactcccctcccgcaacttagaagcacgaaaccaagttcaatagaagggggtacaaaccagtaccactacgaacaagcacttctgtttccccggtgacattgcatagactgctcacgcggttgaaagtgatcgatccgttacccgcttgtgtacttcgaaaagcctagtatcgccttggaatcttcgacgcgttgcgctcagcacccgaccccggggtgtagcttaggctgatgagtctggacattcctcaccggtgacggtggtccaggctgcgttggcggcctacctatggctaacgccataggacgttagatgtgaacaaggtgtgaagagcctattgagctacataagagtcctccggcccctgaatgcggctaatcctaaccacggagcaggcggtcgcgaaccagtgactggcttgtcgtaacgcgcaagtctgtggcggaaccgactactttgggtgtccgtgtttcctgttatttttatcatggctgcttatggtgacaatcagagattgttatcataaagcgaattggattggccatccggtgagtgttgtgtcaggtatacaactgtttgttggaaccactgtgttagctttacttctcatttaaccaattaatcaaaaacaatacgaggataaaacaacaatactaca

SEQ ID NO: 19105 - DNA, 747 bp, synthetic construct
  source 1..747: mol_type = other DNA
ttaaaacagctctggggttgtacccaccccagaggcccacgtggcggctagcactccggtaccacggtacccttgtgcgcctgttttatactcccctcccgcaacttagaagcatgaaaccaagttcaatagaagggggtacaaaccagtaccaccacgaacaagcacttctgttcccccggtgacattgcatagactgctcacgcggttgaaagtgatcgatccgttatccgcttgtgtacttcgagaagcctagtatcaccttggaatcttcgatgcgttgcgctcagcacccgaccccggggtgtagcttaggctgatgagtctggacattcctcaccggtaacggtggtccaggctgcgttggcggcctacctatggctaacgccataggacgctagatgtgaacaaggtgtgaagagcctattgagctacataagagtcctccggcccctgaatgcggctaatcctaaccacggagcaggcggtcgcgaaccagcgattagcttgtcgtaatgcgcaagtctgtggcggaaccgactactttgggtgtccgtgtttcctgttattattatcatggctgcttatggtgacaatcagtgattgttatcataaagcgaattggattggccatccggtgagtgttgtgtcaggtgtacaactgtttattggaaccattgtgttagttttacttctcgttcaaccaattggtcaaaaacagtacgaggataagacaacaatactaca

SEQ ID NO: 19106 - DNA, 745 bp, synthetic construct
  source 1..745: mol_type = other DNA
ttaaaacagctctggggttgttcccaccccagaggcccacgtggcggccagtacactggtattacggtacccttgtacgcctgttttacaccccttcccccgtaacttagaagctttaaacccaagttcaatagtgggtagtacaacccagtactgctacgaacaagcacttctgttaccccggtgagattgcataagctgtccccacggctaaaagcgattgatccgttacccgctcttgtacttcgagaagcctagtaaaaccttggaatcttcgatgcgttgcgctcaacactcaaccccagagtgtagcttaggctgatgagtctggacattcctcaccggcgacggtggtccaggctgcgttggcggcctacctgtggcccaaagccacaggacgctagttgtgaacaaggtgtgaagagcctattgagctacaagggagtcctccggcccctgaatgcggctaatcccaaccacggagcaggtggttgcaacccagcaactggcctgtcgtaacgcgcaagtctgtggcggaaccgactactttgggtgtccgtgtttccttttattacataatggctgcttatggtgacaatcacagattgttgtcataaagcgaattggattggccatccagtgagagttaaagtaattatctacttgtttattggatttgttcctataaccgcccatacaccttgcttgattgaagtgatcctgtcaataagacatcactattaca

SEQ ID NO: 19107 - DNA, 748 bp, synthetic construct
  source 1..748: mol_type = other DNA
gaaattaaaacagctctggggttgttcccaccccagaggcccacgtggcggctagtacactggtattacggtacccttgtacgcctgttttacaccccttcccccgtaacttagaagctttaaatccaagttcaatagtgagtggtacaacccagtactgctatgaacaagcacttctgttaccccggtgagattgcataagctgtccccacggctaaaagcgattgatccgttatccactcttgtacttcgagaagcctagtaagaccttgggatcctcgatgcgttgcgctcaacactctaccccagagtgtagcttgggctgatgagtctggacattccccaccggtgacggtggtccaggctgcgttggcggcctacctgtggcccaagccacaggacgctagttgtgaacaaggtgtgaagagcctattgagctacaagagagtcctccggcccctgaatgcggctaatcccaaccacggagcaggtgattgcaatccagcaactagcctgtcgtaacgcgcaagtctgtggcggaaccgactactttgggtgtccgtgtttccttttattacataatggctgcttatggtgacaatcacagattgttgtcataaagcgaattggattggccatccggtgagaattaaaacgattatttacttgtttgttggatttgttcctatacacacccatacaccttgcttgattgaagtaattctgttaataagacaacactattgcg

SEQ ID NO: 19108 - DNA, 749 bp, synthetic construct
  source 1..749: mol_type = other DNA
gaaattaaaacagctctggggttgttcccaccccagaggcccacgtggcggctagtacactggtattacggtacccttgtacgcctgttttacaccccttcccccgtaacttagaagctttaaatccaagttcaatagtgagtggtacaacccagtactgctatgaacaagcacttctgttaccccggtgagattgcataagctgtccccacggctaaaagcgattgatccgttatccactcttgtacttcgagaagcctagtaagaccttgggatcctcgatgcgttgcgctcaacactctaccccagagtgtagcttgggctgatgagtctggacattcctcaccggtgacggtggtccaggctgcgttggcggcctacctgtggcccaaagccacaggacgctagttgtgaacaaggtgtgaagagcctattgagctacaagagagtcctccggcccctgaatgcggctaatcccaaccacggagcaggtgattgcgatccagcaactagcctgtcgtaacgcgcaagtctgtggcggaaccgactactttgggtgtccgtgtttccttttattacataatggctgcttatggtgacaatcacagattgttgtcataaagcgaattggattggccatccggtgagaattaaaacgattatttacttgtttgttggatttgttcctatacacacccatacaccttgcttgattgaagtaactctgttgataagacaacactattacg

SEQ ID NO: 19109 - DNA, 746 bp, synthetic construct
  source 1..746: mol_type = other DNA
ttaaaacagctctggggttgtacccaccccagaggcccacgtggcggctagcactccggtattacggtacccttgtgcgcctgttttatactcccctcccgcaacttagaagcacgaaaccaagttcaatagaagggggtacaaaccagtaccactatgaacaagcacttctgtttccccggtgacattgcataggctgctcacgcggctaaaagtgatcgatccgttacccgcttgtgtacttcgaaaagcctagtatcgccttggaatcttcgacgcgttgcgctcagcacccgaccccggggtgtagcttaggctgatgagtctggacattcctcaccggtgacggtggtccaggctgcgttggcggcctacctatggctaacgccataggacgctagatgtgaacaaggtgtgaagagcctattgagctacataagagtcctccggcccctgaatgcggctaatcctaaccacggagcaggcggtcacgaaccagtgactggcttgtcgtaacgcgcaagtctgtggcggaaccgactactttgggtgtccgtgtttcctgttatttttatcatggctgcttatggtgacaatcagagattgttatcataaagcgaattggattggccatccggtgagtgttgcatcaggtatacaactgtttgttggaaccactgtgttagctttgcttctcatttaaccaattaatcataacaatacgaggataaaacaacaatactgca

SEQ ID NO: 19110 - DNA, 745 bp, synthetic construct
  source 1..745: mol_type = other DNA
ttaaaacagctctggggttgttcccaccccagaggcccacgtggcggccagtactccggtattacggtacccttgtacgcctgttttatatccccttcccccgcaacttagaagttataaaccaagttcaatagaagggggtacaagccagtaccaccacgaacaagcacttctgtttccccggtgatgttgtatagactgctaacgcggttgaaaacagctgatccgttatccgcttgtgtacttcgagaagcctagtatcatcttggaatcttcgatgcgttgcgttcagcgctctaccccagagcgtagcttaggctgatgagtctgggcattccccaccggcgacggtggcccaggctgcgttggcggcctacctatggctaacgccataggacgctagttgtgaacaaggtgtgaagagcctattgagctacacaagagtcctccggcccctgaatgcggctaatcctaaccatggagcaagtgatcacaatccagtgatattcttgtcgtaacgcgcaagtccgtggcggaaccgactactttgggtgtccgtgtttccttttacttttatcatggctgcttatggtgacaatcattgattgttatcataaagcgaattggattggccatccggtgaaagtgagacttatcatctacttgtttgttggattcactccattgaacacattcactcccagtatcatttcaatagtaatcagaattagacagttgtatcaca

SEQ ID NO: 19111 - DNA, 747 bp, synthetic construct; identical to SEQ ID NO: 1161
  source 1..747: mol_type = other DNA

SEQ ID NO: 19112 - DNA, 745 bp, synthetic construct
  source 1..745: mol_type = other DNA
ttaaaacagctctggggttgttcccaccccagaggcccacgtggcggctagtacactggtattacggtacccttgtacgcctgttttataccccttcccccgtaacttagaagctttaaatccaagttcaacagtgagtggtacaacccagtactgctacgaacaagcacttctgttaccccggtgagattgcataggctgtccccacggctaaaagcgattgatccgttacccgctcttgtacttcgagaagcctagtaagaccttgggatcttcgatgcgttgcgctcaacactcaaccccagagtgtagcttaggctgatgagtctggacattcctcaccggtgacggtggtccaggctgcgttggcggcctacctgtggcccaaagccacaggacgctagttgtgaacaaggtgtgaagagcctattgagctacaagagagtcctccggcccctgaatgcggctaatcctaaccacggagcaggtgattgcaacccagcaactagcctgtcgtaacgcgcaagtctgtggcggaaccgactactttgggagtccgtgtttccttttattacatgatggctgcttatggtgacaatcacagattgttgtcataaagcgaattggattggccatccggtgagaattaaaacaattatctacttgtttgttggatttgttcctataaacacccatacaccttgcttgattgaagtaactctattgataaggcaacactatcaca

SEQ ID NO: 19113 - DNA, 747 bp, synthetic construct
  source 1..747: mol_type = other DNA
ttaaaacagctctggggttgttcccaccccagaggcccacgtggcggctagtacactggtattacggtacccttgtacgcctgttttacacccctttcccccgtaacttagaagcttttaaatccaagttcaacagtgagtggtacaacccagtactactatgaacaagcacttctgttaccccggtgagattgcataagctgtccccacggctgaaagcgattgatccgttatccgctcttgtacttcgagaagcctagtaaaaccttgggatcctcgatgcgttgcgctcaacactctaccccagagtgtagcttgggctgatgagtctggacattccccaccggtgacggtggtccaggctgcgttggcggcctacctgtggcccaaagccacaggacgctagttgtgaacaaggtgtgaagagcctattgagctacaagagagtcctccggcccctgaatgcggctaatcccaaccacggagcaggtgattgcaacccagcaactagcctgtcgtaacgcgcaagtctgtggcggaaccgactactttgggtgtccgtgtttccttttattacacaatggctgcttatggtgacaatcacagattgttgtcataaagcgagttggattggccatccggtgagaattaaaacaattatttacttgtttgttggacttgttcctatacacacccatacactttgcttgattgaagtaattctgtcaataagacaacactattacg

SEQ ID NO: 19114 - DNA, 742 bp, synthetic construct
  source 1..742: mol_type = other DNA
ttaaaacagcctgtgggttgttcccacccacagggcccacggggcgctagcactctggtatcgcggtacctttgtgcgcctgttttatacaccctcccccaacgtaacttagaagcttaatccgaatggtcaatagacgacccaacacgccagctgggccccgaccaggcacttctgttaccccggaccgagtatcaataagctgctcacgcggctgaaggagaaagcgttcgtcacccggccaattacttcgagaaacccagtaacaccatggaggttgcgcagcgtttcgctccgcacaaccccagtgtagatcaggtcgatgagtcaccgcataccccacgggcaaccgtggcggtggctgcgttggcggcctgcccatggggtaacccatgggacgcctcaatactgacatggtgcgaagagtctattgagctaattggtagtcctccggcccctgaatgcggctaatcctaactgcggagcaggtactcacaagccagtgagcggcctgtcgtaatgggcaactctgcagcggaaccgactactttgggtgtccgtgtttccttttattcttgacttggctgcttatggtgacaattcagagattgttaccatatagctattggattggccatccggtgacaaatagagcaattatctatttgtttgttggttttattccattaaattacaaagtattaaacacccttaattacattttaatacttaactcaacaaa

SEQ ID NO: 19115 - DNA, 744 bp, synthetic construct
  source 1..744: mol_type = other DNA
ttaaaacagcctgtgggttgttcccaccccagaggcccacgtggcggccagtactccggtattgcggtacccttgtacgcctgttttacactcccttccccgtaacttagacgcaataaaccaagttcactaggaggggtgcaaaccagcaccaccacgaacaagcacttctgtttccccggtgacattgtatagactgtatccacggttgaaaacgattgatccgttatccgctcttgtacttcgagaagcctagtatcatcttggaatcttcgacgcgttgcgctcagcattcaaccccagaatgtagcttaggtcgatgagtctggacattcctcaccggtgacggtggtccaggctgcgttggcggcctacctgtgacccaaagtcacaggacgctagttgtgaacaaggtgtgaagagcctattgagctacaagagagtcctccggcccctgaatgcggctaatcctaaccacggagcaagtgctcacgaaccagtgagtggcttgtcgtaacgagcaattctgtggcggaaccgactactttgggtgtccgtgtttcctttttaactttaaatggctgcttatggtgacaatcattgattgttatcataaagcgaattggattggccatccggtgaaaatcaagttgatcatttatttgtttgttggattcactccattaactcatttttcaattgacctaatacgtattgtattattagttagaaacatacatcaca

SEQ ID NO: 19116 - DNA, 746 bp, synthetic construct
  source 1..746: mol_type = other DNA
ttaaaacagcctgtgggttgttcccaccccagaggcccacgtggcggctagtactccggtattacggtacccttgtacgcctgttttatacccccttcccccagaaacttagacgttatgaaaccaagttcaataggagggggcacgaaccagtgtcaccacgaacaagcacctctgtttccccggtgattttacataagctgtacccacggctgaaagtgaatgatccgttatccgcttgggtacttcgagaagcctagtaccacctttggatcttcgacgcgttgcgctcagcactctaccccgagtgtagcttaggtcgatgagtctgggcataccccaccggtgacggtggcccaggctgcgttggcggcctacccatggttaacaccatgggacgctagtagtgaacaaggtgtgaagagcctattgagctactcaagagtcctccggcccctgaatgcggctaatcctaaccatggagcaggtgctttcaatccagaaagtggcctgtcgtaatgcgtaagtccgtggcggaaccgactactttgggtgtccgtgtttcctttttacttttgtatggctgcttatggtgacaatcacagattgttatcataaagcaaattggattggccatccggtgaaagttaagcacatcatttatctatttgttggattcactccaatcacttctaaaacacttcagttgatacgtgtggtgctactaatcaggcagctgtatcaca

SEQ ID NO: 19117 - DNA, 746 bp, synthetic construct
  source 1..746: mol_type = other DNA
ttaaaacagcctgtgggttggtcccaccccagaggcccacgtggcggctagtactccggtatcacggtacccttgtacgcctgttttatatccccttcccccagaaacttagacgttatgaaaccaagttcaataggaggggacacgaaccagtgtcaccacgaacaagcacttctgtaaccccggtgattttacataagctgtacccacggctgaaagtgaatgatccgttatccgcttgggtacttcgagaagcctagtaccacctttggatctccgacgcgttgcgctcagcactctaccccgagtgtagcttaggtcgatgagtctgggcatgccccaccggtgacggtggcccaggctgcgttggcggcctacccatggttaacaccatgggacgctagttgtgaacaaggtgtgaagagcctattgagctactcaagagtcctccggcccctgaatgcggctaatcccaaccatggagcaggtgctttcaatccagaaagtggcctgtcgtaatgcgtaagtccgtggcggaaccgactactttgggtgtccgtgtttcctttttacttttgtatggctgcttatggtgacaatcacagattgttatcataaagcgaattggattggccatccggtgaaagttaaacacatcatttatctatttgttggatttactccaatcacccctaagacacttcagttgatacgtgtagtgttactaatcaggcaactgtatcaca

SEQ ID NO: 19118 - DNA, 748 bp, synthetic construct
  source 1..748: mol_type = other DNA
tttaaaaagctctggggttgttcccaccccagaggcccacgtggcggctagtacactggtattacggtacccttgtacgcctgttttacaccccttttcccccgtaacttagaagcttttaaattcaagttcaacagtgagtggtacaacccagtactactatgaacaagcacttctgttaccccggtgagattgcataagctgtccccacggctaaaagcgattgatccgttatccgctcttgtacttcgagaagcctagtaaaaccttgggatcctcgatgcgttgcgctcaacactcaaccccagagtgtagcttgggctgatgagtctggacattcctcaccggtgacggtggtccaggctgcgttggcggcctacctgtggcccaaagccacaggacgctagttgtgaacaaggtgtgaagagcctattgagctacaagagagtcctccggcccctgaatgcggctaatcccaaccacggagcaggtgattgcaacccagcaactagcctgtcgtaacgcgcaagtctgtggcggaaccgactactttgggtgtccgtgtttccttttattacataatggctgcttatggtgacaatcacagattgttgtcataaagcgagttggattggccatccagtgagaattaaaacaattatctacttgtttgttggatttgttcctatacacacccatacaccttgcttgattgaagtaattctgtcgataagacaacactattacg

SEQ ID NO: 19119 - DNA, 745 bp, synthetic construct
  source 1..745: mol_type = other DNA
aaaacagctctggggttgtacccaccccagaggcccacgtggcggctagcactccggtattacggtacccttgtgcgcctgttttatactcccctcccgcaacttagaagcacgaaaccaagttcaatagaagggggtacaaaccagtaccactacgaacaagcacttctgtttccccggtgacattacatagactgctcacgcggttgaaagtgatcgatccgttacccgcttgtgtacttcgaaaagcctagtatcgccttggaatcttcgacgcgttgcgctcagcacccgaccccggggtgtagcttaggctgatgagtctggacattcctcaccggtgacggtggtccaggctgcgttggcggcctacctatggctaacgccataggacgctagatgtgaacaaggtgtgaagagcctattgagctacataagagtcctccggcccctgaatgcggctaatcctaaccacggagcaggcggtcgcgaaccagtgactggcttgtcgtaacgcgcaagtctgtggcggaaccgactactttgggtgtccgtgtttcctgttatttttatcatggctgcttatggtgacaatcagagattgttatcataaagcgaattggattggccatccggtgagtattgtgtcaggtatacaactgtttgttggaaccactgtgttagctttacttctcatttaaccaattaatcaaaaacaatacgaggataaaacaacaatactaca

SEQ ID NO: 19120 - DNA, 745 bp, synthetic construct
  source 1..745: mol_type = other DNA
aaaacagctctggggttgtacccaccccagaggcccacgtggcggctagcactccggtattacggtacccttgtgcgcctgttttatactcccctcccgcaacttagaagcacgaaaccaagttcaatagaagggggtacaaaccagtaccactacgaacaagcacttctgtttccccggtgacattgcatagactgctcacgcggttgaaagtgatcgatccgttacccgcttgtgtacttcgaaaagcctagtatcgccttggaatcttcgacgcgttgcgctcagcacccgaccccggggtgtagcttaggctgatgagtctggacattcctcaccggtgacggtggtccaggctgcgttggcggcctacctatggctaacgccataggacgttagatgtgaacaaggtgtgaagagcctattgagctacataagagtcctccggcccctgaatgcggctaatcctaaccacggagcaggcggtcgcgaaccagtgactggcttgtcgtaacgcgcaagtctgtggcggaaccgactactttgggtgtccgtgtttcctgttatttttatcatggctgcttatggtgacaatcagagattgttatcataaagcgaattggattggccatccggtgagtgttgtgtcaggtatacaactgtttgttggaaccactgtgttagctttacttctcatttaaccaattaatcaaaaacaatacgaggataaaacaacaatactaca

SEQ ID NO: 19121 - DNA, 747 bp, synthetic construct
  source 1..747: mol_type = other DNA
ttaaaacagctctggggttgtacccaccccagaggcccacgtggcggctagcactccggtattacggtacccttgtgcgcctgttttatactcccctcccgcaacttagaagcacgaaaccaagttcaatagaagggggtacaaaccagtaccactacgaacaagcacttctgtttccccggtgacattgcatagactgctcacgcggttgaaagtgatcgatccgttacccgcttgtgtacttcgaaaagcctagtatcgccttggaatcttcgacgcgttgcgctcagcacccgaccccggggtgtagcttaggctgatgagtctggacattcctcaccggtgacggtggtccaggctgcgttggcggcctacctatggctaacgccataggacgctagatgtgaacaaggtgtgaagagcctattgagctacataagagtcctccggcccctgaatgcggctaatcctaaccacggagcaggcggtcgcgaaccagtgactggcttgtcgtaacgcgcaagtctgtggcggaaccgactactttgggtgtccgtgtttcctgttatttttatcatggctgcttatggtgacaatcagagattgttatcataaagcgaattggattggccatccggtgagtgttgtgtcaggtatacaactgtctgttggaaccactgtgttagctttacttctcatttaaccaattaatcaaaaacaatacgaggataaaacaacaatactaca

SEQ ID NO: 19122 - DNA, 734 bp, synthetic construct
  source 1..734: mol_type = other DNA
ttaaaacagctctggggttgcacccaccccagaggcccacgtggcggctagtactccggtattgcggtacccttgtacgcctgttttatactcccttcccgtaacttagacgcacaaaaccaagttcaatagaagggggtacaaaccagtaccaccacgaacaagcacttctgtttccccggtgatgttgtatagactgcttgcgtggttgaaggcgacggatccgttatccgcttatgtacttcgagaagcccagtaccacctcggaatcttcgatgcgttgcgctcagcactcaaccccagagtgtagcttaggctgatgagtctggacatccctcaccggcgacggtggtccaggctgcgttggcggcctacctatggctaacgccatgggacgctagttgtgaacaaggtgtgaagagcctattgagctacataagaatcctccggcccctgaatgcggctaatcccaacctcggagcaggtggtcacaaaccagtgattggcctgtcgtaacgcgcaagtccgtggcggaaccgactactttgggtgtccgtgtttccttttattttattgtggctgcttatggtgacaatcacagattgttatcataaagcgaattggattggccatccggtgaaagtgagattcattatttatctgttttgctccattgagtgtgtttattttaagtacaatttcaacagttatttcaatcagacaattgtatcata

SEQ ID NO: 19123 - DNA, 745 bp, synthetic construct
  source 1..745: mol_type = other DNA
ttaaaacagctgtggggttgttcccaccccagaggcccacgtggcggctagtacactggtattacggtacccttgtacgcctgttttataccccttcccccgtaacttagaagctttaaatccaagttcaacagtgagtggtacaacccagtactgctacgaacaagcacttctgttaccccggtgagattgcataggctgtccccacggctaaaagcgattgatccgttacccgctcttgtacttcgaaaagcctagtaagaccttgggatcttcgatgcgttgcgctcaacactcaaccccagagtgtagcttaggctgatgagtctggacattcctcaccggtgacggtggtccaggctgcgttggcggcctacctgtggcccaaagccacaggacgctagttgtgaacaaggtgtgaagagcctattgagctacaagagagtcctccggcccctgaatgcggctaatcccaaccacggagcaggtgattgcaacccagcaactagcctgtcgtaacgcgcaagtctgtggcggaaccgactactttgggtgtccgtgtttccttttattacatgatggctgcttatggtgacaatcacagattgttgtcataaagcgaattggattggccatccggtgagaattaaaacaattatctacttgtttgttggatttgttcctataaacacccatacaccttgcttgattgaagtaattctattgataaggcaacactatcaca

SEQ ID NO: 19124 - DNA, 747 bp, synthetic construct
  source 1..747: mol_type = other DNA
ttaaaacagctctggggttgttcccaccccagaggcccacgtggcggctagtacactggtattacggtacccttgtacgcctgttttacaccccttttcccccgtaacttagaagctttgcaattgaagttctcagggggtggtacgaccctccactactatgaacaagcacttctgttaccccggtgagattgcataagctgtccccacggctaaaagcgattgatccgttatccgctcttgtacttcgagaagcctagtaaaaccttgggatcctcgatgcgttgcgctcaacactcaaccccagagtgtagcttgggctgatgagtctggacattcctcaccggtgacggtggtccaggctgcgttggcggcctacctgtggcccaaagccacaggacgctagttgtgaacaaggtgtgaagagcctattgagctacaagagagtcctccggcccctgaatgcggctaatcccaaccacggagcaggtgattgcaacccagcaactagcctgtcgtaacgcgcaagtctgtggcggaaccgactactttgggtgtccgtgtttccttttattacataatggctgcttatggtgacaatcacagattgttgtcataaagcgagttggattggccatccagtgagaattaaaacaattatctacttgtttgttggatttgttcctatacacacctatacaccttgcttgattgaagtaattctgtcgataagacaacactattacg

SEQ ID NO: 19125 - DNA, 746 bp, synthetic construct
  source 1..746: mol_type = other DNA
ttaaaacagctctggggttgttcccaccccagaggcccacgtggcggctagtacactggtattacggtacccttgtacgcctgttttacacccctttcccccgtaacttagaagctttaaatccaagttcaacagtgagtggtacaacccagtactactacgaacaagcacttctgttgccccggtgagattgcataggctgtccccacggctaaaagcgattgatccgttacccgctcttgtacttcgagaagcctagtaagaccttgggatcttcgatgcgttgcgctcagcactcaaccccagagtgtagcttgggctgatgagtctggacattcctcaccggtgacggtggtccaggctgcgttggcggcctacctgtggcccaaagccacaggacgctagttgtgaacaaggtgtgaagagcctattgagctacaagagagtcctccggcccctgaatgcggctaatcccaaccacggagcaggtgattgcaacccagcaactagcctgtcgtaacgcgcaagtctgtggcggaaccgactactttgggtgtccgtgtttccttttatcacataatggctgcttatggtgacaatcacagattgttgtcataaagcgaattggattggccatccggtgagaattaaaacaattatctacttgtttgttggatttgttcctataaacacccaaacaccttgcttgattgaagtaattctgttggtaagacaacactatcaca

SEQ ID NO: 19126 - DNA, 746 bp, synthetic construct
  source 1..746: mol_type = other DNA
ttaaaacagctctggggttgttcccacccgagaggcccacgtggcggctagtacactggtattacggtacccttgtacgcctgttttacacccctttcccccgtaacttagaagctttaaatccaagttcaacagtgagtggtacaacccagtactactacgaacaagcacttctgttgccccggtgagattgcataggctgtccccacggctaaaagcgattgatccgttacccgctcttgtacttcgagaagcctagtaagaccttgggatcttcgatgcgttgcgctcagcactcaaccccagagtgcagcttgggctgatgagtctggacattcctcaccggtgacggtggtccaggctgcgttggcggcctacctgtggcccaaagccacaggacgctagttgtgaacaaggtgtgaagagcctattgagctacaagagagtcctccggcccctgaatgcggctaatcccaaccacggagcaggtgattgcaacccagcaactagcctgtcgtaacgcgcaagtctgtggcggaaccgactactttgggtgtccgtgtttccttttatcacataatggctgcttatggtgacaatcacagattgttgtcataaagcgaattggattggccatccggtgagaattaaaacaattatatacttgtttgttggatttgttcctataaacacccaaacaccttgcttgattgaagtaattctgttggtaaggcaacactatcaca

SEQ ID NO: 19127 - DNA, 741 bp, synthetic construct
  source 1..741: mol_type = other DNA
ttaaaacagctctggggttgttcccaccccagaggcccacgtggcggctagtactccggtatcacggtacccttgtacgcctgttttatactccctgccccgtaacttagaagcaaaccaaacaagttcaataggagggggtgcaagcccgcaccaccacgaacaagtactcctgtctccccggtgaggttgtatagactgtacccacggttgaaaacgactgatccgttatccgctctagtacttcgggaagcctagtagcattttggaatcttcgatgcgttgcgctcagcactcaaccccggagtgtagcttaggtcgatgagtctggacatcccccaccggtgacggtggtccaggctgcgttggcggcctacctgtggtccaaagccacaggacgctagttgtgaacaaggtgtgaagagcctactgagctactagagagtcctccggcccctgaatgcggctaatcctaaccacggagcaggtagttgcaacccagcaaccagcctgtcgtaatgcgcaagtctgtggcggaaccgactactttgggtgaccgtgtttccttttattttcatatatggctgcttatggtgacaatcattgattgttatcatatagcgacttggattggccatccggtgagaattagaacgactgtttacccgtttgctgattttgataacactccacacacttaccatttgagaattgtactgttggcaagacagcaccattata

SEQ ID NO: 19128 - DNA, 754 bp, synthetic construct
  source 1..754: mol_type = other DNA
ttaaaacagctctggggttgttcccaccccagaggcccacgtggcggctagtactctggtatcacggtacccttgtacgcctgttttatatccccttcccctgtaacttagaagcaaacaacacaagttcaatagaagggggtacaaaccagtaccaccacgaacaagcacttctgttaccccggtgatattgcatagactgtccccacggtcaaaagcgattgatccgttatccgcttaagtacttcgagaagcctagtatcaccttggaatctccgatgcgttgcgctcatcactcgaccccggagtgtagcttaggtcgatgagtctggacgatcctcactggcgacagtggtccaggctgcgttggcggcctacctatggctcaaagccataggacgctagttgtgaacaaggtgtgaagagcctattgagctacttgagagtcctccggcccctgaatgcggctaatcccaaccacggatcaggtgattgcaatccagcagttggcctgtcgtaacgcgcaagtctgtggcggaaccgactactttgggtgtccgtgtttcctttttattttattgctggctgcttatggtgacaatcgtagattgttatcatagagcgaattggattggccatccggtgaaagtaagacacattatttacctttttgttggatttactacactatccacacacactccagatttaatttgtatagttcttttaattagaaggtcttatcattacaaca

SEQ ID NO: 19129 - DNA, 746 bp, synthetic construct
  source 1..746: mol_type = other DNA
taaaacagctctggggttgtacccaccccagaggcccacgtggcggctagcactccggtattacggtacccttgtgcgcctgttttatactcccctcccgcaacttagaagcacgaaaccaagttcaatagaagggggtacaaaccagtaccactacgaacaagcacttctgtttccccggtgacattgcatagactgctcacgcggttgaaagtgatcgatccgttacccgcttgtgtacttcgaaaagcctagtatcgccttggaatcttcgacgcgttgcgctcagcacccgaccccggggtgtagcttaggctgatgagtctggacattcctcaccggtgacggtggtccaggctgcgttggcggcctacctatggctaacgccataggacgctagatgtgaacaaggtgtgaagagcctattgagctacataagagtcctccggcccctgaatgcggctaatcctaaccacggagcaggcggtcgcgaaccagtgactggcttgtcgtaacgcgcaagtctgtggcggaaccgactactttgggtgtccgtgtttcctgttatttttatcatggctgcttatggtgacaatcagagattgttatcataaagcgaattggattggccatccggtgagtgttgtgtcaggtatacaactgtttgttggaaccactgtgttagctttacttctcatttaaccaattaatcaaaaacaatacgaggataaaacaacaatactaca

SEQ ID NO: 19130 - DNA, 746 bp, synthetic construct
  source 1..746: mol_type = other DNA
ttaaaacagcctgtgggttgttcccaccccagaggcccacgtggcggccagtacactggtattacggtacctttgtacgcctgttttatatcccctcccccgtgtaactttagaagcaattcaaacagttcaatagagggggtacaaaccagtaccaccacgaacaagcacttctgttcccccggtgaagctgtatagactgtttcccacggttgaaaatggctgatccgttatccgcttaagtacttcgagaagcctagtaccaccttggaatcttcgacgcgttgcgctcagcactctaccccgagtgtagcttaggctgatgagtctgggcattccccaccggcgacggtggcccaggctgcgttggcggcctacccatggccaacgccatgggacgctagttgtgaacaaggtgtgaagagcctattgagctacttgagagtcctccggcccctgaatgcggctaatcctaaccacggagcaagtgctcacaaaccagtgagtggcttgtcgtaacgcgcaagtctgtggcggaaccgactactttgggtgtccgtgtttccttttatttttatcatggctgcttatggtgacaatcatagattgttatcataaagcgaattggattggccatccggtgaaaatcaagcatattgtattcttgtttgttggatttacacctctcactcactttacatttggtttaataaatattgtattgttagttagacaatattactaca

SEQ ID NO: 19131 - DNA, 752 bp, synthetic construct
  source 1..752: mol_type = other DNA
ttaaaacagcctgtgggttgttcccaccccagaggcccacgtggcggctagtactccggtattacggtacccttgtacgcctgttttatatcccttccccgtaacttagaagcaagcaacacaagttcaatagaagggggtacaaaccagtaccaccacgaacaagcacttctgttaccccggtgatgttgcatagactgttcccacggtcaaaagcgattgatccgttatccgctcaagtacttcgagaagcctagtaccactttggaatcttcgatgcgttgcgctcaacactcgaccccggagtgtagcttaggtcgatgagtctggacgatcctcactggcgacagtggtccaggctgcgttggcggcctacctatggcccaaagccataggacgctagttgtgaacaaggtgtgaagagcctattgagctacttgagagtcctccggcccctgaatgcggctaatcccaaccacggatcaggtgattgcaatccagcagttggcctgtcgtaacgcgcaagtctgtggcggaaccgactactttgggtgtccgtgtttccttttattcttattactggctgcttatggtgacaatcgaagattgttatcataaagcgaattggattggccatccggtgaaagtaaaacacattatttacctttttgttggatttactacattatccacattcactccagacttaattcgcatagttcttttgattagaagattttactaacataaca

SEQ ID NO: 19132 - DNA, 745 bp, synthetic construct
  source 1..745: mol_type = other DNA
aaaacagctctggggttgtacccaccccagaggcccacgtggcggctagcactccggtattacggtacccttgtgcgcctgttttatactcccctcccgcaacttagaagcacgaaaccaagttcaatagaagggggtacaaaccagtaccactacgaacaagcacttctgtttccccggtgacattgcatagactgctcacgcggttgaaagcgatcgatccgttacccgcttgtgtacttcgaaaagcctagtatcgccttggaatcttcgacgcgttgcgctcagcacccgaccccggggtgtagcttaggctgatgagtctggacattcctcaccggtgacggtggtccaggctgcgttggcggcctacctatggctaacgccataggacgttagatgtgaacaaggtgtgaagagcctattgagctacataagagtcctccggcccctgaatgcggctaatcctaaccacggagcaggcggtcgcgaaccagtgactggcttgtcgtaacgcgcaagtctgtggcggaaccgactactttgggtgtccgtgtttcctgttatttttatcatggctgcttatggtgacaatcagagattgttatcataaagcgaattggattggccatccggtgagtgttgtgtcaggtatacaactgtttgttggaaccactgtgttagctttacttctcatttaaccaattaatcaaaaacaatacgaggataaaacaacaatactaca

SEQ ID NO: 19133 - DNA, 745 bp, synthetic construct
  source 1..745: mol_type = other DNA
aatacagctctggggttgtacccaccccagaggcccacgtggcggctagcactccggtattacggtacccttgtgcgcctgttttatactcccctcccgcaacttagaagcacgaaaccaagttcaatagaagggggtacaaaccagtaccactacgaacaagcacttctgtttccccggtgacattgcatagactgctcacgcggttgaaagtgatcgatccgttacccgcttgtgtacttcgaaaagcctagtatcgccttggaatcttcgacgcgttgcgctcagcacccgaccccggggtgtagcttaggctgatgagtctggacattcctcaccggtgacggtggtccaggctgcgttggcggcctacctatggctaacgccataggacgttagatgtgaacaaggtgtgaagagcctattgagctacataagagtcctccggcccctgaatgcggctaatcctaaccacggagcaggcggtcgcgaaccagtgactggcttgtcgtaacgcgcaagtctgtggcggaaccgactactttgggtgtccgtgtttcctgttatttttatcatggctgcttatggtgacaatcagagattgttatcataaagcgaattggattggccatccggtgagtgttgtgtcaggtatacaactgtttgttggaaccactgtgttagctttacttctcatttaaccaattaatcaaaaacaatacgaggataaaacaacaatactaca

SEQ ID NO: 19134 - DNA, 742 bp, synthetic construct
  source 1..742: mol_type = other DNA
ttaaaacagcctgtgggttgttcccacccacagggcccatggggcgcaagcacactggtattgcggtacctttgtgcgcctgttttatccacccttccccaatgaaacttagaagcttgactcaaacggtcaatagacagcccagtgcaccaactgggtctcgaccaggcactcctgtttccccggactgagtatcaataggctgcttgcgcggctgaaggagaaaacgttcgttacccggccaattacttcgagaaacctagtaccaccatggacgttgcgcagtgtttcgctccacacaaccccggtgtagatcaggtcgatgagtcaccgcaatccccacgggcgaccgtggcggtggctgcgctggtggcctgcccatggggcaacccatgggacgcttcaatactgacatggtgcgaagagtctattgagctaattggtagtcctccggcccctgaatgcggctaatcctaactgcggagcagatacccacataccagtgggcagtctgtcgtaacgggcaactctgcagcggaaccgactactttgggtgtccgtgtttccttttattcttatattggctgcttatggtgacaattgaaaggttgttaccatatagcttttggattggccatccagtgagcaacagagcgatcatactcctttttgttgggtttgtaccacttgattatagtagttacaacaccttgctatacgtcattcatttaaacacgagaaa

SEQ ID NO: 19135 - DNA, 743 bp, synthetic construct; identical to SEQ ID NO: 1034
  source 1..743: mol_type = other DNA

SEQ ID NO: 19136 - DNA, 737 bp, synthetic construct
  source 1..737: mol_type = other DNA
acagctctggggttgcacccaccccagaggcccacgtggcggctagtactccggtattgcggtacccttgtacgcctgttttatactcccttcccgtaacttagacgcacaaaaccaagttcaatagaagggggtacaaaccagtaccaccacgaacaagcacttctgtttccccggtgatgttgtatagactgcttgcgtggttgaaagcgacggatccgttatccgcttatgtacttcgagaagcccagtaccacctcggaatcttcgatgcgttgcgctcagcactcaaccccagagtgtagcttaggctgatgagtctggacatccctcaccggtgacggtggtccaggctgcgttggcggcctacctatggctaacgccatgggacgctagttgtgaacaaggtgtgaagagcctattgagctacataagaatcctccggcccctgaatgcggctaatcccaacctcggagcaggtggtcacaaaccagtgattggcctgtcgtaacgcgcaagtccgtggcggaaccgactactttgggtgtccgtgtttccttttattttattgtggctgcttatggtgacaatcacagattgttatcataaagcgaattggattggccatccggtgaaagtgagattcattatctatctgtttgctggattcgctccattgagtgtgtttactctaagtacaatttcaacagttatttcaatcaaacaattgtatcata

SEQ ID NO: 19137 - DNA, 739 bp, synthetic construct
  source 1..739: mol_type = other DNA
gctctggggttgtacccaccccagaggcccacgtggcggctagcactccggtattacggtacccttgtgcgcctgttttatactcccctcccgcaacttagaagcacgaaaccaagttcaatagaagggggtacaaaccagtaccactacgaacaagcacttctgtttccccggtgacattgcatagactgctcacgcggttgaaagtgatcgatccgttacccgcttgtgtacttcgaaaagcctagtatcgccttggaatcttcgacgcgttgcgctcagcacccgaccccggggtgtagcttaggctgatgagtctggacattcctcaccggtgacggtggtccaggctgcgttggcggcctacctatggctaacgccataggacgttagatgtgaacaaggtgtgaagagcctattgagctacataagagtcctccggcccctgaatgcggctaatcctaaccacggagcaggcggtcgcgaaccagtgactggcttgtcgtaacgcgcaagtctgtggcggaaccgactactttgggtgtccgtgtttcctgttatttttatcatggctgcttatggtgacaatcagagattgttatcataaagcgaattggattggccatccggtgagtgttgtgtcaggtatacaactgtttgttggaaccactgtgttagctttacttctcatttaaccaattaatcaaaaacaatacgaggataaaacaacaatactaca

SEQ ID NO: 19138 - DNA, 740 bp, synthetic construct
  source 1..740: mol_type = other DNA
ttaaaacagcctgtgggttgttcccacccacagggcccattgggcgctagcacactggtatcacggtacccttgtgcgcctgttttatccacccctccccatcgtaacctagaagcatgactccaacggtcaatagacagctcagtaaaccaattgagccttgaccaagcacttctgttaccccggactgagtatcaataggctgctcacgcggccgaaggagaaaatgttcgttacccggccaattacttcgagaaacctagtaccaccatgaaggttgcgcagtgtttcgcttagcacaaccccagtgtagatcaggccgatgagtcaccgcattccccacggtgaccgtggcggtggctgcgctggcggcctgcccatggggcaacccatgggacgcttcaatactgacatggtgtgaagagtctattgagctaattggatgtctccggcccctgaatacggctaatcctaatcgcggagcagatacccacgcaccagtgggcagtctgtcgtaacgggcaactctgcagcggaaccgactactttgggtgtccgtgtttccttttattcttgtactggctgcttatggtgacaattgagagattgttaccatatagctattggattggccatccagtgtcaaacagagcgattgtctacttgttcattggttttataccattgagttacaaggttctagccactcttaacttcattttaacactcaatacatcaaa

SEQ ID NO: 19139 - DNA, 743 bp, synthetic construct
  source 1..743: mol_type = other DNA
ttaaaacagtctgtgggttgttcccactcacagggcccacgtggcgctagcacaccggtatttcggtacccttgtgcgcctgttttatgcacccctagccccacgtaacttagaagggaagcaacaacgatcaacagcaggtgtggcattccagccacatcgtgatcaagcacttctgtctccccggactgagtatcaataagctgctcgcgcggctgaaggagaaaacgttcgttacccggccaattacttcgagaaacccagtaccaccatggaggttgcgcagtgtttcgttccgcacaaccccagtgtagatcaggtcgatgagtcaccgcatcccccacgggcgaccgtggcggtggctgcgttggcggcctgcccatggggtaacccatgggacgcttcaatactgacatggtgtgaagagtctattgagctaattggtagtcctccggcccctgaatgcggctaatcctaactgcggagcagatacccataaaccaatgggcagtctgtcgtaacgggtaacttcgcagcggaaccgactactttgggtgtccgtgtttccttttattcttatattggctgcttatggtgacaattgaaagattgttgccatatttctattggattggccatccggtgacaaatatagcaattgtgtacctatttgttggttttgtaccactgaattacaaagttttaaaaaccctcgatttcattgtcgaacttaacacagcaaa

SEQ ID NO: 19140 - DNA, 742 bp, synthetic construct
  source 1..742: mol_type = other DNA
acagctctggggttgtacccaccccagaggcccacgtggcggctagcactccggtattacggtacccttgtgcgcctgttttatactcccctcccgcaacttagaagcacgaaaccaagttcaatagaagggggtacaaaccagtaccactacgaacaagcacttctgtttccccggtgacattgcatagactgctcacgcggttgaaagtgatcgatccgttacccgcttgtgtacttcgaaaagcctagtatcgccttggaatcttcgacgcgttgcgctcagcacccgaccccggggtgtagcttaggctgatgagtctggacattcctcaccggtgacggtggtccaggctgcgttggcggcctacctatggctaacgccataggacgctagatgtgaacaaggtgtgaagagcctattgagctacataagagtcctccggcccctgaatgcggctaatcctaaccacggagcaggcggtcgcaaaccagtgactggcttgtcgtaacgcgcaagtctgtggcggaaccgactactttgggtgtccgtgtttcctgttatttttatcatggctgcttatggtgacaatcagagattgttatcataaagcgaattggattggccatccggtgagtgttgtgtcaggtatacaactgtttgttggaaccactgtgttagctttacttctcatttaaccaattaatcaaaaacaatacgaggataaaacaacaatactaca

SEQ ID NO: 19141 - DNA, 741 bp, synthetic construct
  source 1..741: mol_type = other DNA
ttaaaacagcctgtgggttgttcccacccacagggcccacagggcgcaagcacactggtatcacggtacctttgtgcgcctgttttatctaccccccccaaagtaacgtagaagcctgaacaaagtggtcactagtaagctcggtaagccaaccgaggttagaccaagcacttctgtctccccggactgagtatcaataggctgctaacgcggctgaaggagaaaacgttcgttacccgaccagctacttcgagaaacctagtaccaccatggatgttgcgcggcgtttcgttcaacacaaccccagtgtagatcaggtcgatgagtcaccgctctccccacgggcgaccgtggcggtggctgcgttggcggcctgcccatggggcaacccatgggacgcttcaatactgacatggtgcgaagagtctattgagctagctggtagtcctccggcccctgaatgcggctaatcctaactgtggagcaggcgctcgcaaaccagcgagtaacctgtcgtaacgggcaactccgcagcggaaccgactactttgggtgtccgtgtttccttttattcctaccttggctgcttatggtgacaattgagagattgttaccatatagctattggattggccatccggtaagcaacagagcagtaatttacttgttcgttggtttcataccacgtgactttaaagtcttacaaacactaaacctcatattatcatttaatagtgcaaa

SEQ ID NO: 19142 - DNA, 741 bp, synthetic construct
  source 1..741: mol_type = other DNA
cagctctggggttgtacccaccccagaggcccacgtggcggctagcactccggtattacggtacccttgtgcgcctgttttatactcccctcccgcaacttagaagcacgaaaccaagttcaatagaagggggtacaaaccagtaccactacgaacaagcacttctgtttccccggtgacattgcatagactgcttacgcggttgaaagtgatcgatccgttacccgcttgtgtacttcgaaaagcctagtatcgccttggaatcttcgacgcgttgcgctcagcacccgaccccggggtgtagcttaggctgatgagtctggacattcctcaccggtgacggtggtccaggctgcgttggcggcctacctatggctaacgccataggacgctagatgtgaacaaggtgtgaagagcctattgagctacataagagtcctccggcccctgaatgcggctaatcctaaccacggagcaggcggtcgcgaaccagtgactggcttgtcgtaacgcgcaagtctgtggcggaaccgactactttgggtgtccgtgtttcctgttatttttatcatggctgcttatggtgacaatcagagattgttatcataaagcgaattggattggccatccggtgagtgttgtgtcaggtatacaaccgtttgttggaaccactgtgttagctttacttctcatttaaccaattaataaaaaacaatactaggataaaacaacaatactaca

SEQ ID NO: 19143 - DNA, 741 bp, synthetic construct
  source 1..741: mol_type = other DNA
taagtttcaattgggggttgtacccacccacagggcccattgggcgctagcactctggtatcacggtacccttgtgcgcctgttttataacccccccccaattgaaacttagaagttgcacgcactgatcaatagcaaacatagcaacccagctatgtcaagatcaagcactcctgtctccccggaccgagtatcaatagactgctcacgcggtcgaaggagaaagtgttcgttacccggctaactacttcgaaaaacctagtaacaccatgaaagttgcgaagtgtttcgctccgcacttccccagtgtagatcaggccgatgagtcaccgagtaccccacgggcgaccgtgtcggtggctgcgttggcggcctgcctacggggcgacccgtaggacgcttcaatacagacatggtgcgaagagtctattgagctagttagtagtcctccggcccctgaatgcggctaatcctaactgcggagcacgtgctctcaagccagagagtggcgtgtcgtaacgggcaactctgcagcggaaccgactactttgggtgtccgtgtttcctttatttcttactctggctgcttatggtgacaattgagagattgttaccatatagctattggattggccatccggtgagcaacagagcgatcatataccaatttgttggcttcatcccacttgacctaaaagccctacagacgctaaattttattatcattttaaacaatacaaa

SEQ ID NO: 19144 - DNA, 743 bp, synthetic construct
  source 1..743: mol_type = other DNA
ttaaaacagctctggggttgtccccaccccagaggcccacgtggcggctagtactctggtatcgcggtacctttgtacgcctgttttatacccctaccccatgcaactttagaagcagttcaacaagttcaatagggggggtacaaaccagtaccaccacgaacaagcacttctgtaaccccggtgatcttgtataagctgtgcccacggccgaaagcgagtgatccgttacccgcttaggtacttcgagaagcctagtatcaccttggaatcatcgatgcgttgcgctcagcattctatcccgaatgtagcttaggctgatgagtctgggcgttccccaccggtgacggtggcccaggctgcgttggcggcctacccatggctaacgccatgggacgctaggtgtgaacaaggtgtgaagagcctattgagctacttaagagtcctccggcccctgaatgcggctaatcccaaccacggagcaggtgccttcgacccagagggtggcctgtcgtaacgcgcaagtctgtggcggaaccgactactttgggtgtccgtgtttccttttatcttttatatggctgcttatggtgacaatcatagattgttatcataaagcgacttggtttggccaaccggtaaatcacacgcgtattatctacttgtttgttggatttattccactcgcccaatttactccctgcataatatccattgtttgtcaacaagatattgctatcaca

SEQ ID NO: 19145 - DNA, 740 bp, synthetic construct
  source 1..740: mol_type = other DNA
aaaacagctctggggttgttcccaccccagaggcccacgtggcggctagtacactggtatcacggtacctttgtacgcctgttttatactccctcccccgcaacttagaagcatacaattcaagctcaataggagggggtgcaagccagcgcctccgtgggcaagcactactgtttccccggtgaggccgcatagactgttcccacggttgaaagtgtccgatccgttatccgctcatgtacttcgagaagcctagtatcgctctggaatcttcgacgcgttgcgctcagcactcaaccccggagtgtagcttgggccgatgagtctggacagtccccactggcgacagtggtccaggctgcgctggcggcccacctgtggcccaaagccacgggacgctagttgtgaacagggtgtgaagagcctattgagctacatgagagtcctccggcccctgaatgcggctaatcctaaccatggagcaggcagctgcaacccagcagccagcctgtcgtaacgcgcaagtccgtggcggaaccgactactttgggtgtccgtgtttccttttattcttgaatggctgcttatggtgacaatcatagattgttatcataaagcgagttggattggccatccagtgtgaatcagattaattactcccttgtttgttggatccactcccgaaacgttttactccttaacttattgaaattgtttgaagacaggatttcagtgtcaca

SEQ ID NO: 19146 - DNA, 746 bp, synthetic construct; identical to SEQ ID NO: 1133
  source 1..746: mol_type = other DNA

SEQ ID NO: 19147 - DNA, 744 bp, synthetic construct
  source 1..744: mol_type = other DNA
ttaaaaccagctgtgggttgttcccaccccagaggcccacgcggcggctagcactccggtattacggtacccttgtgcgcctgttttatactcccttcccccgcaatttagaagcatgaaaccaggttcaatagtaaggggtacaaaccagtaccactatgaacaagcacttctgtctccccggtgatattgcatagactgctcacgcggttgaaagcgattgatccgtcatccgcttgtgtacttcgagaagcctagtatcaccttcggaacttcgacgcgttgcgctcagcacccgaccccggggtgtagcttgggctgatgagtctggacgctcctcaccggcgacggtggtccaggctgcgttggcggcctacccgtggttaccaccgcgggacgctacaagtgaacaaggtgtgaagagcctattgagctacacaagagtcctccggcccctgaatgcggctaatcccaaccacggagcaggcggtcacgaacagtggctggcttgtcgtaacgcgcaagtctgtggcggaaccgactactttgggtgtccgtgtttcctgttatttttatcatggctgcttatggtgacaatcgttgattgttatcataaagcgaattggattggccgtccggaaagtgttgtgtcgcatatactgtttagtgaagctactacattaattcaatctctcactcggttagtcaaacagagctcagatagagtaaaacatcattaacgcg

SEQ ID NO: 19148 - DNA, 742 bp, synthetic construct
  source 1..742: mol_type = other DNA
tttaaaacagcctgtgggttgttcccacccacagggcccattgggcgctagcacactggtattacggtacctttgtgcgcctgttttatataccctccccgaatgtaacttagaagcttcacttaaatggtcaatagaaggtccagcacaccagttggattccgaccaagcacttctgttaccccggactgagtatcaataggccgttcgcacggctgaaggagaaaacgttcgttacccggccaattacttcgagaaacctagtaacaccatgaaagttgcgcagtgtttcgctccgcacgaccccggtgtagatcaggtcgatgagccaccgcgttccccacgggcgaccgtggcggtggctgcgctggcggcctgcccatggggcaacccatgggacgcttcaatactgacatggtgcgaagagtctattgagctaattggtagtcctccggcccctgaatgcggctaatcctaactgcggagcaggcaccctcaagccagagggcagtctgtcgtaacgggcaactctgcagcggaaccgactactttgggtgccgtgtttccttttattcttgaactggctgcttagggtgacattcgaaagattgttaccatatagctattggattggccatccagtgacaaacagagcgattatatatttgtttgttggttttgttccattaagctacaaggttttaaatacacttaaatttatcttactactcaactcagcaaa

SEQ ID NO: 19149 - DNA, 742 bp, synthetic construct
  source 1..742: mol_type = other DNA
ttaagacagctctggggttgttcccaccccagaggcccacgtggcggctagtacactggtatcacggtacctttgtacgcctgttttatactccctcccccgcaacttagaagcatacaattcaagctcaataggagggggtgcaagccagcgcctccgtgggcaagcactactgtttccccggtgaggccgcatagactgttcccacggttgaaagtgtccgatccgttatccgctcatgtacttcgagaagcctagtatcgctctggaatcttcgacgcgttgcgctcagcactcaaccccggagtgtagcttgggccgatgagtctggacagtccccactggcgacagtggtccaggctgcgctggcggcccacctgtggcccaaagccacgggacgctagttgtgaacagggtgtgaagagcctattgagctacatgagagtcctccggcccctgaatgcggctaatcctaaccatggagcaggcagctgcaacccagcagccagcctgtcgtaacgcgcaagtccgtggcggaaccgactactttgggtgtccgtgtttccttttattcttgaatggctgcttatggtgacaatcatagattgttatcataaagcgagttggattggccatccagtgtgaatcagattaattactcccttgcttgttggatccgctcccgaaacgttttactccttaacttattgaaattgtttgaagacaggatttcagtgtcaca

SEQ ID NO: 19150 - DNA, 742 bp, synthetic construct
  source 1..742: mol_type = other DNA
ttaaaacagctctggggttgttcccaccccagaggcccacgtggcggctagtacactggtatcacggtacctttgtacgcctgttttatactccctcccccgcaacttagaagcatacaattcaagctcaataggagggggtgcaagccagcgcctccgtgggcaagcactactgtttccccggtgaggccgcatagactgttcccacggttgaaagtgtccgatccgttatccgctcatgtacttcgagaagcctagtatcgctctggaatcttcgacgcgttgcgctcagcactcaaccccggagtgtagcttgggccgatgagtctggacagtccccactggcgacagtggtccaggctgcgctggcggcccacctgtggcccaaagccacgggacgctagttgtgaacagggtgtgaagagcctattgagctacatgagagtcctccggcccctgaatgcggctaatcctaaccatggagcaggcagctgcaacccagcagccagcctgtcgtaacgcgcaagtccgtggcggaaccgactactttgggtgtccgtgtttccttttattcttgaatggctgcttatggtgacaatcatagattgttatcataaagcgagttggattggccatccagtgtgaatcagattaattactcccttgtttgttggatccactcccgaaacgttttactccttaacttattgaaattgtttgaagacaggatttcagtgtcaca

SEQ ID NO: 19151 - DNA, 742 bp, synthetic construct
  source 1..742: mol_type = other DNA
ttaaaacagctctggggttgttcccaccccagaggcccacgtggcggctagtacactggtatcacggtacctttgtacgcctgttttatactccctcccccgcaacttagaagcatacaattcaagctcaataggagggggtgcaaaccagcgcctccgtgggcaagcactactgtttccccggtgaggccgcatagactgttcccacggttgaaagtgtccgatccgttatccgctcatgtacttcgagaagcctagtatcgctctggaatcttcgacgcgttgcgctcagcactcaaccccggagtgtagcttgggccgatgagtctggacagtccccactggcgacagtggtccaggctgcgctggcggcccacctgtggcccaaagccacgggacgctagttgtgaacagggtgtgaagagcctattgagctacatgagagtcctccggcccctgaatgcggctaatcctaaccatggagcaggcagctgcaacccagcagccagcctgtcgtaacgcgcaagtccgtggcggaaccgactactttgggtgtccgtgtttccttttattcttgaatggctgcttatggtgacaatcacagattgttatcataaagcgagttggattggccatccagtgtgaatcagattaattactcccttgtttgttggatccactcccgaaacgttttactccttaacttattgaaattgtttgaagacaggatttcagtgtcaca

SEQ ID NO: 19152 - DNA, 739 bp, synthetic construct
  source 1..739: mol_type = other DNA
aaacagctctggggttgttcccaccccagaggcccacgtggcggctagtacactggtatcacggtacctttgtacgcctgttttatactccctcccccgcaacttagaagcatacaattcaagctcaataggagggggtgcaagccagcgcctccgtgggcaagcactactgtttccccggtgaggccgcatagactgttcccacggttgaaagtgtccgatccgttatccgctcatgtacttcgagaagcctagtatcgctctggaatcttcgacgcgttgcgctcagcactcaaccccggagtgtagcttgggccgatgagtctggacagtccccactggcgacagtggtccaggctgcgctggcggcccacctgtggcccaaagccacgggacgctagttgtgaacagggtgtgaagagcctattgagctacatgagagtcctccggcccctgaatgcggctaatcctaaccatggagcaggcagctgcaacccagcagccagcctgtcgtaacgcgcaagtccgtggcggaaccgactactttgggtgtccgtgtttccttttattcttgaatggctgcttatggtgacaatcatagattgttaccataaagcgagttggattggccatccagtgtgaatcagattaattactcccttgtttgttggatccactcccgaaacgttttactccttaacttattgaaattgtttgaagacaggatttcagtgtcaca

SEQ ID NO: 19153 - DNA, 742 bp, synthetic construct
  source 1..742: mol_type = other DNA
tttaaaacagcctgtgggttgttcccacccacagggcccattgggcgctagcacactggtattacggtacctttgtgcgcctgttttatataccctccccgaatgtaacttagaagcttcacttaaatggtcaatagaaggtccagcacaccagttggattccgaccaagcacttctgttaccccggactgagtatcaataggccgttcgcacggctgaaggagaaaacgttcgttacccggccaattacttcgagaaacctagtaacaccatgaaagttgcgcagtgtttcgctccgcacgaccccggtgtagatcaggtcgatgagccaccgcgttccccacgggcgaccgtggcggtggctgcgctggcggcctgcccatggggcaacccatgggacgcttcaatactgacatggtgcgaagagtctattgagctaattggtagtcctccggcccctgaatgcggctaatcctaactgcggagcaggcaccctcaagccagagggcagtctgtcgtaacgggcaactctgcagcggaaccgactactttgggtgccgtgtttccttttattcttgaactggctgcttagggtgacattcgaaagattgttaccatatagctattggattggccatctggtgacaaatagagcgattatatatttatttgttggttttgttccattaaactacagagtcttaaacacacttaaatttgtcttactactcaactcagcaag

SEQ ID NO: 19154 - DNA, 741 bp, synthetic construct
  source 1..741: mol_type = other DNA
taaaacagctctggggttgttcccaccccagaggcccacgtggcggctagtacactggtatcacggtacctttgtacgcctgttttatactccctcccccgcaacttagaagcatacaactcaagctcaataggagggggtgcaagccagcgcctccgtgggcaagcactactgtttccccggtgaggccgcatagactgttcccacggttgaaagtgtccgatccgttatccgctcatgtacttcgagaagcctagtatcgctctggaatcttcgacgcgttgcgctcagcactcaaccccggagtgtagcttgggccgatgagtctggacagtccccactggcgacagtggtccaggctgcgctggcggcccacctgtggcccaaagccacgggacgctagttgtgaacagggtgtgaagagcctattgagctacatgagagtcctccggcccctgaatgcggctaatcctaaccatggagcaggcagctgcaacccagcagccagcctgtcgtaacgcgcaagtccgtggcggaaccgactactttgggtgtccgtgtttccttttattcttgaatggctgcttatggtgacaatcatagattgttatcataaagcgagttggattggccatccagtgtgaatcagattaattactcccttgtttgttggatccactcccgaaacgttttactccttaacttattgaaattgtttgaagacaggatttcagtgtcaca

SEQ ID NO: 19155 - DNA, 747 bp, synthetic construct
  source 1..747: mol_type = other DNA
ttaaaacagctctggggttgtacccaccccagaggcccacgtggcggctagcactccggtattacggtacccttgtgcgcctgttttatactcccctcccgcaacttagaagcacgaaaccaagttcaatagaagggggtacaaaccagtaccactacgaacaagcacttctgtttccccggtgacattgcatagactgctcacgcggttgaaagtgatcgatccgttacccgcttgtgtacttcgaaaagcctagtatcgccttggaatcttcgacgcgttgcgctcagcacccgaccccggggtgtagcttaggctgatgagtctggacattcctcaccggtgacggtggtccaggctgcgttggcggcctacctatggctaacgccataggacgctagatgtgaacaaggtgtgaagagcctattgagctacataagagtcctccggcccctgaatgcggctaatcctaaccacggagcaggcggtcgcgaaccagtgactggcttgtcgtaacgcgcaagtctgtggcggaaccgactactttgggtgtccgtgtttcctgttatttttatcatggctgcttatggtgacaatcagagattgttatcataaagcgaattggattggccatccggtgagtgttgtgtcaggtatacaactgtttgttggaaccactgtgttagctttacttctcatttaaccaattaatcaaaaacaatacgaggataaaacaacaatactaca

SEQ ID NO: 19156 - DNA, 743 bp, synthetic construct
  source 1..743: mol_type = other DNA
tttaaaacagcctgtgggttgttcccacccacagggcctattgggcgccagcacactggtatcacggtacctttgtgcgcctgttttaaacaccctccccgaatgtaacttagaagctttacctacatggtcaatagaaggtccagcacaccagttggactccgaccaagtacttctgttaccccggactgagtatccttatgctgtccacacggctgaaggagaaaacgttcgctacccggccaattacttcgagaaacctagtaacaccatggaagttgcccaccgtttcgctccgcacgaccccggtgtacatcaggtcgatgagccaccgcgttccccacgggcgaccgtggcggtggctgcgttggcggcctgcccatggggtaacccatgggacgcttcaatgctgacatggcgcgaagagtctattgagctaattgttagtcctccggcccctgaatgcggctaatcctaactgcggagcaggcaccctcaagccagagggcagcctgtcgtaacgggcaactctgcagcggaaccgactactttgggtgtccgtgtttccttttattcttgaactggctgcttatggtgacaataaaaggattgttaccatatagctattggattggccatccagtgacgaatagagcaattatatatctgtttgttggttttgttccattaaactataaagttttaaacacactcaaatttgtcttactactcaactcagcaaa

SEQ ID NO: 19157 - DNA, 734 bp, synthetic construct
  source 1..734: mol_type = other DNA
ttaaaacagctctggggttgcacccaccccagaggcccacgtggcggctagtactccggtattgcggtacccttgtacgcctgttttatactcccttcccgtaacttagacgcacaaaaccaagttcaatagaagggggtgcaaaccagtaccaccacgaacaagcacttctgtttccccggtgatgttgtatagactgcttgcgtggttgaaagcgacggatccgttatccgcttatgtacttcgagaagcccagtaccacctcggaatcttcgatgcgttgcgctcagcactcaaccccagagtgtagcttaggctgatgagtctggacatccctcaccggcgacggtggtccaggctgcgttggcggcctacctatggctaacgccatgggacgctagttgtgaacaaggtgtgaagagcctattgagctacataagaatcctccggcccctgaatgcggctaatcccaacctcggagcaggtgatcacaaaccagtgattggcctgtcgtaacgcgcaagtccgtggcggaaccgactactttgggtgtccgtgtttccttttattttattgtggctgcttatggtgacaatcacagattgttatcataaagcgaattggattggccatccggtgaaagtgagattcattatttatctgtttcgctccattgagtgtgtttattttaagtacaatttcaacagttattttaaccagacaattgtatcata

SEQ ID NO: 19158 - DNA, 746 bp, synthetic construct
  source 1..746: mol_type = other DNA
ttaaaacagctctggggttgttcccaccccagaggcccacgtggcggccagtacaccggtaccacggtacccttgtacgcctgttttatactcccctccccgtaaactagaagcacgaaacacaagttcaatagaagggggtacaaaccagtaccaccacgaacaagcacttctgttcccccggtgaggtcacatagactgtccccacggtcaaaagtgactgatccgttatccgctcacgtacttcggaaagcctagtaccaccttggaatctacgatgcgttgcgctcagcactcgaccccggagtgtagcttaggctgatgagtctggacgttccccactggtgacagtggtccaggctgcgttggcggcctacctgtggtccacaaccacaggacgctagtagtgaacaagatgtgaagagcccactgagctacctgagaatcctccggcccctgaatgcggctaatcccaaccacggagcaggtaatcgcaaaccagcggtcagcctgtcgtaacgcgtaagtctgtggcggaaccgactactttgggtgtccgtgtttccttttatttttatggtggctgcttatggtgacaatcatagattgttatcataaagcaaattggattggccatccggagtgagctaaactatctatttctctgagtgttggattcgtttcacccacattctgaacaatcagcctcattagtgttaccctgttaataagacgatatcatcacg

SEQ ID NO: 19159 - DNA, 703 bp, synthetic construct
  source 1..703: mol_type = other DNA
gtacaccggtatcacggtacccttgtacgcctgttttatactccctttcccctgcaacttagaagcaaataaaccaagttcaatagaaagggggtacaagccagtaccaccacgaacaagcacttctgtttccccggtgaggttgtataaactgtctccacggttgaaaacgactgatccgttacccgctcttgtacttcgagaagcctagtatcatcttggaatcttcgatgcgttgcgctcagcactcgaccccggagtgtagcttaggctgatgagtctggacgttccccaccggtgacggtggtccaggctgcgttggcggcctacctgtggtccaaagccacaggacgctagttgtgaacagggtgtgaagagcctattgagctacaagagagtcctccggcccctgaatgcggctaatcccaaccacggagcaggtggttgcaatccagcaactagcctgtcgtaacgcgcaagtctgtggcggaaccgactactttgggtgtccgtgtttccttttattcttacaatggctgcttatggtgacaatcatagattgttatcataaagcgaattggattggccatccggtgaaagtcagatcaactattcatttgtttgttggaaccactgtgttagctttacttctcatttaaccaattaatcaaaaacaatacgaggataaaacaacaatactaca

SEQ ID NO: 19160 - DNA, 753 bp, synthetic construct; identical to SEQ ID NO: 1212
  source 1..753: mol_type = other DNA

SEQ ID NO: 19161 - DNA, 753 bp, synthetic construct
  source 1..753: mol_type = other DNA
ttaaaacagctctggggttgttcccaccccagaggcccacgtggcggccagtacaccggtatcacggtacccttgtacgcctgttttatactccctctcccctgtaacttagaagcaaataaaccaagttcaatagaaagggggtacaaaccagtaccaccacgaacaaacacttctgtttccccggtgaggttgtataaactgtccccacggttgaaaacgactgatccgttacccgctcttgtacttcgagaagcctagtatcatcttggaatcttcgatgcgttgcgctcagcactcgaccccggagtgtagcttaggctgatgagtctggacgttccccaccggcgacggtggtccaggctgcgttggcggcctacctgtggcccaaagccacaggacgctagttgtgaacagggtgtgaagagcctattgagctacaagagagtcctccggcccctgaatgcggctaatcccaaccacggagcaggtggttgcaatccagcaactagcctgtcgtaacgcgcaagtctgtggcggaaccgactactttgggtgtccgtgtttccttttattcttacaatggctgcttatggtgacaatcatagattgttgtcataaagcgaattggattggccatccggtgaaagtcagatcaactatttatttgtttgttggagccattgtgttagctttacttctcatctaaccaattaatcaaaaacaatacgaggataaaacaacaacactaca

SEQ ID NO: 19162 - DNA, 747 bp, synthetic construct
  source 1..747: mol_type = other DNA
ttaaaacagctctggggttgtacccaccccagaggcccacgtggcggctagcactccggtattacggtacccttgtgcgcctgttttatactcccctcccgcaacttagaagcacgaaaccaagttcaatagaagggggtacaaaccagtaccactacgaacaagcacttctgtttccccggtgacattgcatagactgctcacgcggttgaaagtgatcgatccgttacccgcttatgtacttcgaaaagcctagtatcgccttggaatcttcgacgcgttgcgctcagcacccgaccccggggtgtagcttaggctgatgagtctggacattcctcaccggtgacggtggtccaggctgcgttggcggcctacctatggctaacgccataggacgttagatgtgaacaaggtgtgaagagcctattgagctacataagagtcctccggcccctgaatgcggctaatcctaaccacggagcaggcggtcgcgaaccagtgactggcttgtcgtaacgcgcaagtctgtggcggaaccgactactttgggtgtccgtgtttcctgttatttttatcatggctgcttatggtgacaatcagagattgttatcataaagcgaattggattggccatccggtgagtgttgtgtcaggtatacaactgtttgttggaaccactgtgttagctttacttctcatttaaccaattaatcaaaaacaatacgaggataaaacaacaatactaca

SEQ ID NO: 19163 - DNA, 746 bp, synthetic construct
  source 1..746: mol_type = other DNA
ttaaaacagctctggggttgttcccaccccagaggcccacgtggcggccagtactctggtactacggtacctttgtacgcctgttttataccccctcccccatgcaaccttagaagcaattcacaaagttcaatagagggggtacaaaccagtaccaacacgaacaagcacttctgtttccccggtgatctcgtataggctgtacccacggctgaaaacaagtgatccgttatccgcttaggtacttcgagaagcctagtaccaccttgggatcttcgacgcgttgcactcagcactctaccccgagtgtagcttaggctgatgagcctgggcattccccaccggtgacggtggcccaggctgcgttggcggcctacccatggctaacgccatgggacgctagttgtgaacaaggtgtgaagagcctattgagctacctaagagtcctccggcccctgaatgcggctaatcccaaccacggagcaagtgccttcaatccagagggtggcttgtcgtaacgcgcaagtctgtggcggaaccgactactttgggtgtccgtgtttccttttatttttattacggctgcttatggtgacaatcattgattgccatcataaagcgagttggattggccatccggtgaaagttgagtatctcgtccacttatctgttggatttcccctattaactcaactcacgcctgttttgatatctatagtgttattgatttggaaaaagctatcata

SEQ ID NO: 19164 - DNA, 746 bp, synthetic construct
  source 1..746: mol_type = other DNA
ttaaaacagctctggggttgttcccaccccagaggcccacgtggcggccagtactctggtactacggtacccttgtacgcctgttttatactccctcccctacgcaaccttagaagcaactcacaaagttcaatagagggggtacaaaccagtaccaacacgaacaagcacttctgtttccccggtgatctcgtataggctgtacccacggctgaaagcaagtgatccgttatccgcttaggtacttcgagaagcctagtaccaccttgggatcttcgacgcgttgcactcagcactctaccccgagtgtagcttaggctgatgagcctgggcataccccaccggtgacggtggcccaggctgcgttggcggcctacccatggctaacgccatgggacgctagttgtgaacaaggtgtgaagagcctattgagctacctaagagtcctccggcccctgaatgcggctaatcccaaccacggagcaagtaccttcaatccagggggtggcttgtcgtaacgcgcaagtctgtggcggaaccgactactttgggtgtccgtgtttccttttatttttattacggctgcttatggtgacaatcattgattgccatcataaagcgagttggattggccatccggtgaaagttgagtatctcgtccacttatctgctggatttcctccattaactcaactcacgcctgttttgatatctatagtgttattgatttggacaaagctatcata

SEQ ID NO: 19165 - DNA, 746 bp, synthetic construct
  source 1..746: mol_type = other DNA
ttaaaacagctctggggttgttcccaccccagaggcccacgtggcggccagtactctggtactacggtacccttgtacgcctgttttatactccctcccccaagcaaccttagaagcaattcacaaagttcaatagagggggtacaaaccagtaccaccacgaacaagcacttctgttcccccggtgatctcgtataggctgtacccacggctgaaaacaagtgatccgttacccgcttaggtacttcgagaagcctagtatcaccttgggatcttcgacgcgttgcactcagcactctaccccgagtgtagcttaggctgatgagtctgggcattccccaccggtgacggtggcccaggctgcgttggcggcctacccatggctaacgccatgggacgctagttgtgaacaaggtgtgaagagcctattgagctacctaagagtcctccggcccctgaatgcggctaatcccaaccacggagcaagtgccttcaatccagagggtggcttgtcgtaacgcgcaagtctgtggcggaaccgactactttgggtgtccgtgtttccgtttatttttactacggctgcttatggtgacaatcattgattgccatcataaagcgagttggattggccatccggtgaaagttaagtatttcgtccacttgtctgttggatttactccattgactcaactcacacctggttcgatatctatagtgttattgattgggaaaaagctatcagt

SEQ ID NO: 19166 - DNA, 746 bp, synthetic construct
  source 1..746: mol_type = other DNA
ttaaaacagctctggggttgttcccaccccagaggcccacgtggcggccagtactctggtactacggtacctttgtacgcctgttttataccccctcccccatgcaaccttagaagcaattcacaaagttcaatagagggggtacaaaccagtaccaccacgaacaagcacttctgtttccccggtgatcttgtataggctgtacccacggctgaaaacgagtgatccgttatccgcttaggtacttcgagaagcctagtatcaccttgggatcctcgacgcgttgcactcagcactctaccccgagtgtagcttaggctgatgagcctgggcattccccaccggtgacggtggcccaggctgcgttggcggcctacccatggctaacgccatgggacgctagttgtgaacaaggtgtgaagagcctattgagctacctaagagtcctccggcccctgaatgcggctaatcccaaccacggagcaagtgccttcaatccagagggtggcttgtcgtaacgcgcaagtctgtggcggaaccgactactttgggtgtccgtgtttccttttatttttattacggctgcttatggtgacaatcattgattgccatcatagagcgagttggattggccatccggtgaaagtcaagtatctcgtccactcatctgttggatttcctccattaacccaactcacgcctgttttgatatctatagtgttattgatttggaaaaagctatcata

SEQ ID NO: 19167 - DNA, 746 bp, synthetic construct
  source 1..746: mol_type = other DNA
ttaaaacagctctggggttgttcccaccccagaggcccacgtggcggccagtactctggtactacggtacctttgtacgcctgttttatactccctcccccatgcaaccttagaagcaattcacaaagttcaatagagggggtacaaaccagtaccaccacgaacaagcacttctgtttccccggtgatctcgtataggctgtacccacggctgaaaacaagtgatccgttatccgcttaggtacttcgagaagcctagtatcaccttgggatcttcgacgcgttgcactcagcactctaccccgagtgtagcttaggctgatgagtctgggcattccccaccggtgacggtggcccaggctgcgttggcggcctacccatggctaacgccatgggacgctagttgtgaacaaggtgtgaagagcctattgagctacctaagagtcctccggcccctgaatgcggctaatcccaaccacggagcaagtgccttcaatccagagggtggcttgtcgtaacgcgcaagtctgtggcggaaccgactactttgggtgtccgtgtttccttttatttttattacggctgcttatggtgacaatcattgattgccatcataaagcgagttggattggccatccggtgaaagttaagtatctcgtccacttatctgttggatttgctccattaactcaactcacgcctgattcgatatctatagtgttattgatttggaaaaagctatcata

SEQ ID NO: 19168 - DNA, 702 bp, synthetic construct
  source 1..702: mol_type = other DNA
gtacaccggtatcacggtacccttgtacgcctgttttatactccctttcccctgtaacttagaagcaaacaaaccaagttcaatagaagggggtacaaaccagtaccaccacgaacaagcacttctgtttccccggtgaggttgtataaactgtccccacggttgaaaacgactgatccgttacccgctcttgtacttcgagaagcctagtatcatcctggaatcttcgatgcgttgcgctcagcactcggccccggagtgtagcttaggctgatgagtctggacgttccccaccggcgacggtggtccaggctgcgttggcggcctacctgtggcccaaagccacaggacgctagttgtgaacagggtgtgaagagcctattgagctacaagagagtcctccggcccctgaatgcggctaatcccaaccacggagcaggtggttgcaatccagcaactagcctgtcgtaacgcgcaagtctgtggcggaaccgactactttgggtgtccgtgtttccttttattcttacaatggctgcttatggtgacaatcatagattgttatcataaagcgaattggattggccatccggtgaaagtcagatcagctatttatttgtttgttggaaccactgtgttagcttcacttctcatttaaccaattaattaaaaacagtacgaggattaaacaacaatactaca

SEQ ID NO: 19169 - DNA, 740 bp, synthetic construct
  source 1..740: mol_type = other DNA
taaaacagcctgtgggttgatcccacccacagggcccactgggcgccagcacactggtatcacggtacctttgtgcgcctgttttatccaccccgccccacgtaacttagaagtccaactcaaacggtcggtaggtggtccagtatgccaactgggccttgaccaagcacttctgttaccccggaccgagtatcaataggctgctcgcgcggctgaaggagaaaaagttcgttacccggccaattacttcgagaaacccagtaccgccatgaatgttgcgaggtgtttcgctcagcacacccccagtgtagatcaggtcgatgagtcaccgcattccccacgggcgaccgtggcggtggctgcgttggcggcctgcccatggggcaacccatgggacgcttcaacactgacatggtgcgaagagtctattgagctaattggtagtcctccggcccctgaatgcggctaatcccaactgcggagcagatgcccgcacgccagcgggtattctgtcgtaacgggtaactctgcagcggaaccgactactttgggtgtccgtgtttcctttttatcttttattggctgcatatggtgacaattgagagattgttaccatatagctattggattggccatccagtgacaaacagagcaattatttatttatttgttggttttgtaccgctgaactacaaagcactaaatactctcagttttataatatcacttaattcaataaa

SEQ ID NO: 19170 - DNA, 712 bp, synthetic construct
  source 1..712: mol_type = other DNA
ttaaaacagctctggggttgcacccaccccagaggcccacgtggcggctagtactccggtattgcggtacccttgtacgcctgttttatactcccttcccgtaacttagacgcacaaaaccaagttcaatagaagggggtacaaaccagtaccaccacgaacaagcacttctgtttccccggtgacgttgtatagactgcttgcgtggttgaaagcgacggatccgttatccgcttatgtacttcgagaagcccagtaccacctcggaatcttcgatgcgttgcgctcagcactcaaccccagagtgtagcttaggctgatgagtctggacatccctcaccggcgacggtggtccaggctgcgttggcggcctacctatggctaatgccatgggacgctagttgtgaacaaggtgtgaagagcctattgagctacataagaatcctccggcccctgaatgcggctaatcccaacctcggagcaggtggtcacaaaccagtgattggcctgtcgtaatgcgcaagtccgtggcggaaccgactactttgggtgtccgtgtttccttttattttattgtggctgcttatggtgacaatcacagattgttatcataaagcgaattggattggccatccggtgaaagtgagattcattatttatctgtttcgctccattgagtgtgtttatattttaatcggacaattgtatcata

SEQ ID NO: 19171 - DNA, 745 bp, synthetic construct
  source 1..745: mol_type = other DNA
ttaaaacagctctggggttgttcccaccccagaggcccacgtggcggccagtactctggtaccacggtacctttgtgcgcctgttttatactccctcccccatgcaaccttagaagcaattcacaaagttcaatagagggggtacaaaccagtatcaccacgaacaagcacttctgtctccccggtgatctcgtataggctgtgcccacggctgaaaacaagtgatccgttatccgcttaggtacttcgagaagcctagtatcaccctgggatctttgacgcgttgcgctcagcactctaccccgagtgtagcttaggctgatgagtctgggcattccccaccggtgacggtggcccaggctgcgttggcggcctacccatggctaacgccatgggacgctatttgtgaacaaggtgtgaagagcctattgagctacctaagagtcctccggcccctgaatgcggctaatcccaaccacggagcaagtgccttcaacccagagggtagcttgtcgtaacgcgcaagtctgtggcggaaccgactactttgggtgtccgtgtttccttttatttttattgtggctgcttatggtgacaatcattgattgccatcataaagcgagttggattggccatccggtgaaagtcaagaacctcgtccacttatcttttggatttgttccatcgactcaactcacgcctgatttgataaccatagtgttattgattagaaaaagctatcata

SEQ ID NO: 19172 - DNA, 744 bp, synthetic construct
  source 1..744: mol_type = other DNA
ttaaaacagctctggggttgttcccaccccagaggcccacgtggcggctagtactctggtatcgcggtacctttgtacgcctgttttatacccccaccccatgtaactttagaagcagttcaacaagttcaatagggggggtgcaaaccagcaccaccacgaacaagcacttctgtaaccccggtgaccttgtatatgctgtacccacggctgaaagcgagtgatccgttatccgcttaagtacttcgagaagcctagtaccaccttggaatcttcgatgcgttgcgctcagcactctatcccgagtgtagcttaggctgatgagtctgggcgttccccaccggcgacggtggcccaggctgcgttggcggcctacccatggctaacgccatgggacgctagatgtgaacaaggtgtgaagagcctattgagctacttaagagtcctccggcccctgaatgcggctaatcccaaccacggagcaggtgccttcaacccagagggcggcctgtcgtaacgcgcaagtctgtggcggaaccgactactttgggtgtccgtgtttccttttatctcttatatggctgcttatggtgacaatcatagattgttatcataaagcgacttggattggccatccggtgagatacaaacacatcacttacttgtttgttggattcactccactctcccaatttactcctagcataatatccattgttttgttaattagacattactatcaca

SEQ ID NO: 19173 - DNA, 744 bp, synthetic construct
  source 1..744: mol_type = other DNA
ttaaaacagctctggggttgttcccaccccagaggcccacgtggcggctagtactctggtatcgcggtacctttgtacgcctgttttatacccccaccccatgtaactttagaagcagttcaacaagttcaatagggggggtgcaaaccagcaccaccacgaacaagcacttctgtaaccccggtgaccttgtatatgctgtacccacggctgaaagcgagtgatccgttatccgcttaagtacttcgagaagcctagtaccaccttagaatcttcgatgcgttgcgctcagcactctatcccgagtgtagcttaggctgatgagtctgggcgttccccaccggcgacggtggcccaggctgcgttggcggcctacccatggctaacgccatgggacgctagatgtgaacaaggtgtgaagagcctattgagctacttaagagtcctccggcccctgaatgcggctaatcccaaccacggagcaggtgtcttcaacccagagggcggcctgtcgtaacgcgcaagtctgtggcggaaccgactactttgggtgtccgtgtttccttttatcttttatatggctgcttatggtgacaatcatagattgttatcataaagcgacttggattggccatccggtaagatacaaacacatcacttacttgtttgttggattcactccactctctcaatttactcctagcataatatccattgttttgttaattagacattactatcaca

SEQ ID NO: 19174 - DNA, 744 bp, synthetic construct
  source 1..744: mol_type = other DNA
ttaaaacagctctggggttgttcccaccccagaggcccacgtggcggctagtactctggtatcgcggtacctttgtacgcctgttttatacccccaccccatgtaactttagaagcagttcaacaagttcaatagggggggtgcaaaccagcaccaccacgaacaagcacttctgtaaccccggtgaccttgtatatgctgtacccacggctgaaagcgagtgatccgttatccgcttaagtacttcgagaagcctagtaccaccttagaatcttcgatgcgttgcgctcagcactctatcccgagtgtagcttaggccgatgagtctgggcgttccccaccggcgacggtggcccaggctgcgttggcggcctacccatggctaacgccatgggacgctagatgtgaacaaggtgtgaagagcctattgagctacttaagagtcctccggcccctgaatgcggctaatcccaaccacggagcaggtgccttcaacccagagggtggcctgtcgtaacgcgcaagtctgtggcggaaccgactactttgggtgtccgtgtttccttttatcttttatatggctgcttatggtgacaatcatagattgttatcataaagcgacttggattggccatccggtaaaatacaaacacatcacttacttgtttgttggatttactccactcccccaatttactcctagcataatatccgttgttttgttaacaagacattactatcaca

SEQ ID NO: 19175 - DNA, 744 bp, synthetic construct
  source 1..744: mol_type = other DNA
ttaaaacagctctggggttgttcccaccccagaggcccacgtggcggctagtactctggtatcgcggtacctttgtacgcctgttttatacccccaccccatgtaactttagaagcagttcaacaagttcaatagggggggtgcaaaccagcaccaccacgaacaagcacttctgtaaccccggtaaccttgtataagctgtacccacggctgaaagcgagtgatccgttatccgcttaagtacttcgagaagcctagtatcaccttagaatcttcgatgcgttgcgctcagcactctatcccgagtgtagcttaggctgatgagtctgggcgttcctcaccggcgacggtggcccaggctgcgttggcggcctacccatggctaacgccatgggacgctagatgtgaacaaggtgtgaagagcctattgagctacttaagagtcctccggcccctgaatgcggctaatcccaaccacggagcaggtgccttcaacccagagggtggcctgtcgtaacgcgcaagtctgtggcggaaccgactactttgggtgtccgtgtttccttttatcttttatatggctgcttatggtgacaatcatagattgttatcataaagcgacttggattggccatccggtaaaatacaaacacatcatttacttgtttgttggatttactccgctctcccaatttactcctagcataatatccattgttttgttaacaagacattactatcaca

SEQ ID NO: 19176 - DNA, 744 bp, synthetic construct
  source 1..744: mol_type = other DNA
ttaaaacagctctggggttgttcccaccccagaggcccacgtggcggctagtactctggtatcgcggtacctttgtacgcctgttttatacccccaccccatgtaactttagaagcagttcaacaagttcaatagggggggtgcaaaccagcaccaccacgaacaagcacttctgtaaccccggtgaccttgtataagctgtacccacggctgaaagcgagtgatccgttatccgcttaagtacttcgagaagcctagtatcaccttagaatcttcgatgcgttgcgctcagcactctatcccgagtgtagcttaggctgatgagtctgggcgttcctcaccggcgacggtggcccaggctgcgttggcggcctacccatggctaatgccatgggacgctagatgtgaacaaggtgtgaagagcctattgagctacttaagagtcctccggcccctgaatgcggctaatcccaaccacggagcaggtgccttcaacccagagggtggcctgtcgtaacgcgcaagtctgtggcggaaccgactactttgggtgtccgtgtttccttttatcttttatatggctgcttatggtgacaatcatagattgttatcataaagcgacttggattggccatccggtaaaatacaaacacatcatttacttgtttgttggatttactccactctcccaatttactcctagcataatatccattgttttgttaacaagacattactatcaca

SEQ ID NO: 19177 - DNA, 744 bp, synthetic construct
  source 1..744: mol_type = other DNA
ttaaaacagctctggggttgttcccaccccagaggcccacgtggcggctagtactctggtatcgcggtacctttgtacgcctgttttatacccccaccccatgtaactttagaagcagttcaacaagttcaatagggggggtgcaaaccagcaccaccacgaacaagcacttctgtaaccccggtaaccttgtataagctgtacccacggctgaaagcgagtgatccgttatccgcttaagtacttcgagaagcctagtatcaccttagaatcttcgatgcgttgcgctcagcactctatcccgagtgtagcttaggctgatgagtctgggcgttcctcaccggcgacggtggcccaggctgcgttggcggcctacccatggctaacgccatgggacgctagatgtgaacaaggtgtgaagagcctattgagctacttaagagtcctccggcccctgaatgcggctaatcccaaccacggagcaggtgccttcaacccagagggtggcctgtcgtaacgcgcaagtctgtggcggaaccgactactttgggtgtccgtgtttccttttatcttttatatggctgcttatggtgacaatcatagattgttatcataaagcgacttggattggccatccggtaaaatacaaacacatcatttacttgtttgttggatttactccactctcccaatttactcctagcataatatccattgttttgttaacaagacattactatcaca

SEQ ID NO: 19178 - DNA, 737 bp, synthetic construct
  source 1..737: mol_type = other DNA
acagctctggggttgttcccaccccagaggcccacgtggcggctagtacactggtatcacggtacctttgtacgcctgttttatactccctcccccgcaacttagaagcatacaattcaagctcaataggagggggtgcaagccagcgcctccgtgggcaagcactactgtttccccggtgaggccgcatagactgttcccacggttgaaagtgtccgatccgttatccgctcatgtacttcgagaagcctagtatcgctctggaatcttcgacgcgttgcgctcagcactcaaccccggagtgtagcttgggccgatgagtctggacagtccccactggcgacagtggtccaggctgcgctggcggcccacctgtggcccaaagccacgggacgctagttgtgaacagggtgtgaagagcctattgagctacatgagagtcctccggcccctgaatgcggctaatcctaaccatggagcaggcagctgcaacccagcagccagcctgtcgtaacgcgcaagtccgtggcggaaccgactactttgggtgtccgtgtttccttttattcttgaatggctgcttatggtgacaatcatagattgttatcataaagcgagttggattggccatccagtgtgaatcagattaattactcccttgtttgttggatccactcccgaaacgttttactccttaacttattgaaattgtttgaagacaggatttcagtgtcaca

SEQ ID NO: 19179 - DNA, 737 bp, synthetic construct
  source 1..737: mol_type = other DNA
acagctctggggttgttcccaccccagaggcccacgtggcggctagtacactggtatcacggtacctttgtacgcctgttttatactccctcccccgcaacttagaagcatacaattcaagctcaataggagggggtgcaagccagcgcctccgtgggcaagcactactgttcccccggtgaggccgcatagactgttcccacggttgaaagtgtccgatccgttatccgctcatgtacttcgagaagcctagtatcgctctggaatcttcgacgcgttgcgctcagcactcaaccccggagtgtagcttgggccgatgagtctggacagtccccactggcgacagtggtccaggctgcgctggcggcccacctgtggcccaaagccacgggacgctagttgtgaacagggtgtgaagagcctattgagctacatgagagtcctccggcccctgaatgcggctaatcctaaccatggagcaggcagctgcaacccagcagccagcctgtcgtaacgcgcaagtccgtggcggaaccgactactttgggtgtccgtgtttccttttattcttgaatggctgcttatggtgacaatcatagattgttatcataaagcgagttggattggccatccagtgtgaatcagattaattactcccttgtttgttggatccactcccgaaacgttttactccttaacttattgaaattgtttgaagacaggatttcagtgtcaca

SEQ ID NO: 19180 - DNA, 736 bp, synthetic construct
  source 1..736: mol_type = other DNA
cagctctggggttgttcccaccccagaggcccacgtggcggctagtacactggtatcacggtacctttgtacgcctgttttatactccctcccccgcaacttagaagcatacaattcaagctcaataggagggggtgcaagccagcgcctccgtgggcaagcactactgtttccccggtgaggccgcatagactgttcccacggttgaaagtgtccgatccgttatccgctcatgtacttcgagaagcctagtatcgctctggaatcttcgacgcgttgcgctcagcactcaaccccggagtgtagcttgggccgatgagtctggacagtccccactggcgacagtggtccaggctgcgctggcggcccacctgtggcccaaagccacgggacgctagttgtgaacagggtgtgaagagcctattgagctacatgagagtcctccggcccctgaatgcggctaatcctaaccatggagcaggcagctgcaacccagcagccagtctgtcgtaacgcgcaagtccgtggcggaaccgactactttgggtgtccgtgtttccttttattcttgaatggctgcttatggtgacaatcatagattgttatcataaagcgagttggattggccatccagtgtgaatcagattaattactcccttgtttgttggatccactcccgaaacgttttactccttaacttattgaaattgtttgaagacaggatttcagtgtcaca

SEQ ID NO: 19181 - DNA, 750 bp, synthetic construct; identical to SEQ ID NO: 1205
  source 1..750: mol_type = other DNA

SEQ ID NO: 19182 - DNA, 745 bp, synthetic construct
  source 1..745: mol_type = other DNA
ttaaaacagctctggggttgttcccaccccagaggcccacgtggcggctagcactctggtatcacggtacctttgtgcgcctgttttatgtccccgcccccatgtaactttagaagcaatacacggtgttcattaggaggggcacaagccagtgttcctatgaacaagcacttctgtttccccggtgacctcgtataggctgtgcccacggctaaaaacgagcgatccgttacccgcttgggtacttcgagaagcctagtaccaccttggaatcttcgacgcgttgcgctcagcactctaccccgagtgtagcttaggctgatgagtctgggcattccccactggtgacagtggcccaggctgcgttggcggcctacccatggctcgcgccatgggacgctagatgtgaacaaggtgtgaagagcctattgagctacctaagagtcctccggcccctgaatgcggccaatcctaaccacggagcaagcgccttcaacccagggggtggcttgtcgtaacgcgcaagtctgtggcggaaccgactactttgggtgtccgtgtttccctttatttttactatggctgcttatggtgacaatcattgattgccatcataaagcgaattggattggccatccggtggaagttatatacatcatctatctatttgttggatttgcttcactaacacagttcacaatcaacttggtatatataataatagtgattagagaaaaataccata

SEQ ID NO: 19183 - DNA, 745 bp, synthetic construct
  source 1..745: mol_type = other DNA
ttaaaacagctctggggttgttcccaccccagaggcccacgtggcggctagcactctggtatcacggtacctttgtgcgcctgttttatgtccccgcccccatgtaactttagaagcaatacacggtgttcattaggaggggcacaagccagtgttcctatgaacaagcacttctgttcccccggtgacctcgtataggctgtgcccacggctaaaaacgagcgatccgttacccgcttgggtacttcgagaagcctagtaccaccttggaatcttcgacgcgttgcgctcagcactctaccccgagtgtagcttaggctgatgagtctgggcattccccactggtgacagtggcccaggctgcgttggcggcctacccatggctcgcgccatgggacgctagatgtgaacaaggtgtgaagagcctattgagctacctaagagtcctccggcccctgaatgcggccaatcctaaccacggagcaagcgccttcaacccagggggtggcttgtcgtaacgcgcaagtctgtggcggaaccgactactttgggtgtccgtgtttccctttatttttactatggctgcttatggtgacaatcattgattgccatcataaagcgaattggattggccatccggtggaagttatatacatcatctatctatttgttggatttgcttcactaacacagttcacaatcaacttggtatatataataatagtgattagagaaaaataccata

SEQ ID NO: 19184 - DNA, 745 bp, synthetic construct
  source 1..745: mol_type = other DNA
ttaaaacagctctggggttgttcccaccccagaggcccacgtggcggctagcactctggtatcacggtacctttgtgcgcctgttttatgtccccgcccccatgtaactttagaagcaatacacggtgttcattaggaggggcacaagccagtgttcctatgaacaagcacttctgtttccccggtgacctcgtataggctgtgcccacggctaaaaacgagcgatccgttacccgcttgggtacttcgagaagcctagtaccaccttggaatcttcgacgcgttgcgctcagcactctaccccgagtgtagcttaggctgatgagtctgggcattccccactggtgacagtggcccaggctgcgttggcggcctacccatggctcgcgccatgggacgctagatgtgaacaaggtgtgaagagcctattgagctacctaagagtcctccggcccctgaatgcggccaatcctaaccacggagcaagcgccttcaacccagggggtggcttgtcgtaacgcgcaagtctgtggcggaaccgactactttgggtgtccgtgtttccctttatttttactatggctgcttatggtgacaatcattgattgccatcataaagcgaattggattggccatccggtggaagttatatacatcacctatctatttgttggatttgcttcactaacacagttcacaatcaacttggtatatataataatagtgattagagaaaaataccata

SEQ ID NO: 19185 - DNA, 745 bp, synthetic construct
  source 1..745: mol_type = other DNA
ttaaaacagctctggggttgttcccaccccagaggcccacgtggcggctagcactctggtatcacggtacctttgtgcgcctgttttatgtccccgcccccatgtaactttagaagcaatacacggtgttcattaggaggggcacaagccagtgttcctatgaacaagcacttctgtttccccggtgaccacgtataggctgtgcccacggctaaaaacgtgcgatccgttacccgcttgggtacttcgagaagcctagtaccaccttggaatcttcgacgcgttgcgctcagcactctaccccgagtgtagcttaggctgatgagtctgggcattccccactggtgacagtggcccaggctgcgttggcggcctacccatggctcgcgccatgggacgctagatgtgaacaaggtgtgaagagtctattgagctacctaagagtcctccggcccctgaatgcggccaatcctaaccacggagcaagcgccttcaacccagggggtggcttgtcgtaacgcgcaagtctgtggcggaaccgactactttgggtgtccgtgtttccctttatttttattatggctgcttatggtgacaatcattgattgccatcataaagcgaattggattggccatccggtggaagttacatacatcatctatctatttgttggatttgcttctctaacacagttcacaatcgacttggtatatataataatagtgattagagaaaaataccata

SEQ ID NO: 19186 - DNA, 745 bp, synthetic construct
  source 1..745: mol_type = other DNA
ttaaaacagctctggggttgttcccaccccagaggcccacgtggcggctagcactctggtatcatggtacctttgtgcgcctgttttatgtccccgcccccatgtaactttagaagctatacacggtgttcattaggaggggcacaagccagtgttcctatgaacaagcacttctgtttccccggtgacctcgtataggctgtgcccacggctaaaaacgagcgatccgttacccgcttgggtacttcgagaagcctagtaccaccttggaatcttcgacgcgttgcgctcagcactctaccccgagtgtagcttaggctgatgagtttgggcattccccactggtgacagtggcccaggctgcgttggcggcctacccatggctcgcgccatgggacgctagatgtgaacaaggtgtgaagagcctattgagctacctaagagtcctccggcccctgaatgcggccaatcctaaccacggagcaagcgccttcaacccagggggtggcttgtcgtaacgcgcaagtctgtggcggaaccgactactttgggtgtccgtgtttccctttatttttattatggctgcttatggtgacaatcattgattgccatcataaagcgaattggattggccatccggtggaagttatatacatcatctatctatttgttggatttgcttcaccaacacagttcacaatcaacttggtatattcaataatagtgattagagaaaaataccata

SEQ ID NO: 19187 - DNA, 745 bp, synthetic construct
  source 1..745: mol_type = other DNA
ttaaaacagctctggggttgttcccaccccagaggcccacgtggcggctagcactctggtatcacggtacctttgtgcgcctgttttatgtccccgcccccatgtaactttagaagcaatacacggtgttcattaggaggggcacaagccagtgttcctatgaacaagcacttctgtttccccggtgacctcgtataggctgtgcccacggctaaaaacgagcgatccgttacccgcttgggtacttcgagaagcctagtaccaccttggaatcttcgacgcgttgcgctcagcactctaccccgagtgtagcttaggctgatgagtctgggcattccccactggtgacagtggcccaggctgcgttggcggcctacccatggctcgcgccatgggacgctagatgtgaacaaggtgtgaagagcctattgagctacctaagagtcctccggcccctgaatgcggccaatcctaaccacggagcaagcgccttcaacccagggggtggcttgtcgtaacgcgcaagtctgtggcggaaccgactactttgggtgtccgtgtttccctttatttttattatggctgcttatggtgacaatcattgattgccatcataaagcgaattggattggccatccggtggaagttatatacatcatctatctatttgttggatttgcttcactaacacagttcacaatcaacttggtatatataataatagtgattagagaaaaataccata

SEQ ID NO: 19188 - DNA, 745 bp, synthetic construct
  source 1..745: mol_type = other DNA
ttaaaacagctctggggttgtacccaccccagaggcccacgtggcggctagcactctggtatcacggtacctttgtgcgcctgttttatgtccccgcccccatgtaactttagaagcaatacacggtgttcattaggaggggcacaagccagtgttcctatgaacaagcacttctgtttccccggtgatctcgtataggctgtgcccacggctaaaaacgagcgatccgttacccgcttgggtacttcgagaagcctagtaccaccttggaatcttcgacgcgttgcgctcagcactctaccccgagtgtagcttaggctgatgagtctgggcattccccactggtgacagtggcccaggctgcgttggcggcctacccatggctcgcgccatgggacgctagatgtgaacaaggtgtgaagagcctattgagctacctaagagtcctccggcccctgaatgcggccaatcctaaccacggagcaagcgccttcaacccagggggtggcttgtcgtaacgcgcaagtctgtggcggaaccgactactttgggtgtccgtgtttccctttatttttactatggctgcttatggtgacaatcattgattgccatcataaagcgaattggattggccatccggtggaagttatatacatcatctatctatttgttggatttgcttcactaacacagctcacaatcaacttggtatatataataatagtgattagagaaaaataccata

SEQ ID NO: 19189 - DNA, 745 bp, synthetic construct
  source 1..745: mol_type = other DNA
ttaaaacagctctggggttgttcccaccccagaggcccacgtggcggctagcactctggtatcacggtacctttgtgcgcctgttttatgtccccgcccccatgtaactttagaagcaatacacggtgttcattaggaggggcacaagccagtgttcctatgaacaagcacttctgtttccccggtgacctcgtataggctgtgcccacggctaaaaacgagcgatccgttacccgcttgggtacttcgagaagcctagtaccaccttggaatcttcgacgcgttgcgctcagcactctaccccgagtgtagcttaggctgatgagtctgggcattccccactggtgacagtggcccaggctgcgttggcggcctacccatggctcgcgccatgggacgctagatgtgaacaaggtgtgaagagcctattgagctacctaagagtcctccggcccctgaatgcggccaatcctaaccacggagcaagcgccttcaacccagggggtggcttgtcgtaacgcgcaagtctgtggcggaaccgactactttgggtgtccgtgtttccctttatttttactatggctgcttatggtgacaatcattgattgccatcataaagcgaattggattggccatccggtggaagttatatacatcacctatctatttgttggatttgcttcactaacacagttcacagtcaacttggtatatataataatagtgattatagaaaaataccata

SEQ ID NO: 19190 - DNA, 745 bp, synthetic construct
  source 1..745: mol_type = other DNA
ttaaaacagctctggggttgttcccaccccagaggcccacgtggcggctagcattctggtatcacggtacctttgtgcgcctgttttatgtccccgcccccatgtaactttagaagcaatacacggtgttcattaggaggggcacaagccagtgttcctatgaacaagcacttctgtttccccggtgacctcgtataggctgtgcccacggccaaaaacgagcgatccgttacccgcttgggtacttcgagaagcctagtaccaccttggaatcttcgacgcgttgcgctcagcactctaccccgagtgtagcttaggctgatgagtctgggcattccccactggtgacagtggcccaggctgcgttggcggcctacccatggctcgcgccatgggacgctagatgtgaacaaggtgtgaagagcctattgagctacctaagagtcctccggcccctgaatgcggccaatcctaaccacggagcaagcgccttcaacccagggggtggcttgtcgtaacgcgcaagtctgtggcggaaccgactactttgggtgtccgtgtttccctttacttttattatggctgcttatggtgacaatcattgattgccatcataaagcgaattggattggccatccggtggaagttatatacatcatctatctatttgttggatttgcttcactaacacagttcacaatcaacttggtatatataataatagtgattagagaaaaataccata

SEQ ID NO: 19191 - DNA, 745 bp, synthetic construct
  source 1..745: mol_type = other DNA
ttaaaacagctctggggttgttcccaccccagaggcccacgtggcggctagcactctggtatcacggtacctttgtgcgcctgttttatgtccccgcccccatgtaactttagaagcaatacacggtgttcattaggaggggcacaagccagtgttcctatgaacaagcacttctgtttccccggtgacctcgtataggctgtgcccacggctaaaaacgagcgatccgttacccgcttgggtacttcgagaagcctagtaccaccttgggatcttcgacgcgttgcgctcagcactctaccccgagtgtagcttaggctgatgagtctgggcattccccactggtgacagtggcccaggctgcgttggcggcctacccatggctcgcgccatgggacgctagatgtgaacaaggtgtgaagagcctattgagctacctaagagtcctccggcccctgaatgcggccaatcctaaccacggagcaagcgccttcaacccagggggtggcttgtcgtaacgcgcaagtctgtggcggaaccgactactttgggtgtccgtgtttccctttatttttattatggctgcttatggtgacaatcattgattgccatcataaagcgaattggattggccatccggtggaagttatatacatcatctatctatttgttggatttgcttcactaacacagttcacaatcaacttggtatatataataatagtgattagagaaaaataccata

SEQ ID NO: 19192 - DNA, 745 bp, synthetic construct
  source 1..745: mol_type = other DNA
ttaaaacagctctggggttgttcccaccccagaggcccacgtggcggctagcactctggtatcacggtacctttgtgcgcctgttttatgtccccgcccccatgtaactttagaagcaatacacggtgttcattaggaggggcacaagccagtgttcctatgaacaagcacttctgtttccccggtgacctcgtataggctgtgcccacggctaaaaacgagcgatccgttacccgcttgggtacttcgagaagcctagtaccaccttggaatcttcgacgcgttgcgctcagcactctaccccgagtgtagcttaggctgatgagtctgggcattccccactggtgacagtggcccaggctgcgttggcggcctacccatggctcgcgccatgggacgctagatgtgaacaaggtgtgaagagcctattgagctacctaagagtcctccggcccctgaatgcggccaatcctaaccacggagcaagcgccttcaacccagggggtggcttgtcgtaacgcgcaagtctgtggcggaaccgactactttgggtgtccgtgtttccctttatttctattatggctgcttatggtgacaatcattgattgccatcataaagcgaattggattggccatccggtggaagttatatacatcatctatctatttgttggatttgcttcactaacacagttcacaatcaacttggtatatataataatagtgattagagaaaaataccata

SEQ ID NO: 19193 - DNA, 745 bp, synthetic construct
  source 1..745: mol_type = other DNA
ttaaaacagctctggggttgttcccaccccagaggcccacgtggcggctagcactctggtatcacggtacctttgtgcgcctgttttatgtccccgcccccatgtaactttagaagcaatacacggtgttcattaggaggggcacaagccagtgttcctatgaacaagcacttctgtttccccggtgacctcgtataggctgtgcccacggctaaaaacgagcgatccgttacccgcttgggtacttcgagaagcctagtaccaccttggaatcttcgacgcattgcgctcagcactctaccccgagtgtagcttaggctgatgagtctgggcattccccactggtgacagtggcccaggctgcgttggcggcctacccatggcttgcgccatgggacgctagatgtgaacaaggtgtgaagagcctattgagctacctaagagtcctccggcccctgaatgcggccaatcctaaccacggagcaagcgccttcaacccaggaggtggcttgtcgtaacgcgcaagtctgtggcggaaccgactactttgggtgtccgtgtttccctttatttttattatggctgcttatggtgacaatcattgattgccatcataaagcgaattggattggccatccggtggaagttatatacatcatctatctatttgctgggtttgcttcactaacacagttcacaatcaacttggtatatataataatagtgattagagaaaaataccata

SEQ ID NO: 19194 - DNA, 745 bp, synthetic construct
  source 1..745: mol_type = other DNA
ttaaaacagctctggggttgttcccaccccagaggcccacgtggcggctagcactctggtatcacggtacctttgtgcgcctgttttatatccccgcccccatgtaactttagaagcaatacacggtgttcattaggaggggcacaagccagtgttcctatgaacaagcacttctgtttccccggtgacctcgtataggctgtgcccacggctaaaaacgagcgatccgttacccgcttgggtacttcgagaagcctagtaccaccttggaatcttcgacgcgttgcgctcagcactctaccccgagtgtagcttaggctgatgagtctgggcattccccactggtgacagtggcccaggctgcgttggcggcctacccatggctcgcgccatgggacgctagatgtgaacaaggtgtgaagagcctattgagctacctaagagtcctccggcccctgaatgcggccaatcctaaccacggagcaagcgccttcaacccagggggtggcttgtcgtaacgcgcaagtctgtggcggaaccgactactttgggtgtccgtgtttccctttatttttattatggctgcttatggtgacaatcattgattgccatcataaagcgaattggattggccatccggtggaagctatatacatcatctatctatttgttggatttgcttcactaacacagttcacaatcaacttggtatatataataatagtgattagagaaaaataccata

SEQ ID NO: 19195 - DNA, 745 bp, synthetic construct
  source 1..745: mol_type = other DNA
ttaaaacagctctggggttgttcccaccccagaggcccacgtggcggctagcactctggtatcacggtacctttgtgcgcctgttttatgtccccgcccccatgtaactttagaagcaatacacggtgttcattaggaggggcacaagccagtgttcctatgaacaagcacttctgtttccccggtgacctcgtataggctgtgcccacggctaaaaacgagcgatccgttacccgcttgggtacttcgagaagcctagtaccaccttggaatcttcgacgcgttgcgctcagcactctaccccgagtgtagcttaggctgatgagtctgggcattccccactggtgacagtggcccaggctgcgttggcggcctacccatggctcgtgccatgggacgctagatgtgaacaaggtgtgaagagcctattgagctacctaagagtcctccggcccctgaatgcggctaatcctaaccacggagcaagcgccttcaacccagggggtggcttgtcgtaacgcgcaagtctgtggcggaaccgactactttgggtgtccgtgtttccctttatttttattatggctgcttatggtgacaatcattgattgccatcataaagcgaattggattggccatccggtggaagttatatacatcatctatctatttgttggattcgcttcactaatacagttcacaatcaacttggtatatataataatagtgattagagaaaaataccata

SEQ ID NO: 19196 - DNA, 736 bp, synthetic construct
  source 1..736: mol_type = other DNA
cagctctggggttgttcccaccccagaggcccacgtggcggctagtacactggtatcacggtacctttgtacgcctgttttatactccctcccccgcaacttagaagcatacaattcaagctcaataggagggggtgcaagccagcgcctccgtgggcaagcactactgtttccccggtgaggccgcatagactgttcccacggttgaaagtgtccgatccgttatccgctcatgtacttcgagaagcctagtatcgctctggaatcttcgacgcgttgcgctcagcactcaaccccggagtgtagcttgggccgatgagtctggacagtccccactggcgacagtggtccaggctgcgctggcggcccacctgtggcccaaagccacgggacgctagttgtgaacagggtgtgaagagcctattgagctacatgagagtcctccggcccctgaatgcggctaatcctaaccatggagcaggcagctgcaacccagcagccagcctgtcgtaacgcgcaagtccgtggcggaaccgactactttgggtgtccgtgtttccttttattcttgaatggctgcttatggtgacaatcatagattgttatcataaagcgagttggattggccatccagtgtgaatcagattaattactcccttgtttgttggatccactcccgaaacgttttactccttaacttattgaaattgtttgaagacaggatttcagtgtcaca

SEQ ID NO: 19197 - DNA, 736 bp, synthetic construct
  source 1..736: mol_type = other DNA
cagctctggggttgttcccaccccagaggcccacgtggcggctagtacactggtatcacggtacctttgtacgcctgttttatactccctcccccgcaacttagaagcatacaattcaagctcaataggagggggtgcaagccagcgcctccgtgggcaagcactactgtttccccggtgaggccgcatagactgttcccacggttgaaagtgtccgatccgttatccgctcatgtacttcgagaagcctagtatcgctctggaatcttcgacgcgttgcgctcagcactcaaccccggagtgtagcttgggccgatgagtctggacagtccccactggcgacagtggtccaggctgcgctggcggcccacctgtggcccaaagccacgggacgctagttgtgaacagggtgtgaagagcctattgagctacatgagagtcctccggcccctgaatgcggctaatcctaaccatggagcaggcagctgcaacccagcagccagcctgtcgtaacgcgcaagtccgtggcggaaccgactactttgggtgtccgtgtttccttttattcttgaatggctgcttatggtgacaatcatagattgttatcataaagcgagttggattggccatccagtgtgaatcagattaattactcccttgtttgttggatccactcccgaaacgttttactccttaacttattgaaattgtttgaagacaggatttcagtgccaca

SEQ ID NO: 19198 - DNA, 744 bp, synthetic construct
  source 1..744: mol_type = other DNA
tttaaacagctctggggttgttcccaccccagaggcccacgtggcggctagtactctggtatcgcggtacctttgtacgcctgttttatacccctaccccatgtaactttagaagcagttcaacaagttcaatagggggggtgcaaaccagcaccaccacgaacaagcacttctgtaaccccggtgaccttgtataagctgtgcccacggctgaaagcgagtgatccgttatccgcttaagtacttcgagaagcttagtatcaccttggaatcttcgatgcgttgcgctcagcactctatcccgagtgtagcttaggctgatgagtctgggcgttccccaccggcgacggtggcccaggctgcgttggcggcctacccatggctaacgccatgggacgctagatgtgaacaaggtgtgaagagcctattgagctacttaagagtcctccggcccctgaatgcggctaatcccaaccacggagcaggtgccttcaacccagagggcggcctgtcgtaacgcgcaagtctgtggcggaaccgactactttgggtgtccgtgtttccttttatcttttatatggctgcttatggtgacaatcatagattgttatcataaagcgacttggattggccatccggtaaaatacaaacacatcatctacttgtttgttggatttactccactcacccaatttactcccagcataatatccattgttttgttaacaagacattgctatcacg

SEQ ID NO: 19199 - DNA, 742 bp, synthetic construct
  source 1..742: mol_type = other DNA
ttaaaacagctctggggttgcacccgccccagaggcccacgtggcggctagtactccggtattgcggtacccttgtacgcctgttttatactcccttcccgtaacttagacgcacaaaaccaagttcaatagaagggggtacaaaccagtaccaccacgaacaagcacttctgtttccccggtgatgttgtatagactgcttgcgtggttgaaagcgacggatccgttatccgcttatgtacttcgagaagcccagtaccacctcggaatcttcgatgcgttgcgctcagcactcaaccccagagtgtagcttaggctgatgagtctggacatccctcaccggtgacggtggtctaggctgcgttggcggcctacctatggctaacgccatgggacgctagttgtgaacaaggtgtgaagagcctattgagctacataagaatcctccggcccctgaatgcggctaatcccaacctcggggcaggtggtcacaaaccagtgattggcctgtcgtaacgcgcaagtccgtggcggaaccgactactttgggtgtccgtgtttccttttattttattgtggctgcttatggtgacaatcacagattgttatcataaagcgaattggattggccatccggtgaaagtgagattcattatctatctgtttgctggattcgctccattgagtgtgtttactctaagtacaatttcaacagttatttcaatcagacaattgtatcata

SEQ ID NO: 19200 - DNA, 743 bp, synthetic construct
  source 1..743: mol_type = other DNA
ttaaaacagctctggggttgttcccaccccagaggcccacgtggcggccagtactctggtatcacggtacctttgtacgcctgttttatactcccttcccgaaacttagacgcatgaaacccaagttcagtagaagggggtgcaagccagtaccaccacgaacaagcacttctgtttccccggtgatgttgtatagactgctcgcgtggttgaaagcgacggatccgttatccgcttgtgtacttcgagaagcccagtaccaccttggaatcttcgatgcgttgcgctcgacactcaatcccagagtgtagcttaggctgatgagtctggacattccccaccggtgacggtggtccaggctgcgttggcggcctacccatggccgacgccatgggacgctagttgtgaacaaggtgtgaagagcctattgagctacataagagtcctccggcccctgaatgcggctaatcccaacctcggagcaggtggtcacacaccagtgactggcctgtcgtaacgcgcaagtccgtggcggaaccgactactttgggtgtccgtgtttccttttattttatgctggctgcttatggtgacaatcacagattgttatcataaagcgaattggattggccatccggtgatagtgaaactcattacttgactgtttgctgaatttgctccattgtaagtgtttgccctgagtacaattttaatagttactttgattggacaattgtactata

SEQ ID NO: 19201 - DNA, 742 bp, synthetic construct
  source 1..742: mol_type = other DNA
ttaaaacagctctggggttgcacccaccccagaggcccacgtggcggctagtactccggtattgcggtacccttgtacgcctgttttatactcccttcccgtaacttagacgcacaaaaccaagttcaatagaagggggtacaaaccagtaccaccacgaacaagcacttctgtttccccggtgatgttgtatagactgcttgcgtggttgaaagcgacggatccgttatccgcttatgtacttcgagaagcccagtaccacctcggaatcttcgatgcgttgcgctcagcactcaaccccagagtgtagcttaggctgatgagtctggacattcctcaccggtgacggtggtccaggctgcgttggcggcctacctatggctaacgccatgggacgctagttgtgaacaaggtgtgaagagcctattgagctacataagaatcctccggcccctgaatgcggctaatcctaacctcggggcaggtggtcacaaaccagtgattaacctgtcgtaacgcgcaagcccgtggcggaaccgactactttgggtgtccgtgtttccttttattttatagtggctgcttatggtgacaatcacggattgttatcataaagcgaattggattggccatccggtgaaagtgagattcattatctatctgtttgctggattcgctccattgagtgtgtttactctaagtacaatttcaacggttatttcaatcagacaattgtatcata

SEQ ID NO: 19202 - DNA, 742 bp, synthetic construct
  source 1..742: mol_type = other DNA
ttaaaacagctctggggttgcacccaccccagaggcccacgtggcggctagtactccggtattgcggtacccttgtacgcctgttttatactcccttcccgtaacttagacgcacaaaaccaagttcaatagaagggggtacaaaccagtaccaccacgaacaagcacttctgtttccccggtgatgttgtatagactgcttgcgtggttgaaagcgacggatccgttatccgcttatgtacttcgagaagcccagtaccacctcggaatcttcgatgcgttgcgctcagcactcaaccccagagtgtagcttaggctgatgagtctggacatccctcaccggtgacggtggtccaggctgcgttggcggcctacctatggctaacgccatgggacgctagttgtgaacaaggtgtgaagagcctattgagctacataagaatcctccggcccctgaatgcggctaatcccaacctcggggcaggtggtcacaaaccagtgattggcctgtcgtaacgcgcaagtccgaggcggaaccgactactttgggtgtccgtgtttccttttattttattgtggctgcttatggtgacaatcacagattgttatcataaagcgaattggattggccatccggtgaaagtgagattcattatctatctgtttgctggattcgctccattgagtgtgtttactccaagtacaatttcaacagttatttcaatcagacaattgtattata

SEQ ID NO: 19203 - DNA, 742 bp, synthetic construct
  source 1..742: mol_type = other DNA
ttaaaacagctctggggttgtacccaccccagaggcccacgtggcggctagtactccggtattgcggtacccttgtacgcctgttttatactcccttcccgtaacttagacgcacaaaaccaagttcaatagaagggggtacaaaccagtaccaccacgaacaagcacttctgtttccccggtgatgttgtatagactgcttgcgtggttgaaagcgacggatccgttatccgcttatgtacttcgagaagcccagtaccacctcggaatcttcgatgcgttgcgctcagcactcaaccccagagtgtagcttaggctgatgagtctggacatccctcaccggtgacggtggtccaggctgcgttggcggcctacctatggctaacgccatgggacgctagttgtgaacaaggtgtgaagagcctattgagctacataagaatcctccggcccctgaatgcggctaatcccaacctcggagcaggtggtcacaaaccagtgattggcctgtcgtaacgcgcaagtccgtggcggaaccgactactttgggtgtccgtgtttccttttattttattgtggctgcttatggtgacaatcacagattgttatcataaagcgaattggattggccatccggtgaaagtgagattcgttatctatctgtttgctggatttgctccattgagtgtgtttactctaagtacaattccaacagctatttcaatcagacaattgtatcata

SEQ ID NO: 19204 - DNA, 742 bp, synthetic construct
  source 1..742: mol_type = other DNA
ttaaaacagctctggggttgcacccaccccagaggcccacgtggcggctagtactccggtattgcggtacccttgtacgcctgttttatactcccttcccgtaacttagaagcatgaaaccaagttcaatagaagggggtgcaaaccagtaccaccacgaacaagcacttctgtttccccggtgatgttgtatagactgcttgcgtggtcgaaagcgacggatccgtcatccgcttatgtacttcgagaagcccagtaccacctcggaatcttcgacgcgttgcgctcagcactcaaccccagagtgtagcttaggctgatgagtctggacgtccctcaccggtgacggtggtccaggctgcgttggcggcctacccatggcatacgccatgggacgctagttgtgaacaaggtgtgaagagcctattgagctacataagaatcctccggcccctgaatgcggctaatcccaacctcggagcaggtggtcacaaaccagtgattggcctgtcgtaacgcgcaagtccgtggcggaaccgactactttgggtgtccgtgtttccttttatattattatggctgcttatggtgacaatcacagattgttatcataaagcgatttggattggccatccggtgaaagtgagattcattatctatctgtttgctggattcgctccattgagtgtgtttactctaagtataatttcaacagttatttcaagcagacaattgtaccata

SEQ ID NO: 19205 - DNA, 742 bp, synthetic construct
  source 1..742: mol_type = other DNA
ttaaaacagctctggggttgcacccaccccagaggcccacgtggcggctagtactccggtattgcggtacccttgtacgcctgttttatactcccttcccgtaacttagacgcacgaaaccaagttcaatagaagggggtgcaaaccagtaccaccacgaacaagcacttctgtttccccggtgatgtcgtatagactgcttgcgtggtcgaaagcgacggatccgtcatccgcttatgtacttcgagaagcccagtaccacctcgggatcttcgacgcgttgcgctcagcactcaaccccagagtgtagcttaggctgatgagtctggacgtccctcaccggtgacggtggtccaggctgcgttggcggcctacccatggtttacgccatgggacgctagttgtgaacaaggtgtgaagagcctattgagctacataagaatcctccggcccctgaatgcggctaatcccaacctcggagcaggtggtcacaaaccagtgattggcctgtcgtaacgcgcaagtccgtggcggaaccgactactttgggtgtccgtgtttccttttattttattatggctgcttatggtgacaatcacagattgttatcataaagcgaattggattggccatccggtgaaagtgagattcattatctattagtttgctggattcgccccattgagtgtgtttactttaagtataatttcaacagttatttcaaacagacaattgtaccaca

SEQ ID NO: 19206 - DNA, 742 bp, synthetic construct
  source 1..742: mol_type = other DNA
ttaaaacagctctggggttgcacccaccccagaggcccacgtggcggctagtactccggtattgcggtacccttgtacgcctgttttatactcccttcccgtaacttagacgcacgaaaccaagttcaatagaagggggtgcaaaccagtaccaccacgaacaagcacttctgtttccccggtgatgttgtatagactgcttgcgtggtcgaaagcgacggatccgtcatccgcttatgtacttcgagaagcccagtaccacctcgggatcttcgacgcgttgcgctcagcactcaaccccagagtgtagcttaggctgatgagtctggacgtccctcaccggtgacggtggtccaggctgcgttggcggcctacctatggcttacgccatgggacgctagttgtgaacaaggtgtgaagagcctattgagctacataagaatcctccggcccctgaatgcggctaatcccaacctcggagcaggtggtcacaaaccagtgattggcctgtcgtaacgcgcaagtccgtggcggaaccgactactttgggtgtccgtgtttccttttattttattatggctgcttatggtgacaatcacagattgttatcataaagcgaattggattggccatccggtgaaagtgagattcattatctatctgtttgctggattcgctccattgagtgtgtttactttaagtataatttcaacagttatttcaaacagacaattgtaccaca

SEQ ID NO: 19207 - DNA, 742 bp, synthetic construct
  source 1..742: mol_type = other DNA
ttaaaacagctctggggttgcacccaccccagaggcccacgtggcggctagtactccggtattgcggtacccttgtacgcctgttttatactcccttcccgtaacttagacgcacaaaaccaagttcaatagaagggggtacaaaccagtaccaccacgaacaagcacttctgtttccccggtgatgttgtatagactgcttgcgtggttgaaagcgacggatccgttatccgcttatgtacttcgagaagcccagtaccacctcggaatcttcgatgcgttgcgctcagcactcaaccccagagtgtagcttaggctgatgagtctggacatccctcaccggtgacggtggtccaggctgcgttggcggcctacctatggctaacgccatgggacgctagttgtgaacaaggtgtgaagagcctattgagctacataagaatcctccggcccctgaatgcggctaatcccaacctcggggcaggtggtcacaaaccagtgattggcctgtcgtaacgcgcaagtccgtggcggaaccgactactttgggtgtccgtgtttccttttattttattgtggctgcttatggtgacaatcacagattgttatcataaagcgaattggattggccatccggtgaaagtgagattcattatctatctgtttgctggattcgctccattgagtgtgtttactctaagtacaatttcaacagttatttcaatcagacaattgtatcata

SEQ ID NO: 19208 - DNA, 734 bp, synthetic construct; identical to SEQ ID NO: 944
  source 1..734: mol_type = other DNA

SEQ ID NO: 19209 - DNA, 742 bp, synthetic construct
  source 1..742: mol_type = other DNA
ttaaaacagctctggggttgcacccaccccagaggcccacgtggcggctagtactccggtactgcggtacccttgtacgcctgttttatactcccttcccgtaacttagacgcacgaaaccaagttcaatagaagggggtgcaaaccagtaccaccacgaacaagcacttctgtttccccggtgatgttgtatagactgcttgcgtggtcgaaagcgacggatccgtcatccgcttatgtacttcgagaagcccagtaccacctcggaatcttcgacgcgttgcgctcagcactcaaccccagagtgtagcttaggctgatgagtctggacgtccctcaccggtgacggtggtccaggctgcgttggcggcctacctatggcttacgccatgggacgctagttgtgaacaaggtgtgaagagcctattgagctacataagaatcctccggcccctgaatgcggctaatcccaacctcggagcaggtggtcacaaaccagtgattggcctgtcgtaacgcgcaagtccgtggcggaaccgactactttgggtgtccgtgtttccttttattttactatggctgcttatggtgacaatcacagattgttatcataaagcgaattggattggccatccggtgaaagtgagatacattatctatctgtttgctggattctttccattgagtgtacttactctaagtataatttcaacagttatttcaaacagacaattgtaccata

SEQ ID NO: 19210 - DNA, 742 bp, synthetic construct
  source 1..742: mol_type = other DNA
ttaaaacagctctggggttgcacccaccccagaggcccacgtggcggctagtactccggtattgcggtacccttgtacgcctgttttatactcccttcccgtaacttagaagcatgaaaccaagttcaatagaagggggtgcaaaccagtaccaccacgaacaagcacttctgtttccccggtgatgttgtatagactgcttgcgtggtcgaaagcgacggatccgtcatccgcttatgtacttcgagaagcccagtaccacctcggaatcttcgacgcgttgcgctcagcactcaaccccagagtgtagcttaggctgatgagtctggacgtccctcaccggtgacggtggtccaggctgcgttggcggcctacccatggcttacgccatgggacgctagttgtgaacaaggtgtgaagagcctattgagctacataagaatcctccggcccctgaatgcggctaatcccaacctcggagcaggtggtcacaaaccagtgattggcctgtcgtaacgcgcaagtccgtggcggaaccgactactttgggtgtccgtgtttccttttatattattatggctgcttatggtgacaatcacagattgttatcataaagcgaattggattggccatccggtgaaagtgagattcattatctatctgtttgctggattcgctccattgagtgtgtttactctaagtataatttcaacagttatttcaaacagacaattgtaccata

SEQ ID NO: 19211 - DNA, 742 bp, synthetic construct
  source 1..742: mol_type = other DNA
ttaaaacagctctggggttgcacccaccccagaggcccacgtggcggctagtactccggtactgcggtacccttgtacgcctgttttatactcccttcccgtaacttagacgcacgaaaccaagttcaatagaagggggtgcaaaccagtaccaccacgaacaagcacttctgtttccccggtgatgttgtatagactgcttgcgtggtcgaaagcgacggatccgtcatccgcttatgtacttcgagaagcccagtaccacctcggaatcttcgacgcgttgcgctcagcactcaaccccagagtgtagcttaggctgatgagtctggacgttcctcaccggtgacggtggtccaggctgcgttggcggcctacctatggcttacgccatgggacgctagttgtgaacaaggtgtgaagagcctattgagctacataagaatcctccggcccctgaatgcggctaatcccaacctcggagcaggtggtcacaaaccagtgattggcctgtcgtaacgcgcaagtccgtggcggaaccgactactttgggtgtccgtgtttccttttattttactatggctgcttatggtgacaatcacagattgttgtcataaagcgaattggattggccatccggtgaaagtgagatacattatctatctgtttgctggattctttccattgagtgtacttactctaagtataatttcaacagttatttcaaacagacaattgtaccata

SEQ ID NO: 19212 - DNA, 742 bp, synthetic construct
  source 1..742: mol_type = other DNA
ttaaaacagctctggggttgcacccaccccagaggcccacgtggcggctagtactccggtactacggtacccttgtacgcctgttttatactcccttcccgtaacttagacgcacgaaaccaagttcaatagaagggggtgcaaaccagtaccaccacgaacaagcacttctgtttccccggtgatgttgtatagactgcttgcgtggtcgaaagcgacggatccgtcatccgcttatgtacttcgagaagcccagtaccacctcggaatcttcgacgcgttgcgctcagcactcaaccccagagtgtagcttaggctgatgagtctggacgtccctcaccggtgacggtggtccaggctgcgttggcggcctacccatggtttacgccatgggacgctagttgtgaacaaggtgtgaagagcctattgagctacataagaatcctccggcccctgaatgcggctaatcccaacctcggagcaggtggtcacaaaccagtgattggcctgtcgtaacgcgcaagtccgtggcggaaccgactactttgggtgtccgtgtttccttttattttattgtggctgcttatggtgacaatcacagattgttatcataaagcgaattggattggccatccggtgaaagtgagactcattatctacctgttcgctggattcgctccattgagtgtgtttaccctaagtacaatttcaacagttattttaatcagacaattgtaccata

SEQ ID NO: 19213 - DNA, 742 bp, synthetic construct
  source 1..742: mol_type = other DNA
ttaaaacagctctggggttgcacccaccccagaggcccacgtggcggctagtactccggtactgcggtacccttgtacgcctgttttatactcccttcccgtaacttagacgcacgaaaccaagttcaatagaagggggtgcaaaccagtaccaccacgaacaagcacttctgtttccccggtgatgttgtatagactgcttgcgtggtcgaaagcgacggatccgtcatccgcttatgtacttcgagaagcccagtaccacctcggaatcttcgatgcgttgcgctcagcactcaaccccagagtgtagcttaggctgatgagtctggacgtccctcaccggtgacggtggtccaggctgcgttggcggcctacctatggcttacgccatgggacgctagttgtgaacaaggtgtgaagagcctattgagctacataagaatcctccggcccctgaatgcggctaatcccaacctcggagcaggtggtcacaaaccagtgattggcctgtcgtaacgcgcaagtccgtggcggaaccgactactttgggtgtccgtgtttcctcttattttattatggctgcttatggtgacaatcacagattgttatcataaagcgaattggattggccatccggtgaaagtgagattcactatctatctgtttgctggattcgctccattgagtgtgtttactctaagtataatttcaacagttatttcaaacagacaattgtatcata

SEQ ID NO: 19214 - DNA, 742 bp, synthetic construct
  source 1..742: mol_type = other DNA
ttaaaacagctctggggttgtacccaccccagaggcccacgtggcggctagtactccggtattgcggtacccttgtacgcctgttttatactcccttcccgtaacttagacgcacgaaaccaagttcaatagaagggggtgcaaaccagtaccaccacgaacaagcacttctgtttccccggtgatgttgtatagactgcttgcgtggtcaaaagcgacggatccgtcatccgcttatgtacttcgagaagcccagtaccacctcgggatcttcgacgcgttgcgctcagcactcaaccccagagtgtagcttaggctgatgagtctggacgtccctcaccggtgacggtggtccaggctgcgttggcggcctacccatggcttacgccatgggacgctagttgtgaacaaggtgtgaagagcctattgagctacataagaatcctccggcccctgaatgcggctaatcccaacctcggagcaggtggtcacaaaccagtgattggcctgtcgtaacgcgcaagtccgtggcggaaccgactactttgggtgtccgtgtttccttttattttattatggctgcttatggtgacaatcacagattgttatcataaagcgaattggattggccatccggtgaaagtgagattcattatctatctatttgctggattcgctccgttgagtgtgtttactttaagtataatttcaacagttatttcaaacagacaattgtaccaca

SEQ ID NO: 19215 - DNA, 742 bp, synthetic construct
  source 1..742: mol_type = other DNA
ttaaaacagctctggggttgcacccaccccagaggcccacgtggcggctagtactccggtattgcggtacccttgtacgcctgttttatactcccttcccgtaacttagacgcacgaaaccaagttcaatagaagggggtgcaaaccagtaccaccacgaacgagcacttctgtttccccggtgatgttgtatagactgcttgcgtggtcgaaagcgacggatccgtcatccgcttatgtacttcgagaagcccagtaccacctcgggatcttcgacgcgttgcgctcagcactcaaccccagagtgtagcttaggctgatgagtctggacgtccctcaccggtgacggtggtccaggctgcgttggcggcctacctatggcttacgccatgggacgctagttgtgaacaaggtgtgaagagcctattgagctacataagaatcctccggcccctgaatgcggctaatcccaacctcggagcaggtggtcacaaaccagtgattggcctgtcgtaacgcgcaagtccgtggcggaaccgactactttgggtgtccgtgtttccttttattttattatggctgcttatggtgacaatcacagattgttatcataaagcgaattggattggccatccggtgaaagtgagattcattatctatctgtttgctggattcgccccattgagtgtgtttactttaagtatagtttcaacagttatttcaaacagacaattgtaccaca

SEQ ID NO: 19216 - DNA, 742 bp, synthetic construct
  source 1..742: mol_type = other DNA
ttaaaacagctctggggttgcacccaccccagaggcccacgtggcggctagtactccggtattgcggtacccttgtacgcctgttttatactcccttcccgtaacttagacgcacgaaaccaagttcaatagaagggggtgcaaaccagtaccaccacgaacaagcacttctgtttccccggtgatgttgtatagactgcttgcgtggtcgaaagcgacggatccgtcatccgcttatgtacttcgagaagcccagtaccacctcgggatcttcgacgcgttgcgctcagcactcaaccccagagtgtagcttaggctgatgagtctggacgtccctcaccggtgacggtggtccaggctgcgttggcggcctacctatggcttacgccatgggacgctagttgtgaacaaggtgtgaagagcctattgagctacataagaatcctccggcccctgaatgcggctaatcccaacctcggagcaggtggtcacaaaccagtgattggcctgtcgtaacgcgcaagtccgtggcggaaccgactactttgggtgtccgtgtttccttttattttattatggctgcttatggtgacaatcacagattgttatcataaagcgaattggattggccatccggtgaaagtgagattcattatctatctgtttgctggattcgccccattgagtgtgtttactttaagtatagtttcaacagttatttcaaacagacaattgtaccaca

SEQ ID NO: 19217 - DNA, 742 bp, synthetic construct
  source 1..742: mol_type = other DNA
ttaaaacagctctggggttgcacccaccccagaggcccacgtggcggctagtactccggtattgcggtacccttgtacgcctgttttatactcccttcccgtaacttagacgcacgaaaccaagttcaatagaagggggtgcaaaccagtaccaccacgaacaagcacttctgtttccccggtgatgttgtatagactgcttgcgtggtcgaaagcgacggatccgtcatccgcttatgtacttcgagaagcccagtaccacctcaggatcttcgacgcgttgcgctcagcactcaaccccagagtgtagcttgggctgatgagtctggatgtccctcaccggtgacggtggtccaggctgcgttggcggcctacctatggcttacgccatgggacgctagttgtgaacaaggtgtgaagagcctattgagctacataagaatcctccggcccctgaatgcggctaatcctaacctcggagcaggtggtcacaaaccagtgattggcctgtcgtaacgcgcaagtccgtggcggaaccgactactttgggtgtccgtgtttccttttattttattatggctgcttatggtgacaatcacagattgttatcataaagcgaattggattggccatccggtgaaagtgagattcattatctatctgcttgctggattcgccccattgagtgtgtttactttaagtataatttcaacagttatttcaaacagacaattgtaccaca

SEQ ID NO: 19218 - DNA, 742 bp, synthetic construct
  source 1..742: mol_type = other DNA
ttaaaacagctctggggttgcacccaccccagaggcccacgtggcggctagtactccggtattgcggtacccttgtacgcctgttttatactcccttcccgtaacttagacgcacgaaaccaagttcaatagaagggggtgcaaaccagtaccaccacgaacaagcacttctgtttccccggtgatgttgtatagactgcttgcgtggtcgaaagcgacggatccgtcatccgcttatgtacttcgagaagcccagtaccacctcaggatcttcgacgcgttgcgctcagcactcaaccccagagtgtagcttaggctgatgagtctggacgtccctcaccggtgacggtggtccaggctgcgttggcggcctacctatggcttacgccatgggacgctagttgtgaacaaggtgtgaagagcctattgagctacataagaatcctccggcccctgaatgcggctaatcctaacctcggagcaggtggtcacaaaccagtgattggcctgtcgtaacgcgcaagtccgtggcggaaccgactactttgggtgtccgtgtttccttttattttattatggctgcttatggtgacaatcacagattgttatcataaagcgaattggattggccatccggtgaaagtgagattcattatctatctgtttgctggattcgccccattgagtgtgtttactttaagtataatttcaacagttatttcaaacagacaattgtaccaca

SEQ ID NO: 19219 - DNA, 742 bp, synthetic construct
  source 1..742: mol_type = other DNA
ttaaaacagctctggggttgcacccaccccagaggcccacgtggcggctagtactccggtattgcggtacccttgtacgcctgttttatactcccttcccgtaacttagacgcacgaaaccaagttcaatagaagggggtgcaaaccagtaccaccacgaacaagcacttctgtttccccggtgatgttgtatagactgcttgcgtggtcgaaagcgacggatccgtcatccgcttatgtacttcgagaagcccagtaccacctcgggatcttcgacgcgttgcgctcagcactcaaccccagagtgtagcttaggctgatgagtctggacgtccctcaccggcgacggtggtccaggctgcgttggcggcctacctatggcttacgccatgggacgctagttgtgaacaaggtgtgaagagcctattgagctacataagaatcctccggcccctgaatgcggctaatcccaacctcggagcaggtggtcacaaaccagtgattggcctgtcgtaacgcgcaagtccgtggcggaaccgactactttgggtgtccgtgtttccttttattttattatggctgcttatggtgacaatcacagattgttatcataaagcgaattggattggccatccggtgaaagtgagattcattatctatctgtttgctggattcgctccattgagtgtgtttactttaagcataatttcaatagctatttcaaacagacaattgtaccaca

SEQ ID NO: 19220 - DNA, 742 bp, synthetic construct
  source 1..742: mol_type = other DNA
ttaaaacagctctggggttgcacccaccccagaggcccacgtggcggctagtactccggtattgcggtacccttgtacgcctgttttatactcccttcccgtaacttagacgcacgaaaccaagttcaatagaagggggtgcaaaccagtaccaccacgaacaagcacttctgtttccccggtgatgttgtatagactgcttgcgtggtcgaaagcgacggatccgtcatccgcttatgtacttcgagaagcccagtaccacctcgggatcttcgacgcgttgcgctcagcactcaaccccagagtgtagcttaggctgatgagtctggacgtccctcaccggtgacggtggtccaggctgcgttggcggcctacctatggcttacgccatgggacgctagttgtgaacaaggtgtgaagagcctattgagctacataagaatcctccggcccctgaatgcggctaatcccaacctcggagcaggtggtcacaaaccagtgattggcctgtcgtaacgcgcaagtccgtggcggaaccgactactttgggtgtccgtgtttccttttattttattatggctgcttatggtgacaatcacagattgttatcataaagcgaattggattggccatccggtgaaagagagattcattatctatttgtttgctggattcgccccattgagtgtgtttactttaagtataatttcaacagttatttcaaacagacaattgtaccaca

SEQ ID NO: 19221 - DNA, 742 bp, synthetic construct
  source 1..742: mol_type = other DNA
ttaaaacagctctggggttgcacccaccccagaggcccacgtggcggctagtactccggtattgcggtacccttgtacgcctgttttatactcccttcccgtaacttagacgcacgaaaccaagttcaatagaagggggtgcaaaccagtaccaccacgaacaagcacttctgtttccccggtgatgttgtatagactgcttgcgtggtcgaaagcgacggatccgtcatccgcttatgtacttcgagaagcccagtaccacctcgggatcttcgacgcgttgcgctcagcactcaaccccagagtgtagcttaggctgatgagtctggacgtccctcaccggtgacggtggtccaggctgcgttggcggcctacctatggcttacgccatgggacgctagttgtgaacaaggtgtgaagagcctattgagctacataagaatcctccggcccctgaatgcggctaatcccaacctcggagcaggtggtcacaaaccagtgattggcctgtcgtaacgcgcaagtccgtggcggaaccgactactttgggtgtccgtgtttccttttattttattatggctgcttatggtgacaatcacagattgttatcataaagcgaattggattggccatccggtgaaagtgagattcattatctatttgtttgctggattcgccccattgagtgtgtttactttaagtataatttcaacagttatttcaaacagacaattgtaccaca

SEQ ID NO: 19222 - DNA, 742 bp, synthetic construct
  source 1..742: mol_type = other DNA
ttaaaacagctctggggttgcacccaccccagaggcccacgtggcggctagtactccggtattgcggtacccttgtacgcctgttttatactcccttcccgtaacttagacgcacgaaaccaagttcaatagaagggggtgcaaaccagtaccaccacgaacaagcacttctgtttccccggtgatgttgtatagactgcttgcgtggtcgaaagcgacggatccgtcatccgcttatgtacttcgagaagcccagtaccacctcgggatcttcgacgcgttgcgctcagcactcaaccccagagtgtagcttaggctgatgagtctggacgtccctcaccggtgacggtggtccaggctgcgttggcggcctacctatggcttacgccatgggacgctagttgtgaacaaggtgtgaagagcctattgagctacataagaatcctccggcccctgaatgcggctaatcccaacctcggagcaggtggtcacaaaccagtgattggcctgtcgtaacgcgcaagtccgtggcggaaccgactactttgggtgtccgtgtttccttttattttattatggctgcttatggtgacaatcacagattgttatcataaagcgaattggattggccatccggtgaaagtgagattcattatctatctgtttgttggattcgctccattgagtgtgtttactttaagtataatttcaacagttatttcaaacagacaattgtaccaca

SEQ ID NO: 19223 - DNA, 742 bp, synthetic construct
  source 1..742: mol_type = other DNA
ttaaaacagctctggggttgcacccaccccagaggcccacgtggcggctagtactccggtattgcggtacccttgtacgcctgttttatactcccttcccgtaacttagacgcacgaaaccaagttcaatagaagggggtgcaaaccagtaccaccacgaacaagcacttctgtttccccggtgatgttgtatagactgcttgcgtggtcgaaagcgacggatccgtcatccgcttatgtacttcgagaagcccagtaccacctcgggatcttcgacgcgttgcgctcagcactcaaccccagagtgtagcttaggctgatgagtctggacgtccctcaccggcgacggtggtccaggctgcgttggcggcctacctatggcttacgccatgggacgctagttgtgaacaaggtgtgaagagcctattgagctacataagaatcctccggcccctgaatgcggctaatcccaacctcggagcaggtggtcacaaaccagtgattggcctgtcgtaacgcgcaagtccgtggcggaaccgactactttgggtgtccgtgtttccttttattttattatggctgcttatggtgacaatcacagattgttatcataaagcgaattggattggccatccggtgaaagtgagatacattatctatctgtttgctagattcgctccattgagtgtgtttactttaagtataatttcaatagttatttcaaacagacaattgtaccaca

SEQ ID NO: 19224 - DNA, 742 bp, synthetic construct
  source 1..742: mol_type = other DNA
ttaaaacagctctggggttgcacccaccccagaggcccacgtggcggctagtactccggtattgcggtacccttgtacgcctgttttatactcccttcccgtaacttagacgcacgaaaccaagttcaatagaagggggtgcaaaccagtaccaccacgaacaagcacttctgtttccccggtgatgttgtatagactgcttgcgtggtcgaaagcgacggatccgtcatccgcttatgtacttcgagaagcccagtaccacctcaggatcttcgacgcgttgcgctcagcactcaaccccagagtgtagcttaggctgatgagtctggacgtccctcaccggtgacggtggtccaggctgcgttggcggcctacctatggcttacgccatgggacgctagttgtgaacaaggtgtgaagagcctattgagctacataagaatcctccggcccctgaatgcggctaatcccaacctcggagcaggtggtcacaaaccagtgattggcctgtcgtaacgcgcaagtccgtggcggaaccgactactttgggtgtccgtgtttccttttattttattatggctgcttatggtgacaatcacagattgttatcataaagcgaattggattggccatccggtgaaagtgaggttcattatctatctgtttgctggattcgctccattgagtgtgtttactttaagtataatttcaacagttatttcaaacatacaattgtaccaca

SEQ ID NO: 19225 - DNA, 742 bp, synthetic construct
  source 1..742: mol_type = other DNA
ttaaaacagctctggggttgcacccaccccagaggcccacgtggcggctagtactccggtattgcggtacccttgtacgcctgttttatactcccttcccgtaacttagacgcacgaaaccaagttcaatagaagggggtgcaaaccagtaccaccacgaacaagcacttctgtttccccggtgatgttgtatagactgcttgcgtggtcgaaagcgacggatccgtcatccgcttatgtacttcgagaagcccagtaccacctcgggatcttcgacgcgttgcgctcagcactcaaccccagagtgtagcttaggctgatgagtctggacgtccctcaccggtgacggtggtccaggctgcgttggcggcctacctatggcttacgccatgggacgctagttgtgaacaaggtgtgaagagcctattgagctacataagaatcctccggcccctgaatgcggctaatcccaacctcggagcaggtggtcacaagccagtgattggcctgtcgtaacgcgcaagtccgtggcggaaccgactactttgggtgtccgtgtttccttttattttattatggctgcttatggtgacaatcacagattgttatcataaagcgaattggattggccatccggtgaaagtgagattcattatctatctgtttgctggattcgctccattgagtgtgtttactttaagtataatttcaacagttatttcaaacagacaattgtaccaca

SEQ ID NO: 19226 - DNA, 742 bp, synthetic construct
  source 1..742: mol_type = other DNA
ttaaaacagctctggggttgtacccaccccagaggcccacgtggcggctagtactccggtattgcggtacccttgtacgcctgttttatactcccttcccgtaacttagacgcacgaaaccaagttcaatagaagggggtgcaaaccagtgccaccacgaacaagcacttctgtttccccggtgatgttgtatagactgcttgcgtggtcgaaagcgacggatccgtcatccgcttatgtacttcgagaagcccagtaccacctcgggatcttcgacgcgttgcgctcagcactcaaccccagagtgtagcttaggctgatgagtctggacgtccctcaccggcgacggtggtccaggctgcgttggcggcctacctatggcttacgccatgggacgctagttgtgaacaaggtgtgaagagcctattgagctacataagaatcctccggcccctgaatgcggctaatcccaacctcggagcaggtggtcacaaaccagtgattggcctgtcgtaacgcgcaagtccgtggcggaaccgactactttgggtgtccgtgtttccttttattttattatggctgcttatggtgacaatcacagattgttatcataaagcgaattggattggccatccggtgaaagtgagattcattatctatctgtttgctggattcgctccattgagtgtgtttactttaagtataatttcaacagttatttcaaacagacaattgtaccaca

SEQ ID NO: 19227 - DNA, 742 bp, synthetic construct
  source 1..742: mol_type = other DNA
ttaaaacagctctggggttgtacccaccccagaggcccacgtggcggctagtactccggtattgcggtacccttgtacgcctgttttatactcccttcccgcaacttagaagcatgaaaccaagttcaatagaagggggtgcaaaccagtaccaccacgaacaagcacttctgtttccccggtgatgttgtatagactgcttgcgtggtcgaaagcgacggatccgtcatccgcttatgtacttcgagaagcccagtaccacctcggaatcttcgacgcgttgcgctcagcactcaaccccagagtgtagcttaggctgatgagtctggacgtcccccaccggtgacggtggtccaggctgcgttggcggcctacccatggcttacgccatgggacgctagttgtgaacaaggtgtgaagagcctattgagctacataagagtcctccggcccctgaatgcggctaatcccaacctcggagcaggtggtcacaaaccagtgattggcctgtcgtaacgcgcaagtccgtggcggaaccgactactttgggtgtccgtgtttccttttatattattatggctgcttatggtgacaatcacagattgttatcataaagcgaattggattggccatccggtgaaagtgagattcattatctatctgtttgctggactcgctccattgagtgtgtttactccaagtataatttcaacagttatatcaaacagacaattgcaccata

SEQ ID NO: 19228 - DNA, 742 bp, synthetic construct
  source 1..742: mol_type = other DNA
ttaaaacagctctggggttgcacccaccccagaggcccacgtggcggctagtactccggtactgcggtacccttgtacgcctgttttatactcccttcccgtaacttagacgcacgaaaccaagttcaatagaagggggtgcaaaccagtaccaccacgaacaagcacttctgtttccccggtgatgttgtatagactgcttgcgtggtcgaaagcgacggatccgtcatccgcttatgtacttcgagaagcccagtaccacctcggaatcttcgacgcgttgcgctcagcactcaaccccagagtgtagcttaggctgatgagtctggacgtccctcaccggtgacggtggtccaggctgcgttggcggcctacccatggcttacgccatgggacgctagttgtgaacaaggtgtgaagagcctattgagctacataagaatcctccggcccctgaatgcggctaatcccaacctcggagcaggtggtcacaaaccagtgattggcctgtcgtaacgcgcaagtccgtggcggaaccgactactttgggtgtccgtgtttccttttattttactatggctgcttatggtgacaatcacagattgttatcataaagcgaattggattggccatccggtgaaagtgagattcattatctatctgtttgcttgattctttccattgagtgtacttactccaagtataatttcaacagttatttcaaacagacaattgtaccata

SEQ ID NO: 19229 - DNA, 734 bp, synthetic construct
  source 1..734: mol_type = other DNA
ttaaaacagctctggggttgttcccaccccagaggcccacgtggcggctagtacaccggtattacggtacccttgtacgcctgttttatactccctcccccccgtaacttagaagtacaaaactcaagttcaataggagggggtacaaaccagtaccaccacgaacgagcacttctgtctccccggtgaggttacatagactgtccccgcggttgaaagtaaccgatccgttatccgctcttgtccttcgagaagcccagtaccatcttggaatcttcgatgcgttgcgctcaacactcaaccccagagtgtagcttaggtcgatgagtctggacactccccaccggcgacggtggtccaggctgcgttggcggcctacctgtggcccaaagccacaggacgctagttgtgaacaaggtgtgaagagcctattgagctacaagagagtcctccggcccctgaatgcggctaatcccaaccacggagcaggtgacttcaagccagaagttggcctgtcgtaacgcgtaagtctgtggcggaaccgactactttgggtgtccgtgtttccctttattcttacaatggctgcttatggtgacaatcatagattgttatcataaagcgaattggattggccatccggtgagaatcagatcagttacttacctgtttgttggattcactccgttgacactttacatactaacccttgtcaatacacctgtattatcata

SEQ ID NO: 19230 - DNA, 748 bp, synthetic construct
  source 1..748: mol_type = other DNA
ttaaaacagcctgtgggttgttcccaccccagaggcccacgtggcggctagtactctggtattgcggtacctttgtacgcctgttttatactcccttccccatgtaactttagaagcaattcaccaagttcaatagaggggggtacaagccagtaccaccacgaacaagcacttctgtttccccggtgattttacataagctgtgcccacggctgaaagtaaatgatccgttatccgcttgagtacttcgagaagcctagtatcaccttggaatcttcgacgcgttgcgctcaacactctaccccgagtgtagcttaggctgatgagcctgggcatcccccaccggcgacggtggcccaggctgcgttggcggcctacccatggccaacgccatgggacgctagttgtgaacaaggtgtgaagagcctattgagctacttaagagtcctccggcccctgaatgcggataatcccaaccatggagcaagtggccccaacccaggggatggcttgtcgtaatgcgcaagtccgtggcggaaccgactactttgggtgtccgtgtttccttttatttcatatatggctgcttatggtgcaatcacagattgttatcataaagcgaattggattggccatccggtgaaatataagcatattatctacatcttcgttggattcactctgttgacacattcttcaccaaagttgatttatacagtcttagtaattagaaattaccacttcagtt

SEQ ID NO: 19231 - DNA, 745 bp, synthetic construct
  source 1..745: mol_type = other DNA
ttaaaacagcctgtgggttgttcccaccccagaggcccacgtggcggctagtactctggtatcacggtacctttgtacgcctgttttatgccccctaccccatgtaactttagaagcaattcaacaagttcaatagagggggtacaaaccagtaccaccacgaacaagcacttctgttaccccggtgactttgcataagctgtgcccacggctgaaagcgaacgatccgttatccgcttgagtacttcgagaagcctagtatcaccttggaatcttcgacgcgttgcgctcagcactctaccccgagtgtagcttaggctgatgagtctgggcactccccaccggtgacggtggcccaggctgcgttggcggcctacccatggccaacgccatgggacgctagttgtgaacaaggtgtgaagagcctattgagctacttaagagtcctccggcccctgaatgcggctaatcccaaccacggagcaggtgccttcaacccagaaggtggcctgtcgtaacgcgtaagtctgtggcggaaccgactactttgggtgtccgtgtttccttttatctcttatgtggctgcttatggtgacaatcatagattgttatcataaagcgagttggattggccatccggtgaaatacaaacacattatttacttgtttgttggatttactccactcacccaattcacccccagtataataattattgttttattaataaggcatcaatatcaat

SEQ ID NO: 19232 - DNA, 745 bp, synthetic construct
  source 1..745: mol_type = other DNA
ttaaaacagcctgtgggttgttcccaccccagaggcccacgtggcggccagtactctggtatcgcggtacctttgtacgcctgttttataccccctaccccatgtaactttagaagtaattcaacaagttcaatagggggggtacgaaccagtaccaccgtgaacaagcacttctgttaccccggtgactttgcataagctgtgcccacggccgaaagcgaacgatccgttatccgcttgagtacttcgagaagtctagtaacaccttggaatcttcgacgcgttgcgctcagcactctaccccgagtgtagcttaggctgatgagtctgggcgctccccaccggtgacggtggcccaggctgcgttggcggcctacccatggctaacgccatgggacgctagttgtgaacaaggtgtgaagaacctattgagctacttaagattcctccggcccctgaatgcggctaatcccaaccacagagcaggtgccttcaaaccagaaggtggcctgtcgtaacgcgtaagtctgtggcggaaccgactactttgggtgtccgtgtttccttttatcttttatatggctgcttatggtgacaatcatagattgttatcataaagcgaattggattggccatccagtgaaatacaaacatattatctacttgtttgttggatttactccactcactcaattcacccccagtatattatctattgttttgttgttaagacactactatcgat

SEQ ID NO: 19233 - DNA, 745 bp, synthetic construct
  source 1..745: mol_type = other DNA
ttaaaacagcctgtgggttgttcccaccccagaggcccacgtggcggctagtactctggtatcacggtacctttgtgcgcctgttttataccccccaccccctgtaactttagaagcaactcaacaagttcaatagagggggtacaaaccagtaccaccacgaacaagcacttctgtgtccccggtgacttcgcataggctgtgcccacggctgaaagtgaacgatccgttatccgcttgagtacttcgagaagcctagtatcaccttggaatcttcgacgcgttgcgctcagcactctaccccgagtgtagcttaggctgatgagtctgggcgtcccccaccggcgacggtggcccaggctgcgttggcggcctacccatggctaacgccatgggacgctagttgtgaacaaggtgtgaagagcctattgagctactcaagagtcctccggcccctgaatgcggctaatcccaaccacggagcaggtgccttcaatccagagggtggcctgtcgtaacgcgcaagtctgtggcggaaccgactactttgggtgtccgtgtttctttttatcttttatatggctgcttatggtgacaatcacagattgttatcataaagcgaattggattagccatccggtgaaatacaaacatattatttacttatttgttggatttactccactcattcaatctactcccagtgtaatatctattgcattattgataagactacattatcaac

SEQ ID NO: 19234 - DNA, 745 bp, synthetic construct
  source 1..745: mol_type = other DNA
ttaaaacagcctgtgggttgttcccaccccagaggcccacgtggcggctagtactctggtatcacggtacctttgtacgcctgttttataccccttaccccatgcaactttagaagcaattcaataagttcaacagggggggtacaaaccagtaccaccacgaacaagcacttctgtttccccggtgatttcatataagctgtatccacggctgaaagtgaatgatccgttacccgcttgggtacttcgagaagcctagtaccaccttggaatcttcgatgcgttgcgttcagcactctaccccgagtgtagcttaggctgatgagtctgggcaccccccaccggtgacggtggcccaggctgcgttggcggcctacccatggctaacgccatgggacgctagtgtgaacaaggtgtgaagagcctattgagctactcaagagtcctccggcccctgaatgcggctaatcctaaccacggagcaggtgccctcaacccagagggtggcctgtcgtaacgcgcaagtctgtggcggaaccgactactttgggtgtccgtgtttccttttatctcttatatggctgcttatggtgacaatcacagattgttatcatagagcgaattggattggccatccggtgaaatataaacatatcatttatttgtttaattggatttaccccattcactcagtttactccaaatataatacatattgaattgttgatcagacatagctaccaca

SEQ ID NO: 19235 - DNA, 742 bp, synthetic construct
  source 1..742: mol_type = other DNA
ttaaaacagctctggggttgcgcccaccccagaggcccacgtggcggctagtactccggtattgcggtacccttgtacgcctgttttatactcccttcccgtaacttagacgcacaaaaccaagttcaataggagggggtacaaaccagtaccaccacgaacaagcacttctgtttccccggtgatgttgtatagactgcttgcgtggttgaaagcgacggatccgtcatccgcttatgtacttcgagaagcccagtaccacctcggaatcttcgatgcgttgcgctcagcactcaaccccagagtgtagcttaggctgatgagtctggacatccctcaccggtgacggtggtccaggctgcgttggcggcctacctatggctaacgccatgggacgctagttgtgaacaaggtgtgaagagcctattgagctacataagaatcctccggcccctgaatgcggctaatcccaacctcggagcaggtggtcacaaaccagtgattgacctgtcgtaacgcgcaagtccgtggcggaaccgactactttgggtgtccgtgtttccttttattttattgtggctgcttatggtgacaatcacagattgttatcataaagcgaattggattggccatccggtgaaagtgagatttattatctatctgtttactggactcgctccattgagtgtgtttattctaagaataatctcaacagttattccaatcagacagttgtatcata

SEQ ID NO: 19236 - DNA, 742 bp, synthetic construct
  source 1..742: mol_type = other DNA
ttaaaacagctctggggttgcacccaccccagaggcccacgtggcggctagtactccggtattgcggtacccttgtacgcctgttttatactcccttcccgtaacttagacgcacaaaaccaagttcaataggagggggtacaaaccagtaccaccacgaacaagcacttctgtttccccggtgatgttgtatagactgcttgcgtggttgaaagcgacggatccgttatccgcttatgtacttcgagaagcccagtaccacctcggaatcttcgatgcgttgcgctcagcactcaaccccagagtgtagcttaggctgatgagtctggacatccctcaccggtgacggtggtccaggctgcgttggcggcctacctatggctaacgccatgggacgctagttgtgaacaaggtgtgaagagcctattgagctacataagaatcctccggcccctgaatgcggctaatcccaacctcggagcaggtggtcacaaaccagtgattgacctgtcgtaacgcgcaagtccgtggcggaaccgactactttgggtgtccgtgtttccttttattttattgtggctgcttatggtgacaatcacagattgttatcataaagcgaattggattggccatccggtgaaagtgagatttattatctatctgtttactggactcgctccattgagtgtgtttattctaagaataatctcaacagttattccaatcagacagttgtatcata

SEQ ID NO: 19237 - DNA, 742 bp, synthetic construct
  source 1..742: mol_type = other DNA
ttaaaacagctctggggttgcacccaccccagaggcccacgtggcggctagtactccggtattgcggtacccttgtacgcctgttttatactcccttcccgtaacttagacgcacaaaaccaagttcaataggagggggtacaaaccagtaccaccacgaacaagcacttctgtttccccggtgatgttgcatagactgcttgcgtggttgaaagcgacggatccgtcatccgcttatgtacttcgagaagcccagtaccacctcggaatcttcgatgcgttgcgctcagcactcaaccccagagtgtagcttaggctgatgagtctggacatccctcaccggtgacggtggtccaggctgcgttggcggcctacccatggctaacgccatgggacgctagttgtgaacaaggtgtgaagagcctattgagctacataagaatcctccggcccctgaatgcggctaatcccaacctcggagcaggtggtcacaaaccagtgattgacctgtcgtaacgcgcaagtccgtggcggaaccgactactttgggtgtccgtgtttccttttatttcattgtggctgcttatggtgacaatcacagattgttatcataaagcgaattggattggccatccggtgaaagtgagatttattatctatctgtttactggactcgctccattgagtgtgtttattctaagaataatctcaacagttattccaatcagacagttgtatcata

SEQ ID NO: 19238 - DNA, 742 bp, synthetic construct
  source 1..742: mol_type = other DNA
ttaaaacagctctggggttgcacccaccccagaggcccacgtggcggctagtactccggtattgcggtacccttgtacgcctgttttatactcccttcccgtaacttagacgcacaaaaccaagttcaatagaagggggtacaaaccagtaccaccacgaacaagcacttctgtttccccggtgatgttgtatagactgcttgcgtggttgaaagcgacggatccgttatccgcttatgtacttcgagaagcccagtaccacctcggaatcttcgatgcgttgcgctcagcactcaaccccagagtgtagcttaggctgatgagtctggacatccctcaccggtgacggtggtccaggctgcgttggcggcctacctatggcaaacgccatgggacgctagttgtgaacaaggtgtgaagagcctattgagctacataagaatcctccggcccctgaatgcggctaatcccaaccacggggcaggtggtcacaaaccagtgattggcctgtcgtaacgcgcaagtccgtggcggaaccgactactttgggtgtccgtgtttccttttattttattgtggctgcttatggtgacaatcacagattgttatcataaagcgaattggattggccatccggtgaaagtgagattcattatctatctgtttgctggattcgctccattgagtgtgtttactctaagtacaatttcaatagttatttcaatcagtcaattgtatcata

SEQ ID NO: 19239 - DNA, 742 bp, synthetic construct
  source 1..742: mol_type = other DNA
ttaaaacagctctggggttgcacccaccccagaggcccacgtggcggctagtactccggtattgcggtacccttgtacgcctgttttatactcccttcccgtaacttagacgcacaaaaccaagttcaatagaagggggtacaaaccagtaccaccacgaacaagcacttctgtttccccggtgatgttgtatagactgcttgcgtggttgaaagcgacggatccgttatccgcttatgtacttcgagaagcccagtaccacctcggaatcttcgatgcgttgcgctcagcactcaaccccagagtgtagcttaggctgatgagtctggacatccctcaccggtgacggtggtccaggctgcgttggcggcctacctatggcaaacgccatgggacgctagttgtgaacaaggtgtgaagagcctattgagctacataagaatcctccggcccctgaatgcggctaatcccaaccacggggcaggtggtcacaaaccagtgattggcctgtcgtaacgcgcaagtccgtggcggaaccgactactttgggtgtccgtgtttccttttattttattgtggctgcttatggtgacaatcacagattgttatcataaagcgaattggattggccatccggtgaaagtgagattcattatctatctgtttgctggattcgctccattgagtgtgtttattctaagtacaatttcaatagttatttcaatcagtcaattgtatcata

SEQ ID NO: 19240 - DNA, 742 bp, synthetic construct
  source 1..742: mol_type = other DNA
ttaaaacagctctggggttgcacccaccccagaggcccacgtggcggctagtactccggtattgcggtacccttgtacgcctgttttatactcccttcccgtaacttagacgcacaaaaccaagttcaatagaagggggtacaaaccagtaccaccacgaacaagcacttctgtttccccggtgatgttgtatagactgcttgcgtggttgaaagcgacggatccgttatccgcttatgtacttcgagaagcccagtaccacctcggaatcttcgatgcgttgcgctcagcactcaaccccagagtgtagcttaggctgatgagtctggacatccctcaccggtgacggtggtccaggctgcgttggcggcctacctatggcaaacgccatgggacgctagttgtgaacaaggtgtgaagagcctattgagctacataagaatcctccggcccctgaatgcggctaatcccaaccacggggcaggtggtcacaaaccagtgattggcctgtcgtaacgcgcaagtccgtggcggaaccgactactttgggtgtccgtgtttccttttattttattgtggctgcttatggtgacaatcacagattgttatcataaagcgaattggattggccatccggtgaaagtgagattcattatctatctgtttgctggattcgctccattgagtgtgtttattctaagtacaatttcaatagttatttcaatcagtcaattgtattata

SEQ ID NO: 19241 - DNA, 742 bp, synthetic construct
  source 1..742: mol_type = other DNA
ttaaaacagctctggggttgtacccaccccagaggcccacgtggcggctagtactccggtattgcggtacccttgtacgcctgttttatactcccttcccgtaacttagacgcacaaaaccaagttcaatagaagggggtacaaaccagtaccaccacgaacaagcacttctgtttccccggtgatgttgtatagactgcttgcgtggttgaaagcgacggatccgttatccgcttatgtacttcgagaagcccagtaccacctcggaatcttcgatgcgttgcgctcagcactcaaccccagagtgtagcttaggctgatgagtctggacatccctcaccggtgacggtggtccaggctgcgttggcggcctacctatggcaaacgccatgggacgctagttgtgaacaaggtgtgaagagcctattgagctacataagaatcctccggcccctgaatgcggctaatcccaaccacggggcaggtggtcacaaaccagtgattggcctgtcgtaacgcgcaagtccgtggcggaaccgactactttgggtgtccgtgtttccttttattttattgtggctgcttatggtgacaatcacagattgttatcataaagcgaattggattggccatccggtgaaagtgagatttattatctatctgtttgctggattcgctccattgagtgtgtttactctaagtacaatttcaatagttatttcaatcagtcaattgtatcata

SEQ ID NO: 19242 - DNA, 742 bp, synthetic construct
  source 1..742: mol_type = other DNA
ttaaaacagctctggggttgcacccaccccagaggcccacgtggcggctagtactccggtattgcggtacccttgtacgcctgttttatactcccttcccgcaacttagacgcacaaaaccaagttcaatagaagggggtacaaaccagtaccaccacgaacaagcacttctgtttccccggtgatgttgtatagactgctcgcgtggttgaaagcgacggatccgttatccgcttatgtacttcgagaagcccagtaccacctcggaatcttcgatgcgttgcgctcagcactcaaccccagagtgtagcttaggctgatgagtctggacatccctcaccggagacggtggtccaggctgcgttggcggcctacccatggctagcgccatgggacgctagttgtgaacaaggtgtgaagagcctattgagctacataagagtcctccggcccctgaatgcggctaatcccaacctcggagcaggtggtcacaaaccagtgattggcctgtcgtaacgcgcaagtccgtggcggaaccgactactttgggtgtccgtgtttccttttattttattgtggctgcttatggtgacaatcacagattgttatcataaagcgaattggattggccatccggtgaaagtgagattcattacctatctgtttgctggatttgctccattgagtgtgtttactctaagtacaattttaacagttatttcaatcagacaattgtatcata

SEQ ID NO: 19243 - DNA, 742 bp, synthetic construct
  source 1..742: mol_type = other DNA
ttaaaacagctctggggttgcacccaccccagaggcccacgtggcggctagtactccggtattgcggtacccttgtacgcctgttttatactcccttcccgcaacttagacgcacaaaaccaagttcaatagaagggggtacaaaccagtaccaccacgaacaagcacttctgtttccccggtgatgttgtatagactgctcgcgtggttgaaagcgacggatccgttatccgcttatgtacttcgagaagcccagtaccacctcggaatcttcgatgcgttgcgctcagcactcaaccccagagtgtagcttaggctgatgagtctggacatccctcaccggagacggtggtccaggctgcgttggcggcctacccatggctagcgccatgggacgctagttgtgaacaaggtgtgaagagcctattgagctacataagagtcctccggcccctgaatgcggctaatcccaacctcggagcaggtggtcacaaaccagtgattggcctgtcgtaacgcgcaagtccgtggcggaaccgactactttgggtgtccgtgtttccttttattttattgtggctgcttatggtgacaatcacagattgttatcataaagcgaattggattggccatccggtgaaagtgagattcattacctatctgtttgctggatttgttccattgagtgtgtttactctaagtacaatttcaacagttatttcaatcagacaattgtatcata

SEQ ID NO: 19244 - DNA, 742 bp, synthetic construct
  source 1..742: mol_type = other DNA
ttaaaacagctctggggttgcacccaccccagaggcccacgtggcggctagtactccggtattgcggtacccttgtacgcctgttttatactcccttcccgcaacttagacgcacaaaaccaagttcaatagaagggggtacaaaccagtaccaccacgaacaagcacttctgtttccccggtgatgttgtatagactgctcgcgtggttgaaagcgacggatccgttatccgcttatgtacttcgagaagcccagtaccacctcggaaccttcgatgcgttgcgctcagcactcaaccccagagtgtagcttaggctgatgagtctggacatccctcaccggagacggtggtccaggctgcgttggcggcctacccatggctagcgccatgggacgctagttgtgaacaaggtgtgaagagcctattgagctacataagagtcctccggcccctgaatgcggctaatcccaacctcggagcaggtggtcacaaaccagtgattggcctgtcgtaacgcgcaagtccgtggcggaaccgactactttgggtgtccgtgtttccttttattttattatggctgcttatggtgacaatcacagattgttatcataaagcgaattggattggccatccggtgaaagtgagattcattacctatctgtttgccggatttgctccattgagtgtgtttactctaagtacaatttcaacagttatttcaatcagacaattgtatcata

SEQ ID NO: 19245 - DNA, 742 bp, synthetic construct
  source 1..742: mol_type = other DNA
ttaaaacagctctggggttgcacccaccccagaggcccacgtggcggctagtactccggtattgcggtacccttgtacgcctgttttatactcccttcccgcaacttagacgcacaaaaccaagttcaatagaagggggtacaaaccagtaccaccacgaacaagcacttctgtttccccggtgacgttgtatagactgctcgcgtggttgaaagcgacggatccgttatccgcttatgtacttcgagaagcccagtaccacctcggaatcttcgatgcgttgcgctcagcactcaaccccagagtgtagcttaggctgatgagtctggacatccctcaccggagacggtggtccaggctgcgttggcggcctacccatggctagcgccatgggacgctagttgtgaacaaggtgtgaagagcctattgagctacataagagtcctccggcccctgaatgcggctaatcccaacctcggagcaggtggtcacaaaccagtgattggcctgtcgtaacgcgcaagtccgtggcggaaccgactactttgggtgtccgtgtttccttttattttattgtggctgcttatggtgacaatcacagattgttatcataaagcgaattggattggccatccggtgaaagtgagattcattacctatctgtttgctggatttgctccattgagtgtgtttactccaagtacaatttcaacagttatttcaatcagacaattgtatcgta

SEQ ID NO: 19246 - DNA, 742 bp, synthetic construct
  source 1..742: mol_type = other DNA
ttaaaacagctctggggttgcacccaccccagaggcccacgtggcggctagtactccggtattgcggtacccttgtacgcctgttttatacccccttcccgcaacttagacgcacaaaaccaagttcaatagaagggggtacaaaccagtaccaccacgaacaagcacttctgtttccccggtgatgttgtatagactgcttgcgtggttgaaagcgacggatccgttatccgcttatgtacttcgagaagcccagtaccaccttggaatcttcgatgcgttgcgctcagcactcaaccccagagtgtagcttaggctgatgagtctggacatccctcaccggagacggtggtccaggctgcgttggcggcctacccatggctagcgccatgggacgctagttgtgaacaaggtgtgaagagcctattgagctacataagagtcctccggcccctgaatgcggctaatcccaacctcggagcaggtggtcacaaaccagtgactggcctgtcgtaacgcgcaagtccgtggcggaaccgactactttgggtgtccgtgtttccttttattttactgtggctgcttatggtgacaatcacagattgttatcataaagcgaattggattggccatccggtgaaagtgagatccattacctatctgtttgctggatttgctccattgagtgtgtttactctaagtacaatttcaacagttatttcaatcagacaattgtatcata

SEQ ID NO: 19247 - DNA, 742 bp, synthetic construct
  source 1..742: mol_type = other DNA
ttaaaacagctctggggttgcacccaccccagaggcccacgtggcggctagtactccggtattgcggtacccttgtacgcctgttttatactcccttcccgcaacttagacgcacaaaaccaagttcaatagaagggggtacaaaccagtaccaccacgaacaagcacttctgtttccccggtgacgttgtatagactgctcgcgtggttgaaagcgacggatccgttatccgcttatgtacttcgagaagcccagtaccacctcggaatcttcgatgcgttgcgctcagcactcaaccccagagtgtagcttaggctgatgagtctggacatccctcaccggagacggtggtccaggctgcgttggcggcctacccatggctagcgccatgggacgctagttgtgaacaaggtgtgaagagcctattgagctacataagagtcctccggcccctgaatgcggctaatcccaacctcggagcaggtggtcacaaaccagtgattggcctgtcgtaacgcgcaagtccgtggcggaaccgactactttgggtgtccgtgtttccttttattttattgtggctgcttatggtgacaatcacagattgttatcataaagcgaattggattggccatccggtgaaagtgagattcattacctatctgtttgctggatttgctccattgagtgtgtttactctaagtacaatttcaacagttatttcaatcagacaattgtatcata

SEQ ID NO: 19248 - DNA, 742 bp, synthetic construct
  source 1..742: mol_type = other DNA
ttaaaacagctctggggttgcacccaccccagaggcccacgtggcggctagtactccggtattgcggtacccttgtacgcctgttttatacccccttcccgcaacttagacgcacaaaaccaagttcaatagaagggggtacaaaccagtaccaccacgaacaagcacttctgtttccccggtgatgttgtatagactgcttgcgtggttgaaagcgacggatccgttatccgcttatgtacttcgagaagcccagtaccaccttggaatcttcgatgcgttgcgctcagcactcaaccccagagtgtagcttaggctgatgagtctggacatccctcaccggagacggtggtccaggctgcgttggcggcctacccatggctagcgccatgggacgctagttgtgaacaaggtgtgaagagcctattgagctacataagagtcctccggcccctgaatgcggctaatcccaacctcggagcaggtggtcacaaaccagtgattggcctgtcgtaacgcgcaagtccgtggcggaaccgactactttgggtgtccgtgtttccttttattttactgtggctgcttatggtgacaatcacagattgttatcataaagcgaattggattggccatccggtgaaagtgagatccattacctatctgtttgctggatttgctccattgagtgtgtttactctaagtacaatttcaacagttatttcaatcagacaattgtatcata

SEQ ID NO: 19249 - DNA, 742 bp, synthetic construct
  source 1..742: mol_type = other DNA
ttaaaacagctctggggttgcacccaccccagaggcccacgtggcggctagtactccggtattgcggtacccttgtacgcctgttttatactcccttcccgtaacttagacgcacaaaaccaagttcaatagaagggggtacaaaccagtaccaccacgaacaagcacttctgtttccccggtgatgttgtatagactgcttgcgtggttgaaagcgacggatccgttatccgcttatgtacttcgagaagcccagtaccacctcggaatcttcgatgcgttgcgctcagcactcaaccccagagtgtagcttaggctgatgagtctggacatccctcaccggtgacggtggtccaggctgcgttggcggcctacctatggctaacgccatgggacgctagttgtgaacaaggtgtgaagagcctattgagctacataagaatcctccggcccctgaatgcggctaatcccaacctcggagcaggtggtcacaaaccagtgattggcctgtcgtaacgcgcaagtccgtggcggaaccgactactttgggtgtccgtgtttccttttattttattgtggctgcttatggtgacaatcacagattgttatcataaagcgaattggattggccatccggtgaaagtgagattcattatctatctgtttgctggattcgctccattgagtgtgtttactctaagtacaatttcaacagttatttcaatcagacaattgtatcata

SEQ ID NO: 19250 - DNA, 847 bp, synthetic construct
  source 1..847: mol_type = other DNA
ttaaaacagcctgggggttgttcccacccccagggcccacgtggcgcaagtactctgcttcgttagaagccttgtacgcctgttttcccctccttaaacaaattaagattgccacttccgaggggagtagtccgactccgctccgatacgtcgctccagtgcgctagtacgcttagtactttctcacggggatagtggtatccctccctagtaatttagaagacttgaaaaaccgaccaataggcacctcgcatccagcggggtaaaggtcaagcacttctgtttccccgggtcgagtagcgatagactgtgcccacggtcgaaggtgaaacaacccgttatccgactttgtacttcgggaagcctagtaccaccaaagattatgcttggggtttcgctcagcacgaccctggtgtagatcaggccgatggatcaccgcattcctcacaggcgactgtggcggtggtcgcgtggcagcctgccgatggggcaacccatcggacgccaagcatatgacagggtgtgaagagcctactgagctacaaagtattcctccggcccctgaatgcggctaatcccaaccacggagcatttgctaccaaaccaggtagtggaatgtcgtaacgggtaactctgtggcggaaccgactactttgggtgtccgtgtttccttttaatttatcattctgtatatggtgacaactatagtgctatctcgatttgcattactattgttgagattaaaactttattacattgttgcattttaccctttgagtgagttttcacctgaacagattaatttactcatcctgtttatatattacaagcagaaatacttgcaaag

SEQ ID NO: 19251 - DNA, 742 bp, synthetic construct
  source 1..742: mol_type = other DNA
ttaaaacagctctggggttgtacccaccccagaggcccacgtggcggctagtactccggtattgcggtacccttgtacgcctgttttatactcccttcccgtaacttagacgcacaaaaccaagttcaatagaagggggtacaaaccagtaccaccacgaacaagcacttctgtttccccggtgatgtcgtatagactgcttgcgtggttgaaagcgacggatccgttatccgcttatgtacttcgagaagcccagtaccacctcggaatcttcgatgcgttgcgctcagcactcaaccccagagtgtagcttaggctgatgagtctggacatccctcaccggtgacggtggtccaggctgcgttggcggcctacctatggctaacgccatgggacgctagttgtgaacaaggtgtgaagagcctattgagctacataagaatcctccggcccctgaatgcggctaatcccaacctcggagcaggtggtcacaaaccagtgattggcctgtcgtaacgcgcaagtccgtggcggaaccgactactttgggtgtccgtgtttccttttattttattgtggctgcttatggtgacaatcacagattgttatcataaagcgaattggattggccatccggtgaaagtgagattcattatctatctgtttgctggattcgctccattgagtgtgtttactctaagtacaatttcaacagttatttcaatcagacaattgtatcata

SEQ ID NO: 19252 - DNA, 743 bp, synthetic construct
  source 1..743: mol_type = other DNA
taaaacagctctggggttgtccccaccccagaggcccacgtggcggctagtactctggtatcgcggtacctttgtacgcctgttttacacccctaccccatgcaactttagaagcaaatcaataagttcaataggggggggtacaaaccagtaccaccacgaacaagcacttctgtaaccccggtgatcttgtataagctgtgcccacggctgaaagcgagtgatccgttatccgcttaggtacttcgagaagcctagtatcaccttggaatcttcgatgcgttgcgctcagcactctatcccgagtgtagcttaggctgatgagtctgggcgttccccaccggcgacggtggcccaggctgcgttggcggcctacccatggctaacgccatgggacgctagatgtgaacaaggtgtgaagagcctattgagctacttaagagtcctccggcccctgaatgcggctaatcccaaccacggagcaggtgccttcaacccagagggtggcctgtcgtaacgcgcaagtctgtggcggaaccgactactttgggtgtccgtgtttccttttatcttttatatggctgcttatggtgacaatcatagattgttatcataaagtgacttggattggccatccggtaaaatacaaacacatcatctacttgtttgttggatttaccccactcacccaatttactcccagcataacatccattgtttgttaacaagatactgctaccaca

SEQ ID NO: 19253 - DNA, 743 bp, synthetic construct
  source 1..743: mol_type = other DNA
taaaacagctctggggttgttcccaccccagaggcccacgtggcggctagtactctggtatcgcggtacctttgtacgcctgttttatacccctaccccatgtaactttagaagcagttcaacaagttcaatagggggggtgcaaaccagcaccaccacgaacaagcacttctgtaaccccggtgaccttgtataagctgtacccacggctgaaagcgagtgatccgttatccgcttaagtacttcgagaagcctagtatcaccttagaatcttcgatgcgttgcgctcagcactctatcccgagtgtagcttaggctgatgagtctgggcgttcctcaccggcgacggtggcccaggctgcgttggcggcctacccatggctaacgccatgggacgctagatgtgaacaaggtgtgaagagcctattgagctacttaagagtcctccggcccctgaatgcggctaatcccaaccacggagcaggtgccttcaacccagagggtggcctgtcgtaacgcgcaagtctgtggcggaaccgactactttgggtgtccgtgtttccttttatcttttatatggctgcttatggtgacaatcatagattgttatcataaagcgacttggattggccatccggtaaaatacaaacacatcatttacttgtttgttggatttactccactctcccaatttactcctagcataatatccattgttttgttaacaagacattactatcaca

SEQ ID NO: 19254 - DNA, 743 bp, synthetic construct
  source 1..743: mol_type = other DNA
acaggcaactctggggttgttcccaccccagaggcccacgtggcggctagtactctggtatcgcggtacctttgtacgcctgttttatacccctaccccatgtaactttagaagcagttcaacaagttcaatagggggggtgcaaaccagcaccaccacgaacaagcacttctgtaaccccggtgaccttgtataagctgtacccacggctgaaagcgagtgatccgttatccgcttaagtacttcgagaagcctagtatcaccttagaatcttcgatgcgttgcgctcagcactctatcccgagtgtagcttaggctgatgagtctgggcgttcctcaccggcgacggtggcccaggctgcgttggcggcctacccatggctaacgccatgggacgctagatgtgaacaaggtgtgaagagcctattgagctacttaagagtcctccggcccctgaatgcggctaatcccaaccacggagcaggtgccttcaacccagagggtggcttgtcgtaacgcgcaagtctgtggcggaaccgactactttgggtgtccgtgtttccttttatcttttatatggctgcttatggtgacaatcatagattgttatcataaagcgacttggattggccatccggtgaaatacaagcacatcatctacttgtttgttgggtttactccactcacccaatttactcccagcataatatccattgttttgttaacaagacattgctatcaca

SEQ ID NO: 19255 - DNA, 746 bp, synthetic construct
  source 1..746: mol_type = other DNA
taaaacagctctggggttgtacccaccccagaggcccacgtggcggctagcactccggtattacggtacccttgtgcgcctgttttatactcccctcccgcaacttagaagcacgaaaccaagttcaatagaagggggtacaaaccagtaccactacgaacaagcacttctgtttccccggtgacattgcatagactgctcacgcggttgaaagtgatcgatccgttacccgcttgtgtacttcgaaaagcctagtatcgccttggaatcttcgacgcgttgcgctcagcacccgaccccggggtgtagcttaggctgatgagtctggacattcctcaccggtgacggtggtccaggctgcgttggcggcctacctatggctaacgccataggacgttagatgtgaacaaggtgtgaagagcctattgagctacataagagtcctccggcccctgaatgcggctaatcctaaccacggagcaggcggtcgcgaaccagtgactggcttgtcgtaacgcgcaagtctgtggcggaaccgactactttgggtgtccgtgtttcctgttatttttatcatggctgcttatggtgacaatcagagattgttatcataaagcgaattggattggccatccggtgagtgttgtgtcaggtatacaactgtttgttggaaccactgtgttagctttacttctcatttaaccaattaatcaaaaacaatacgagggtaaaacaacaatactaca

SEQ ID NO: 19256 - DNA, 746 bp, synthetic construct
  source 1..746: mol_type = other DNA
taaaacagctctggggttgtacccaccccagaggcccacgtggcggctagcactccggtattacggtacccttgtgcgcctgttttatactcccctcccgcaacttagaagcacgaaaccaagttcaatagaagggggtacaaaccagtaccactacgaacaagcacttctgtttccccggtgacattgcatagactgctcacgcggttgaaagtgatcgatccgttacccgcttgtgtacttcgaaaagcctagtatcgccttggaatcttcgacgcgttgcgctcagcacccgaccccggggtgtagcttaggctgatgagtctggacattcctcaccggtgacggtggtccaggctgcgttggcggcctacctatggctaacgccataggacgttagatgtgaacaaggtgtgaagagcctattgagctacataagagtcctccggcccctgaatgcggctaatcctaaccacggagcaggcggtcgcgaaccagtgactggcttgtcgtaacgcgcaagtctgtggcggaaccgactactttgggtgtccgtgtttcctgttatttttatcatggctgcttatggtgacaatcagagattgttatcataaagcgaattggattggccatccggtgagtgttgtgtcaggtatacaactgtttgttggaaccactgtgttagctttacttctcatttaaccaattaatcaaaaacaatacgaggataaaacaacaatactaca

SEQ ID NO: 19257 - DNA, 741 bp, synthetic construct
  source 1..741: mol_type = other DNA
ttaaaacagcctgtgggttgatcccacccacagggcccactgggcgccagcacactggtatttcggtacctttgtgcgcctgttttatccaccctaccccacgcaacttagaagttcaacttaagcggtcgataggtagtccggtgtaccaaccgggccgtgaccaagcacttctgttaccccggaccgagtatcaataggctgcttgcgcggctgaaggagaaaacgttcgttacccggccaattacttcgaaaaacctagtaccaccatggaggttgcgaggtgtttcgctccgcacaaccctagtgtagatcaggtcgatgagtcaccgcgttccccacgggcgaccgtggcggtggctgcgttggcggcctgcccatggggcaacccatgggacgcttcaatactgacatggtgcgaagagtctattgagctaattggtagtcctccggcccctgaatgcggctaatcctaactgcggagcagatgcccgcatgccagcgggtattctgtcgtaacgggcaactctgcagcggaaccgactactttgggtgtccgtgtttccttttatctttacattggctgcttatggtgacaattgagagattgttaccatatagctattggattggccatccggttacaaatagagcacttgtttatttatttgttggttttgtgccactgaactacaaagtactaaacactctcaactacattatattacttaattcagtgaa

SEQ ID NO: 19258 - DNA, 742 bp, synthetic construct
  source 1..742: mol_type = other DNA
ttaaaacagctctggggttgtacccaccccagaggcccacgtggcggctagtactccggtattgcggtacccttgtacgcctgttttatactcccttcccgtaacttagacgcacaaaaccaagttcaatagaagggggtacaaaccagtaccaccacgaacaagcacttctgtttccccggtgatgtcgtatagactgcttgcgtggttgaaagcgacggatccgttatccgcttatgtacttcgagaagcccagtaccacctcggaatcttcgatgcgttgcgctcagcactcaaccccagagtgtagcttaggctgatgagtctggacatccctcaccggtgacggtggtccaggctgcgttggcggcctacctatggctaacgccatgggacgctagttgtgaacaaggtgtgaagagcctattgagctacataagaatcctccggcccctgaatgcggctaatcccaacctcggagcaggtggtcacaaaccagtgattggcctgtcgtaacgcgcaagtccgtggcggaaccgactactttgggtgtccgtgtttccttttattttattgtggctgcttatggtgacaatcacagattgttatcataaagcgaattggattggccatccggtgaaagtgagactcattatctatctgtttgctggatccgctccattgagtgtgtttactctaagtacaatttcaacagttatttcaatcagacaattgtatcata

SEQ ID NO: 19259 - DNA, 747 bp, synthetic construct; identical to SEQ ID NO: 1166
  source 1..747: mol_type = other DNA

SEQ ID NO: 19260 - DNA, 742 bp, synthetic construct
  source 1..742: mol_type = other DNA
ttaaaacagctctggggttgtacccaccccagaggcccacgcggcggctagtactccggtattgcggtacccttgtacgcctgttttatactcccttcccgtaacttagacgcacaaaaccaagttcaatagaagggggtacaaaccagtaccaccacgaacaagcacttctgtttccccggtgatgttgtatagactgcttgcgtggttgaaagcgacggatccgttatccgcttatgtacttcgagaagcccagtaccacctcggaatcttcgatgcgttgcgctcagcactcaaccccagagtgtagcttaggctgatgagtctggacatccctcaccggtgacggtggtccaggctgcgttggcggcctacctatggctaacgccatgggacgctagttgtgaacaaggtgtgaagagcctattgagctacataagaatcctccggcccctgaatgcggctaatcccaacctcggagcaggtggtcacaaaccagtgattggcctgtcgtaacgcgcaagtccgtggcggaaccgactactttgggtgtccgtgtttccttttattttattgtggctgcttatggtgacaatcacagattgttatcataaagcgaattggattggccatccggtgaaagtgagattcgttatctatctgtttgctggatttgctccattgagtgtgtttactctaagtacaatttcaacagctatttcaatcagacaattgtatcata

SEQ ID NO: 19261 - DNA, 747 bp, synthetic construct
  source 1..747: mol_type = other DNA
ttaaaacagctctggggttgttcccaccccagaggcccacgtggcggccagtacactggtattgcggtacctttgtacgcctgttttatactcccttcccccgtaacttagaagcacaatgtccaagttcaataggagggggtacaaaccagtaccaccacgaacaagcacttctgttcccccggtgaggctgtataggctgtttccacggctaaaagcggctgatccgttatccgctcatgtacttcgagaagcctagtatcaccttggaatcttcgatgcgttgcgctcaacactcaaccccagagtgtagcttaggtcgatgagtctggacgttcctcaccggcgacggtggtccaggctgcgttggcggcctacctgtggcccaaagccacaggacgctagttgtgaacaaggtgtgaagagcctattgagctacctgagagtcctccggcccctgaatgcggctaatcctaaccacggagcaggcagtggcaatccagcgaccagcctgtcgtaacgcgcaagttcgtggcggaaccgactactttgggtgtccgtgtttccttttatttttacaatggctgcttatggtgacaatcattgattgttatcataaagcaaattggattggccatccggtgagaatttgattattaaattactctcttgttgggattgctcctttgaaatcctgtgcactcacacctattggaattacctcattgttaagatatcatcaccact

SEQ ID NO: 19262 - DNA, 742 bp, synthetic construct
  source 1..742: mol_type = other DNA
ttaaaacagctctggggttgcacccaccccagaggcccacgtggcggctagtactccggtattgcggtacccttgtacgcctgttttatactcccttcccgtaacttagatgcacaaaaccaagttcaataggagggggtacaaaccagtaccaccacgaacaagcacttctgtttccccggtgatgttgtatagactgcttgcgtggttgaaagcgacggatccgttatccgcttatgtacttcgagaagcccagtaccacctcggaatcttcgatgcgttgcactcagcactcaaccccagagtgtagcttaggctgatgagcctggacatccctcaccggtgacggtggtccaggctgcgttggcggcctacccatggctaacgccatgggacgctagttgtgaacaaggtgtgaagagcctattgagctacataagagtcctccggcccctgaatgcggctaatcccaacctcggagcaggtggtcacaaaccagtgattggcctgtcgtaacgcgcaagtccgtggcggaaccgactactttgggtgtccgtgtttccttttatcttattgtggctgcttatggtgacaatcacagattgttatcatagagcaaattggattggccatccggtgaaggtgaaattcattatctgtctgtttgctggattcgctccattgagtgtgtttactctaagtacaacttcaacagttatttcaatcagacaattgtatcaca

SEQ ID NO: 19263 - DNA, 742 bp, synthetic construct
  source 1..742: mol_type = other DNA
ttaaaacagctctggggttgcacccaccccagaggcccacgtggcggctagtactccggtattgcggtacccttgtacgcctgttttatactcccttcccgtaacttagatgcacaaaaccaagttcaataggagggggtacaaaccagtaccaccacgaacaagcacttctgtttccccggtgatgttgtatagactgcttgcgtggttgaaagcgacggatccgttatccgcttatgtacttcgagaagcccagtaccacctcggaatcttcgatgcgttgcgctcagcactcaaccccagagtgtagcttaggctgatgagtctggacatccctcaccggtgacggtggtccaggctgcgttggcggcctacccatggctaacgccatgggacgctagttgtgaacaaggtgtgaagagcctattgagctacataagaatcctccggcccctgaatgcggctaatcccaacctcggagcaggtggtcacaaaccagtgattggcctgtcgtaacgcgcaagtccgtggcggaaccgactactttgggtgtccgtgtttccttttatcttattgtggctgcttatggtgacaatcacagattgttatcataaagcaaattggattggccatccggtgaaggtgaaattcattatctgtctgtttgctggattcgctccactgagtgtgtttactctaattacaatttcaacagttatttcaatcagacaattgtatcaca

SEQ ID NO: 19264 - DNA, 742 bp, synthetic construct
  source 1..742: mol_type = other DNA
ttaaaacagctctggggttgcacccaccccagaggcccacgtggcggctagtactccggtattgcggtacccttgtacgcctgttttatactcccttcccgtaacttagatgcacaaaaccaagttcaataggagggggtacaaaccagtaccaccacgaacaagcacttctgtttccccggtgatgttgtatagactgcttgcgtggttgaaagcgacggatccgttatccgcttatgtacttcgagaagcccagtaccacctcggaatcttcgatgcgttgcgctcagcactcaaccccagagtgtagcttaggctgatgagtctggacatccctcaccggtgacggtggtccaggctgcgttggcggcctacccatggctaacgccatgggacgctagttgtgaacaaggtgtgaagagcctattgagctacataagaatcctccggcccctgaatgcggctaatcccaacctcggagcaggtggtcacaaaccagtgattggcctgtcgtaacgcgcaagtccgtggcggaaccgactactttgggtgtccgtgtttccttttatcttattgtggctgcttatggtgacaatcacagattgttatcataaagcaaattggattggccatccggtgaaggcgaaattcattatctgtctgtttactggattcgctccactgagtgtgtttactctaattacaatttcaacagttatctcaatcagacaattgtatcaca

SEQ ID NO: 19265 - DNA, 744 bp, synthetic construct
  source 1..744: mol_type = other DNA
ttaaaacagctctggggttgttcccaccccagaggcccacgtggcggctagtactctggtatcacggtacctttgtacgcctgttttacgtccctaccccatgtaactttagaagcaattcaacaagttcaatagagggggtacaaaccagtaccaccatgaacaagcacttctgttaccccggtgactttgcataagctgtacccacggctgaaagcgaacgatccgttatccgcttgagtacttcgagaagcctagtaccaccttggaatcttcgacgcgttgcgctcagcactctaccccgagtgtagcttaggctgatgagtctgggcattcctcaccggtgacggtggcccaggctgcgttggcggcctacccatggttaacaccatgggacgctagttgtgaacaaggtgtgaagagcctattgagctacttaagagtcctccggcccctgaatgcggctaatcccaaccacggagcaggtgccttcaatccagaaggtggcctgtcgtaacgcgtgagtctgtggcggaaccgactactttgggtgtccgtgtttccttttaccttttatgtggctgcttatggtgacaatcatagattgttatcataaagcgaattggattggccatccggtgaaatacaaacatcttatctacttgcttgttggatttactccactcactcaattcactcccagtataatatctacagttctgttagtaagacattatcatcgat

SEQ ID NO: 19266 - DNA, 747 bp, synthetic construct
  source 1..747: mol_type = other DNA
ttaaaacagctctggggttgtacccaccccagaggcccacgtggcggctagcactccggtattacggtacccttgtgcgcctgttttatactcccttcccgcaacttagaagcacgaaaccaagttcaatagaagggggtacaaaccagtaccactacgaacaagcacttctgtttccccggtgacattgcatagactgctcacgcggttgaaagtgatcgatccgttacccgcttgtgtacttcgaaaagcctagtatcgccttggaatcttcgacgcgttgcgctcagcacccgaccccggggtgtagcttaggctgatgagtctggacattcctcaccggtgacggtggtccaggctgcgttggcggcctacctatggctaacgccataggacgctagatgtgaacaaggtgtgaagagcctattgagctacataagagtcctccggcccctgaatgcggctaatcctaaccacggagcaggcggtcgcaaaccagcgactggcttgtcgtaacgcgcaagtctgtggcggaaccgactactttgggtgtccgtgtttcctgttatttttatcatggctgcttatggtgacaatcagagattgttatcataaagcgaattggattggccatccggtgagtgttgtgtcaggtatacagctgtttgttggaaccactgtgttagctttacttctcatttaaccaattaatcaaaaacaatacgaggataaaacaacaatactaca

SEQ ID NO: 19267 - DNA, 747 bp, synthetic construct
  source 1..747: mol_type = other DNA
ttaaaacagctctggggttgtacccaccccagaggcccacgtggcggctagcactccggtattacggtacccttgtgcgcctgttttatactcccctcccgcaacttagaagcacgaaaccaagttcaatagaagggggtacaaaccagtaccactacgaacaagcacttctgtttccccggtgacattgcatagactgctcacgcggttgaaagcgattgatccgttacccgcttgtgtacttcgaaaagcctagtatcgccttggaatcttcgacgcgttgcgctcagcacccgaccccggggtgtagcttaggctgatgagtctggacattcctcaccggtgacggtggtccaggctgcgttggcggcctacctatggctaacgccataggacgttagatgtgaacaaggtgtgaagagcctattgagctacataagagtcctccggcccctgaatgcggctaatcctaaccacggagcaggcggtcgcgaaccagtgactggcttgtcgtaacgcgcaagtctgtggcggaaccgactactttgggtgtccgtgtttcctgttatttttatcatggctgcttatggtgacaatcagagattgttatcataaggcgaattgggttggccatccggtgagtgttgtgtcaggtatacaactgtttgttggaaccactgtgttagctttacttctcatttaaccaattaatcaaaaacaatacgaggataaaacaacaatactaca

SEQ ID NO: 19268 - DNA, 747 bp, synthetic construct
  source 1..747: mol_type = other DNA
ttaaaacagctctggggttgtacccaccccagaggcccacgtggcggctagcactccggtattacggtacccttgtgcgcctgttttatactcccctcccgcaacttagaagcacgaaaccaagttcaatagaagggggtacaaaccagtaccactacgaacaagcacttctgtttccccggtgacattgcatagactgctcacgcggttgaaagtgatcgatccgttacccgcttgtgtacttcgaaaagcctagtatcaccttggaatcttcgacgcgttgcgctcaacacccgaccccggggtgtagcttaggctgatgagtctggacattcctcaccggtgacggtggtccaggctgcgttggcggcctacctatggctaacgccataggacgctagatgtgaacaaggtgtgaagagcctattgagctacataagagtcctccggcccctgaatgcggctaatcctaaccatggagcaggcggtcacgaaccagtgactggcttgtcgtaacgcgcaagtctgtggcggaaccgactactttgggtgtccgtgtttcctgttatttttatcatggctgcttatggtgacaatcagagattgttatcataaagcgtattggattggccatccggtgagtgttgtgtcaggtatacaactgtttgttggaaccactgtgttagctttacttctcatttaaccaattaatcaaaaacaatacgaggataaaacaacaatactaca

SEQ ID NO: 19269 - DNA, 747 bp, synthetic construct
  source 1..747: mol_type = other DNA
ttaaaacagctctggggttgtacccaccccagaggcccacgtggcggctagcactccggtattgcggtacccttgtgcgcctgttttatacccccctcccgcaacttagaagcacgaaaccaagttcaatagaaaggggtacaaaccagtaccactacgaacaagcacttctgtttccccggtgacattgcatagactgctcacgcggttgaaagtgatcgatccgttacccgcttgtgtacttcgaaaagcctagtatcgccttggaatcttcgacgcgttgcgctcagcacccgaccccggggtgtagcttaggctgatgagtctggacattcctcaccggtgacggtggtccaggctgcgttggcggcctacctatggctgacaccataggacgctagatgtgaacaaggtgtgaagagcctattgagctacacaagagtcctccggcccctgaatgcggctaatcctaaccacggagcaggcggtcgcgaaccagtgactggcttgtcgtaacgcgcaagtctgtggcggaaccgactactttgggtgtccgtgtttcctgttatttttatcatggctgcttatggtgacaatcagagattgttatcataaagcaaattggattggccatccggtgagtgttgtgtcaggtgtgcaactgtttgttggaaccactgtgttaactttacatctcatttaacctattaatcaaaaacaatacgaggataaaacaacaatactaca

SEQ ID NO: 19270 - DNA, 747 bp, synthetic construct
  source 1..747: mol_type = other DNA
ttaaaacagctctggggttgtacccaccccagaggcccacgtggcggctagcactccggtattacggtacccttgtgcgcctgttttatactcccctcccgcaacttagaagcacgaaaccaagttcaatagaagggggtacaaaccagtaccactacgaacaagcacttctgtttccccggtgacattgcataaactgctcacgcggttgaaagtgatcgatccgttacccgcttgtgtacttcgaaaagcctagtatcgccttggaatcttcgacgcgttgcgctcagcacccgaccccggggtgtagcttaggctgatgagtctggacattcctcactggtgacggtggtccaggctgcgttggcggcctacctatggctaacgccataggacgttagatgtgaacaaggtgtgaagagcctattgagctacataagagtcctccggcccctgaatgcggctaatcctaaccacggagcaggcggtcgcgaaccagtgactggcttgtcgtaacgtgcaagtctgtggcggaaccgactactttgggtgtccgtgtttcctgttatttttatcatggctgcttatggtgacaatcagagattgttattataaagcgaattggattggccatccggtgagtgttgtgtcaggtatacaactgtttgttggaaccactgtgttagctttacttctcatttaaccaattaatcaaaaacaatacgaggataaaacaacaatactaca

SEQ ID NO: 19271 - DNA, 747 bp, synthetic construct
  source 1..747: mol_type = other DNA
ttaaaacagctctggggttgtacccaccccagaggcccacgtggcggctagcactccggtattacggtacccttgtgcgcctgttttatactcccctcccgcaacttagaagcacgaaaccaagttcaatagaagggggtacaaaccagtaccactacgaacaagcacttctgtttccccggtgacattgcatagactgctcacgcggttgaaagtgatcgatccgttacccgcttgtgtacttcgaaaagcctagtatcaccttggaatcttcgacgcgttgcgctcagcacccgaccccggggtgtagcttaggctgatgagtctggacattcctcaccggtgacggtggtccaggctgcgttggcggcctacctatggctaacgccataggacgttagatgtgaacaaggtgtgaagagcctattgagctacataagagtcctccggcccctgaatgcggctaatcctaaccacggagcaggcggtcgcgaaccagtgactggcttgtcgtaacgcgcaagtctgtggcggaaccgactactttgggtgtccgtgtttcctgttatttttatcatggctgcttatggtgacaatcagagattgttatcataaagcgaattggattggccatccggtgagtgttgtgtcaggtatacaactgtttgttggaaccactgtgttagctttacttctcatttaaccaattaatcaaaaacaatacgaggataaaacaacaatactaca

SEQ ID NO: 19272 - DNA, 735 bp, synthetic construct
  source 1..735: mol_type = other DNA
agctctggggttgttcccaccccagaggcccacgtggcggctagtacactggtatcacggtacctttgtacgcctgttttatactccctcccccgcaacttagaagcatacaattcaagctcaataggagggggtgcaagccagcgcctccgtgggcaagcactactgtttccccggtgaggccgcatagactgttcccacggttgaaagtgtccgatccgttatccgctcatgtacttcgagaagcctagtatcgctctggaatcttcgacgcgttgcgctcagcactcaaccccggagtgtagcttgggccgatgagtctggacagtccccactggcgacagtggtccaggctgcgctggcggcccacctgtggcccaaagccacgggacgctagttgtgaacagggtgtgaagagcctattgagctacatgagagtcctccggcccctgaatgcggctaatcctaaccatggagcaggcagctgcaacccagcagccagcctgtcgtaacgcgcaagtccgtggcggaaccgactactttgggtgtccgtgtttccttttattcttgaatggctgcttatggtgacaatcatagattgttatcataaagcgagttggattggccatccagtgtgaatcagattaattactcccttgtttgttggatccactcccgaaacgttttactccttaacttattgaaattgtttgaagacaggatttcagtgtcaca

SEQ ID NO: 19273 - DNA, 742 bp, synthetic construct
  source 1..742: mol_type = other DNA
ttaaaacagctctggggttgttcccaccccagaggcccacgtggcggctagtacactggtatcacggtacctttgtacgcctgttttatactccctcccccgcaacttagaagcatacaattcaagctcaataggagggggtgcaagccagcgcctccgtgggcaagcactactgtttccccggtgaggccgcatagactgttcccacggttgaaagtgtccgatccgttatccgctcatgtacttcgagaagcctagtatcgctctggaatcttcgacgcgttgcgctcagcactcaaccccggagtgtagcttgggccgatgagtctggacagtccccactggcgacagtggtccaggctgcgctggcggcccacctgtggcccaaagccacgggacgctagttgtgaacagggtgtgaagagcctattgagctacatgagagtcctccggcccctgaatgcggctaatcctaaccatggagcaggcagctgcaacccagcagccagcctgtcgtaacgcgcaagtccgtggcggaaccgactactttgggtgtccgtgtttccttttattcttgaatggctgcttatggtgacaatcatagattgttatcataaagcgagttggattggccatccagtgtgaatcagattaattactcccttgttcgttggatccactcccgaaacgttttactccttaacttattgaaattgtttgaagacaggatttcagtgtcaca

SEQ ID NO: 19274 - DNA, 734 bp, synthetic construct
  source 1..734: mol_type = other DNA
gctctggggttgttcccaccccagaggcccacgtggcggctagtacactggtatcacggtacctttgtacgcctgttttatactccctcccccgcaacttagaagcatacaattcaagctcaataggagggggtgcaagccagtgcctccatgggcaagcactactgtttccccggtgaggccgcatagactgttcccacggttgaaagtgtccgatccgttacccgctcatgtacttcgagaagcctagtatcgctctggaatcttcgacgcgttgcgctcagcactcaaccccggagtgtagcttgggccgatgagtctggacagtccccactggcgacagtggtccaggctgcgctggcggcccacctgtggcccaaagccacgggacgctagttgtgaacagggtgtgaagagcctattgagctacatgagagtcctccggcccctgaatgcggctaattctaaccatggagcaggtagctgcaacccagcagccagcctgtcgtaacgcgcaagtccgtggcgaaaccgactactttgggtgtccgtgtttccttttattcttgaatggctgcttatggtgacaatcatagattgttatcataaagcgagttggattggccatccagtgtgaatcagattaattactcccttgtttgttggatccactcccgaaacgttttactcctcaacttattgaaattgtttgaagacaggatttcagtgtcaca

SEQ ID NO: 19275 - DNA, 747 bp, synthetic construct
  source 1..747: mol_type = other DNA
ttaaaacagctctggggttgtacccactccagaggcccacgtggcggctagcactccggtattacggtacctttgtgcgcctgttttatactcccctcccgcaacttagaagcacgaaaccaagttcaatagaagggggtacaaaccagtaccactacgaacaagcacttctgtttccccggtgacattgcatagactgctcacgcggttgaaagtgatcgatccgttacccgcttgtgtacttcgaaaagcctagtatcgccttggaatcttcgacgcgttgcgctcagcacccgaccccggggtgtggcttaggctgatgagtctggacattcctcaccggtgacggtggtctaggctgcgttggcggcctacctatggctaacgccataggacgttagatgtgaacaaggtgtgaagagcctattgagctacataagagtcctccggcccctgaatgcggctaatcctaaccacggaacaggcggtcgcgaaccagtgactggcttgtcgtaacgcgcaagtctgtggcggaaccgactactttgggtgtccgtgtttcctgttatttttatcatggctgcttatggtgacaatcagagattgttatcataaagcgaattggattggccatccggtgagtgttgtgtcaggtatacaactgtttgttggaaccactgtgttagctttacttctcatttaaccaattaatcaaaaacaatacgaggataaaacaacaatactaca

SEQ ID NO: 19276 - DNA, 747 bp, synthetic construct
  source 1..747: mol_type = other DNA
ttaaaacagctctggggttgtacccaccccagaggcccacgtggcggctagcactccggtattacggtacccttgtgcgcctgttttatactcccctcccgcaacttagaagcacgaaaccaagttcaatagaagggggtacaaaccagtaccactacgaacaagcacttctgtttccccggtgacattgcatagactgctcacgcggttgaaagtgatcgatccgttacccgcttgtgtacttcgaaaagcctagtatcgccttggaatcttcgacgcgttgcgctcagcacccgaccccggggtgtagcttaggctgatgagtctggacattcctcaccggtgacggtggtccaggctgcgttggcggcctacctatggctaacgccataggacgttagatgtgaacaaggtgtgaagagcctattgagctacataagagtcctccggcccctgaatgcggctaatcctaaccacggaacaggcggtcgcgaaccagtgactggcttgtcgtaacgcgcaagtctgtggcggaaccgactactttgggtgtccgtgtttcctgttatttttatcatggctgcttatggtgacaatcagagattgttatcataaagcgaattggattggccatccggtgagtgttgtgtcaggtatacaactgtttgttggaaccactgtgttagctttacttctcatttaaccaattaatcaaaaacaatacgaggataaaacaacaatactaca

SEQ ID NO: 19277 - DNA, 747 bp, synthetic construct
  source 1..747: mol_type = other DNA
ttaaaacagctctggggttgtacccaccccagaggcccacgtggcggctagcactccggtattacggtacccttgtgcgcctgttttatactcccctcccgcaacttagaagcacgaaaccaagttcaatagaagggggtacaaaccagtaccactacgaacaagcacttctgtttccccggtgacatcgcatagactgctcacgcggttgaaagtgatcgatccgttacccgcttgtgtacttcgaaaagcctagtatcgccttggaatcttcgacgcgttgcgctcagcacccgaccccggggtgtagcttaggctgatgagtctggacattcctcaccggtgacggtggtccaggctgcgttggcggcctacctatggctaacgccataggacgttagatgtgaacaaggtgtgaagagcctattgagctacataagagtcctccggcccctgaatgcggctaatcctaaccacggagcaggcggtcgcgaaccagtgactggcttgtcgtaacgcgcaagtctgtggcggaaccgactactttgggtgtccgtgtttcctgttatttttatcatggctgcttatggtgacaatcagagattgttatcataaagcgaattggattggccatccggtgagtgttgtgtcaggtatacaactgtttgttggaaccactgtgttagctttacttctcatttaaccaattaatcaaaaacaatacgaggataaaacaacaatactaca

SEQ ID NO: 19278 - DNA, 747 bp, synthetic construct
  source 1..747: mol_type = other DNA
ttaaaacagctctggggttgtacccaccccagaggcccacgtggcggctagcactccggtattacggtacccttgtgcgcctgttttatactcccctcccgcaacttagaagcacgaaaccaagttcaatagaagggggtacaaaccagtaccactacgaacaagcacttctgtttccccggtgacattgcatagactgctcacgcggttgaaagtgatcgatccgttacccgcttgtgtacttcgaaaagcctagtatcgccttggaatcttcgacgcgttgcgctcagcacccgaccccggggtgtagcttaggctgatgagtctggacattcctcaccggtgacggtggtccaggctgcgttggcggcctacctatggctaacgccataggacgttagatgtgaacaaggtgtgaagagcctattgagctacataagagtcctccggcccctgaatgcggctaatcctaaccacggagcaggcggtcgcgaaccagtgactggcttgtcgtaacgcgcaagtctgtggcggaaccgactactttgggtgtccgtgtttcctgttatttttatcatggctgcttatggtgacaatcagagattgttatcataaagcgaattggattggccatccggtgagtgttgtgtcaagtatacaactgtttgttggaaccactgtgttagctttacttctcatttaaccaattaatcaaaaacaatacgaggataaaacaacaatactaca

SEQ ID NO: 19279 - DNA, 747 bp, synthetic construct
  source 1..747: mol_type = other DNA
ttaaaacagctctggggttgtacccaccccagaggcccacgtggcggctagcactccggtattacggtacccttgtgcgcctgttttatactcccctcccgcaacttagaagcacgaaaccaagttcaatagaaaggggtacaaaccagtaccactacgaacaagcacttctgtttccccggtgacattgcatagactgctcacgcggttgaaagtgatcgatccgttacccgcttgtgtacttcgaaaagcctagtatcgccttggaatcttcgacgcgttgcgctcagcacccgaccccggggtgtagcttaggctgatgagtctggacattcctcaccggtgacggtggtccaggctgcgttggcggcctacctatggctaacgccataggacgctagatgtgaacaaggtgtgaagagcctattgagctacataagagtcctccggcccctgaatgcggctaatcctaaccacggagcaggcggtcgcgaaccagtgactggcttgtcgtaacgcgcaagtctgtggcggaaccgactactttgggtgtccgtgtttcctgttatttttatcatggctgcttatggtgacaatcagagattgttatcataaagcgaattggattggccatccggtgagtgttgtgtcaggtatacaactgtttgttggaaccactgtgttagctttacttctcatttaaccaattaatcaaaaacaatacgaggataaaacaacaatactaca

SEQ ID NO: 19280 - DNA, 747 bp, synthetic construct
  source 1..747: mol_type = other DNA
ttaaaacagctctggggttgtacccaccccagaggcccacgtggcggctagcactccggtattacggtacccttgtgcgcctgttttatactcccctcccgcaacttagaagcacgaaaccaagttcaatagaagggggtacaaaccagtaccactacgaacaagcacttctgtttccccggtgacattgcatagactgctcacgcggttgaaagtgatcgatccgttacccgcttgtgtacttcgaaaagcctagtatcaccttggaatcttcgacgcgttgcgctcagcacccgaccccggggtgtagcttaggctgatgagtctggacattcctcaccggtgacggtggtccaggctgcgttggcggcctacctatggctaacgccataggacgctagatgtgaacaaggtgtgaagagcctattgagctacataagagtcctccggcccctgaatgcggctaatcctaaccacggagcaggcggtcgcgaaccagtgactggcttgtcgtaacgcgcaagtctgtggcggaaccgactactttgggtgtccgtgtttcctgttatttttatcatggctgcttatggtgacaatcagagattgttatcataaagcaaattggattggccatccggtgagtattgtgtcaggtacacaactgttcgttggaaccactgtgttatctttacttctcatttaaccaattaatcaaaaacaacacgaggataaaacaacaatactaca

SEQ ID NO: 19281 - DNA, 747 bp, synthetic construct; identical to SEQ ID NO: 1170
  source 1..747: mol_type = other DNA

SEQ ID NO: 19282 - DNA, 747 bp, synthetic construct
  source 1..747: mol_type = other DNA
ttaaaacagctctggggttgtacccaccccagaggcccacgtggcggctagcactccggtattacggtacccttgtgcgcctgttttatactcccctcccgtaacttagaagcacgaaaccaagttcaatagaagggggtacaaaccagtaccaccacgaacaagcacttctgtttccccggtgacattgcatagactgctcacgcggttgaaagtgatcgatccgttacccgcttgtgtacttcgaaaagcctagtatcgccttggaatcttcgacgcgttgcgctcagcacccgaccccggggtgtagcttgggctgatgagtctggacattcctcaccggtgacggtggtccaggctgcgttggcggcctacctatggctaacgccataggacgctagatgtgaacaaggtgtgaagagcctattgagctacataagagtcctccggcccctgaatgcggctaatcctaaccacggagcaggcggtcgcgaaccagtgactggcttgtcgtaacgcgcaagtctgtggcggaaccgactactttgggtgtccgtgtttcctgttatttttatcatggctgcttatggtgacaatcagagattgttatcataaagcgaattggattggccatccggtgagtgttgtgtcaggtgtacaactgtttgttggaaccactgtgttagcttcacttctcattcaaccaattaatcaaaaacaatacgaggataaaacaacaatattaca

SEQ ID NO: 19283 - DNA, 747 bp, synthetic construct
  source 1..747: mol_type = other DNA
ttaaaacagctctggggttgtacccaccccagaggcccacgtggcggctagcactccggtattacggtacccttgtgcgcctgttttatactcccctcccgtaacttagaagcacgaaaccaagttcaatagaagggggtacaaaccagtaccaccacgaacaagcacttctgtttccccggtgacattgcatagactgctcacgcggttgaaagtgatcgatccgttacccgcttgtgtacttcgaaaagcctagtatcgccttggaatcttcgacgcgttgcgctcagcacccgaccccggggtgtagcttgggctgatgagtctggacattcctcaccggtgacggtggtccaggctgcgttggcggcctacctatggctaacgccataggacgctagatgtgaacaaggtgtgaagagcctattgagctacataagagtcctccggcccctgaatgcggctaatcctaaccacggagcaggcggtcgcgaaccagtgactggcttgtcgtaacgcgcaagtctgtggcggaaccgactactttgggtgtccgtgtttcctgttatttttatcatggctgcttatggtgacaatcagagattgttatcataaagcgaattggattggccatccggtgagtgttgtgtcaggtgtacaactgtttgttggaaccactgtgttagctttacttctcattcaatcaattaatcaaaaacaatacgaggataaaacaacaatattaca

SEQ ID NO: 19284 - DNA, 747 bp, synthetic construct
  source 1..747: mol_type = other DNA
ttaaaacagctctggggttgtacccaccccagaggcccacgtggcggctagcactccggtattacggtacccttgtgcgcctgttttatactccccccccgcaacttagaagcacgaaaccaagttcaatagaagggggtacaaaccagtaccaccacgaacaagcacttctgtttccccggtgacattgcatagactgctcacgcggttgaaagtgatcgatccgttacccgcttgtgtacttcgaaaagcctagtatcgccttggaatcttcgacgcgttgcgctcagcaccccaccccggggtgtagcttaggctgatgagtctggacattcctcaccggtgacggtggtccaggctgcgttggcggcctacctatggctaacgccataggacgctagatgtgaacaaggtgtgaagagcctattgagctacataagagtcctccggcccctgaatgcggctaatcctaaccacggagcaggcggtcgcgaaccagtgactggcttgtcgtaacgcgcaagtctgtggcggaaccgactactttgggtgtccgtgtttcctgttatttttatcatggctgcttatggtgacaatcagagattgttatcataaagcgaattggattggccatccggtgagtgtcgtgccaggtatacaactgtttgttggaaccactgtgttagctttacttctcattcaaccaattaatcaaaaacaatacgaggataaaacaacaatactaca

SEQ ID NO: 19285 - DNA, 747 bp, synthetic construct
  source 1..747: mol_type = other DNA
ttaaaacagctctggggttgtacccaccccagaggcccacgtggcggctagcactccggtattacggtacccttgtgcgcctgttttatacccccctcccgcaacttagaagcacgaaaccaagttcaatagaagggggtacaaaccagtaccaccaggaacaagcacttctgtttccccggtgacattgcatagactgctcacgcggttgaaagcgatcgatccgttacccgcttgtgtacttcgagaagcctagtatcgccttggaatcttcgacgcgttgcgctcagcacccgaccccggggtgtagcttaggctgatgagtctggacactcctcaccggcgacggtggtccaggctgcgttggcggcctacctatggctaatgccataggacgctagatgtgaacaaggtgtgaagagcctattgagctacataagagtcctccggcccctgaatgcggctaatcctaaccacggagcaggcggtcgcaaaccagtgactggcttgtcgtaccgcgcaagtctgtggcggaaccgactactttgggtgtccgtgtttcctgttatttttatcatggctgcttatggtgacaatcagagattgttatcataaagcgaattggattggccatccggtgagtgttgtgtcaggtatacaactgtttgttgtaaccattgtattagctttacttctcatttaaccaattaatcaaaaacaatacgaggataaaactacaatactaca

SEQ ID NO: 19286 - DNA, 747 bp, synthetic construct
  source 1..747: mol_type = other DNA
ttaaaacagctctggggttgtacccaccccagaggcccacgtggcggctagcactccggtatcacggtacccttgtgcgcctgttttatactcccttcccgtaacttagaagcacgaaaccaagttcaataggagggggtacaaaccagtaccaccacgaacaagcacttctgtttccccggtgacattgcatagactgctcacgcggttgaaagtgatcgatccgttacccgcttgtgtacttcgaaaagcttagtaccaccttggaatcttcgacgcgttgcgctcagcgcccgaccccggggcgtagcttaggctgatgagtctggacattcctcaccggtgacggtggtccaggctgcgttggcggcctacctatggctaacgccataggacgctagatgtgaacaaggtgtgaagagcctattgagctacataagagtcctccggcccctgaatgcggctaatcctaaccatggagcaggcggtcgcgaaccagtgactggcttgtcgtaacgcgcaagtccgtggcggaaccgactactttgggtgtccgtgtttcctgttatttttatcatggctgcttatggtgacaatcagagattgttaccatagagcgaattggattggccatccggtgagtgttgcgtcaggtatacaactgtttgttggaatcactgtgttaactttactttttatccaaccaaccagtcaaaaacaatacgagggtaaaacaacaatattaca

SEQ ID NO: 19287 - DNA, 746 bp, synthetic construct
  source 1..746: mol_type = other DNA
ttaaaacagcctgtgggttgttcccaccccagaggcccacgtggcggctagtactctggtatcacggtacctttgtacgcctgttttacatccccttcccatgcaactttagaagcaaatcactaagttcaatagggggggtacaaaccagtaccaccacgaacaagcacttctgttaccccggtgatttcacataagctgtgcccacggccgaaagtgaacgatccgttacccgcttgagtacttcgagaagcctagtatcaccttggaaccttcgatgcgttgcgttcagcactctaacccgagtgtagcttaggctgatgagtctgggcgatccccaccggcgacggtggcccaggctgcgttggcggcctacccatggccaacgccatgggacgctagttttgaacaaggtgtgaagagcctattgagctactcaagagtcctccggcccctgaatgcggctaatcccaaccacggagcaagtgtcctcaaaccagagggtggcttgtcgtaacgcgcaagtctgtggcggaaccgactactttgggtgtccgtgtttccttttatttcatattggctgcttatggtgataatcacggattgttatcataaagcgaattggattggccatccggtgagatacaagcacattatttacctttttatcggattcactccaatacaatattcttcaccaaggttgatccaaatagtcttagtgattagaaattattatttcagca

SEQ ID NO: 19288 - DNA, 746 bp, synthetic construct; identical to SEQ ID NO: 1137
  source 1..746: mol_type = other DNA

SEQ ID NO: 19289 - DNA, 747 bp, synthetic construct
  source 1..747: mol_type = other DNA
ttaaaacagctctggggttgtacccaccccagaggcccacgtggcggctagcactccggtattacggtacccttgtgcgcctgttttatactcccctcccgtaacttagaagcacgaaaccaagttcaatagaagggggtacaaaccagtaccaccacgaacaagcacttctgtttccccggtgacattgcatagactgctcacgcggttgaaagtgatcgatccgttacccgcttgtgtacttcgaaaagcctagtatcgccttggaatcttcgacgcgttgcgctcagcacccgaccccggggtgtagcttgggctgatgagtctggacattcctcaccggtgacggtggtccaggctgcgttggcggcctacctatggctaacgccataggacgctagatgtgaacaaggtgtgaagagcctattgagctacataagagtcctccggcccctgaatgcggctaatcctaaccacggagcaggcggtcgcgaaccagtgactggcttgtcgtaacgcgcaagtctgtggcggaaccgactactttgggtgtccgtgtttcctgttatttttatcatggctgcttatggtgacaatcagagattgttatcataaagcgaattggattggccatccggtgagtgttgtgtcaggtgtacaactgtttgttggaaccactgtgttagctttacttctcattcaaccaattaatcaaaaacaatacgaggataaaacaacaatattaca

SEQ ID NO: 19290 - DNA, 747 bp, synthetic construct
  source 1..747: mol_type = other DNA
ttaaaacagctctggggttgtatccaccccagaggcccacgtggcggctagcactccggtattacggtacccttgtgcgcctgttttatactcccctcccgcaacttagaagcacgaaaccaagttcaatagaagggggtacaaaccagtaccactacgaacaagcacttctgtttccccggtgacattgcatagactgctcacgcggttgaaagtgatcgatccgttacccgcttgtgtacttcgaaaagcctagtatcgccttggaatcttcgacgcgttgcgctcagcacccgaccccggggtgtagcttaggctgatgagtctggacattcctcaccggtgacggtggtccaggctgcgttggcggcctacctatggctaacgccataggacgctagatgtgaacaaggtgtgaagagcctattgagctacacaagagtcctccggcccctgaatgcggctaatcctaaccacggagcaggcggtcgcgaaccagtgactggcttgtcgtaacgcgcaagtctgtggcggaaccgactactttgggtgtccgtgtttcctgttatttttatcatggctgcttatggtgacaatcagagattgttatcataaagcgaattggattggccatccggtgagtgttgtgtcaggtatacaactgtttgttggaaccactgtgttagctttacttctcatttaaccaattaatcaaaaacaatacgaggataaaacaacaatactaca

SEQ ID NO: 19291 - DNA, 747 bp, synthetic construct
  source 1..747: mol_type = other DNA
ttaaaacagctctggggttgtacccaccccagaggcccacgtggcggctagcactccggtattacggtacccttgtgcgcctgttttatactcccctcccgcaacttagaagcacgaaaccaagttcaatagaagggggtacaaaccagtaccactacgaacaagcacttctgtttccccggtgacattgcatagactgctcacgcggttgaaagtgatcgatccgttacccgcttgtgtacttcgaaaagcctagtatcgccttggaatcttcgacgcgttgcgctcagcacccgaccccggggtgtagcttaggctgatgagtctggacattcctcaccggtgacggtggtccaggctgcgttggcggcctacctatggctaacgccataggacgctagatgtgaacaaggtgtgaagagcctattgagctacataagagtcctccggcccctgaatgcggctaatcctaaccacggagcaggcggtcgcaaaccagtgactggcttgtcgtaacgcgcaagtctgtggcggaaccgactactttgggtgtccgtgtttcctgttatttttatcatggctgcttatggtgacaatcagagattgttatcataaagcgaattggattggccatccggtgagtgttgtgtcaggtatacaactgtttgttggaaccactgtgttagctttacttctcatttaaccaattaatcaaaaacaatacgaggataaaacaacaatactaca

SEQ ID NO: 19292 - DNA, 747 bp, synthetic construct
  source 1..747: mol_type = other DNA
ttaaaacagctctggggttgtacccaccccagaggcccacgtggcggctagcactccggtattacggtacccttgtgcgcctgttttatactcccctcccgcaacttagaagcacgaaaccaagttcaatagaagggggtacaaaccagtaccaccacgaacaagcacttctgtttccccggtgacattgcatagactgctcacgcggttgaaagcgatcgatccgttacccgcttgtgtacttcgaaaagcctagtatcgccttggaatcttcgacgcgttgcgctcagcacccgaccccggggtgtagcttaggctgatgagtctggacattcctcaccggcgacggtggtccaggctgcgttggcggcctacctatggctaacgccataggacgctagatgtgaacaaggtgtgaagagcctattgagctacataagagtcctccggcccctgaatgcggctaatcctaaccacggagcaggcggtcacgaaccagtgactggcttgtcgtaacgcgcaagtctgtggcggaaccgactactttgggtgtccgtgtttcctgttatttttatcatggctgcttatggtgacaatcagagattgttatcataaagcgaattggattggccatccggtgagtgttgtgtcagatatacaactgtttgttggaaccactgtattagctttacttctcatttaaccaattaatcaaaaacaatacgaggataaaacaacaatactaca

SEQ ID NO: 19293 - DNA, 747 bp, synthetic construct
  source 1..747: mol_type = other DNA
ttaaaacagctctggggttgtacccaccccagaggcccacgtggcggctagcactccggtattacggtacccttgtgcgcctgttttatactcccctcccgcaacttagaagcacgaaaccaagttcaatagaagggggtacaaaccagtaccactacgaacaagcacttctgtttccccggtgacattgcatagactgctcacgcggttgaaagtgatcgatccgttacccgcttgtgtacttcgaaaagcctagtatcgccttggaatcttcgacgcgttgcgctcagcacccgaccccggggtgtagcttaggctgatgagtctggacattcctcaccggtgacggtggtccaggctgcgttggcggcctacctacggctaacgccataggacgctagatgtgaacaaggtgtgaagagcctattgagctacataagagtcctccggcccctgaatgcggctaatcctaaccacggagcaggcggtcgcgaaccagtgactggcttgtcgtaacgcgcaagtctgtggcggaaccgactactttgggtgtccgtgtttcctgttatttttatcatggctgcttatggtgacaatcagagattgttatcataaagcgaattggattggccatccggtgagtgttgtgtcagatatacaactgtttgttggaaccactgtgttagctttacttctcatttaaccaattaatcaaaaacaatacgaggataaaacaacaatactaca

SEQ ID NO: 19294 - DNA, 747 bp, synthetic construct
  source 1..747: mol_type = other DNA
ttaaaacagctctggggttgtacccaccccagaggcccacgtggcggctagcactccggtattacggtacccttgtgcgcctgttttatactcccctcccgcaacttagaagcacgaaaccaagttcaatagaaaggggtacaaaccagtaccactacgaacaagcacttctgtttccccggtgacattgcatagactgctcacgcggttgaaagtgatcgatccgttacccgcttgtgtacttcgaaaagcctagtatcgccttggaatcttcgacgcgttgcgctcagcacccgaccccggggtgtagcttaggctgatgagtctggacattcctcaccggtgacggtggtccaggctgcgttggcggcctacctatggctaacgccataggacgctagatgtgaacaaggtgtgaagagcctattgagctacacaagagtcctccggcccctgaatgcggctaatcctaaccacggagcaggcggtcgcgaaccagtgactggcttgtcgtaacgcgcaagtctgtggcggaaccgactactttgggtgtccgtgtttcctgttatttttatcatggctgcttatggtgacaatcagagattgttatcataaagcgaattggattggccatccggtgagtgttgtgtcaggtatacaactgtttattagaaccactgtgttagctttacttctcatttaaccaattaatcaaaaacaatacgaggataaaacaacaacactaca

SEQ ID NO: 19295 - DNA, 747 bp, synthetic construct
  source 1..747: mol_type = other DNA
ttaaaacagctctggggttgtacccaccccagaggcccacgtggcggctagcactccggtattacggtacccttgtgcgcctgttttatactcccctcccgcaacttagaagcacgaaaccaagttcaatagaagggggtacaaaccagtaccactacgaacaagcacttctgtttccccggtgacattgcatagactgctcacgcggttgaaagtgatcgatccgttacccgcttgtgtacttcgagaagcctagtatcgccttggaatcttcgatgcgttgcgctcagcacccgaccccggggtgtagcttaggctgatgagtctggacattcctcaccggtgacggtggtccaggctgcgttggcggcctacctatggctaacgccataggacgctagatgtgaacaaggtgtgaagagcctattgagctacataagagtcctccggcccctgaatgcggctaatcctaaccacggagcaggcggtcgcgaaccagtgactggcttgtcgtaacgcgcaagtctgtggcggaaccgactactttgggtgtccgtgtttcctgttatttttatcatggctgcttatggtgacaatcagagattgttatcataaagcgaattggattggccatccggtgagtgttgtgtcaggtatacaactgtttgttggaaccactgtgttagttttacttctcatttaaccaattaatcaaaaacaatacgaggataaaacaacaatactata

SEQ ID NO: 19296 - DNA, 747 bp, synthetic construct
  source 1..747: mol_type = other DNA
ttaaaacagctctggggttgtacccaccccagaggcccacgtggcggctagcactccggtattacggtacccttgtgcgcctgttttatactcccctcccgcaacttagaagcacgaaaccaagttcaatagaagggggtacaaaccagtaccactacgaacaagcacttctgtttccccggtgacattgcatagactgctcacgcggttgaaagtgatcgatccgttacccgcttgtgtacttcgaaaagcctagtatcgccttggaatcttcgacgcgttgcgctcagcacccgaccccggggtgtagcttaggctgatgagtctggacattcctcaccggtgacggtggtccaggctgcgttggcggcctacctatggctaacgccataggacgctagatgtgaacaaggtgtgaagagcctattgagctacataagagtcctccggcccctgaatgcggctaatcctaaccacggagcaggcggtcgcgaaccagtgactggcttgtcgtaacgcgcaagtctgtggcggaaccgactactttgggtgtccgtgtttcctgttatttttatcatggctgcttatggtgacaatcagagattgttatcataaagcgaattggattggccatccggtgagtgttgtgtcaggtgtacaactgttagttggaaccactgtgttagctttacttctcatttaaccaattaatcaaaaacaatacgaggataaaacaacaatactaca

SEQ ID NO: 19297 - DNA, 747 bp, synthetic construct
  source 1..747: mol_type = other DNA
ttaaaacagctctggggttgtacccaccccagaggcccacgtggcggctagcactccggtattacggtacctttgtgcgcctgttttatactcccctcccgcaacttagaagcacgaaaccaagttcaatagaagggggtacaaaccagtaccactacgaacaagcacttctgtttccccggtgacattgcatagactgctcacgcggttgaaagtgatcgatccgttacccgcttgtgtacttcgaaaagcctagtatcgccttggaatcttcgacgcgttgcgctcagcacccgaccccggggtgtagcttaggctgatgagtctggacattcctcaccggtgacggtggtccaggctgcgttggcggcctacctatggctaacgccataggacgctagatgtgaacaaggtgtgaagagcctattgagctacataagagtcctccggcccctgaatgcggctaatcctacccacggagcaggcggtcgcgaaccagtgactggcttgtcgtaatgcgcaagtctgtggtggaaccgactactttgggtgtccgtgtttcctgttatttttatcatggctgcttatggtgacaatcggagattgttatcataaagcgagttggattggccatccggtgagtgttgtgtcaggtatacaactgtttgttggaaccactgtgttagctttacctctcatttaaccaattaatcaaaaacaatacgaagataaaacaacaatactaca

SEQ ID NO: 19298 - DNA, 747 bp, synthetic construct
  source 1..747: mol_type = other DNA
ttaaaacagctctggggttgtacccaccccagaggcccacgtggcggctagcactccggtattacggtacccttgtgcgcctgttttatactcccctcccgcaacttagaagcacgaaaccaagttcaatagaagggggtacaaaccagtaccactacgaacaagcacttctgtttccccggtgacattgcatagactgctcacgcggttgaaagtgatcgatccgttacccgcttgtgtacttcgaaaagcctagtatcgccttggaatcttcgacgcgttgcgctcagcacccgaccccggggtgtagcttaggctgatgagtctggacattcctcaccggtgacggtggtccaggctgcgttggcggcctacctatggctaacgccataggacgctagatgtgaacaaggtgtgaagagcctattgagctacacaagagtcctccggcccctgaatgcggctaatcctaaccacggagcaggcggtcgcgaaccagtgactggcttgtcgtaacgcgcaagtctgtggcggaaccgactactttgggtgtccgtgtttcctgttatttttatcatggctgcttatggtgacaatcagagattgttatcataaagcgaattggattggccatccggtgagtgttgtgtcaggtatacaactgtttgttggaaccactgtgttagctttacttctcatttaaccaattaatcaaaaacaatacgaggataaaacaacaatactaca

SEQ ID NO: 19299 - DNA, 747 bp, synthetic construct
  source 1..747: mol_type = other DNA
ttaaaacagctctggggttgtacccaccccagaggcccacgtggcggctagcactccggtattacggtacccttgtgcgcctgttttatactcccctcccgcaacttagaagcacgaaaccaagttcaatagaagggggtacaaaccagtaccactacgaacaagcacttctgtttccccggtgacattgcatagactgctcacgcggttgaaagtgatcgatccgttacccgcttgtgtacttcgaaaagcctagtatcgccttggaatcttcgacgcgttgcgctcagcacccgaccccggggtgtagcttaggctgatgagtctggacattcctcaccggtgacggtggtccaggctgcgttggcggcctacctatggctaacgccataggacgctagatgtgaacaaggtgtgaagagcctattgagctacataagagtcctccggcccctgaatgcggctaatcctaaccacggagcaggcggtcgcgaaccagtgactggcttgtcgtaacgcgcaagtctgtggcggaaccgactactttgggtgtccgtgtttcctgttatttttatcatggctgcttatggtgacaatcagagattgttatcataaagcgaattggattggccatccggtgagtgttgtgtcaggtatacaactgtttgttggaaccactgtgttagctttacttctcatttaaccaattaatcaaaaacaatacgagggtaaaacaacaatactaca

SEQ ID NO: 19300 - DNA, 747 bp, synthetic construct
  source 1..747: mol_type = other DNA
ttaaaacagctctggggttgtacccaccccagaggcccacgtggcggctagcactccggtattacggtacccttgtgcgcctgttttatactcccctcccgcaacttagaagcacgaaaccaagttcaatagaagggggtacaaaccagtaccactacgaacaagcacttctgtttccccggtgacattacatagactgctcacgcggttgaaagtgatcgacccgttacccgcttgtgtacttcgaaaagcctagtatcgccttggaatcctcgacgcgttgcgctcagcacccgaccccggggtgtagcttaggctgatgagtctggacattcctcaccggtgacggtggtccaggctgcgttggcggcctacctatggctaacgccataggacgctagatgtgaacaaggtgtgaagagcctattgagctacataagagtcctccggcccctgaatgcggctaatcctaaccacggagcaggcggtcgcgaaccagtgactggcttgtcgtaacgcgcaagtctgtggcggaaccgactactttgggtgtccgtgtttcctgttatttttatcatggctgcttatggtgacaatcagagattgttatcataaagcgaattggattggccatccggtgagtgttgtgtcaggtatacaactgtttgttggaaccactgtgttggctttacttctcatttgaccaattaatcaaaaacaatacgaggataaaacaacaatactaca

SEQ ID NO: 19301 - DNA, 747 bp, synthetic construct
  source 1..747: mol_type = other DNA
ttaaaacagctctggggttgtacccaccccagaggcccacgtggcggccagcactccggtattacggtacccttgtgcgcctgttttatactcccctcccgcaacttagaagcacgaaaccaagttcaatagaagggggtacaaaccagtaccactacgaacaagcacttctgtttccccggtgacattgcatagactgctcacgcggtcaaaagtgatcgatccgttacccgcttgtgtacttcgaaaagcctagtatcgccttggaatcttcgacgcgttgcgctcagcacccgaccccggggtgtagcttaggctgatgagtctggacattcctcaccggtgacggtggtccaggctgcgttggcggcctacctatggctaacgccataggacgctagatgtgaacaaggtgtgaagagcctattgagctacataagagtcctccggcccctgaatgcggctaatcctaaccacggagcaggcggtcgcgaaccagcgactggcttgtcgtaacgcgcaagtctgtggcggaaccgactactttgggtgtccgtgtttcctgttattcttatcatggctgcttatggtgacaatcagagattgttatcataaagcgaattggattggccatccggtgagtgtagtgtcaagtatacaactgtttgttggaaccactgtgttagtattacttctcatttaaccaattaaacaaaaacaatacgaggataaaacaacaacactaca

SEQ ID NO: 19302 - DNA, 747 bp, synthetic construct
  source 1..747: mol_type = other DNA
ttaaaacagctctggggttgttcccaccccagaggcccacgtggcggctagtactccggtatcacggtacccttgtacgcctgttttatactcccttcccccgtaacttagaagaaacaaacaaagttcaatagaagggggtacaaaccagtaccaccacgaacaagcacttctgtctccccggtgacgttgtatagactgtacccacggtcgaaaacgattgatccgttatccgcttttgtacttcgagaagcctagtatcatcttggaatcttcgatgcgttgcgctcagcactcaatcccagagtgtagcttaggtcgatgagtctggacgttcctcaccggcgacggtggtccaggctgcgttggcggcctacctgtggcccaaagccacaggacgctagtcgtgaacaaggtgtgaagagcctattgagctacaaaagagtcctccggcccctgaatgcggctaatcctaaccacggagcaagggtgcgtgagccaacacataccttgtcgtaacgcgtaagttcgtggcggaaccgactactttgggtgtccgtgtttccttttattcttgtattggctgcttatggtgacaatcatagattgttatcataaagcgacttggattggccatccagtggaagtgaaatactttgtctacctgtctgttggttttactccatttgactaattcacttacaagcttattgctataatttttattgactaaacaacaataccaca

SEQ ID NO: 19303 - DNA, 747 bp, synthetic construct
  source 1..747: mol_type = other DNA
ttaaaacagctctggggttgtacccaccccagaggcccacgtggcggctagcactccggtattacggtacccttgtgcgcctgttttatactcccctcccgcaacttagaagcacgaacccaagttcaatagaaggtggtacaaaccagtaccactacgaacaagcacttctgtttccccggtgacattgcatagactgctcacgcggttgaaagtgatcgatccgttacccgcttgtgtacttcgaaaagcctagtatcgccttggaatcttcggcgcgttgcgctcagcacccgaccccggggtgtagcttaggctgatgagtctggacattcctcaccggagacggtggtccaggctgcgttggcggcctacctatggctaacgccataggacgctagatgtgaacaaggtgtgaagagcctattgagctacacaagagtcctccggcccctgaatgcggctaatcctaaccacggagcaggcggtcgcgaaccagtgactggcttgtcgtaacgcgcaagtctgtggcggaaccgactactttgggtgtccgtgtttcctgttatttttatcatggctgcttatggtgacaatcagagattgttatcataaagcgaattggattggccatccggtgagtgttgtgtcaggtatacaactgtttgttggaaccactgtgttagctttacttctcatttaaccaattaatcaaaaacaatacgaggataaaacaacaatattaca

SEQ ID NO: 19304 - DNA, 747 bp, synthetic construct
  source 1..747: mol_type = other DNA
ttaaaacagctctggggttgtacccaccccagaggcccacgtggcggctagcactccggtatcacggtacccttgtgcgcctgttttatattccccccccgcaacttagaagcacgaaaccaagttcaatagaagggggtacaaaccagtaccaccacgaacaagcacttctgtttccccggtgacattgcatagactgctcacgcggttgaaagtgatcgatccgttacccgcttgtgtacttcgaaaagcctagtattgccttggaatcttcgacgcgttgcgctcagcacccgaccccggggtgtagcttaggctgatgagtctggacattcctcaccggtgacggtggtccaggctgcgttggcggcctacctatggctaatgccataggacgctagatgtgaacaaggtgtgaagagcctattgagctacataagagtcctccggcccctgaatgcggctaatcctaaccacggagcaggcggtcgcaaaccagtgactagcttgtcgtaacgcgcaagtctgtggcggaaccgactactttgggtgtccgtgtttcctgttatttttattatggctgcttatggtgacaatcagagattgttatcataaagcgaattggattggccatccggtgagtgttgtgtcaggtatacaactgtttgttggaaccactgtgttagtttaacctctctttcaaccaattagtcaaaaacaatacgaagatagaacaacaatactaca

SEQ ID NO: 19305 - DNA, 745 bp, synthetic construct; identical to SEQ ID NO: 1104
  source 1..745: mol_type = other DNA

SEQ ID NO: 19306 - DNA, 747 bp, synthetic construct
  source 1..747: mol_type = other DNA
ttaaaacagctctggggttgtacccaccccagaggcccacgtggcggctagcactccggtattacggtacccttgtgcgcctgttttatactcccctcccgcaacttagaagcacgaaaccaagttcaatagaagggggtacaaaccagtaccactacgaacaagcacttctgtttccccggtgacattgcatagactgctcacgcggttgaaagtgatcgatccgttacccgcttgtgtacttcgaaaagcctagtatcgccttggaatcttcgacgcgttgcgctcagcacccgaccccggggtgtagcttaggctgatgagtctggacattcctcaccggtgacggtggtccaggctgcgttggcggcctacctatggctaacgccataggacgctagatgtgaacaaggtgtgaagagcctattgagctacataagagtcctccggcccctgaatgcggctaatcctaaccacggagcaggcggtcgcgaaccagtgactggcttgtcgtaacgcgcaagtctgtggcggaaccgactactttgggtgtccgtgtttcctgttatttttatcatggctgcttatggtgacaatcagagattgttatcataaagcgaattggattggccatccggtgagtgttgtgtcaggtatacaactgtttgttggaaccactgtgttagctttacttctcatttaaccaattaatcaaaaacaatacgaggataaaataacaatactaca

SEQ ID NO: 19307 - DNA, 747 bp, synthetic construct
  source 1..747: mol_type = other DNA
tttaaacagctctggggttgtacccaccccagaggcccacgtggcggctagcactccggtattacggtacccttgtgcgcctgttttatactcccctcccgtaacttagaagcacgaaaccaagttcaatagaagggggtacaaaccagtaccactacgaacaagcacttctgtttccccggtgacatcgcatagactgctcacgcggttgaaagtgatcgatccgttacccgcttgtgtacttcgaaaagcctagtatcgccttggaatcttcgacgcgttgcgctcagcacccgaccccggggtgtagcttaggctgatgagtctggacattcctcaccggtgacggtggtccaggctgcgttggcggcctacctatggctaacgccataggacgctagatgtgaacaaggtgtgaagagcctattgagctacataagagtcctccggcccctgaatgcggctaatcctaaccacggagcaggcggtcgcgaaccagtgactggcttgtcgtaacgcgcaagtctgtggcggaaccgactactttgggtgtccgtgtttcctgttatttttatcatggctgcttatggtgacaatcagagattgttatcataaagcgaattggattggccatccggtgagtgttgtgtcaggtatacaactgtttgttggaaccactgtgttagttttacttctcatttaaccaattaatcaaaaacaatacgaggataaaacaacaatactaca

SEQ ID NO: 19308 - DNA, 747 bp, synthetic construct
  source 1..747: mol_type = other DNA
ttaaaacagctctggggttgtacccaccccagaggcccacgtggcggctagcactccggtattacggtacccttgtgcgcctgttttatactcccctcccgtaacttagaagcacgaaaccaagttcaatagaagggggtacaaaccagtaccactacgaacaagcacttctgtttccccggtgacattgcatagactgctcacgcggttgaaagtgatcgatccgttacccgcttgtgtacttcgaaaagcctagtatcgccttggaatcttcgacgcgttgcgctcagcacccgaccccggggtgtagcttaggctgatgagtctggacattcctcaccggtgacggtggtccaggctgcgttggcggcctacctatggctaacgccataggacgctagatgtgaacaaggtgtgaagagcctattgagctacataagagtcctccggcccctgaatgcggctaatcctaaccacggagcaggcggtcgcgaaccagtgactggcttgtcgtaacgcgcaagtctgtggcggaaccgactactttgggtgtccgtgtttcctgttatttttatcatggctgcttatggtgacaatcagagattgttatcataaagcgaattggattggccatccggtgagtgttgtgtcaggtatacaactgtttgttggaaccactgtgttagttttacttctcatttaaccaattaatcaaaaacaatacgaggataaaacaacaatactaca

SEQ ID NO: 19309 - DNA, 747 bp, synthetic construct
  source 1..747: mol_type = other DNA
ttaaaacagctctggggttgtacccaccccagaggcccacgtggcggctagcactccggtattacggtacccttgtgcgcctgttttatactcccctcccgcaacttagaagcacgaaaccaagttcaatagaagggggtacaaaccagtaccactacgaacaagcacttctgtttccccggtgacatcgcatagactgctcacgcggttgaaagcgatcgatccgttacccgcttgtgtacttcgagaagcctagtatcgccttggaatcttcgacgcgttgcgctcagcacccgaccccggggtgtagcttaggctgatgagtctggacattcctcaccggtgacggtggtccaggctgcgttggcggcctacctatggctaacgccataggacgctagatgtgaacaaggtgtgaagagcctattgagctacacaagagtcctccggcccctgaatgcggctaatcctaaccacggagcaggcggtcgcgaaccagtgactggcttgtcgtaacgcgcaagtctgtggcggaaccgactactttgggtgtccgtgtttcctgttatttttatcatggctgcttatggtgacaatcagagattgttatcataaagcgaattggattggccatccggtgagtgttgtgtcaggtatacaactgtttgttggaaccactgtgttggttttacttctcatttaaccaattaatcaaaaacaatacgaggataaaacatcaatactaca

SEQ ID NO: 19310 - DNA, 747 bp, synthetic construct
  source 1..747: mol_type = other DNA
ttaaaacagctttggggttgtacccaccccagaggcccacgtggcggctagcactccggtattacggtacccttgtgcgcctgttttacactcccctcccgtaacttagaagcacgaaaccaagttcaatagaagggggtacaagccagtaccactacgaacaagcacttctgtttccccggtgacatcgcatagactgctcacgcggttgaaagtgatcgatccgttacccgcttgtgtacttcgaaaagcctagtatcgccttggaatcttcgacgcgttgcgctcagcacccgaccccggggtgtagcttaggctgatgagtctggacattcctcaccggtgacggtggtccaggctgcgttggcggcctacctatggctaacgccataggacgctagatgtgcacaaggtgtgaagagcctattgagctacataagagtcctccggcccctgaatgcggctaatcctaaccacggagcaggcggtcgcgaaccagtgactggcttgtcgtaacgcgcaagtctgtggcggaaccgactactttgggtgtccgtgtttcctgttatttttatcatggctgcttatggtgacaatcagagattgttatcataaagcgaattggattggccatccggtgagtgttgtgtcaggtatacaactgtttgttggaaccactgtgttagttttacttctcatttaaccaattaatcaaaaacaatacgaggataaaacatcaataatata

SEQ ID NO: 19311 - DNA, 747 bp, synthetic construct
  source 1..747: mol_type = other DNA
ttaaaacagctctggggttgtacccaccccagaggcccacgtggcggctagcactccggtattacggtacccttgtgcgcctgttttacactcccctcccgtaacttagaagtacgaaaccaagttcaatagaagggggtacaagccagtaccactacgaacaagcacttctgtttccccggtgacatcgcatagactgctcacgcggttgaaagtgatcgatccgttacccgcttgtgtacttcgaaaagcctagtatcgccttggaatcttcgacgcgttgcgctcagcacccgaccccggggtgtagcttaggctgatgagtctggacattcctcaccggtgacggtggtccaggctgcgttggcggcctacctatggctaacgccataggacgctagatgtgcacaaggtgtgaagagcctattgagctacataagagtcctccggcccctgaatgcggctaatcctaaccacggagcaggcggtcgcgaaccagtgactggcttgtcgtaacgcgcaagtctgtggcggaaccgactactttgggtgtccgtgtttcctgttatttttatcatggctgcttatggtgacaatcagagattgttatcataaagcgaattggattggccatccggtgagtgttgtgtcaggtatacaactgtttgttggaaccactgtgttagttttacttctcatttaaccaattaatcaaaaacaatacgaggataaaacatcaatactaca

SEQ ID NO: 19312 - DNA, 747 bp, synthetic construct
  source 1..747: mol_type = other DNA
ttaaaacagctctggggttgtacccaccccagaggcccacgtggcggctagcactccggtattacggtacccttgtgcgcctgttttatactcccctcccgcaacttagaagcacgaaaccaagttcaatagaagggggtacaaaccagtaccactacgaacaagcactcctgtttccccggtgacattgcatagactgctcacgcggttgaaagtgatcgatccgttacccgcttgtgtacttcgaaaagcctagtatcgccttggaatcttcgacgcgttgcgctcagcacccgaccccggggtgtagcttaggctgatgagtctggacattcctcaccggtgacggtggtccaggctgcgttggcggcctacctatggctaacgccataggacgttagatgtgaacaaggtgtgaagagcctattgagctacataagagtcctccggcccctgaatgcggctaatcctaaccacggagcaggcggtcgcgaaccagtgactggcttgtcgtaacgcgcaagtctgtggcggaaccgactactttgggtgtccgtgtttcctgttatttttatcatggctgcttatggtgacaatcagagattgttatcataaagcgaattggattggccatccggtgagtgttgtgtcaggtatacaactgcttgttggaaccactgtgttagctttacttctcatttaaccaattaatcaaaaacaatacgaggataaaacaacaatactaca

SEQ ID NO: 19313 - DNA, 747 bp, synthetic construct
  source 1..747: mol_type = other DNA
ttaaaacagctctggggttgtacccaccccagaggcccacgtggcggctagcactccggtattacggtacccttgtgcgcctgttttatactcccctcccgcaacttagaagcacaaaaccaagttcaatagaagggggtacaaaccagtaccactatgaacaagcacttctgtttccccggtgacattgcatagactgctcacgcggttgaaagcgatcgatccgttacccgcttgtgtacttcgagaagcctagtatcgccttggaatcttcgacgcgttgcgctcagcacccgaccccggggtgtagcttaggctgatgagtctggacattcctcaccggtgacggtggtccaggctgcgttggcggcctacctatggctaacgccatgggacgctagttgtgaacaaggtgtgaagagcctattgagctacataagagtcctccggcccctgaatgcggctaatcctaaccacggagcaggcggtcgcgaaccagtgactggcttgtcgtaacgcgcaagtctgtggcggaaccgactactttgggtgtccgtgtttcctgttatttttatcatggctgcttatggtgacaatcagagattgttatcataaagcgaattggattggccatccggtgagtgttgtgacaggtatataattgtttgttggaaccactgtgttagctttacttctcatttaaccaattaatcaaaaacaatacgaggataaaacaacaatactaca

SEQ ID NO: 19314 - DNA, 744 bp, synthetic construct
  source 1..744: mol_type = other DNA
tttaaaacagcctgtgggttgttcccacccacagggcccattgggcgccagcacactggtatttcggtacctttgtgcgcctgttttatccacccctcccccaaacgtaacttagaagctcaacacacatggtcagtaggtggcccagtaagccaaccgggtcttgaccaagcacttctgttaccccggaccgagtatcaataggctgctcacgcggctgaaggagaaagtgttcgttatccggccaattacttcgagaaacctagtaccaccatggaagttgcgcagcgtttcgctccgcacgaccccagtgtagatcaggccgatgagtcaccgcactcctcacgggcgaccgtggcggtggctgcgctggcggcctgcccatggggcaacccatgggacgcttcaatgctgacatggtgcgaagagtctattgagctaattggtaatcctccggcccctgaatgcggctaatcctaactgcggagcagatatccacacgccagtgggcagtctgtcgtaacgggcaactctgcagcggaaccgactactttgggtgtccgtgtttctctttattctttattggctgcttatggtgacaattgaaagattgttgccatatagctattggattggccatccagtgacaaacagagcgatcgtttatctatttgttggtttcataccattaaattttaaagttttgaaaactatcaacttgatcatactacttaatacagcaaa

SEQ ID NO: 19315 - DNA, 747 bp, synthetic construct
  source 1..747: mol_type = other DNA
ttaaaacagctctggggttgtacccaccccagaggcccacgtggcggctagcactccggtattacggtacccttgtgcgcctgttttatactcccctcccgcaacttagaagcacgaaaccaagttcaatagaagggggtacaaaccagtaccactacgaacaagcacttctgtttccccggtgacattgcatagactgctcacgcggttgaaagtgatcgatccgttacccgcttgtgtacttcgaaaagcctagtatcgccttggaatcttcgacgcgttgcgctcagcacccgaccccggggtgtagcttaggctgatgagtctggacattcctcaccggtgacggtggtccaggctgcgttggcggcctacctatggctaacgccataggacgttagatgtgaacaaggtgtgaagagcctattgagctacataagagtcctccggcccctgaatgcggctaatcctaaccacagagcaggcggtcgcgaaccagtgactggcttgtcgtaacgcgcaagtctgtggcggaaccgactactttgggtgtccgtgtttcctgttatttttatcatggctgcttatggtgacaatcagagattgttatcataaagcgaattggattggccatccggtgagtgttgtgtcaggtatacaactgtttgttggaaccactgtgttagctttacttctcatttaaccaattaatcaaaaacaatacgaggataaaacaacaatactaca

SEQ ID NO: 19316 - DNA, 742 bp, synthetic construct
  source 1..742: mol_type = other DNA
ttaaaacagcctgtgggttgttcccacccacagggcccaatgggcgctagcactctggtattacggtacccttgtgcgcctgttttattttcccttccccgactgaaacttagaagtaatacacaccgatcgacagtaagcatggcacaccagccatgttttgatcaagcacttctgtttccccggaccgagtatcaatagactgctcacgcggttgaaggagaaagtgttcgttaaccggctaactacttcgagaagcctagtaacgccatgaaagttgcggagtgtttcgctcagcacttccccagtgtagatcaggtcgatgagtcaccgcgttccccacgggcgaccgtggcggtggctgcgttggcggcctgcctgtggggcaacccacaggacgctctaatacggacatggtgcgaagagcctattgagctagtcagtagtcctccggcccctgaatgcggctaatcctaactgtggagcacatgcccctaacccaaggggtggtgtgtcgtaatgggtaactccgcagcggaaccgactactttgggtgtccgtgtttccttttattcttactttggctgcttatggtgacaattgagagattgttaccatatagttattggattggccacccggtgagtaatagagcaatcatttatttatttattggctacatacctttgaattttaaagccttcaacacactcaactacattttaaaactcaattcaataaa

SEQ ID NO: 19317 - DNA, 747 bp, synthetic construct
  source 1..747: mol_type = other DNA
ttaaaacagctctggggttgtacccaccccagaggcccacgtggcggctagcactccggtattacggtacccttgtgcgcctgttttatactcccctcccgcaacttagaagcacgaaaccaagttcaatagaagggggtacaaaccagtaccactacgaacaagcacttctgtttccccggtgacattgcatagactgctcacgcggttgaaagtgatcgatccgttacccgcttgtgtacttcgaaaagcctagtatcgccttggaatcttcgacgcgttgcgctcagcacccgaccccggggtgtagcttaggctgatgagtctggacattcctcaccggtgacggtggtccaggctgcgttggcggcctacctatggctaacgccataggacgttagatgtgaacaaggtgtgaagagcctattgagctacataagagtcctccggcccctgaatgcggctaattctaaccattgagcaggcagctgcaacccagcagccagcctgtcgtaacgcgcaagtcaatggcgaaaccgactactttgggtgtccgtgtttcctgttatttttatcatggctgcttatggtgacaatcagagattgttatcataaagcgaattggattggccatccggtgagtgttgtgtcaggtatacaactgtttgttggaaccactgtgttagctttacttctcatttaaccaattaatcaaaaacaatacgaggataaaacaacaatactaca

SEQ ID NO: 19318 - DNA, 747 bp, synthetic construct
  source 1..747: mol_type = other DNA
ttaaaacagctctggggttgtacccaccccagaggcccacgtggcggctagcactccggtattacggtacccttgtgcgcctgttttatactcccctcccgcaacttagaagcacgaaaccaagttcaatagaagggggtacaaaccagtaccaccacgaacaagtacttctgtttccccggtgacattgcatagactgctcacgcggttgaaagtgatcgatccgttacccgcttgtgtacttcgaaaagcctagtatcgccttggaatcttcgacgcgttgcgctcagcacccgaccccggggtgtagcttaggctgatgagtctggacattcctcaccggtgacggtggtccaggctgcgttggcggcctacctatggctagcgccataggacgctagatgtgaacaaggtgtgaagagcctattgagctacataagaatcctccggcccctgaatgcggctaatcctaaccacggagcaggcggtcgcgaaccagtgactggcttgtcgtaatgcgcaagtctgtggcggaaccgactactttgggtgtccgtgtttcctgttatttttatcatggctgcttatggtgacaatcagagattgttatcataaagcgaattggattggccatctggtgagtgttgtgtcgggtatacaactgtttgttggaaccactgtgttagctttacttctcatttaaccaattaatcaaaaacaatacgaggataaaacaacaatactaca

SEQ ID NO: 19319 - DNA, 745 bp, synthetic construct; identical to SEQ ID NO: 1105
  source 1..745: mol_type = other DNA

SEQ ID NO: 19320 - DNA, 745 bp, synthetic construct
  source 1..745: mol_type = other DNA
ttaaaacagcctgtgggttgttcccaccccagaggcccacgcggcggctagtactctggtgctgcggtacctttgtacgcctgttttatacccccgtccccgcaatttagaagcaagaaaacaaagttcaatagtaggtggtgcaatccagcatcgctatgaacaagcacttctgttgccccggtgaggttgcatagactgttcccacggtcgaaagtgaccaatccgttacccgcttttgtacttcgagaagcctagtatcaccttggaatcttcgacgcgttgcgttccgcactcaaccccagagtgtagcttaggtcgatgagtctgggcggaccccaccggcgacggtggcccaggctgcgttggcggcctacctgtggtccaaagccacaggacgctagttgtgaacaaggtgtgaagagcctattgagctacaaaagagtcctccggcccctgaatgcggctaatcctaaccacggagcaggtggtcgcaaaccagtgattaacctgtcgtaatgcgcaagtctgtggcggaaccgactactttgggtgtccgtgtttctctttattttactatggctgcttatggtgacaatcgaggattgttatcataaagcgaattggattggccatccggtgaaagtgaaatacattatctattcaattgttgaattcatccagaacacacccgcaacactacatctgattaaactcgttttgataaccagagaacattaccaca

SEQ ID NO: 19321 - DNA, 746 bp, synthetic construct
  source 1..746: mol_type = other DNA
ttaaaacagctctggggttgtacccactccagaggcccacgtggcggctagcactccggtattacggtacccttgtgcgcctgttttatacccccctcccgcaacttagaagcacgaaaccaagttcaatagaagggggtacaaaccagtacctctacgaacaagcacttctgtttccccggtgacattgcatagactgctcacgcggttgaaagcgatcgatccgttacccgcttgtgtacttcgaaaagcctagtatcgccttggaatcttcgacgcgttgcgctcagcacccgaccccggggtgtagcttaggctgatgagtctggacattcctcaccggcgacggtggtccaggctgcgttggcggcctacctatggctaacgccataggacgctagatgtgaacaaggtgtgaagagcctattgagctacataagagtcctccggcccctgaatgcggctaatcctaaccacggagcaggcggtcgcgaaccagcgactggcttgtcgtaacgcgtaagtctgtggcggaaccgactactttgggtgtccgtgtttcctgttatttttattatggctgcttatggtgacaatcagagattgttatcataaagcgaattggattggccatccggtgagtgttgtgtcaggtatacaactgtttgttggaaccactgtgttggctttacttctcatttaaccaattaatcaaaacaattcgaggataaaacaacaattccaca

SEQ ID NO: 19322 - DNA, 746 bp, synthetic construct
  source 1..746: mol_type = other DNA
ttaaaacagctctggggttgtacccactccagaggcccacgtggcggctagcactccggtattacggtacccttgtgcgcctgttttatacccccctcccgcaacttagaagcacgaaaccaagttcaatagaagggggtacaaaccagtacctctacgaacaagcacttctgtttccccggtgacattgcatagactgctcacgcggttgaaagtgatcgatccgttacccgcttgtgtacttcgaaaagcctagtatcgccttggaatcttcgacgcgttgcgctcagcacccgaccccggggtgtagcttaggctgatgagtctggacattcctcaccggcgacggtggtccaggctgcgttggcggcctacctatggctaacgccataggacgctagatgtgaacaaggtgtgaagagcctattgagctacataagagtcctccggcccctgaatgcggctaatcctaaccacggagcaggcggtcgcgaaccagcgactggcttgtcgtaacgcgtaagtctgtggcggaaccgactactttgggtgtccgtgtttcctgttatttttattatggctgcttatggtgacaatcaaagattgttatcataaagcgaattggattggccatccggtgagtgttgtgtcaggtatacaactgtttgttggaaccactgtgttggctttacttcttatttaaccaattaatcaaaacaattcgaggataaaacaacaattccaca

SEQ ID NO: 19323 - DNA, 746 bp, synthetic construct
  source 1..746: mol_type = other DNA
ttaaaacagctctggggttgtacccactccagaggcccacgtggcggctagcactccggtattacggtacccttgtgcgcctgttttatacccccctcccgcaacttagaagcacgaaaccaagttcaatagaagggggtacaaaccagtacctctacgaacaagcacttctgtttccccggtgacattgcatagactgctcacgcggttgaaagtgatcgatccgttatccgcttatgtacttcgaaaagcctagtatcgccttggaatcttcgacgcgttgcgctcagcacccgaccccggggtgtagcttaggctgatgagtctggacattcctcaccggcgacggtggtccaggctgcgttggcggcctacctatggctaacgccataggacgctagatgtgaacaaggtgtgaagagcctattgagctacataagagtcctccggcccctgaatgcggctaatcctaaccacggagcaggcggtcgcgaaccagcgactggcttgtcgtaacgcgcaagtctgtggcggaaccgactactttgggtgtccgtgtttcctgttatttttatcaaggccgcttatggtgacaatcaaagattgttatcataaagcgaattggattggccatccggtgagtgttgtgtcaggtatacaactgtttgttggaaccactgtgttggctttacttctcatttaaccaattaatcaaaacaattcgaggataaaacaacaattccaca

SEQ ID NO: 19324 - DNA, 746 bp, synthetic construct
  source 1..746: mol_type = other DNA
ttaaaacagctctggggttgtacccactccagaggcccacgtggcggctagcactccggtattacggtacccttgtgcgcctgttttatacccccctcccgcaacttagaagcacgaaaccaagttcaatagaagggggtacaaaccagtacctctacgaacaagcacttctgtttccccggtgacattgcatagactgctcacgcggttgaaagcgatcgatccgttacccgcttgtgtacttcgaaaagcctagtatcgccttggaatcttcgacgcgttgcgctcagcacccgaccccggggtgtagcttaggctgatgagtctggacattcctcaccggcgacggtggtccaggctgcgttggcggcctacctatggctaacgccataggacgctagatgtgaacaaggtgtgaagagcctattgagctacataagagtcctccggcccctgaatgcggctaatcctaaccacggagcaggcggtcgcgaaccagcgactggcttgtcgtaacgcgtaagtctgtggcggaaccgactactttgggtgtccgtgtttcctgttatttttatcatggctgcttatggtgacaatcagagattgttatcataaagcgaattggattggccatccggtgagtgttgtgtcaggtatacaactgtttgttggaaccactgtgttggctttacttctcatttaaccaattaatcaaaacaattcgaggataaaacaacaattccaca

SEQ ID NO: 19325 - DNA, 746 bp, synthetic construct
  source 1..746: mol_type = other DNA
ttaaaacagctctggggttgtacccactccagaggcccacgtggcggctagcactccggtattacggtacccttgtgcgcctgttttatacccccctcccgcaacttagaagcacgaaaccaagttcaatagaagggggtacaaaccagtacctctacgaacaagcacttctgtttccccggtgacattgcatagactgctcacgcggttgaaagtgatcgatccgttatccgcttatgtacttcgaaaagcctagtatcgccttggaatcttcgacgcgttgcgctcagcacccgaccccggggtgtagcttaggctgatgagtctggacattcctcaccggcgacggtggtccaggctgcgttggcggcctacctatggctaacgccataggacgctagatgtgaacaaggtgtgaagagcctattgagctacataagagtcctccggcccctgaatgcggctaatcctaaccacggagcaggcggtcgcgaaccagcgactggcttgtcgtaacgcgtaagtctgtggcggaaccgactactttgggtgtccgtgtttcctgttatttttatcatggctgcttatggtgacaatcaaagattgttatcataaagcgaattggattggccatccggtgagtgttgtgtcaggtatacaactgtttgttggaaccactgtgttggctttacttcttatttaaccaattaatcaaaaccattcgaggataaaacaacaattccaca

SEQ ID NO: 19326 - DNA, 746 bp, synthetic construct
  source 1..746: mol_type = other DNA
ttaaaacagctctggggttgtacccactccagaggcccacgtggcggctagcactccggtattacggtacccttgtgcgcctgttttatactcccctcccgcaacttagaagcacgaaaccaagttcaatagaagggggtacaaaccagtaccaccacgaacaagcacttctgtttccccggtgacattgcatagactgctcacgcggttgaaagcgatcgatccgttacccgcttgtgtacttcgaaaagcctagtatcgccttggaatcttcgacgcgttgcgctcagcacccgaccccggggtgtagcttaggctgatgagtctggacattcctcaccggcgacggtggtccaggctgcgttggcggcctacctatggctaacgccataggacgctagatgtgaacaaggtgtgaagagcctattgagctacataagagtcctccggcccctgaatgcggctaatcctaaccacggagcaggcggtcgcgaaccagcgactggcttgtcgtaacgcgtaagtctgtggcggaaccgactactttgggtgtccgtgtttcctgttatttttatcaaggccgcttatggtgacaatcagagattgttatcataaagcgaattggattggccatccggtgagtgttgtgtcaggtatacaactgtttgttggaaccactgtgttggctttacttctcatttaaccaattaatcaaaacaattcgaggataaaacaacaattccaca

SEQ ID NO: 19327 - DNA, 746 bp, synthetic construct
  source 1..746: mol_type = other DNA
ttaaaacagctctggggttgtacccactccagaggcccacgtggcggctagcactccggtattacggtacctttgtgcgcctgttttatactcccctcccgcaacttagaagcacgaaaccaagttcaatagaagggggtacaaaccagtacctctacgaacaagcacttctgtttccccggtgacattgcatagactgctcacgcggttgaaagcgatcgatccgttacccgcttgtgtacttcgaaaagcctagtatcgccttggaatcttcgacgcgttgcgctcagcacccgaccccggggtgtagcttaggctgatgagtctggacattcctcaccggcgacggtggtccaggctgcgttggcggcctacctatggctaacgccataggacgctagatgtgaacaaggtgtgaagagcctattgagctacataagagtcctccggcccctgaatgcggctaatcctaaccacggagcaggcggtcgcgaaccagcgactggcttgtcgtaacgcgtaagtctgtggcggaaccgactactttgggtgtccgtgtttcctgttatttttatcatggccgcttatggtgacaatcagagattgttatcataaagcgaattggattggccatccggtgagtgttgtgtcaggtatacaactgtttgttggaaccactgtgttggctttacttctcatttaaccaattaatcaaaacaattcgaggataaaacaacaattccaca

SEQ ID NO: 19328 - DNA, 746 bp, synthetic construct
  source 1..746: mol_type = other DNA
ttaaaacagctctggggttgtacccactccagaggcccacgtggcggctagcactccggtattacggtacccttgtgcgcctgttttatactcccctcccgcaacttagaagcacgaaaccaagttcaatagaagggggtacaaaccagtacctccacgaacaagcacttctgtttccccggtgacattgcatagactgctcacgcggttgaaagcgatcgatccgttacccgcttgtgtacttcgaaaagcctagtatcgccttggaatcttcgacgcgttgcgctcagcacccgaccccggggtgtagcttaggctgatgagtctggacattcctcaccggcgacggtggtccaggctgcgttggcggcctacctatggctaacgccataggacgctagatgtgaacaaggtgtgaagagcctattgagctacataagagtcctccggcccctgaatgcggctaatcctaaccacggagcaggcggtcgcgaaccagcgactggcttgtcgtaacgcgtaagtctgtggcggaaccgactactttgggtgtccgtgtttcctgttatttttatcatggccgcttatggtgacaatcagagattgttatcataaagcgaattggattggccatccggtgagtgttgtgtcaggtatacaactgtttgttggaaccactgtgttggctttacttctcatttaaccaattaatcaaaacaattcgaggataaaaccacaattccaca

SEQ ID NO: 19329 - DNA, 746 bp, synthetic construct
  source 1..746: mol_type = other DNA
ttaaaacagctctggggttgtacccactccagaggcccacgtggcggctagcactccggtattacggtacccttgtgcgcctgttttatacccccctcccgcaacttagaagcacgaaaccaagttcaatagaagggggtacaaaccagtacctcgacgaacaagcacttctgtttccccggtgacattgcatagactgctcacgcggttgaaagtgatcgatccgttacccgcttatgtacttcgaaaagcctagtatcgccttggaatcttcgacgcgttgcgctcagcacccgaccccggggtgtagcttaggctgatgagtctggacattcctcaccggcgacggtggtccaggctgcgttggcggcctacctatggctaacgccataggacgctagatgtgaacaaggtgtgaagagcctattgagctacataagagtcctccggcccctgaatgcggctaatcctaaccacggagcaggcggtcgcgaaccagcgactggcttgtcgtaacgcgtaagtctgtggcggaaccgactactttgggtgtccgtgtttcctgttatttttatcatggccgcttatggtgacaatcagagattgttatcataaagcgaattggattggccatccggtgagtgttgtgtcaggtatacaactgtttgttggaaccactgtgttggctttacttctcatttaaccaattaatcaaaacaattcgaggataaaaccacaattccaca

SEQ ID NO: 19330 - DNA, 746 bp, synthetic construct
  source 1..746: mol_type = other DNA
ttaaaacagctctggggttgtacccactccagaggcccacgtggcggctagcactccggtattacggtacccttgtgcgcctgttttatactcccctcccgcaacttagaagcacgaaaccaagttcaatagaagggggtacaaaccagtacctctacgaacaagcacttctgtttccccggtgacattgcatagactgctcacgcggttgaaagtgatcgatccgttacccgcttgtgtacttcgaaaagcctagtatcgccttggaatcttcgacgcgttgcgctcagcacccgaccccggggtgtagcttaggctgatgagtctggacattcctcaccggcgacggtggtccaggctgcgttggcggcctacctatggctaacgccataggacgctagatgtgaacaaggtgtgaagagcctattgagctacataagagtcctccggcccctgaatgcggctaatcctaaccacggagcaggcggtcgcgaaccagcgactggcttgtcgtaacgcgtaagtctgtggcggaaccgactactttgggtgtccgtgtttcctgttatttttatcatggctgcttatggtgacaatcagagattgttatcataaagcgaattggattggccatccggtgagtgttgtgtcaggtatacaactgtttgttggaaccactgtgttggctttacttctcatttaaccaattaatcaaaacaattcgaggataaaaccacaattccaca

SEQ ID NO: 19331 - DNA, 746 bp, synthetic construct
  source 1..746: mol_type = other DNA
ttaaaacagctctggggttgtacccactccagaggcccacgtggcggctagcactccggtattacggtacccttgtgcgcctgttttatactcccctcccgcaacttagaagcacgaaaccaagttcaatagaagggggtacaaaccagtacctctacgaacaagcacttctgtttccccggtgacattgcatagactgctcacgcggttgaaagtgatcgatccgttatccgcttatgtacttcgaaaagcctagtatcgccttggaatcttcgacgcgttgcgctcagcacccgaccccggggtgtagcttaggctgatgagtctggacattcctcaccggcgacggtggtccaggctgcgttggcggcctacctatggctaacgccataggacgctagatgtgaacaaggtgtgaagagcctattgagctacataagagtcctccggcccctgaatgcggctaatcctaaccacggagcaggcggtcgcgaaccagcgactggcttgtcgtaacgcgtaagtctgtggcggaaccgactactttgggtgtccgtgtttcctgttatttttatcaaggccgcttatggtgacaatcagagattgttatcataaagcgaattggattggccatccggtgagtgttgtgtcaggtatacaactgtttgttggaaccactgtgttagctttacttcttatttaaccaattaatcaaaacaattcgaggataaaaccacaattccaca

SEQ ID NO: 19332 - DNA, 746 bp, synthetic construct
  source 1..746: mol_type = other DNA
ttaaaacagctctggggttgtacccactccagaggcccacgtggcggctagcactccggtattacggtacccttgtgcgcctgttttatacccccctcccgcaacttagaagcacgaaaccaagttcaatagaagggggtacaaaccagtacctctacgaacaagcacttctgtttccccggtgacattgcatagactgctcacgcggttgaaagtgatcgatccgttacccgcttgtgtacttcgaaaagcctagtatcgccttggaatcttcgacgcgttgcgctcagcacccgaccccggggtgtagcttaggctgatgagtctggacattcctcaccggcgacggtggtccaggctgcgttggcggcctacctatggctaacgccataggacgctagatgtgaacaaggtgtgaagagcctattgagctacataagagtcctccggcccctgaatgcggctaatcctaaccacggagcaggcggtcgcgaaccagcgactggcttgtcgtaacgcgtaagtctgtggcggaaccgactactttgggtgtccgtgtttcctgttatttttatcaaggccgcttatggtgacaatcagagattgttatcataaagcgaattggattggccatccggtgagtgttgtgtcaggtatacaactgtttgttggaaccactgtgttagctttacttcttatttaaccaattaatcaaaacaattcgaggataaaaccacaattccaca

SEQ ID NO: 19333 - DNA, 746 bp, synthetic construct
  source 1..746: mol_type = other DNA
ttaaaacagctctggggttgtacccactccagaggcccacgtggcggctagcactccggtattacggtacccttgtgcgcctgttttatactcccctcccgcaacttagaagcacgaaaccaagttcaatagaagggggtacaaaccagtacctccacgaacaagcacttctgtttccccggtgacattgcatagactgctcacgcggttgaaagtgatcgatccgttacccgcttatgtacttcgaaaagcctagtatcgccttggaatcttcgacgcgttgcgctcagcacccgaccccggggtgtagcttaggctgatgagtctggacattcctcaccggcgacggtggtccaggctgcgttggcggcctacctatggctaacgccataggacgctagatgtgaacaaggtgtgaagagcctattgagctacataagagtcctccggcccctgaatgcggctaatcctaaccacggagcaggcggtcgcgaaccagcgactggcttgtcgtaacgcgtaagtctgtggcggaaccgactactttgggtgtccgtgtttcctgttatttttatcatggctgcttatggtgacaatcagagattgttatcataaagcgaattggattggccatccggtgagtgttgtgtcaggtatacaactgtttgttggaaccactgtgttggctttacttcttatttaaccaattaatcaaaacaatacgaggataaaacaacaataccaca

SEQ ID NO: 19334 - DNA, 746 bp, synthetic construct
  source 1..746: mol_type = other DNA
ttaaaacagctctggggttgtacccactccagaggcccacgtggcggctagcactccggtattacggtacccttgtgcgcctgttttatactcccctcccgcaacttagaagcacgaaaccaagttcaatagaagggggtacaaaccagtacctctacgaacaagcacttctgtttccccggtgacattgcatagactgctcacgcggttgaaagtgatcgatccgttacccgcttgtgtacttcgaaaagcctagtatcgccttggaatcttcgacgcgttgcgctcagcacccgaccccggggtgtagcttaggctgatgagtctggacattcctcaccggcgacggtggtccaggctgcgttggcggcctacctatggctaacgccataggacgctagatgtgaacaaggtgtgaagagcctattgagctacataagagtcctccggcccctgaatgcggctaatcctaaccacggagcaggcggtcgcgaaccagcgactggcttgtcgtaacgcgtaagtctgtggcggaaccgactactttgggtgtccgtgtttcctgttatttttatcatggccgcttatggtgacaatcaaagattgttatcataaagcgaattggattggccatccggtgagtgttgtgtcaggtatacaactgtttgttggaaccactgtgttggctttacttctcatttaaccaattaatcaaaacaattcgaggataaaacaacaattccaca

SEQ ID NO: 19335 - DNA, 746 bp, synthetic construct
  source 1..746: mol_type = other DNA
ttaaaacagctctggggttgtacccactccagaggcccacgtggcggctagcactccggtattacggtacccttgtgcgcctgttttatactcccctcccgcaacttagaagcacgaaaccaagttcaatagaagggggtacaaaccagtacctctacgaacaagcacttctgtttccccggtgacattgcatagactgctcacgcggttgaaagtgatcgatccgttatccgcttatgtacttcgaaaagcctagtatcgccttggaatcttcgacgcgttgcgctcagcacccgaccccggggtgtagcttaggctgatgagtctggacattcctcaccggcgacggtggtccaggctgcgttggcggcctacctatggctaacgccataggacgctagatgtgaacaaggtgtgaagagcctattgagctacataagagtcctccggcccctgaatgcggctaatcctaaccccggagcaggcggtcgcgaaccagcgacttgcttgtcgtaacgcgtaagtctgtggcggaaccgactactttgggtgtccgtgtttcctgttatttttatcaaggccgcttaaggtgacaatcagagattgttatcataaagcgaattggattggccatccggtgagtgttgtgtcaggtatacaactgtttgttggaaccactgtgttggctttacttctcatttaaccaattaatcaaaaccattcgaggataaaaccaccattccaca

SEQ ID NO: 19336 - DNA, 747 bp, synthetic construct
  source 1..747: mol_type = other DNA
ttaaaacagcctgtgggttgtacccaccccagaggcccacgtggcggctagcactccggtattacggtacccttgtgcgcctgttttatactcccctcccgcaacttagaagcacgaaaccaagttcaatagaagggggtacaaaccagtaccactacgaacaagcacttctgtttccccggtgacattgcatagactgctcacgcggttgaaagtgatcgatccgttacccgcttgtgtacttcgaaaagcctagtatcgccttggaatcttcgacgcgttgcgctcagcacccgaccccggggtgtagcttaggctgatgagtctggacattcctcaccggtgacggtggtccaggctgcgttggcggcctacctatggctaacgccataggacgttagatgtgaacaaggtgtgaagagcctattgagctacataagagtcctccggcccctgaatgcggctaatcctaaccacggagcaggcggtcgcgaaccagtgactggcttgtcgtaacgcgcaagtctgtggcggaaccgactactttgggtgtccgtgtttcctgttatttttatcatggctgcttatggtgacaatcagagattgttatcataaagcgaattggattggccatccggtgagtgttgtgtcaggtatacaactgtttgttggaaccactgtgttagctttacttctcatttaaccaattaatcaaaaacaatacgaggataaaacaacaatactaca

SEQ ID NO: 19337 - DNA, 740 bp, synthetic construct
  source 1..740: mol_type = other DNA
aaaacagctctggggttgcacccaccccagaggcccacgtggcggctagtactccggtattgcggtacccttgtacgcctgttttatactcccttcccgcaacttagacgcacaaaaccaagttcaatagaagggggtacaaaccagtaccaccacgaacaagcacttctgtttccccggtgatgttgtatagactgcttgcgtggttgaaagcgacggatccgttatccgcttatgtacttcgagaagcccagtaccacctcggaatcttcgatgcgttgcgctcagcactcaaccccagagtgtagcttaggctgatgagtctggacatccctcaccggtgacggtggtccaggctgcgttggcggcctacctatggctaacgccatgggacgctagttgtgaacaaggtgtgaagagcctattgagctacataagaatcctccggcccctgaatgcggctaatcccaaccacggggcaggtggtcacaaaccagtgattggcctgtcgtaacgcgcaagtccgtggcggaaccgactactttgggtgtccgtgtttccttttattttattgtggctgcttatggtgacaatcacagattgttatcataaagcgaattggattggccatccagtgaaagtgagattcattatctatctgtttgctggattcgctccattgagtgtgtttactctaagtacaatttcaacagttatttcaatcagacaattgtatcata

SEQ ID NO: 19338 - DNA, 745 bp, synthetic construct
  source 1..745: mol_type = other DNA
aaaacagctctggggttgtacccaccccagaggcccacgtggcggctagcactccggtattacggtacccttgtgcgcctgttttatactcccctcccgcaacttagaagcacgaaaccaagttcaatagaagggggtacaaaccagtaccactacgaacaagcacttctgtttccccggtgacgttgcatagactgctcacgcggttgaaagtgatcgatccgttacccgcttgtgtacttcgaaaagcctagtatcgccttggaatcttcgacgcgttgcgctcagcacccgaccccggggtgtagcttaggctgatgagtctggacattcctcaccggtgacggtggtccaggctgcgttggcggcctacctatggctaacgccataggacgttagatgtgaacaaggtgtgaagagcctattgagctacataagagtcctccggcccctgaatgcggctaatcctaaccacggagcaggcggtcgcgaaccagtgactggcttgtcgtaacgcgcaagtctgtggcggaaccgactactttgggtgtccgtgtttcctgttatttttatcatggctgcttatggtgacaatcagagattgttatcataaagcgaattggattggccatccggtgagtgttgtgtcaggtatacaactgtttgttggaaccgctgtgttagttttacttctcatttaaccaattaatcaaaaacaatacgaggataaaacaacaatactaca

SEQ ID NO: 19339 - DNA, 747 bp, synthetic construct
  source 1..747: mol_type = other DNA
ttaaaacagctctggggttgtacccaccccagaggcccacgtggcggctagcactccggtattacggtacccttgtgcgcctgttttatactcccctcccgcaacttagaagcacgaaaccaagttcaatagaagggggtacaaaccagtaccaccacgaacaagtacttctgtttccccggtgacattgcatagactgctcacgcggttgaaagtgatcgatccgttacccgcttgtgtacttcgaaaagcctagtatcgccttggaatcttcgacgcgttgcgctcagcacccgaccccggggtgtagcttaggctgatgagtctggacattcctcaccggtgacggtggtccaggctgcgttggcggcctacctatggctagcgccataggacgctagatgtgaacaaggtgtgaagagcctattgagctacataagaatcctccggcccctgaatgcggctaatcctaaccacggagcaggcggtcgcgaaccagcgactggcttgtcgtaatgcgcaagtctgtggcggaaccgactactttgggtgtccgtgtttcctgttatttttatcatggctgcttatggtgacaatcagagattgttatcataaagcgaattggattggccatctggtgagtgttgtgtcgggtatacaactgtttgttggaaccactgtgttagctttacttctcatttaaccaattaatcaaaaacaatacgaggataaaacaacaatactaca

SEQ ID NO: 19340 - DNA, 737 bp, synthetic construct
  source 1..737: mol_type = other DNA
acagctctggggttgcacccaccccagaggcccacgtggcggctagtactccggtattgcggtacccttgtacgcctgttttatactcccttcccgtaacttagacgcacaaaaccaagttcaatagaagggggtacaaaccagtaccaccacgaacaagcacttctgtttccccggtgatgttgtatagactgcttgcgtggttgaaagcgacggatccgttatccgcttatgtacttcgagaagcccagtaccacctcggaatcttcgatgcgttgcgctcagcactcaaccccagagtgtagcttaggctgatgagtctggacatccctcaccggtgacggtggtccaggctgcgttggcggcctacctatggctaacgccatgggacgctagttgtgaacaaggtgtgaagagcctattgagctacataagaatcctccggcccctgaatgcggctaatcccaacctcggagcaggtggtcacaaaccagtgattggcctgtcgtaacgcgcaagtccgtggcggaaccgactactttgggtgtccgtgtttccttttattttattgtggctgcttatggtgacaatcacagattgttatcataaagcgaattggattggccatccggtgaaagtgagattcattatctatctgtttgctggattcgctccattgagtgtgtttactctaagtacaatttcaacagttatttcaatcagacaattgtattata

SEQ ID NO: 19341 - DNA, 737 bp, synthetic construct
  source 1..737: mol_type = other DNA
acagctctggggttgcacccaccccagaggcccacgtggcggctagtactccggtattgcggtacccttgtacgcctgttttatactcccttcccgtaacttagacgcacaaaaccaagttcaatagaagggggtacaaaccagtaccaccacgaacaagcacttctgtttccccggtgatgttgtatagactgcttgcgtggttgaaagcgacggatccgttatccgcttatgtacttcgagaagcccagtaccacctcggaatcttcgatgcgttgcgctcagcactcaaccccagagtgtagcttaggctgatgagtctggacatccctcaccggtgacggtggtccaggctgcgttggcggcctacctatggctaacgccatgggacgctagttgtgaacaaggtgtgaagagcctattgagctacataagaatcctccggcccctgaatgcggctaatcccaacctcggagcaggtggtcacaaaccagtgattggcctgtcgtaacgcgcaagtccgtggcggaaccgactactttgggtgtccgtgtttccttttattttattgtggctgcttatggtgacaatcacagattgttatcataaagcgaattggattggccatccggtgaaagtgagatttattatctatctgtttgctggattcgctccattaagtgtgtttactctaagtataatttcaacagttatttcaatcagacaattgtatcata

SEQ ID NO: 19342 - DNA, 743 bp, synthetic construct
  source 1..743: mol_type = other DNA
aacagctctggggttgtacccaccccagaggcccacgtggcggctagcactccggtattacggtacccttgtgcgcctgttttatactcccctcccgcaacttagaagcacgaaaccaagttcaatagaagggggtacaaaccagtaccactacgaacaagcacttctgtttccccggtgacattgcatagactgctcacgcggttgaaagtgatcgatccgttacccgcttatgtacttcgaaaagcctagtatcgccttggaatcttcgacgcgttgcgctcagcacccgaccccggggtgtagcttaggctgatgagtctggacattcctcaccggtgacggtggtccaggctgcgttggcggcctacctatggctaacgccataggacgctagatgtgaacaaggtgtgaagagcctattgagctacataagagtcctccggcccctgaatgcggctaatcctaaccacggagcaggcggtcgcgaaccagtgactggcttgtcgtaacgcgcaagtctgtggcggaaccgactactttgggtgtccgtgtttcctgttatttttatcatggctgcttatggtgacaatcagagattgttatcataaagcgaattggattggccatccggtgagtgttgtgtcaggtatacaactgtttgttggaaccactgtgttagctttacttctcatttaaccaattaatcaaaaacaatacgaggataaaacaacaatactaca

SEQ ID NO: 19343 - DNA, 745 bp, synthetic construct
  source 1..745: mol_type = other DNA
ttaaaacagggtgtgggttattcccacccacagggcccactgggcgccagcacactggtatcacggtacccttgtgcgcctgttttatatacccctcccctaaaatgtaacttagaagcaaatccacaaagaccaacagcagacacagcgcgccagttgtgttacggtcaagcacttctgttaccccggaccgagtatcaataagctactcacgtggctgaaggagaaaacgttcgttacccgcccgattacttcgagaagcctagtaacgccatggaggttgcgcggcgtttcgctccgcacaatcccagtgtagatcaggtcgatgagccaccgcattccccacgggtgaccgtggcggtggctgcgctggcggcctgcccatggggcaacccatgggacgcttcaatactgacatggtgcgaagagcctattgagctaattgggagtcctccggcccctgaatgcggctaatcccaactgcggagcaggcgcccacgtgccagtgggtagtctgtcgtaacgggcaactctgcagcggaaccgactactttgggtgtccgtgtttccttttattcctacattggctgcttatggtgacaattgagagattgttaccatatagctattggattggccatccggcgacaaacagagcgattgtttatttgttcattggttttataccactaaactatacaactttaaacaccctcaattttattttaacgcttaacacagcaaa

SEQ ID NO: 19344 - DNA, 747 bp, synthetic construct
  source 1..747: mol_type = other DNA
ttaaaacagctctggggttgctcccaccccagaggcccacgtggcggccagtactctggtattgcggtacctttgtacgcctgttttatactccctccccccgtgcaactttagaagaaatccacaaagttcaatagagggggtgcaaaccagcaccaccacgaacaagcacttctgtttccccggtgatgtcgtataagctgtacccacggctgaaggcgacggatccgttatccgcttgagtacttcgagaagcctagtattaccttggaatcttcgacgcgttgcgctcagcactctaccccgagtgtagcttaggtcgatgagtctgggcacgccccaccggcgacggtggcccaggctgcgttggcggcctacccatggctatcaccatgggacgctagttgtgaacaaggtgtgaagagcctattgagctacccaagagtcctccggcccctgaatgcggctaatcctaaccacggagcaagtgtcctcaacccaggggatggcttgtcgtaacgcgaaagtctgtggcggaaccgactactttgggtgtccgtgtttccttttatttttatgtatggctgcttatggtgacaatcaaaggttgttaccataaagcaatttggattggccatccggtgagaatcaaacatattatctacctgtttgttgggttttcttcttttacttgaacaatacctctaataataactgctatattgtcaataagacattatcatcaca

SEQ ID NO: 19345 - DNA, 744 bp, synthetic construct
  source 1..744: mol_type = other DNA
ttaaaacagcctgtgggttgtacccaccccagaggcccacgtggcggctagtactccggtattacggtacccttgtacgcctgttttatactccctccctcgtaacttagaagcacaaaaccaagttcaatagaagggggtgcaaaccagtaccaccacgaacaagcatttctgtttccccggtgatgttgtatagactgcccgcgcggttgaaagcaacggatccgttacccgctcaagtacttcgagaagcctagtattaccttggaatcttcgatgcgttgcgttcagcactcgaccctggagtgtagcttaggctgatgagtctggacgtccctcaccggtgacggtggtccaggctgcgttggcggcctacctatggctaacgccataggacgctagttgtgaacaaggtgtgaagagcctattgagctacttgagagtcctccggcccctgaatgcggctaatcctaaccatggagcaggcggtcacagaccagtgactagcttgtcgtaatgcgcaagtctatggcggaaccgactactttgggtgtccgtgtttccttttatttttattatggctgcttatggtgacaatcattgattgttatcataaagcgaattggattggccatccggtgaaagcgagacttactatttacttacttgttggacttaccacacttaatacatttattctaggtgtcacttgtatagcaattagaatcaaacagttgcatcata

SEQ ID NO: 19346 - DNA, 742 bp, synthetic construct
  source 1..742: mol_type = other DNA
ttaaaacagctctggggttgcacccaccccagaggcccacgtggcggctagtactccggtattgcggtacccttgtacgcctgttttatactcccttcccgtaacttagacgcacaaaaccaagttcaatagaagggggtacaaaccagtaccaccacgaacaagcacttctgtttccccggtgatgttgtatagactgcttgcgtggttgaaagcgacggatccgttatccgcttatgtacttcgagaagcccagtaccacctcggaatcttcgatgcgttgcgctcagcactcaaccccagagtgtagcttaggctgatgagtctggacatccctcaccggtgacggtggtccaggctgcgttggcggcctacctatggctaacgccatgggacgctagttgtgaacaaggtgtgaagagcctattgagctacataaaaatcctccggcccctgaatgcggctaatcccaacctcggggcaggtggtcacaaaccagtgattggcctgtcgtaacgcgcaagcccgtggcggaaccgactactttgggtgtccgtgtttccttttattttattgtggctgcttatggtgacaatcacagattgttatcataaagcgaattggattggccatccggtgaaagtgagattcattatctatctgtttgctggattcgctccattgagtgtgtttactctaagtacaatttcaacagttatttcaatcagacaattgtatcata

SEQ ID NO: 19347 - DNA, 747 bp, synthetic construct
  source 1..747: mol_type = other DNA
ttaaaacagctctggggttgtacccaccccagaggcccacgtggcggctagcactccggtattacggtacccttgtgcgcctgttttatattcccctcccgcaacttagaagcacgaaaccaagttcaatagaagggggtacaaaccagtaccaccacgaacaagcacttctgtttccccggtgacattgcatagactgctcacgcggttgaaagtgatcgatccgttacccgcttgtgtacttcgaaaagcctagtatcgccttggaatcttcgacgcgttgcgctcagcacccggccccggggtgtagcttaggctgatgagtctggacattcctcaccggcgacggtggtccaggctgcgttggcggcctacctatggctaacgccataggacgctagatgtgaacaaggtgtgaagagcctattgagctacataagagtcctccggcccctgaatgcggctaatcctaaccacggagcaggcggtcgcgaaccagtgactggcttgtcgtaacgcgcaagtctgtggcggaaccgactactttgggtgtccgtgtttcctgttatttttatcatggctgcttatggtgacaatcagagattgttatcataaagcgaattggattggccatccggtgagtgttgtgtcaggtatacaactgtttgttgaaaccactgtgttagttttacttctcatttaaccaattaatcaaaaacaacacgaggataaaacaacaatactaca

SEQ ID NO: 19348 - DNA, 743 bp, synthetic construct
  source 1..743: mol_type = other DNA
aacagctctggggttgttcccaccccagaggcccacgtggcggctagtacactggtattacggtacccttgtacgcctgttttacaccccctttcccccgtaacttagaagttttaaattcaagttcaacagtcagtggtacaacccagtactactacgaacaagcacttctgttaccccggtgagattgcataggctgttcccacggctaaaagcgattgatccgttatccgctcttgtacttcgagaagcctagtaagaccttgggatcctcgacgcgttgcgttcaacactcaaccccagagtgtagcttgggctgatgagtctggacattccccaccggtgacggtggtccaggctgcgttggcggcctacctgtggcccaaagccacaggacgctagttgtgaacaaggtgtgaagagcctattgagctacaagtgagtcctccggcccctgaatgcggctaatcccaaccacggagcaggcgattgcaacccagcaactagcctgtcgtaacgcgcaagtctgtggcggaaccgactactttgggtgtccgtgtttccttttattacgtaatggctgcttatggtgacaatcacagattgttgtcataaagcgaattggattggccatccggtgagaattaaaacaatcatttatttatttgttggatttgttcctatacacacccaaacactttgctcgattgaagtaattctgttgataagacaacactattata

SEQ ID NO: 19349 - DNA, 743 bp, synthetic construct
  source 1..743: mol_type = other DNA
aacagctctggggttgttcccaccccagaggcccacgtggcggctagtacactggtattacggtacccttgtacgcctgttttacaccccctttcccccgtaacttagaagttttaaattcaagttcaacagtcagtggtacaacccagtactactacgaacaagcacttctgttaccccggtgagattgcataggctgttcccacggctaaaagcgattgatccgttatccgctcttgtacttcgagaagcctagtaagaccttgggatcctcgacgcgttgcgttcaacactcaaccccagagtgtagcttgggctgatgagtctggacattccccaccggtgacggtggtccaggctgcgttggcggcctacctgtggcccaaagccacaggacgctagttgtgaacaaggtgtgaagagcctattgagctacaagtgagtcctccggcccctgaatgcggctaatcccaaccacggagcaggcgattgcaacccagcaactagcctgtcgtaacgcgcaagtctgtggcggaaccgactactttgggtgtccgtgtttccttttattacataatggctgcttatggtgacaatcacagattgttgtcataaagcgaattggattggccatccggtgagaattaaaacaatcatttatttatttgttggatttgttcctatacacacccaaacactttgcttgattgaagtaactctgttgataagacaacactattata

SEQ ID NO: 19350 - DNA, 743 bp, synthetic construct
  source 1..743: mol_type = other DNA
aacagctctggggttgttcccaccccagaggcccacgtggcggctagtacactggtattacggtacccttgtacgcctgttttacaccccctttcccccgtaacttagaagttttaaattcaagttcaacagtcagtggtacaacccagtactactacgaacaagcacttctgttaccccggtgagattgcataggctgttcccacggctaaaagcgattgatccgttatccgctcttgtacttcgagaagcctagtaagaccttgggatcctcgacgcgttgcgttcaacactcaaccccagagtgtagcttgggctgatgagtctggacattccccaccggtgacggtggtccaggctgcgttggcggcctacctgtggcccaaagccacaggacgctagttgtgaacaaggtgtgaagagcctattgagctacaagtgagtcctccggcccctgaatgcggctaatcccaaccacggagcaggcgattgcaacccagcaactagcctgtcgtaacgcgcaagtctgtggcggaaccgactactttgggtgtccgtgtttccttttattacataatggctgcttatggtgacaatcacagattgttgtcataaagcgaattggattggccatccggtgagaattaaaacaatcatttatttatttgttggatttgttcctatacacacccaaacactttgcttgattgaagtaattctgttgataagacaacactattata

SEQ ID NO: 19351 - DNA, 745 bp, synthetic construct
  source 1..745: mol_type = other DNA
tttaaaacagcctgtgggttgttcccacccacagggcccactgggcgccagcactctggtattgcggtaccttagtgcgcctgttttatatacccatcccccaaacgtgatttagatgcatgttaacgaagaccaatagtaagcgcagcacaccagctgtgttccggtcaagcacttctgttaccccggactgagtatcaataagctactcacgtggctgaaggagaaaacgttcgttacccggccaattacttcgagaaacccagtaacaccatgaaggttgcgcagtgtttcgctccgcacaaccccagtgtagatcaggtcgatgagtcaccgcattccccacgggtgaccgtggcggtggctgcactggcggcctgcccatggggtaacccatgggacgcttcaatactgacatggtgcgaagagtctattgagctaattggtagtcctccggcccctgaatgcggctaatcctaactgcggagcagatactcacataccagtgggcggtctgtcgtaacgggcaactctgcagcggaaccgactactttgggtgtccgtgtttctctttatccttatactggctgcttatggtgacaattgggagattgttaccatatagctattggattggccatccagtgacaaatagagcaatcgtgtatttgtttgttggtttcgtaccattaaattacaaggtcataaacaccctcaatcttattatagcattcaatacaacaaa

SEQ ID NO: 19352 - DNA, 746 bp, synthetic construct; identical to SEQ ID NO: 1141
  source 1..746: mol_type = other DNA

SEQ ID NO: 19353 - DNA, 735 bp, synthetic construct
  source 1..735: mol_type = other DNA
tctggggttgttcccaccccagaggcccacgtggcggctagtactccggtattacggtacccttgtacgcctgttttatactcccctccctgtaacttagaagaaacataacaagttcaataggagggggtgcaaaccagcaccaccacgaacaagtacttctgtctccccggtgacattgcatagactgtccccacggttgaaagcgattgatccgttatccgctcttatacttcgagaagcctagtaccatcttggaatcatcgatgcgttgcgctccacactcaatcccagagtgtagcttaggctgatgagtctggacattcctcaccggcgacggtggtccaggctgcgttggcggcctacctgtggcccaaagccacaggacgctagttgtgaacaaggtgtgaagagcctattgagctataagagagtcctccggcccctgaatgcggctaatcctaaccacggatcaagggtgcacgaaccagtgtataccttgtcgtaacgcgcaagtctgtggcggaaccgactactttgggtgtccgtgtttccttttattgtttcaatggctgcttatggtgacaatcattgattgttatcataaagcgatttggattggccatccagtgaaagtgaaaaatattgtttgcctcctcgttgggtctactccaaccaacctctttacttacaaacttattaccacaattttattggttagaagtgtgtttcaca

SEQ ID NO: 19354 - DNA, 743 bp, synthetic construct
  source 1..743: mol_type = other DNA
aacagctctggggttgttcccaccccagaggcccacgtggcggctagtacactggtattacggtacccttgtacgcctgttttacaccccctttcccccgtaacttagaagttttaaattcaagttcaacagtcagtggtacaacccagtactactacgaacaagcacttctgttaccccggtgagattgcataggctgttcccacggctaaaagcgattgatccgttatccgctcttgtacttcgagaagcctagtaagaccttgggatcctcgacgcgttgcgttcaacactcaaccccagagtgtagcttgggctgatgagtctggacattccccaccggtgacggtggtccaggctgcgttggcggcctacctgtggcccaaagccacaggacgctagttgtgaacaaggtgtgaagagcctattgagctacaagtgagtcctccggcccctgaatgcggctaatcccaaccacggagcaggcgattgcaacccagcaactagcctgtcgtaacgcgcaagtctgtggcggaaccgactactttgggtgtccgtgtttccttttattacataatggctgcttatggtgacaatcacagattgttgtcataaagcgaattggattggccatccggtgagaattaaaacaatcatttatttatttgttggatttgttcctatacacacccaaacactttgcttgattgaagtaattctgttgataagacaacactattaca

SEQ ID NO: 19355 - DNA, 744 bp, synthetic construct; identical to SEQ ID NO: 123
  source 1..744: mol_type = other DNA

SEQ ID NO: 19356 - DNA, 747 bp, synthetic construct
  source 1..747: mol_type = other DNA
ttaaaacagctctggggttgttcccaccccagaggcccacgtggcggccagtacactggtatcgcggtacctttgtacgcctgttttatactcccttcccccgtaacttagaagcacaacgtccaagttcaatagaagggggtacaaaccagtaccaccacgaacaagcacttctgttcccccggtgaggctgtataggctgtttccacggctaaaagcggctgatccgttatccgctcatgtacttcgagaagcctagtatcaccttggaatcttcgatgcgttgcgctcaacactcaaccccagagtgtagcttaggtcgatgagtctggacgttcctcaccggcgacggtggtccaggctgcgttggcggcctacctgtggcccaaagccacaggacgctagttgtgaacaaggtgtgaagagcctattgagctacctgagagtcctccggcccctgaatgcggctaatcctaaccacggagcaggcagtggcaatccagcgaccagcctgtcgtaacgcgcaagttcgtggcggaaccgactactttgggtgtccgtgtttccttttatttttacaatggctgcttatggtgacaattattgatagttatcataaagcaaattggattggccatccggtgagaatttgattattaaattactctcttgttgggattgctcctttgaaatcctgtgcactcacacctattggaattacctcattgttgagatattattaccact

SEQ ID NO: 19357 - DNA, 735 bp, synthetic construct
  source 1..735: mol_type = other DNA
tggggttgtacccaccccagaggcccacgtggcggctagcactccggtattacggtacccttgtgcgcctgttttatactcccctcccgcaacttagaagcacgaaaccaagttcaatagaagggggtacaaaccagtaccactacgaacaagcacttctgtttccccggtgacattgcatagactgctcacgcggttgaaagtgatcgatccgttacccgcttgtgtacttcgaaaagcctagtatcgccttggaatcttcgacgcgttgcgctcagcacccgaccccggggtgtagcttaggctgatgagtctggacattcctcaccggtgacggtggtccaggctgcgttggcggcctacctatggctaacgccataggacgctagatgtgaacaaggtgtgaagagcctattgagctacataagagtcctccggcccctgaatgcggctaatcctaaccacggagcaggcggtcgcgaaccagtgactggcttgtcgtaacgcgcaagtctgtggcggaaccgactactttgggtgtccgggtttcctgttatttttatcatggctgcttatggtgacaatcagagattgttatcataaagcgaattggattggccatccggtgagtgttgtgtcaggtatacaactgtttattggaaccactgtgttagctttacttctcatttaaccaattaatcaaaaacaatacgaggataaaacaacaatactaca

SEQ ID NO: 19358 - DNA, 747 bp, synthetic construct
  source 1..747: mol_type = other DNA
ttaaaacagctctggggttgcacccgccccagaggcccacgtggcggctagcactccggtattacggtacccttgtgcgcctgttttatactcccctcccgcaacttagaagcacgaaaccaagttcaatagaagggggtacaaaccagtaccactacgaacaagcacttctgtttccccggtgacattgcatagactgctcacgcggttgaaagtgatcgatccgttacccgcttgtgtacttcgaaaagcctagtatcgccttggaatcttcgacgcgttgcgctcagcacccgaccccggggtgtagcttaggctgatgagtctggacattcctcaccggtgacggtggtccaggctgcgttggcggcctacctatggctaacgccataggacgttagatgtgaacaaggtgtgaagagcctattgagctacataagagtcctccggcccctgaatgcggctaatcctaaccacggagcaggcggtcgcgaaccagtgactggcttgtcgtaacgcgcaagtctgtggcggaaccgactactttgggtgtccgtgtttcctgttatttttatcatggctgcttatggtgacaatcagagattgttatcataaagcgaattggattggccatccggtgagtgttgtgtcaggtatacaactgtttgttggaaccactgtgttagctttacttctcatttaaccaattaatcaaaaacaatacgaggataaaacaacaatactaca

SEQ ID NO: 19359 - DNA, 742 bp, synthetic construct
  source 1..742: mol_type = other DNA
ttaaaacagctctggggttgttcccaccccagaggcccacgtggcggctagtacactggtatcacggtacctttgtacgcctgttttataccccctcccccgcaacttagaagcatacaattcaagctcaataggagggggtgcaagccagcgcctccgtgggcaagcactactgtttccccggtgaggccgcatagactgttcccacggttgaaagtgtccgatccgttatccgcccatgtacttcgagaagcctagtatcgctctggaatcttcgacgcgttgcgctcagcactcaaccccggagtgtagcttgggccgatgagtctggacagtccccactggcgacagtggtccaggctgcgctggcggcccacctgtggcccaaagccacaggacgctagttgtgaacagggtgtgaagagcctattgagctacatgggagtcctccggcccctgaatgcggctaatcctaaccatggagcaggcagctgcaacccagcagccagcctgtcgtaacgcgcaagtccgtggcggaaccgactactttgggtgtccgtgtttccttttattcttgaatggctgcttatggtgacaatcatagattgttatcataaagcgagttggattggccatccagtgtgaatcagattaattactcccttgtttgttggatccactccccaaacgttttattccttaacttattgaaattgtttgaagacaggatttcagtgtcaca

SEQ ID NO: 19360 - DNA, 742 bp, synthetic construct
  source 1..742: mol_type = other DNA
ttaaaacagcctgtgggttgttcccactcacagggcctactgggcgttagcacactggtattacggtacccttgtgcgcctgttttatccaccctaccccattgcaacttagaagctaaccaaacacggtcattaggcagctcagtatgccaactgagttttgaccaagcacttctgttaccccggactgagtatcaataggctgtttacacggctgaaggagaaaacgttcgttacccgaccagttacttcgagaagcccagtatcaccatgaaggttgcgcagtgtttcgctccgcacaaccccagtgtagatcaggccgatgagtcaccgcattccccacgggcgaccgtggcggtgactgcgctggcggcctgcccatgggccaacccatgggacgcttcaaaactgacatggtgtgaagagcctattgagctaattggtagtcctccggcccctgaatgcggctaatcctaactgcggagcagatacccacatgccagtgggcggtctgtcgtaacgggcaactctgcagcggaaccgactactttgggtgtccgtgtttccttttattcctatactggctgcttatggtgacaattgagagattgttaccatatagctactggattggccatccagtgacaaacagagcgattatttacctatttgttggttacataccattgaattttaaagttttaaaaaccctcaaccttgttttggcactcaacgctgcaaa

SEQ ID NO: 19361 - DNA, 697 bp, synthetic construct
  source 1..697: mol_type = other DNA
ttaaaacagctctggggttgtacccaccccagaggcccacgtggcggctagtactccggtattgcggtacccttgtacgcctgttttatactcccttcccgtaacttagacgcacaaaaccaagttcaatagaagggggtacaaaccagtaccaccacgaacaagcacttctgtttccccggtgatgtcgtatagactgcttgcgtggttgaaagcgacggatccgttatccgcttatgtacttcgagaagcccagtaccacctcggaatcttcgatgcgttggttagcactcaaccccagagtgtagcttaggctgatgagtctggacatccctcaccggtgacggtgttccaggctgcgttggcggcctacctatggctaacgcatgggacgctagttgtgaacaaggtgtgaagagcctattgagctacataagaatcctccggcccctgaatgcggctaatcccaacctcggagcaggtggttcacaaaccagtgattggcctgtcgtaacgcgcaagtccgtggcggaaccgactactttgggtgtccgtgtttccttttattttattgtggctgcttatggtgacaatcacagattgttatcataaagcgaattggattggccatccggtgaaagtgagactcattatctatctgtttgctggatccgctccattgagtgtgtttactcta

SEQ ID NO: 19362 - DNA, 744 bp, synthetic construct
  source 1..744: mol_type = other DNA
ttaaaacagcctgtgggttgttcccatccacagggcccactgggcgccagcactctggtattgcggtaccttagtgcgcctgttttatatacccaccccccaaatgtaatttagatgcatgtcaacaaagaccaatagtaagcgcagcacaccagctgtgttctggtcaagcacttctgttaccccggactgagtatcaataagctactcgcgtggctgaaggagaaaacgttcgttacccggccaattacttcgagaaacctagtaacaccatgaaggttgcgcagtgtttcgctccgcacaaccccagtgtagatcaggtcgatgagtcaccgcattccccacgggtgaccgtggcggtggctgcgctggcggcctgcccatggggtaacccatgggacgcttcaatactgacatggtgcgaagagtctattgagctaattggtagtcctccggcccctgaatgcggctaatcctaactgcggagcagatacccacacaccagtgggcagtctgtcgtaacgggcaactctgcagcggaaccgactactttgggtgtccgtgtttctctttatccttatactggctgcttatggtgacaattgagagattgttaccatatagctattggattggccatccggtgacgaatagagcaattgtgtatttgtttgttggttttataccattaaattacaaggttctaaacacccttaatcttattgtagtattcaatacaataaa

SEQ ID NO: 19363 - DNA, 744 bp, synthetic construct
  source 1..744: mol_type = other DNA
ttaaaacagcctgtgggttgctcccatccacagggcccactgggcgccagcactctggtattgcggtactttagtgcgcctgttttatatacccatcccccaaatgtaatttagatgcatgtcaacaaagaccaatagtaagcgcagcacaccagctgtgttctggtcaagcacttctgttaccccggactgagtatcaataagctactcacgtggctgaaggagaaaacgttcgttacccggccaattacttcgagaaacctagtaacaccatgaaggttgcgcagtgtttcgctccgcacaaccccagtgtagatcaggtcgatgagtcaccgcattccccacgggtgaccgtggcggtggctgcgctggcggcctgcccatggggtaacccatgggacgcttcaatactgacatggtgcgaagagtctattgagctaattggtagtcctccggcccctgaatgcggctaatcctaactgcagagcagatacccacacaccagtgggcagtctgtcgtaacgggcaactctgcagcggaaccgactactttgggtgtccgtgtttctttttatccttatactggctgcttatggtgacaattgagagattgttaccatatagctattggattggccatccggtgacaaatagagcaattgtgtatttgtttgttggcttcataccattaaattacaaggtcctaaacacccttgatcttattatagtattcaatacaataaa

SEQ ID NO: 19364 - DNA, 744 bp, synthetic construct
  source 1..744: mol_type = other DNA
ttaaaacagcctgtgggttgttcccatccacagggcccactgggcgccagcactctggtattgcggtaccttagtgcgcctgttttatatacccgtcccccaaacgtaacttagacgcatgtcaacgaagaccaatagtaagcgcagcacaccagctgtgttccggtcaagcacttctgttaccccggaccgagtatcaataagctactcacgtggctgaaggagaaaacgttcgttacccgaccaattacttcaagaaacctagtaacaccatgaaggttgcgcagtgtttcgctccgcacaaccccagtgtagatcaggtcgatgagtcaccgcattccccacgggtgaccgtggcggtggctgcgctggcggcctgcccatggggaaacccatgggacgcttcaatactgacatggtgcgaagagtctattgagctaattggtagtcctccggcccctgaatgcggctaatcctaactgcggagcagatacccacacaccagtgggcagtctgtcgtaacgggcaactctgcagcggaaccgactactttgggtgtccgtgtttctctttatccttatactggctgcttatggtgacaattgagagattgttaccatatagctattggattggccatccggtgacaaatagagcaattgtgtatttgtttgttggtttcgtgccattaaattacaaggttctaaacacccttaatcttattatagcattcaacacaacaaa

SEQ ID NO: 19365 - DNA, 734 bp, synthetic construct
  source 1..734: mol_type = other DNA
ttaaaacagctctggggttgcacccaccccagaggcccacgtggcggctagtactccggtattgcggtacccttgtacgcctgttttatactccctccccgtaacttagacgcacaaaaccaagttcaatagaagggggtacaaaccagtaccaccacgaacaagcacttctgtttccccggtgatgttgtatagactgcttgcgtggttgaaagcgacagatccgttatccgcttatgtacttcgagaagcccagtaccacctcggaatcttcgatgcgttgcgctcagcactcaaccccagagtgtagcttaggctgatgagtctggacatccctcaccggcgacggtggtccaggctgcgttggcggcctacctatggctaacgccatgggacgctagttgtgaacaaggtgtgaagagcctattgagctacataagaatcctccggcccctgaatgcggctaatcccaacctcggagcaggtggtcacaaaccagtgattggcctgtcgtaacgcgcaagtccgtggcggaaccgactactttgggtgtccgtgtttccttttattttattgtgactgcttatggtgacaatcacagattgttatcataaagcgaattggattggccatccggtgaaagtgagattcattatttatctgtttcgctccattgagtgtgtttattttaagtacaatttcaacagttatttcaatcagacaattgtatcata

SEQ ID NO: 19366 - DNA, 744 bp, synthetic construct; identical to SEQ ID NO: 1070
  source 1..744: mol_type = other DNA

SEQ ID NO: 19367 - DNA, 822 bp, synthetic construct; identical to SEQ ID NO: 1277
  source 1..822: mol_type = other DNA

SEQ ID NO: 19368 - DNA, 743 bp, synthetic construct
  source 1..743: mol_type = other DNA
ttaaaacagtctgtgggttgtaccccctcacagggcccacgtggcgctagcacaccggtatctcggtacccttgtgcgcctgttttatacaccctcacccccatgtaacttagaaggaaagcaacaatgatcaacagcaggtgtggcatcccagtcacatcgtgatcaagcacttctgtctccccggactgagtatcaatgggctgctcgcgcggctgaaggagaaaacgttcgttacccggccaattacttcgagaaacccagtaacaccatggaggttgcgcagtgtttcgctccacacaaccccagtgtagatcaggtcgatgagccaccgcattccccacgggcgaccgtggtggtggctgcgctggcggcctgcccatggggtaacccatgggacgcttcaatactgacatggtgtgaagagtctattgagctaattggtagtcctccggcccctgaatgcggctaatcctaactgcggagcagatactcacatgccagtgagcagtctgtcgtaacgggtgactctgcagcggaaccgactactttgggtgtccgtgtttccttttattccttatttggctgcttatggtgacaattgagagattgttgccatatagctattggattggccatccagtgacaaacagagctattgtgtacctgtttgttggttttgtaccactaaattttaaagtcttaagaaccatcaacttgatcatattactgaatacaagaaa

SEQ ID NO: 19369 - DNA, 743 bp, synthetic construct
  source 1..743: mol_type = other DNA
ttaaaacagcctgtgggttgttcccacccacagggcccaccgggcgtcagcacactggtattgcggtacctttgtgcgcctgttttatatatccctaccctaacgtaacctagaagcaaattaacgaggatcaatagtcagcacggcacaccagccgtgttttgatcaagcacttctgttaccccggaccgagtatcaataggctactcacgtggctgaaggagaaagtgttcgttacccggccaattacttcgagaaacccagtaacaccatgaaggttgcgcagcgtttcgctccgcacaaccccagtgtagatcaggtcgatgagtcaccgcattccccacgggcgaccgtggcggtggctgcgctggcggcctgcccatagggtgacctatgggacgcttcaatactgacatggtgcgaagagtctattgagctaattggtagtcctccggcccctgaatgcggctaatcctaactgcggagcaggtgcccacaaaccagtgggtagtctgtcgtaatgggcaactctgcagcggaaccgactactttgggtgtccgtgtttccttttattcttatactggctgcttatggtgacaattgaaaggttgttaccatatagctattggattggccatccggtgacaaacagagcgattatatacttgtttgttggtttcataccactaaatcacaagactttaaacacccttaatttcataatagcattaaatacagcaag

SEQ ID NO: 19370 - DNA, 742 bp, synthetic construct
  source 1..742: mol_type = other DNA
ttaaaacagctctggggttgttcccaccccagaggcccacgtggcggctagtacactggtatcacggtacctttgtacgcctgttttatactccctcccccgcaacttagaagcatacaattcaagctcaataggagggggtgcaagccagcgcctccgtgggcaagcactactgtttccccggtgaggccgcatagactgttcccacggttgaaagtgtccgatccgttatccgctcatgtacttcgagaagcctagtatcgctctggaatcttcgacgcgttgcgctcagcactcaaccccggagtgtagcttgggccgatgagtctggacagtccccactggcgacagtggtccaggctgcgctggcggcccacctgtggcccaaagccacgggacgctagttgtgaacagggtgtgaagagcctattgagctacatgagagtcctccggcccctgaatgcggctaattctaaccatggagcaggcagctgcaacccagcagccagcctgtcgtaacgcgcaagtccgtggcggaaccgactactttgggtgtccgtgtttccttttattcttgaatggctgcttatggtgacaatcatagattgttatcataaagcgagttggattggccatccagtgtgaatcagattaattactcccttgtttgttggatccactcccgaaacgttttactccttaacttattgaaattgtttgaagacaggatttcagtgtcaca

SEQ ID NO: 19371 - DNA, 741 bp, synthetic construct; identical to SEQ ID NO: 973
  source 1..741: mol_type = other DNA

SEQ ID NO: 19372 - DNA, 734 bp, synthetic construct
  source 1..734: mol_type = other DNA
ttaaaacagctctggggttgcacccaccccagaggcccacgtggcggctagtactccggtattgcggtacccttgtacgcctgttttatactccctccccgtaacttagacgcacaaaaccaagttcaatagaagggggtacaaaccagtaccaccacgaacaagcacttctgtttccccggtgatgttgtatagactgcttgcgtggttgaaagcgacagatccgttatccgcttatgtacttcgagaagcccagtaccacctcggaatcttcgatgcgttgcgctcagcactcaaccccagagtgtagcttaggctgatgagtctggacatccctcaccggcgacggtggtccaggctgcgttggcggcctacctatggctaacgctatgggacgctagttgtgaacaaggtgtgaagagcctattgagctacataagaatcctccggcccctgaatgcggctaatcccaacctcggagcaggtggtcacaaaccagtgattggcctgtcgtaacgcgcaagtccgtggcggaaccgactactttgggtgtccgtgtttccttttattttattgtggctgcttatggtgacaatcacagattgttatcataaagcgaattggattggccatccggtgaaagtgacattcattatttatctgtttcgccccattgagtgtgtttattttaagtacaatttcaacagttatttcaatcagacaattgtatcata

SEQ ID NO: 19373 - DNA, 734 bp, synthetic construct
  source 1..734: mol_type = other DNA
ttaaaacagctctggggttgcacccaccccagaggcccacgtggcggctagtactccggtattgcggtacccttgtacgcctgttttatactccctccccgtaacttagacgcacaaaaccaagttcaatagaagggggtacaaaccagtaccaccacgaacaagcacttctgtttccccggtgatgttgtatagactgcttgcgtggttgaaagcgacagatccgttatccgcttatgtacttcgagaagcccagtaccacctcggaatcttcgatgcgttgcgctcagcactcaaccccagagtgtagcttaggctgatgagtctggacatccctcaccggcgacggtggtccaggctgcgttggcggcctacctatggctaacgccatgggacgctagttgtgaacaaggtgtgaagagcctattgagctacataagaatcctccggcccctgaatgcggctaatcccaacctcggagcaggtggtcacaaaccagtgattggcctgtcgtaacgcgcaagtccgtggcggaaccgactactttgggtgtccgtgtttccttttattttattgtggctgcttatggtgacaatcacagattgttatcataaagcgaattggattggccatccggtgaaagtgagattcattatttatctgtttcgctccattgagtgtgtttattttaagtacaatttcaacagttatttcaatcagacaattgtatcata

SEQ ID NO: 19374 - DNA, 734 bp, synthetic construct
  source 1..734: mol_type = other DNA
ttaaaacagctctggggttgcacccgccccagaggcccacgtggcggctagtactccggtattgcggtacccttgtacgcctgttttatactcccttcccgtaacttagacgcacaaaaccaagttcaatagaagggggtacaaaccagtaccaccacgaacaagcacttctgtttccccggtgatgttgtatagactgcttgcgtggttgaaagcgacggatccgttatccgcttatgtacttcgagaagcccagtaccacctcggaatcttcgatgcgttgcgctcagcactcaaccccagagtgtagcttaggctgatgagtctggacatccctcaccggtgacggtggtccaggctgcgttggcggcctacctatggctaacgccatgggacgctagttgtgaacaaggtgtgaagagcctattgagctacataagaatcctccggcccctgaatgcggctaatcccaacctcggagcaggtggtcacaaaccagtgattggcctgtcgtaacgcgcaagtccgtggcggaaccgactactttgggtgtccgtgtttccttttattttattgtggctgcttatggtgacaatcacagattgttatcataaagcgaattggattggccatccggtaaaagtgagattcattatctatctcttttgctccattgagtgtgtttattctaagtacaatttcaacagctatttcaatcagacaattgtattata

SEQ ID NO: 19375 - DNA, 742 bp, synthetic construct
  source 1..742: mol_type = other DNA
ttaaaacagctctggggttgttcccaccccagaggcccacgtggcggctagtacactggtatcacggtacctttgtacgcctgttttatactcccttccccgcaacttagaagcatacaattcaagctcaataggagggggtgcaagccagcgcctccgtgggcaagcactactgtttccccggtgaggccacatagactgttcccacggttgaaagtgtccgatccgttatccgctcatgtacttcgagaagcctagtatcgctctggaatcttcgacgcgttgcgctcagcactcaaccccggagtgtagcttgggctgatgagtctggacagtccccactggcgacagtggtccaggctgcgctggcggcccacctgtggcccaaagccacaggacgctagttgtgaacagggtgtgaagagcctattgagctacatgagagtcctccggcccctgaatgcggctaatcctaaccatggagcaggcagctgcaacccagcagccagcctgtcgtaacgcgcaagtccgtggcggaaccgactactttgggtgtccgtgtttccttttattcttgaatggctgcttatggtgacaatcatagattgttatcataaagcgagttggattggccatccagtgtgaatcagattaattactcccttgtttgttggatccactcccgaaacgtcttactccttaactcattgaaattactcgaagacaggatttcagtgtcaca

SEQ ID NO: 19376 - DNA, 742 bp, synthetic construct
  source 1..742: mol_type = other DNA
ttaaaacagctctggggttgttcccaccccagaggcccacgtggcggctagtacactggtatcacggtacctttgtacgcctgttttatactcccttccccgcaacttagaagcatacaattcaagctcaataggagggggtgcaagccagcgcctccgtgggcaagcactactgtttccccggtgaggccacatagactgttcccacggttgaaagtgtctgatccgttatccgctcatgtacttcgagaagcctagtatcgctctggaatcttcgacgcgttgcgctcagcactcaaccccagagtgtagcttgggctgatgagtctggacagtccccactggcgacagtggtccaggctgcgctggcggcccacctgtggcccaaagccacgggacgctagttgtgaacagggtgtgaagagcctattgagctacatgagagtcctccggcccctgaatgcggctaatcctaaccatggagcaggcagctgcaacccagcagccagcctgtcgtaacgcgcaagtccgtggcggaaccgactactttgggtgtccgtgtttccttttattcttgaatggctgcttatggtgacaatcatagattgttatcataaagcgagttggattggccatccagtgtgaatcagattaattactcccttgtttgttggatccactcccgaaacgttttactccttaacttattgaaattactcgaagacaggatttcagtgtcaca

SEQ ID NO: 19377 - DNA, 742 bp, synthetic construct
  source 1..742: mol_type = other DNA
ttaaaacagctctggggttgttcccaccccagaggcccacgtggcggctagtacactggtatcacggtacctttgtacgcctgttttatactccctcccccgcaacttagaagcatacaattcaagctcaataggagggggtgcaagccagcgcctccgtgggcaagcactactgtttccccggtgaggccgcatagactgttcccacggttgaaagtgtccgatccgttatccgctcatgtacttcgagaagcctagtatcgctctggaatcttcgacgcgttgcgctcagcactcaaccccggagtgtagcttgggccgatgagtctggacagtccccactggcgacagtggtccaggctgcgctggcggcccacctgtggcccaaagccacgggacgctagttgtgaacagggtgtgaagagcctattgagctacatgagagtcctccggcccctgaatgcggctaatcctaaccatggagcaggcagctgcaacccagcagccagcctgtcgtaacgcgcaagtccgtggcggaaccgactactatgggtgtccgtgtttccttttattcttgaatggctgcttatggtgacaatcacagattgttatcataaagcgagttggattggccatccagtgtgaatcagattaattactcccttgtttgttggatccactcccgaaacgttttactccttaacttattgaaattgtttgaacacaggatttcagtgtcaca

SEQ ID NO: 19378 - DNA, 742 bp, synthetic construct
  source 1..742: mol_type = other DNA
ttaaaacagctctggggttgttcccaccccagaggcccacgtggcggctagtacactggtatcacggtacctttgtacgcctgttttatactccctcccccgcaacttagaagcatacaattcaagctcaataggagggggtgcaagccagcgcctccgtgggcaagcactactgtttccccggtgaggccgtatagactgttcccacggttgaaagtgtccgatccgttatccgctcatgtacttcgagaagcctagtatcgctctggaatcttcgacgcgttgcgctcagcactcaaccccggagtgtagcttgggccgatgagtctggacagtccccactggcgacagtggtccaggctgcgctggcggcccacctgtggcccaaagccacgggacgctagttgtgaacagggtgtgaagagcctattgagctacatgagagtcctccggcccctgaatgcggctaatcctaaccatggagcaggcagctgcaacccagcagccagcctgtcgtaacgcgcaagtccgtggcggaaccgactactttgggtgtccgtgtttccttttattcttgaatggctgcttatggtgacaatcatagattgttatcataaagcgagttggattggccatccagtgtgaatcagattaattactcccttgtttgttggatccactcccgaaacgttttactccttaacttattgaaattgtttgaagacaggatttcagtgtcaca

SEQ ID NO: 19379 - DNA, 742 bp, synthetic construct
  source 1..742: mol_type = other DNA
ttaaaacagctctggggttgttcccaccccagaggcccacgtggcggctagtacactggtatcacggtacctttgtacgcctgttttatactccctcccccgcaacttagaagcatacaattcaagctcaataggagggggtgcaagccagcgcctccgtgggcaagcactactgtttccccggtgaggccgcatagactgttcccacggttgaaagtgtccgatccgttatccgctcatgtacttcgagaagcctagtatcgctctggaatcttcgacgcgttgcgctcagcactcaaccccggagtgtagcttgggccgatgagtctggacagtccccactggcgacagtggtccaggctgcgctggcggcccacctgtggcccaaagccacgggacgctagttgtgaacagggtgtgaagagcctattgagctacatgagagtcctccggcccctgaatgcggctaatcctaaccatggagcaggcagctgcaacccagcagccagcctgtcgtaacgcgcaagtccgtggcggaaccgactactttgggtgtccgtgtttccttttattcttgaatggctgcttatggtgacaatcatagattgttatcataaagcgagttggattggccatccagtgtgaatcagattaattactcccttgtttgttggatccactcccgaaacgttttactccttaacttattgaaattgtttgaggacaggatttcagtgtcaca

SEQ ID NO: 19380 - DNA, 742 bp, synthetic construct
  source 1..742: mol_type = other DNA
ttaaaacagctctggggttgttcccaccccagaggcccacgtggcggctagtacactggtatcacggtacctttgtacgcctgttttatactccctcccccgcaacttagaagcatacaattcaagctcaataggagggggtgcaagccagcgcctccgtgggcaagcactactgtttccccggtgaggccgcatagactgttcccacggttgaaagtgtccgatccgttatccgctcatgtacttcgagaagcctagtatcgctctggaatcttcgacgcgttgcgctcagcactcaaccccggagtgtagcttgggccgatgagtctggacagtccccactggcgacagtggtccaggctgcgctggcggcccacctgtggcccaaagccacgggacgctagttgtgaacagggtgtgaagagcctattgagctacatgagagtcctccggcccctgaatgcggctaatcctaaccatggagcaggcagctgcaacccagcagccagcctgtcgtaacgcgcaagtccgtggcggaaccgactactttgggtgtccgtgtttccttttattcttgaatggctgcttatggtgacaatcatagattgttatcataaagcgagttggattggccatccagtgtgaatcggattaactactcccttgtttgttggatccactcccgaaacgttctactccttaacttattgaaattgtttgaagacaggatttcagtgtcaca

SEQ ID NO: 19381 - DNA, 742 bp, synthetic construct
  source 1..742: mol_type = other DNA
ttaaaacagctctggggttgttcccaccccagaggcccacgtggcggctagtacactggtatcacggtacctttgtacgcctgttttatactccctcccccgcaacttagaagcatacaattcaagctcaataggagggggtgcaagccagcgcctccgtgggcaagcactactgtttccccggtgaggccgcatagactgttcccacggttgaaagtgtccgatccgttatccgctcatgtacttcgagaagcctagtatcgctctggaatcttcgacgcgttgcgttcagcactcaaccccggagtgtagcttgggccgatgagtctggacagtccccactggcgacagtggtccaggctgcgctggcggctcacctgtggcccaaagccacgggacgctagttgtgaacagggtgtgaagagcctattgagctacatgagagtcctccggcccctgaatgcggctaatcctaaccatggagcaggcagctgcaacccagcagtcagcctgtcgtaacgcgcaagtccgtggcggaaccgactactttgggtgtccgtgtttccttttattcttgaatggctgcttatggtgacaatcatagattgttatcataaagcgagttggattggccatccagtgtgaatcagattaattactcccttgtttgttggatccactcccgaaacgttttactccttaacttattgaaattgtttgaagacaggatttcagtgtcaca

SEQ ID NO: 19382 - DNA, 742 bp, synthetic construct
  source 1..742: mol_type = other DNA
ttaaaacagctctggggttgttcccaccccagaggcccacgtggcggctagtacactggtatcacggtacctttgtacgcctgttttatactccttcccccgcaacttagaagcatacaattcaagctcaataggagggggtgcaagccagcgcctccgtgggcaagcactactgtttccccggtgaggccgcatagactgttcccacggttgaaagtgtccgatccgttatccgctcatgtacttcgagaagcctagtatcgctctggaatcttcgacgcgttgcgctcagcactcaaccccggagtgtagcttgggccgatgagtctggacagtccccactggcgacagtggtccaggctgcgctggcggcccacctgtggcccaaagccacgggacgctagttgtgaacagggtgtgaagagcctattgagctacatgagagtcctccggcccctgaatgcggctaatcctaaccatggagcaggcagctgcaacccagcagccagcctgtcgtaacgcgcaagtccgtggcggaaccgactactttgggtgtccgtgtttccttttattcttgaatggctgcttatggtgacaatcatagattgttatcataaagcgagttggattggccatccagtgtgaatcagattaattactcccttgtttgttggatccactcccgaaacgttttactccttaacttattgaaattgtttgaagacaggatttcagtgtcaca

SEQ ID NO: 19383 - DNA, 742 bp, synthetic construct
  source 1..742: mol_type = other DNA
ttaaaacagctctggggttgttcccaccccagaggcccacgtggcggctagtacactggtatcacggtacctttgtacgcctgttttatactccctcccccgcaacttagaagcatacaattcaagctcaataggagggggtgcaagccagcgcctccgtgggcaagcactactgtttccccggtgaggccgcatagactgttcccacggttgaaagtgtccgatccgttatccgctcatgtacttcgagaagcctagtatcgctctggaatcttcgatgcgttgcgctcagcactcaaccccggagtgtagcttgggccgatgagtctggacagtccccactggcgacagtggtccaggctgcgctggcggcccacctgtggcccaaagccacgggacgctagttgtgaacagggtgtgaagagcctattgagctacatgagagtcctccggcccctgaatgcggctaatcctaaccatggagcaggcagctgcaacccagcagccagcctgtcgtaacgcgcaagtccgtggcggaaccgactactttgggtgtccgtgtttccttttattcttgaatggctgcttatggtgacaatcatagattgttatcataaagcgagttggattggccatccagtgtgaatcagattaattactcccttgtttgttggatccactcccgaaacgttttactccttaacttattgaaattgtttaaagacaggatttcagtgtcaca

SEQ ID NO: 19384 - DNA, 742 bp, synthetic construct
  source 1..742: mol_type = other DNA
ttaaaacagctctggggttgttcccaccccagaggcccacgtggcggctagtacactggtatcacggtacctttgtacgcctgttttatactccctcccccgcaacttagaagcatacaattcaagctcaataggagggggtgcaagccagcgcctccgtgggcaagcactactgtttccccggtgaggccgcatagactgttcccacggttgaaagtgtccgatccgttatccgctcatgtacttcgagaagcctagtatcgctctggaatcttcgacgcgttgcgctcagcactcaaccccggagtgtagcttgggccgatgagtctggacagtccccactggcgacagtggtccaggctgcgctggcggcccacctgtggcccaaagccacgggacgctagttgtgaacagggtgtgaagagcctattgagctacatgagagtcctccggcccctgaatgcggctaatcctaaccatggagcaggcagctgcaacccagcagccagcctgtcgtaacgcgcaagtccgtggcggaaccgactactttgggtgtccgtgtttccttttattcttgaatggctgcttatggtgacaatcatagattgttatcataaagcgagttggattggccatccagtgtgaatcagattaattactcccttgtttgttggatctactcccgaaacgttttactccttaacttattgaaattgtttgaagacaggatttcagtgtcaca

SEQ ID NO: 19385 - DNA, 742 bp, synthetic construct
  source 1..742: mol_type = other DNA
ttaaaacagctctggggttgttcccaccccagaggcccacgtggcggctagtacactggtatcacggtacctttgtacgcctgttttatactccctcccccgcaacttagaagcatacaattcaagctcaataggagggggtgcaagccagcgcctccgtgggcaagcactactgtttccccggtgaggccgcatagactgttcccacggttgaaagtgtccgatccgttatccgctcatgtacttcgagaagcctagtatcgctctggaatcttcgacgcgttgcgctcagcactcaaccccggagtgtagcttgggccgatgagtctggacagcccccactggcgacagtggtccaggctgcgctggcggcccacctgtggcccaaagccacgggacgctagttgtgaacagggtgtgaagagcctattgagctacatgagagtcctccggcccctgaatgcggctaatcctaaccatggagcaggcagctgcaacccagcagccagcctgtcgtaacgcgcaagtccgtggcggaaccgactactttgggtgtccgtgtttccttttattcttgaatggctgcttatggtgacaatcatagattgttatcataaagcgagttggattggccatccagtgtgaatcagattaattactcccttgtttgttggatccactcccgaaacgttttactccttaacttattgaaattgtttgaagacaggatttcagtgtcaca

SEQ ID NO: 19386 - DNA, 693 bp, synthetic construct
  source 1..693: mol_type = other DNA
gtacactggtatcacggtacctttgtacgcctgttttatactccctccccccgcaacttagaagcacacaattcaagctcaataggagggggtgcaagccagcgcctccgtgggcaagtactactgtttccccggtgaggccgcatagactgttcccacggttgaaagtgtccgatccgttatccgctcacgtacttcgagaagcctagtatcactctggaatcttcgacgcgttgcgctcagcactcaaccccggagtgtagcttgggccgatgagtctggacagtccccactggcgacagtggtccaggctgcgctggcggcccacctgtggcccaaagccacgggacgctagttgtgaacagggtgtgaagagcctattgagctacatgagagtcctccggcccctgaatgcggctaatcctaaccatggagcaggcagctgcaacccagcagccagcctgtcgtaacgcgcaagtccgtggcggaaccgactactttgggtgtccgtgtttccttttattcttgaatggctgcttatggtgacaatcatagattgttatcataaagcgagttggattggccatccagtgtgaatcagactaattactcccttgtttgttggacccactcccgaaacgttttactccttaacttattgaaattggttgaagacaggatttcagtgtcaca

SEQ ID NO: 19387 - DNA, 744 bp, synthetic construct; identical to SEQ ID NO: 1071
  source 1..744: mol_type = other DNA

SEQ ID NO: 19388 - DNA, 744 bp, synthetic construct
  source 1..744: mol_type = other DNA
ttaaaacagcctgtgggttgctcccacccacagggcccactgggcgctagcacactggtatcccggtacctttgtgcgcctgttttatccatcccacccccagctgtaacttagaagttcgacacacatggtcaatagatggctcagtgcaccaactgggtttagaccaagcacttctgttaccccggaccgagtatcaataagctgctcgcgcggctgaaggagaaaacgttcgttacccggccaattacttcgagaaacctagtaccaccatggaggttgcgcagcgtttcgctccgcacagccccagtgtagatcaggccgatgagccaccgcattcctcacgggcgaccgtggcggtggctgcgctggcggcctgcccatggggcaacccatgggacgcttcaatactaacatggtgtgaagagtctattgagctaattggtagtcctccggcccctgaatgcggctaatcctaactgcggagcagatactcacatgccagtgggcagtctgtcgtaacgggcaactctgcagcggaaccgactactttgggtgtccgtgtttccttatattcttatactggctgcttatggtgacaattgagaaattgttaccatatagctattggattggccatccagtgacaaacagagcaattgtttacctatttgttggcttcataccgttgaattttagagttttgaagacccttaacttgattacactatttaactctgtaaa

SEQ ID NO: 19389 - DNA, 744 bp, synthetic construct
  source 1..744: mol_type = other DNA
taaaacagcctgtgggttgttcccacccacagggcccactgggcgccagcactctggtattatggtaccttagtgcgcctgttttatacaccccttccccaaatgtaatttagatgcatgtaaacaaaggccaatagcaggcgcagcataccagctgtgtctcggtcaagcacttctgttaccccggactgagtatcaataggctactcacgtggctgaaggagaaaacgttcgttatccggccaattacttcgagaaacctagtaataccatgaaggttgcgaagtgtttcgctcagcacaaccccagtgtagatcaggtcgatgagtcaccgcattccccacgggtgaccgtggcggtggctgcgctggcggcctgcccatgggattacccatgggacgcttcaatattgacatggtgtgaagagtctattgagctaattggtattcctccggcccctgaatgcggctaatcccaactgcggagcaggtacccacatgccagtgggcagcctgtcgtaatgggcaactctgcagcggaaccgactactttgggtgtccgtgtttctctttattcttatactggctgcttatggtgacaattgagaaattgttgccatatagctattggattggccatccggtgacaaatagagcaattgtgcatccatttgttggttttatactaactcaatctcaaggttttaactaccctcaatctcattatatcattcaatacagcaaa

SEQ ID NO: 19390 - DNA, 744 bp, synthetic construct
  source 1..744: mol_type = other DNA
ttaaaacagcctgtgggttgttcccacccacagggcccactgggcgccagcactctggtattgcggtaccttagtgcgcctgttttatacaccccttccctaaatgcaatttagatgcatgtaaataaagaccaatagcaggcgcagcacaccagctgtgtctcggtcaagcactcctgttaccccggactgagtatcaataggctactcacgtggctgaaggagaaaacgttcgttacccggccaattacttcgagaaacctagtaacaccatgaaggttgcgaagtgtttcgctccgcacaaccccagtgtagatcaggtcgatgagtcaccgcattccccacgggtgaccgtggcggtggctgcgttggcggcctgcccatgggattacccatgggacgcttcaatactgacatggtgtgaagagtctattgagctaattggtattcctccggcccctgaatgcggctaatcccaactgcggagcagatacccacacaccagtgggcagtctgtcgtaatgggcaactctgcagcggaaccgactactttgggtgtccgtgtttctctttattcttatactggctgcttatggtgacaattgagagattgttgccatatagctattggattggccatccggtgacaaatagagcaattgtgtatctatttgttggttttataccattaaattacaaagttttaagcacccttaatcttattatagcattcaatacagcaaa

SEQ ID NO: 19391 - DNA, 744 bp, synthetic construct
  source 1..744: mol_type = other DNA
ttaaaacagcctgtgggttgttcccacccacagggcccactgggcgccagcactctggtattgcggtaccttagtgcgcctgttttatacaccccttccctaaatgcaatttagatgcatgtaaacaaaggccaatagcaggcgcagcacaccagctgtgtctcggtcaagcacttctgttaccccggactgagtatcaataggctactcacgtggctgaaggagaaaacgttcgttatccggccaattacttcgagaaacctagtaataccatgaaggttgcgaagtgtttcgctcagcacaaccccagtgtagatcaggtcgatgagtcaccgcattccccacgggtgaccgtggcggtggctgcgttggcggcctgcccatgggattacccatgggacgcttcaatattgacatggtgtgaagagtctattgagctaattggtattcctccggcccctgaatgcggctaatcccaactgcggagcaggtacccacataccagtgggcagcctgtcgtaatgggcaactctgcagcggaaccgactactttgggtgtccgtgtttctctttattcttatactggctgcttatggtgacaattgagaaattgttgccatatagctattggattggccatccggtgacaaatagagcaattgtgcatccatttgttggttttatactattgtattacaaagttttaagtacccttaatcctattatatcattcaatacagcaaa

SEQ ID NO: 19392 - DNA, 743 bp, synthetic construct
  source 1..743: mol_type = other DNA
cttaaaacagctctggggttgttcccaccccagaggcccacgtggcggctagtacactggtatcacggtacctttgtacgcctgttttatactccctcccccgcaacttagaagcatacaattcaagctcaataggagggggtgcaagccagcgcctccgtgggcaagcactactgtttccccggtgaggccgcatagactgttcccacggttgaaagtgtccgatccgttatccgctcatgtacttcgagaagcctagtatcgctctggaatcttcgacgcgttgcgctcagcactcaaccccggagtgtagcttgggccgatgagtctggacagtccccactggcgacagtggtccaggctgcgctggcggcccacctgtggcccaaagccacgggacgctagttgtgaacagggtgtgaagagcctattgagctacatgagagtcctccggcccctgaatgcggctaatcctaaccatggagcaggcagctgcaacccagcagccagcctgtcgtaacgcgcaagtccgtggcggaaccgactactttgggtgtccgtgtttccttttattcttgaatggctgcttatggtgacaatcatagattgttatcataaagcgagttggattggccatccagtgtgaatcagattaattactcccttgtttgttggatccactcccgaaacgttttactccttaacttattgaaattgtttgaagacaggatttcagtgtcaca

SEQ ID NO: 19393 - DNA, 742 bp, synthetic construct; identical to SEQ ID NO: 118
  source 1..742: mol_type = other DNA

SEQ ID NO: 19394 - DNA, 742 bp, synthetic construct
  source 1..742: mol_type = other DNA
ttaaaacagctctggggttgttcccatcccagaggcccacgtggcggctagtacactggtatcacggtacctttgtacgcctgttttatactccctcccccgcaacttagaagcatacaattcaagctcaataggagggggtgcaagccagcgcctccgtgggcaagcactactgtttccccggtgaggccgcatagactgttcccacggttgaaagtgtccgatccgttatccgctcatgtacttcgagaagcctagtatcgctctggaatcttcgacgcgttgcgctcagcactcaaccccggagtgtagcttgggccgatgagtctggacagtccccactggcgacagtggtccaggctgcgctggcggcccacctgtggcccaaagccacgggacgctagttgtgaacagggtgtgaagagcctattgagctacatgagagtcctccggcccctgaatgcggctaattctaaccatggagcaggcagctgcaacccagcagccagcctgtcgtaacgcgcaagtccgtggcggaaccgactactttgggtgtccgtgtttccttttattcttgaatggctgcttatggtgacaatcatagattgttatcataaagcgagttggattggccatccagtgtgaatcagattaattactcccttgtttgttggatccactcccgaaacgttttactccttaacttattgaaattgtttgaagacaggatttcagtgtcaca

SEQ ID NO: 19395 - DNA, 752 bp, synthetic construct
  source 1..752: mol_type = other DNA
aaagcaggctttaaaacagctctggggttgttcccacccacagggcccactgggcgctagcactctggtatcacggtacctttgtgcgcctgtttttccacccctccccatacgcaacttagaagagagactcaaccggtcaatagacagcctagtacaccaactaggttctgaccaagaacttctgtttccccggaccgagtatcaataggctgcttacgcggctgaaggagaaaacgttcgttacccggccaattacttcgagaaacctagtatcaccatggaagttgcgcagtgtttcgctccgcacaaccccagtgtagatcaggtcgatgagtcaccgcattccccacaggcgactgtggcggtggctgcgttggcggcctgcccgtggggcaacccacgggacgcttcaataccgacatggtgcgaagagtctattgagctaattggtagtcctccggcccctgaatgcggctaatcctaactgtggagcagatacccacgcgccagtgggcagtctgtcgtaatgggcaactccgcagcggaaccgactactttgggtgtccgtgtttccttttatcctcataatggctgcttatggtgacaattgaaagattgttaccatatagctattggattggccatccggtgactaacagagcaattatttatttgtttgttgggtttgtaccattgaactacaaggtccttaatactctaaactacattataagtcttaatacagtgca

SEQ ID NO: 19396 - DNA, 742 bp, synthetic construct
  source 1..742: mol_type = other DNA
ttaaaacagctctggggttgttcccaccccagaggcccacgtggcggctagtacactggtatcacggtacctttgtacgcctgttttatactccctcccccgcaacttagaagcatacaattcaagctcaataggagggggtgcaagccagcgcctccgtgggcaagcactactgtttccccggtgaggccgcatagactgttcccacggttgaaagtggccgatccgttatccgctcatgtacttcgagaagcctagtatcgctctggaatcttcgacgcgttgcgctcagcactcaaccccggagtgtagcttgggccgatgagtctggacagtccccactggcgacagtggtccaggctgcgctggcggcccacctgtggcccaaagccacgggacgctagttgtgaacagggtgtgaagagcctattgagctacatgagagtcctccggcccctgaatgcggctaatcctaaccatggagcaggcagctgcaacccagcagccagcctgtcgtaacgcgcaagtccgtggcggaaccgactactttgggtgtccgtgtttccttttattcttgaatggctgcttatggtgacaatcatagattgttatcataaagcgagttggattggccatccagtgtgaatcagattaattactcccttgtttgttggatccactcccgaaacgttttactccttaacttattgaaattgtttgaagacaggatttcagtgtcaca

SEQ ID NO: 19397 - DNA, 742 bp, synthetic construct
  source 1..742: mol_type = other DNA
ttaaaacagggtgtgggttattcccacccacagggcccaccgggcgctagcacactggtatcacggtacctttgtgcgcctgttttatacaccctttcccaatgtaacttagaagcttagtacaaccggtcaatagattgcacagtaaaccaactgggcactgaccaagcacttctgttaccccggactgagtatcaataggctgctcacgcggctgaaggagaaaacgttcgttacccggccaattacttcgagaaacccagtaccatcatgaaggttgcgaagtgtttcgctccgcacaaccccagtgtagatcaggccgatgagtcaccgcactccccacgggcaaccgtggcggtggctgcgttggcggcctgcccatggggtaacccatgggacgcttcaatactgacatggtgcgaagagtctattaagctaattggtagtcctccggcccctgaatgcggctaatcctaactgcggacgagatacccacacgccagtgggcagtctgtcgtaatgggcaactctgcagcggaaccgactactttgggtgtccgtgtttccttttattcttatactggctgcttatggtgacaattgagagattgttgccatatagctattggattggccatccggtgacaaatagagcaattgtttacctatttgttggttttataccattaaatcacaaagttttaaaaaccctcaactacatcttagcacttaatacagcaag

SEQ ID NO: 19398 - DNA, 742 bp, synthetic construct
  source 1..742: mol_type = other DNA
ttaaaacagctctggggttgttcccaccccagaggcccacgtggcggctagtacactggtatcacggtacctttgtacgcctgttttatactccctcccccgcaacttagaagcatacaattcaagctcaataggagggggtgcaagccagcgcctccgtgggcaagcactactgtttccccggtgaggccgcatagactgttcccacggttgaaagtgtccgatccgttatccgctcatgtacttcgagaagcctagtatcgctctggaatcttcgacgcgttgcgctcagcactcaaccccggagtgtagcttgggccgatgagtctggacagtccccactggcgacagtggtccaggctgcgctggcggcccacctgtggcccaaagccacgggacgctagttgtgaacagggtgtgaagagcctattgagctacatgagagtcctccggcccctgaatgcggctaatcctaaccatggagcaggcagctgcaacccagcagccagcctgtcgtaacgcgcaagtccgtggcggaaccgactactttgggtgtccgtgtttccttttattcttgaatggctgcttatggtgacaatcatagattgttatcataaagcgagttggattggccatccagtgtgaatcagattaattactcccttgtttgttggatccactcccgaaacgttttactcctcaacttattgaaattgtttgaagacaggatttcagtgtcaca

SEQ ID NO: 19399 - DNA, 742 bp, synthetic construct
  source 1..742: mol_type = other DNA
ttaaaacagctctggggttgttcccaccccagaggcccacgtggcggctagtacactggtatcacggtacctttgtacgcctgttttatactccctcccccgcaacttagaagcatacaactcaagctcaataggagggggtgcaagccagcgcctccgtgggcaagcactactgtttccccggtgaggtcgcatagactgttcccacggttgaaagtgtccgatccgttatccgctcatgtacttcgagaagcctagtatcgctctggaatcttcgacgcgttgcgctcagcactcaaccccggagtgtagcttgggccgatgagtctggacagtccccactggcgacagtggtccaggctgcgctggcggcccacctgtggcccaaagccacgggacgctagttgtgaacagggtgtgaagagcctattgagctacatgagagtcctccggcccctgaatgcggctaatcctaaccatggagcaggcagctgcaacccagcagccagcctgtcgtaacgcgcaagtccgtggcggaaccgactactttgggtgtccgtgtttccttttattcttgaatggctgcttatggtgacaatcatagattgttatcataaagcgagttggattggccatccagtgtgaatcagattaattactcccttgtttgttggatccactcccgaaacgttttactccttaacttattgaaattgtttgaagacaggatttcagtgtcaca

SEQ ID NO: 19400 - DNA, 733 bp, synthetic construct
  source 1..733: mol_type = other DNA
tggggttgttcccaccccagaggcccacgtggcggctagtactccggtattacggtacccttgtacgcctgttttatactcccctccccgtaacttagatgaaacaaaacaagttcaataggagggggtacaaaccagtaccaccacgaacaagcacttctgtctccccggtgacattgcatagactgtccccacggttgaaagcaattgatccgttacccgctcttgtacttcgagaagcctagtaccatcttggaatcatcgatgcgttgcgctccacactcagtcccagagtgtagcttaggctgatgagtctggacattcctcaccggcgacggtggtccaggctgcgttggcggcctacctgtggcccaaagccacaggacgctagatgtgaacaaggtgtgaagagcctattgagctataagagagtcctccggcccctgaatgcggctaatcccaaccacggatcaagggtgcacgaaccagtgtataccttgtcgtaacgcgcaagtctgtggcggaaccgactactttgggtgaccgtgtttccttttattatttcaatggctgcttatggtgacaatcattgattgttatcataaagcgaattggattggccatccggtgaaagtgaaacatattgtttgcctcctcgttgggtctactccaaccaatctctttacttacaatcttaccactacagttttgctggttagaagtgtgtttcacg

SEQ ID NO: 19401 - DNA, 742 bp, synthetic construct
  source 1..742: mol_type = other DNA
taaaacagcctgtgggttgttcccacccacggggcccactgggcgctagcacactggtatcacggtacctttgtgcgcctgttttatccaccctcccccccacgtaacttagaagcaaaacctacccggtcaatagacaactcagtgagccaactgagcaatgaccaagcacttctgttaccccggaccaagtatcaatagactgctagcgcggttgaaggagaaaacgtccgttacccggccaattacttcgagaaacctagtaccaccatggaggttgcgcagtgtttcgctccgcacaaccccagtgtagatcaggccgatgagccaccgcattccccacgggcgaccgtggcggtggctgcgctggcggcctgcccacggggcaacccgtgggacgcttcaatactgacatggtgcgaagagtctattgagctaattggtagtcctccggcccctgaatgcggctaatcctaactgcggagcagatacccacgtaccagtgggcagtctgtcgtaacgggcaactctgcagcggaaccgactactttgggtgtccgtgtttccttttattcttacattggctgcttatggtgacaattgaaagattgttaccatatagctattggattggccatccggtgacaaatagagcgatcatttatttgtttgttggttttattccattgaacctcaaagttttgaacactcttaattttattatattgctcaacacaacaaa

SEQ ID NO: 19402 - DNA, 743 bp, synthetic construct
  source 1..743: mol_type = other DNA
ttaaaacagcctgtgggttgttcccacccacagggcccaccgggcgtcagcacactggtattgcggtacctttgtgcgcctgttttatatatccctacccgaacgtaacctagaagcaaattaatgaggatcgatagtcagcacggcacaccagccgtgttttgatcaagcacttctgttaccccggaccgagtatcaataggctactcacgtggccgaaggagaaagtgttcgttacccggccaattacttcgagaaacccagtaacaccatgaaggttgcgcagcgtttcgctccgcacaaccccagtgtagatcaggtcgatgagtcaccgcattccccacgggcgaccgtggcggtggctgcgctggcggcctgcccatagggtgacctatgggacgcttcaatactgacatggtgcgaagagtctattgagctaattggtagtcctccggcccctgaatgcggctaatcctaactgcggagcaggtgcccacaaaccagtgggtagtctgtcgtaatgggcaactctgcagcggaaccgactactttgggtgtccgtgtttccttttattcttatactggctgcttatggtgacaattgaaaggttgttaccatatagctattggattggccatccggtgacaaacagagcgattatatacttgtttgttggtttcataccactaaatcacaagactttaaacacccttaatttcataatagcattaaatacagcaag

SEQ ID NO: 19403 - DNA, 742 bp, synthetic construct
  source 1..742: mol_type = other DNA
ttaaaacagcctgtgggttgttcccacccacggggcccactgggcgctagcacactggtatcacggtacctttgtgtgcctgttttatccaccctccccccacgtaacttagaagcaaaacctacccggtcaatagacaactcagtgagccaactgagcaatgaccaagcacttctgttaccccggactaagtatcaatagactgctagcgcggttgaaggagaaaacgtccgttacccggccaattacttcgagaaacctagtaccaccatggaggttgcgcagtgtttcactccgcacaaccccagtgtagatcaggccgatgagccaccgcactccccacgggcgaccgtggcggtggctgcgctggcggcctgcccatggggcaacccatgggacgcttcaatactgacatggtgcgaagagtctattgagctaattggtagtcctccggcccctgaatgcggctaatcctaactgcggagcagatacccacgtaccagtgggcagtctgtcgtaacgggcaactctgcagtggaaccgactactttgggtgtccgtgtttccttttattcttacattggctgcttatggtgacaattgaaagattgttaccatatagctattggattggccatccggtgacaaatagagcgatcatttatttgtttgttggttttgttccattgaacctcaaagttttgaacactcttaactttattatatcactcaacacaacaaa

SEQ ID NO: 19404 - DNA, 743 bp, synthetic construct
  source 1..743: mol_type = other DNA
taaaacagcctgtgggttgttcccacccacagggcccactgggcgccagcactctggtattgcggtaccttagtgcgcctgttttatacaccccttccctaaatgcaatttagatgcatgtaaataaagaccaatagcaggcgcagcacaccagctgtgtctcggtcaagcactcctgttaccccggactgagtatcaataggctactcacgtggctgaaggagaaaacgttcgttacccggccaattacttcgagaaacctagtaacaccatgaaggttgcgaagtgtttcgctccgcacaaccccagtgtagatcaggtcgatgagtcaccgcattccccacgggtgaccgtggcggtggctgcgttggcggcctgcccatgggattacccatgggacgcttcaatactgacatggtgtgaagagtctattgagctaattggtattcctccggcccctgaatgcggctaatcccaactgcggagcagatacccacacaccagtgggcagtctgtcgtaatgggcaactctgcagcggaaccgactactttgggtgtccgtgtttctctttattcttatactggctgcttatggtgacaattgagagattgttgccatatagctattggattggccatccggtgacaaatagagcaattgtgtatctatttgttggttttataccattaaattacaaagttttaagcacccttaatcttattatagcattcaatacagcaaa

SEQ ID NO: 19405 - DNA, 743 bp, synthetic construct
  source 1..743: mol_type = other DNA
taaaacagcctgtgggttgttcccacccacagggcccactgggcgccagcactctggtattgtggtaccttagtgcgcctgttttatacaccccttccctaaatgtaatttagatgcatgtaaacaaaggccaatagcaggcgcagcacaccagctgtgtctcggtcaagcacttctgttaccccggactgagtatcaataggctactcacgtggctgaaggagaaaacgttcgttatccggccaattacttcgagaaacctagtaataccatgaaggttgcgaagtgtttcgctcagcacaaccccagtgtagatcaggtcgatgagtcaccgcattccccacgggtgaccgtggcggtggctgcgctggcggcctgcccatgggattacccatgggacgcttcaatattgacatggtgtgaagagtctattgagctaattggtattcctccggcccctgaatgcggctaatcctaactgcggagcaggtacccacataccagtgggcagcctgtcgtaatgggcaactctgcagcggaaccgactactttgggtgtccgtgtttctctttattcttatactggctgcttatggtgacaattgagaaattgttgccatatagctattggattggccatccggtgacaaatagagcaattgtgcatccatttgttggttttatactattgtattacaaagttttaagtacccttaatcctattatatcattcaatacagcaaa

SEQ ID NO: 19406 - DNA, 742 bp, synthetic construct
  source 1..742: mol_type = other DNA
ttaaaacagctctggggttgttcccaccccagaggcccacgtggcggctagtacactggtatcacggtacctttgtacgcctgttttatactccctcccccgcaacttagaagcatacaattcaagctcaataggagggggtgcaagccagcgcctccgtgggcaagcactactgtttccccggtgaggccgcatagactgttcccacggttgaaagtgtccgatccgttatccgctcatgtacttcgagaagcctagtatcgctctggaatcttcgacgcgttgcgctcagcactcaaccccggagtgtagcttgggctgatgagtctggacagtccccactggcgacagtggtccaggctgcgctggcggcccacctgtggcccaaagccacgggacgctagttgtgaacagggtgtgaagagcctattgagctacatgagagtcctccggcccctgaatgcggctaatcctaaccatggagcaggcagctgcaacccagcagccagcctgtcgtaacgcgcaagtccgtggcggaaccgactactttgggcgtccgtgtttccttttattcttgaatggctgcttatggtgacaatcatagattgttatcataaagcgagttggattggccatccagtgtgaatcagattaattacccccttgtttgttggatccactcccgaaacgttttactccttaacttattgaaattgtttgaagacaggatttcagtgtcaca

SEQ ID NO: 19407 - DNA, 738 bp, synthetic construct
  source 1..738: mol_type = other DNA
aacagctctggggttgttcccaccccagaggcccacgtggcggctagtacactggtatcacggtacctttgtacgcctgttttatactccctcccccgcaacctagaagcatacaattcaagctcaataggagggggtgcaagccagcacctccatgggcaagcactactgtttccccggtgaggccgcatagactgttcccacggttgaaagtgtccgatccgttatccgctcatgtacttcgagaagcctagtatcgctctggaatcttcgacgcgttgcgctcagcactcaaccccggagtgtagcttgggccgatgagtctggacagtccccactggcgacagtggtccaggctgcgctggcggcccacctgtggcccaaagccacgggacgctagttgtgaacagggtgtgaagagcctattgagctacatgagagtcctccggcccctgaatgcggctaatcctaaccatggagcaggcagctgcaacccagcagccagcctgtcgtaacgcgcaagtccgtggcggaaccgactactttgggtgtccgtgtttccttttattcttgaatggctgcttatggtgacaatcatagattgttatcataaagcgagttggattggccatccagtgtgaatcagattaattactcccttgtttgttggatccactcccgaagcgttttactccttaacttattgaaattgtttgaagacaggatttcagtgtcaca

SEQ ID NO: 19408 - DNA, 741 bp, synthetic construct
  source 1..741: mol_type = other DNA
taaaacagctctggggttgttcccaccccagaggcccacgtggcggctagtacactggtatcacggtacctttgtacgcctgttttatactccctcccccgcaacttagaagcatacaattcaagctcaataggagggggtgcaaaccagcgcctccgtgggcaagcactactgtttccccggtgaggccgcatagactgttcccacggttgaaagtgtccgatccgttatccgctcatgtacttcgagaagcctagtatcgctctggaatcttcgacgcgttgcgctcagcactcaaccccggagtgtagcttgggccgatgagtctggacagtccccactggcgacagtggtccaggctgcgctggcggcccacctgtggcccaaagccacgggacgctagttgtgaacagggtgtgaagagcctattgagctacatgagagtcctccggcccctgaatgcggctaatcctaaccatggagcaggcagctgcaacccagcagccagcctgtcgtaacgcgcaagtccgtggcggaaccgactactttgggtgtccgtgtttccttttattcttgaatggctgcttatggtgacaatcatagattgttatcataaagcgagttggattggccatccagtgtgaatcagattaattactcccttgtttgttgggtccactcccgaaacgttttactccttaacttattgaaattgtttgaagacaggatttcagtgtcaca

SEQ ID NO: 19409 - DNA, 745 bp, synthetic construct; identical to SEQ ID NO: 1109
  source 1..745: mol_type = other DNA

SEQ ID NO: 19410 - DNA, 732 bp, synthetic construct
  source 1..732: mol_type = other DNA
ggggttgttcccaccccagaggcccacgtggcggctagtactccggtattacggtacccttgtacgcctgttttatactcccctccccgtaacttagatgaaacaaaacaagttcaataggagggggtacaaaccagtaccaccacgaacaagcacttctgtctccccggtgacattgcatagactgtccccacggttgaaagcgattgatccgttacccgctcttgtacttcgagaagcctagtaccatcttggaatcatcgatgcgttgcgctccacactcagtcccagagtgtagcttaggctgatgagtctggacattcctcaccggcgacggtggtccaggctgcgttggcggcctacctgtggcccaaagccacaggacgctagatgtgaacaaggtgtgaagagcctattgagctataagagagtcctccggcccctgaatgcggctaatcccaaccacggatcaagggtgcacgaaccagtgtataccttgtcgtaacgcgcaagtctgtggcggaaccgactactttgggtgaccgtgtttccttttattatttcaatggctgcttatggtgacaatcattgattgttatcataaagcgaattggattggccacccggtgaaagtgaaacatatcgtttgcctcttcgttgggtctactccaaccaatctctttacttacaatcttaccactacagttttgctggttaaaagtgtgtttcacg

SEQ ID NO: 19411 - DNA, 741 bp, synthetic construct
  source 1..741: mol_type = other DNA
aaaacagcctgtgggttgttcccacccacagggcccaccgggcgtcagcacactggtattgcggtacctttgtgcgcctgttttatatatccctgcccgaacgtaacctagaagcaaattaacgaggatcgatagtcagcacggcacaccagccgtgttttgatcaagcacttctgttaccccggaccgagtatcaataggctactcacgtggccgaaggagaaagtgttcgttacccggccaattacttcgagaaacccagtaacaccatgaaggttacgcagcgtttcgctccgcacaaccccagtgtagatcaggtcgatgagtcaccgcattccccacgggcgaccgtggcggtggctgcgctggcggcctgcccatagggtgacctatgggacgcttcaatactgacatggtgcgaagagtctattgagctaattggtagtcctccggcccctgaatgcggctaatcctaactgcggagcaggtgcccacaaaccagtgggtagtctgtcgtaatgggcaactctgcagcggaaccgactactttgggtgtccgtgtttccttttattcttatactggctgcttatggtgacaatcgaaaggttgttaccatatagctattggattggccatccggtgacaaacagagcgattatatacttgtttgttggcttcataccactaaattacaagactttaaacacccttaatttcataatagcattaaatacagcaag

SEQ ID NO: 19412 - DNA, 741 bp, synthetic construct
  source 1..741: mol_type = other DNA
taaaacagcctgtgggttgttcccacccacggggcccactgggcgctagcacactggtatcacggtacctttgtgcgcctgttttattcaccctccccccacgtaacttagaagcaaaacctacccggtcaatagacaactcagtgagccaactgagcaatgaccaagcacttctgttaccccggaccaagtatcaatagactgctagcgcggttgaaggagaaaacgtccgttacccggccaattacttcgagaaacctagtaccaccatggaggttgcgcagtgtttcgctccgcacaaccccagtgtagatcaggccgatgagccaccgcattccccacgggcgaccgtggcggtggctgcgctggcggcctgcccacggggcaacccgtgggacgcttcaatactgacatggtgcgaagagtctattgagctaattggtagtcctccggcccctgaatgcggctaatcctaactgcggagcagatacccacgtaccagtgggcagtctgtcgtaacgggcaactctgcagcggaaccgactactttgggtgtccgtgtttccttttattcttacattggctgcttatggtgacaattgaaagattgttaccatatagctattggattggccatccggtgacaaatagagcgatcatctatttgtttgttggttttattccattgaacctcaaagttttgaacactctcaattttattatattgctcaacacaacaaa

SEQ ID NO: 19413 - DNA, 743 bp, synthetic construct
  source 1..743: mol_type = other DNA
taaaacagcctgtgggttgttcccacccacagggcccactgggcgccagcactctggtattgcggtaccttagtgcgcctgttttatacaccctttccctaaatgcaatttagatgcatgtaaataaagaccaatagcaggcgcagcacaccagctgtgtctcggtcaagcactcctgttaccccggactgagtatcaataggctactcacgtggctgaaggagaaaacgttcgttacccggccaattacttcgagaaacctagtaacaccatgaaggttgcgaagtgtttcgctccgcacaaccccagtgtagatcaggtcgatgagtcaccgcatcccccacgggtgaccgtggcggtggctgcgttggcggcctgcccatgggattacccatgggacgcttcaatactgacatggtgtgaagagtctattgagctaattggtattcctccggcccctgaatgcggctaatcccaactgcggagcagatacccacacaccagtgggcagtctgtcgtaatgggcaactctgcagcggaaccgactactttgggtgtccgtgtttctctttattcttatactggctgcttatggtgacaattgagagattgttgccatatagctattggattggccatccggtgacaaatagagcaattgtgtatctatttgttggttttataccattaaattacaaagctttaagcacccttaatcttattatagcattcaatacagcaaa

SEQ ID NO: 19414 - DNA, 739 bp, synthetic construct
  source 1..739: mol_type = other DNA
aaacagctctggggttgttcccaccccagaggcccacgtggcggctagtacactggtatcacggtacctttgtacgcctgttttatactccctcccccgcaacttagaagcatacaattcaagctcaataggagggggtgcaagccagcgcctccgtgggcaagcactactgtttccccggtgaggccgcatagactgttcccacggttgaaagtgtccgatccgttatccgctcatgtacttcgagaagcctagtatcgctctggaatcttcgacgcgttgcgctcagcactcaaccccggagtgtagcttgggccgatgagtctggacagtccccactggcgacagtggtccaggctgcgctggcggcccacccgtggcccaaagccacgggacgctagttgtgaacagggtgtgaagagcctattgagctacatgagagtcctccggcccctgaatgcggctaatcctaaccatggagcaggcagctgcaacccagcagccagcctgtcgtaacgcgcaagtccgtggcggaaccgactactttgggtgtccgtgtttccttttattcttgaatggctgcttatggtgacaatcatagattgttatcataaagcgagttggattggccatccagtgtgaatcagattaattactcccttgtttgttggatccactcccgaaacgttttactccttaacttattgaaattgtttgaagacaggatttcagtgtcaca

SEQ ID NO: 19415 - DNA, 741 bp, synthetic construct
  source 1..741: mol_type = other DNA
taatgcagctctggggttgttcccaccccagaggcccacgtggcggctagtacactggtatcacggtacctttgtacgcctgttttatactccctcccccgcaacttagaagcatacaattcaagctcaataggagggggtgcaagccagcgcctccgtgggcaagcactactgtttccccggtgaggccgcatagactgttcccacggttgaaagtgtccgatccgttatccgctcatgtacttcgagaagcctagtatcgctctggaatcttcgacgcgttgcgctcagcactcaaccccggagtgtagcttgggccgatgagtctggacagtccccactggcgacagtggtccaggctgcgctggcggcccacctgtggcccaaagccacgggacgctagttgtgaacagggtgtgaagagcctattgagctacatgagagtcctccggcccctgaatgcggctaatcctaaccatggagcaggcagctgcaacccagcagccagcctgtcgtaacgcgcaagtccgtggcggaaccgactactttgggtgtccgtgtttccttttattcttgaatggctgcttatggtgacaatcatagattgttatcataaagcgagttggattggccatccagtgtgaatcagattaattactcccttgtttgttggatccactcccgaaacgttttactccttaacttattgaaattgtttgaagacaggatttcagtgtcaca

SEQ ID NO: 19416 - DNA, 742 bp, synthetic construct
  source 1..742: mol_type = other DNA
ttaaaacagctctggggttgttcccaccccagaggcccacgtggcggctagtacactggtatcacggtacctttgtacgcctgttttatactccctcccccgcaacttagaaacatacaattcaagctcaataggagggggtgcaagccagcgcctccgtgagcaagcactactgtttccccggtgaggccgcatagactgttcccacggttgaaagtgtccgatccgttatccgctcatgtacttcgagaagcctagtatcgctctggaatcttcgacgcgttgcgctcagcactcaaccccggagtgtagcttgggccgatgagtctggacagtccccactggcgacagtggtccaggctgcgctggcggcccacctgtggcccaaagccacaggacgctagttgtgaacagggtgtgaagagcctattgagctacatgagagtcctccggcccctgaatgcggctaatcctaaccacggagcaggcagctgcaacccagcagccagcctgtcgtaacgcgcaagtccgtggcggaaccgactactttgggtgtccgtgtttccttttattcttgaatggctgcttatggtgacaatcacagattgttatcataaagcgagttggattggccatccagtgtgaatcagattaattactcccttgtttgttggatccactcccgaaacgttttactccttaacttattgaaattgtttgaagacaggatttcagtgtcaca

SEQ ID NO: 19417 - DNA, 742 bp, synthetic construct
  source 1..742: mol_type = other DNA
ttaaaacagctctggggttgttcccaccccagaggcccacgtggcggctagtacactggtatcacggtacctttgtacgcctgttttatactccctcccccgcaacttagaaacatacaattcaagctcaataggagggggtgcaagccagcgcctccgtgagcaagcactactgtttccccggtgagcccgcatagactgttcccacggttgaaagtgtccgatccgttatccgctcatgtacttcgagaagcctagtatcgctctggaatcttcgacgcgttgcgctcagcactcaaccccggagtgtagcttgggccgatgagtctggacagtccccactggcgacagtggtccaggctgcgctggcggcccacctgtggcccaaagccacaggacgctagttgtgaacagggtgtgaagagcctattgagctacatgagagtcctccggcccctgaatgcggctaatcctaaccacggagcaggcagctgcaacccagcagccagcctgtcgtaacgcgcaagtccgtggcggaaccgactactttgggtgtccgtgtttccttttattcttgaatggctgcttatggtgacaatcacagattgttatcataaagcgagttggattggccatccagtgtgaatcagattaattactcccttgtttgttggatccactcccgaaacgttttactccttaacttattgaaattgtttgaagacaggatttcagtgtcaca

SEQ ID NO: 19418 - DNA, 742 bp, synthetic construct
  source 1..742: mol_type = other DNA
ttaaaacagctctggggttgttcccaccccagaggcccacgtggcggctagtacactggtatcacggtacctttgtacgcctgttttatactccctcccccgcaacttagaaacatacaatttaagctcaataggagggggtgcaagccagcgcctccgtgagcaagcactactgtttccccggtgaggccgcatagactgttcccacggttgaaagtgtccgatccgttatccgctcatgtacttcgagaagcctagtatcgctctggaatcttcgacgcgttgcgctcagcactcaaccccggagtgtagcttgggccgatgagtctggacagtccccactggtgacagtggtccaggctgcgctggcggcccacctgtggcccaaagccacaggacgctagttgtgaacagggtgtgaagagcctattgagctacatgagagtcctccggcccctgaatgcggctaatcctaaccacggagcaggcagctgcaacccagcagccagcctgtcgtaacgcgcaagtccgtggcggaaccgactactttgggtgtccgtgtttccttttattcttgaatggctgcttatggtgacaatcacagattgttatcataaagcgagttggattggccatccagtgtgaatcagattaattactcccttgtttgttggatccactcccgaaacgttttactccttaacttattgaaattgtttgaagacaggatttcagtgtcaca

SEQ ID NO: 19419 - DNA, 747 bp, synthetic construct
  source 1..747: mol_type = other DNA
tttaaaacagtcctgtgggttgttacccacccacagggcccactgggcgccagcacactggtatcacggtacctttgtgcgcctgttttatatacccttcccctactaagtaacttagaagcaattaaacaaagaccaacagtaagcacagcgcaccagctgtgtttcggtcaagcacttctgttaccccggactgagtatcaataggctactcacgtggctgaaggagaaaacgttcgttacccgaccaattacttcgagaagcctagtaacaccatggaggttgcgcggcgtttcgctccacacaaccccagtgcagatcaggtcgatgagccaccgcattccccacgggcgaccgtggcggtggctgcgttggcggcctgcccatggggcaacccatgggacgcttcaatactgacatggtgcgaagagtctattgagctaattggtagtcctccggcccctgaatgcggctaatcccaactgcggagcagatacccacgcgccagtgggcagtctgtcgtaatgggcaactctgcagcggaaccgactactttgggtgtccgtgtttcctttattcttatactggctgcttatggtgacaattgagagattgttaccatatagctattggattggccatccggtgacgagcagagctattatttacctatttgttggttttataccattgaactataaagttttaaaaaccttaaacttcatcttagtactcaatacagcaaa

SEQ ID NO: 19420 - DNA, 743 bp, synthetic construct
  source 1..743: mol_type = other DNA
ttaaaacagcctgtgggttgttcccacccatagggcccactgggcgctagcacactggtattacggtacctttgtgcgcctgttttattcacccctctcccaaacgtaacttagaagctcaacacatgtggtcagtaggcagcccagtatgccaactgggtcttgaccaagcacttctgttaccccggactgagtatcaataggctgctcacgcggctgaaggagaaagtgttcgtcacccggccaattacttcgagaaacctagtatcaccatggaagttgcgcagcgtttcgctccgcacgaccccagtgtagatcaggccgatgagtcaccgcactcctcacgggcgaccgtggcggtggctgcgctggcggcctgcccatgaggcaactcatgggacgcttcaatactgacatggtgtgaagagtctattgagctaattggtagtcctccggcccctgaatgcggctaatcctaaccgcagagcagatacccacacgccagtgggcagtctgtcgtaacgggtaactctgcggcggaaccgactactttgggtgtccgtgtttctttttattctttattggctgcttatggtgacaattgaaagattgttgccatatagctattggattggccatccagtgacaaacagagcgactgtttatctatttgttggtttcataccattaaattttaaagtattaaagactatcaacttgatcatactacttaatacagcaaa

SEQ ID NO: 19421 - DNA, 742 bp, synthetic construct
  source 1..742: mol_type = other DNA
ttaaaacagcctgtgggttgttcccacccacagggcccactgggcgctagcactctggtatcacggtacccttgtgcgcctgttttatcccccccttcccagatgtaacttagaagctaaacctaatggtcaataggaaccccagcacaccagctgggtcttgaccaagcacctctgttaccccggactgagtatcaatagactgctcgcgcggttgaaggagaaaacgttcgttacccggccaactacttcgagaaacctagtaacaccatgaaagttgcgcagtgtttcgttccacacaaccccagtgtagatcaggtcgatgagtcaccgcgttccccacgggcgaccgtggcggtggctgcgttggcggcctgcccatggggtaacccatgggacgcttcaatactgacatggtgcaaagagtctattgagctagttggtagtcctccggcccctgaatgcggctaatcccaactgcggagcagacacccacatgccagtgggcagtctgtcgtaacgggcaactctgcagcggaaccgactactttgggtgtccgtgtttccttttattttcatactggctgcttatggtgacaattgaaagattgttaccatatagctattggattggccatccggtgacaaatagagcaattatttaccaatttgttggttttgtaccattaaattttaaagttttaaagactctcaaccttattatacgaatcaactcagcaaa

SEQ ID NO: 19422 - DNA, 737 bp, synthetic construct
  source 1..737: mol_type = other DNA
tggggttgttcccaccccagaggcccacgtggcggctagtactccggtattacggtacccttgtacgcctgttttatactcccttccccgcaacttagaagaattaaaccaagttcaatagaagggggtacaagccagtaccaccacgaacaagcacttctgtttccccggtgacgccgtatagactgtacccacggttgaaaacgactgatccgttatccgctttcgtacttcgagaagcctagtatcatcttgggatcatcgatgcgttgcgctcagcactcaaccccggagtgtagcttaggccgatgagtctggacattcctcaccggtgacggtggtccaggctgcgttggcggcctacctgtggcccaaagccacaggacgctagttgtgaacaaggtgtgaagagcctattgagctacgaaagattcctccggcccctgaatgcggctaatcccaaccacggagcaagtgctcgcacaccagtgagtagcttgtcgtaacgggtaactctgtggcggaaccgactactttgggtgtccgtgtttcctgctatttttatcatggctgcttatggtgacaatcagagattgttatcataaagcgaattggattggccatccggtgagtgttgtgtcaggtatacaactgtttgttggaaccactgtgttagctttacttctcatttaaccaattaatcacaaacaatacgaggacaaaacaacaatactaca

SEQ ID NO: 19423 - DNA, 742 bp, synthetic construct
  source 1..742: mol_type = other DNA
aaaacagcctgtgggttgttcccacccacagggcccactgggcgccagcactctggtattgcggtaccttagtgcgcctgttttatacaccccttccctaaatgtaatttagatgcatgtaaataaaggccaatagcaggcgcagcacaccagctgtgtctcggtcaagcactcctgttaccccggactgagtatcaataggctactcacgtggctgaaggagaaaacgttcgttacccggccaattacttcgagaaacctagtaataccatgaaggttgcgaagtgtttcgctcagcacaaccccagtgtagatcaggtcgatgagtcaccgcattccccacgggtgaccgtggcggtggctgcgttggcggcctgcccatgggattacccatgggacgcttcaatattgacatggtgtgaagagtctattgagctaattggtattcctccggcccctgaatgcggctaatcccaactgcggagcaggtacccacataccagtgggcagtctgtcgtaatgggcaactctgcagcggaaccgactactttgggtgtccgtgtttctctttattcttatactggctgcttatggtgacaattgagaaattgttgccatatagctattggattggccatccggtgacaaatagagcaattgtgcatccatttgttggttttataccattgaattacaaagttttaagtacccttaatcctattatatcattcaatacagcaaa

SEQ ID NO: 19424 - DNA, 743 bp, synthetic construct
  source 1..743: mol_type = other DNA
ttaaaacagcctgtgggttgtacccacccacagggcccactgggcgccagcactctggtattacggtacccttgtgcgcctgttttatatcccttccccaaggtaaacgttagaagcaatgcactcccgatcaatagaaggtgcgacgcgccagtcgtatctcgatcaagcacttctgtttccccggaccgagtatcaatagactgctagcgcggttgaaggagaaaacgttcgttacccgactaactacttcgagaagcccagtagcgccatgaaagttgcagagtgtttcgctcagcacttcccccgtgtagatcaggccgatgagtcaccgcaatccccacgggcgaccgtggcggtggctgcgttggcggcctgcctatggggaaacccataggacgctcaaatacagacatggtgcgaagagtctattgagctagttagtactcctccggcccctgaatgcggctaatcctaactgcggagcaagtactcacaatccagtgggcagcttgtcgtaacgggtaactctgcagcggaaccgactactttgggtgtccgtgtttccttttattcctacattggctgcttatggtgacaatcaaagagttgttaccatatagctattggattggccatccggtgactaataaagcaattatatttctttttgttgggtttgtaccccttaatacaaccagcttcaccacattgtgttacatcattagactgaacaaggcaaa

SEQ ID NO: 19425 - DNA, 743 bp, synthetic construct
  source 1..743: mol_type = other DNA
ttaaaacagcctgtgggttggacccacccatagggcccactgggcgctagcacactggtatcacggtacctttgtgcgcctgttttatccacccttccccgaacgaaacttagaagtttgacttaaacggtcaatagaaaacccagtacaccaactgggtcgtgaccaagcacttctgtgaccccggactgagtatcaataagctactcacgtggctgaaggaggaaacgttcgttacccggccaattacttcgagaaacttagtaccaccatgaaggttgcgtagcgtttcgctccacacgaccccagtgtagatcaggtcgatgagtcaccgcgttccccacgggtgaccgtggcggtggctgcgttggcggcctgcccttggggcaacccaagggacgcttcaatactgacatggtgcgaagagtctattgagctaattggtagtcctccggcccctgaatgcggctaatcccaactgcggagcagatacccacatgccagtgggcagtctgtcgtaacgggcaactctgcagcggaaccgactactttgggtgtccgtgtttccttttattcttatactggctgcttatggtgacaattgagagattgttaccatatagctattggattggccatccagtgtctaatagagcaatcatctacctttttgttggatttattccacttgactataaagcactcaaaacacttgaatacattgtaaatcttaacacaacaaa

SEQ ID NO: 19426 - DNA, 743 bp, synthetic construct
  source 1..743: mol_type = other DNA
ttaaaacagcctgtgggttgaacccacccacagggcccactgggcgctagcacactggtatcacggtacctttgtgcgcctgttttatccacccttccccgaacgaaacttagaagtttgacttaaacggtcaatagaaaacccagtacaccaactgggtcgtgaccaagcacttctgtgaccccggactgagtatcaataagctactcacgtggctgaaggagaaaacgttcgttacccggccaattacttcgagaaacttagtaccaccatgaaggttgcgtagcgtttcgctccgcacgaccccagtgtagatcaggtcgatgagtcaccgcgttccccacgggtgaccgtggcggtggctgcgttggcggcctgcccttggggcaacccaagggacgcttcaatactgacatggtgcgaagagtctattgagctaattggtagtcctccggcccctgaatgcggctaatcccaactgcggagcagatacccacatgccagtgggcagtctgtcgtaacgggcaactctgcagcggaaccgactactttgggtgtccgtgtttccttttattcttatactggctgcttatggtgacaattgagaaattgttaccatatagctattggattggccatccattgtctaatagagcaatcatctacctttttgttggttttattccacttgactacaaagcactcaaaacacttaaatacattgtaaatcttaacacaacaaa

SEQ ID NO: 19427 - DNA, 743 bp, synthetic construct
  source 1..743: mol_type = other DNA
ttaaaacagcctgtgggttgttcccacccacagggcccactgggcgttagcactctggtatcacggtacctttgtgcgcctgttttacccaccctccctaaaatgtaatttagaagcatgatccgaacggtcattaggtagctcagtgcaccaactgagcccagaccaagcacttctgttaccccggactgagtatcaataggctgctcgcgcggctgaaggagaaaacgttcgttatccggccaattacttcgagaaacccagtaccactatgaaagttgcgcagcgtttcgttccgcacaaccccagtgtagatcaggtcgatgagtcaccgcgttccccacgggcgaccgtggcggtggctgcgttggcggcctgctcatggggcaacccatgagacgcttcaatactgacatggtgcgaagagtctattgagctaattggtagtcctccggcccctgaatgcggctaatcccaactgcggagcagatacccacaaaccagtgggcagtctgtcgtaatgggtaactctgcagcggaaccgactactttgggtgtccgtgtttccttttgttcttacactggctgcttatggtgacaattgagagattgttgccatatagctattggattggccatccggtgactaacagagcaattgtttacttatttattggttttataccgttagattacaaagtcctaaacaccctgaatctcattataacacttaattcagcaaa

SEQ ID NO: 19428 - DNA, 743 bp, synthetic construct
  source 1..743: mol_type = other DNA
ttaaaacagcctgtgggttgttcccacccacagggcccactgggcgttagcactctggtatcacggtacctttgtgcgcctgttttatccaccctccctaaaatgtaatttagaagcatgatccgaacggtcattaggtagctcagtgcaccaactgagcccagaccaagcacttctgttaccccggactgagtatcaataggctgctcgcgcggctgaaggagaaaacgttcgttatccggccaattacttcgagaaacccagtaccactatgaaagttgcgcagcgtttcgttccgcacaaccccagtgtagatcaggtcgatgagtcaccgcgttccccacgggcgaccgtggcggtggctgcgttggcggcctgctcatggggcaacccatgagacgcttcaatactgacatggtgcgaagagtctattgagctaattggtagtcctccggcccctgaatgcggctaatcccaactgcggagcagatacccacaaaccagtgggcagtctgtcgtaatgggtaactctgcagcggaaccgactactttgggtgtccgtgtttccttttgctcttacactggctgcttatggtgacaattgagagattgttgccatatagctattggattggccatccggtgactaacagagcaattgtttacttatttattggttttataccgttagattacaaagtcctaaacaccctgaatctcattataacacttaattcagcaaa

SEQ ID NO: 19429 - DNA, 743 bp, synthetic construct
  source 1..743: mol_type = other DNA
ttaaaacagcctgtgggttgttcccacccacagggcccactgggcgttagcactctggtatcacggtacctttgtgcgcctgttttatccaccctccctaaaatgtaatttagaagcatgaaccgaacggtcattaggtagctcagtgcaccaactgagcccagaccaagcacttctgttaccccggactgagtatcaataggctgctcgcgcggctgaaggagaaaacgttcgttatccggccaattacttcgagaaacccagtaccactatgaaagttgcgcagcgtttcgttccgcactaccccagtgtagatcaggtcgatgagtcaccgcgttccccacgggcgaccgtggcggtggctgcgttggcggcctgcccatggggcaacccatgggacgcttcaatactgacatggtgcgaagagtctattgagctaattggtagtcctccggcccctgaatgcggctaatcccaactgcggagcagatacccacaaaccagtgggcagtctgtcgtaatgggtaactctgcagcggaaccgactactttgggtgtccgtgtttccttttgttcttacactggctgcttatggtgacaattgagaaattgttgccatatagctattggattggccatccggtgactaacagagcaattgtttacttatttattggttttataccgttagattacaaagtcctaaacaccctgaatctcattataacacttaattcagcaaa

SEQ ID NO: 19430 - DNA, 743 bp, synthetic construct
  source 1..743: mol_type = other DNA
ttaaaacagcctgtgggttgttcccacccacagggcccactgggcgttagcactctggtatcacggtacctttgtgcgcctgttttatccaccctccctaaaatgtaacttagaagcatgaaccgaacggtcattaggtagctcagtgcaccaactgagcccagaccaagcacttctgttaccccggactgagtatcaataggctgctcgcgcggctgaaggagaaaacgttcgttatccggccaattacttcgagaaacccagtaccactatgaaagttgcgcagcgtttcgttccgcactaccccagtgtagatcaggtcgatgagtcaccgcgttccccacgggcgaccgtggcggtggctgcgttggcggcctgcccatggggcaacccatgggacgcttcaatactgacatggtgcgaagagtctattgagctaattggtagtcctccggcccctgaatgcggctaatcccaactgcggagcagatacccacaaaccagtgggcagtctgtcgtaatgggtaactctgcagcggaaccgactactttgggtgtccgtgtttccttttgttcttacactggctgcttatggtgacaattgagaaattgttgccatatagctattggattggccatccggtgactaacagagcaattgtttacttatttattggttttataccgttagattacaaagtcctaaacaccctgaatctcattataacacttaattcagcaaa

SEQ ID NO: 19431 - DNA, 743 bp, synthetic construct
  source 1..743: mol_type = other DNA
ttaaaacagcctgtgggttgttcccacccacagggcccactgggcgttagcactctggtatcacggtacctttgtgcgcctgttttatccaccctccctaaaatgtaatttagaagcatgatccgaacggtcattaggtagctcagtgcaccaactgagcccagaccaagcacttctgttaccccggactgagtatcaataggctgctcgcgcggctgaaggagaaaacgttcgttatccggccaattacttcgagaaacccagtaccactatgaaagttgcgcagcgtttcgttccgcacaaccccagtgtagatcaggtcgatgagtcaccgcgttccccacgggcgaccgtggcggtggctgcgttggcggcctgctcatggggcaacccatgagacgcttcaatactgacatggtgcgaagagtctattgagctaattggtagtcctccggcccctgaatgcggctaatcccaactgcggagcagacacccacaaaccagtgggcagtctgtcgtaatgggtaactctgcagcggaaccgactactttgggtgtccgtgtttccttttgttcttacactggctgcttatggtgacaattgagagattgttgccatatagctattggattggccatccggtgactaacagagcaattgtttacttatttattggttttataccgttagattacaaagtcctaaacaccctgaatctcattataacacttaattcagcaaa

SEQ ID NO: 19432 - DNA, 743 bp, synthetic construct
  source 1..743: mol_type = other DNA
ttaaaacagcctgtgggttgttcccacccacagggcccactgggcgttagcactctggtatcacggtacctttgtgcgcctgttttatccaccctccctaaaatgtaatttagaagcatgatccgaacggtcattaggtagctcagtgcaccaactgagcccagaccaagcacttctgttaccccggactgagtatcaataggctgctcgcgcggctgaaggagaaaacgttcgttatccggccaattacttcgagaaacccagtaccactatgaaagttgcgcagcgtttcgttccgcacaaccccagtgtagatcaggtcgatgagtcaccgcgttccccacgggcgaccgtggcggtggctgcgttggcggcctgctcatggggcaacccatgagacgcttcaatactgacatggtgcgaagagtctattgagctaattggtagtcctccggcccctgaatgcggctaatcccaactgcggagcagatacccacaaaccagtgggcagtctgtcgtaatgggtaactctgcagcggaaccgactactttgggtgtccgtgtttccttttgttcttacactggctgcttatggtgacaattgagagattgttgccatatagctattggattggccatccggtgactaacagagcaattgtttacttatttattggttttataccgttagattacaaagtcctaaacaccctgaatctcattataacacttaattcagcaaa

SEQ ID NO: 19433 - DNA, 743 bp, synthetic construct
  source 1..743: mol_type = other DNA
ttaaaacagcctgtgggttgttcccacccacagggcccactgggcgttagcactctggtatcacggtacctttgtgcgcctgttttatccaccctccctaaaatgtaatttagaagcatgatccgaacggtcattaggtagctcagtgcaccaactgagcccagaccaagcacttctgttaccccggactgagtatcaataggctgctcgcgcggctgaaggagaaaacgttcgttatccggccaattacttcgagaaacccagtaccactatgaaagttgcgcagcgtttcgttccgcactaccccagtgtagatcaggtcgatgagtcaccgcgttccccacgggcgaccgtggcggtggctgcgttggcggcctgctcatggggcaacccatgagacgcttcaatactgacatggtgcgaagagtctattgagctaattggtagtcctccggcccctgaatgcggctaatcccaactgcggagcagatacccacaaaccagtgggcagtctgtcgtaatgggtaactctgcagcggaaccgactactttgggtgtccgtgtttccttttgttcttacactggctgcttatggtgacaattgagagattgttgccatatagctattggattggccatccggtgactaacagagcaattgtttacttatttattggttttataccgttagattacaaagtcctaaacaccctgaatctcattataacacttaattcagcaaa

SEQ ID NO: 19434 - DNA, 743 bp, synthetic construct
  source 1..743: mol_type = other DNA
ttaaaacagcctgtgggttgttcccacccacagggcccactgggcgttagcactctggtatcacggtacctttgtgcgcctgttttatccaccctccctaaaatgtaatttagaagcatgatccgaacggtcattaggtagctcagtgcaccaactgagcccagaccaagcacttctgttaccccggactgagtatcaataggctgctcgcgcggctgaaggagaaaacgttcgttatccggccaattacttcgagaaacccagtaccactatgaaagttgcgcagcgtttcgttccgcacaaccccagtgtagatcaggtcgatgagtcactgcgttccccacgggcgaccgtggcggtggctgcgttggcggcctgctcatggggcaacccatgagacgcttcaatactgacatggtgcgaagagtctattgagctaattggtagtcctccggcccctgaatgcggctaatcccaactgcggagcagatacccacaaaccagtgggcagtctgtcgtaatgggtaactctgcagcggaaccgactactttgggtgtccgtgtttccttttgttcttacactggctgcttatggtgacaattgagagattgttgccatatagctattggattggccatccggtgactaacagagcaattgtttacttatttattggttttataccgttagattacaaagtcctaaacaccctgaatctcattataacacttaattcagcaaa

SEQ ID NO: 19435 - DNA, 743 bp, synthetic construct
  source 1..743: mol_type = other DNA
ttaaaacagcctgtgggttgttcccacccatagggcccactgggcgctagcacactggtattgtggtacctttgtgcgcctgttttatctacccctcccccaaacgtgacttagaagctcaacacatgtggtcagcaggtggcccagtataccaactgggtcttgatcaagcacttctgttaccccggaccgagtatcaataggctgctcacgcggctgaaggagaaagtgttcgttatccggccaattactacgagaaacctagtaccaccatggaagttgcgcggcgtttcgctccgcacaaccccagtgtagatcaggccgatgagtcaccgcactcctcacgggcgaccgtggcggtggctgcgctggcggcctgcccatggggcaacccatgggacgcttcaataccgacatggtgtgaagagtctattgtgctaattggtaatcctccggcccctgaatgcggctaatcccaactgcggagcagatacccacatgccagtgggcagtctgtcgtaacgggtaactctgcagcggaaccgactactttgggtgtccgtgtttctttttattctttattggctgcttatggtgacaattgagagattgttgccatatagctattggattggccatccggtgacaaacagaacaatagtttatctatttgttggtttcataccattaaattttaaagtattaaagactatcaacttgatcatactacttaatacagcaaa

SEQ ID NO: 19436 - DNA, 730 bp, synthetic construct
  source 1..730: mol_type = other DNA
ggggttgttcccaccccagaggcccacgtggcggctagtactccggtattacggtacccttgtacgcctgttttatactcccctccccgtaacttagaagaaacaaaataagttcaataggagggggtacaaaccagtaccaccacgaacaagcacttctgtctccccggtgacattgcatagactgtccccacggttgaaagcaattgatccgttacccgctcttgtacttcgagaagcctagtaccatcttggaatcatcgatgcgttgcgctccacactcagtcccagagtgtagcttaggctgatgagtctggacattcctcaccggcgacggtggtccaggctgcgttggcggcctacctgtggcccaaagccacaggacgctagatgtgaacaaggtgtgaagagcctattgagctataagagagtcctccggcccctgaatgcggctaatcccaaccacggatcaagggtgcacgaaccagtgtataccttgtcgtaacgcgcaagtccgtggcggaaccgactactttgggtgaccgtgtttccttttattatttcaatggctgcttatggtgacaatcattgattgttatcataaagcgaattggactggccatccggtgaaagtgaaacatattgtttgcctcctcgttgggtctacttcaaccaatctttacttacaatcttaccactacagttttgctggttagaagtgtgtttcacg

SEQ ID NO: 19437 - DNA, 743 bp, synthetic construct
  source 1..743: mol_type = other DNA
ttaaaacagcctgtgggttgtacccacccacagggcccactgggcgccagcactctggtattacggtacccttgtgcgcctgttttatatcccttccccaaggtaaacgttagaagcaatgcactcccgatcaatagaaggtgcgacgcgccagtcgtatctcgatcaagcacttctgtttccccggaccgagtatcaatagactgctagcgcggttgaaggagaaaacgttcgttacccgactaactacttcgagaagcccagtagcgccatgaaagttgcagagtgtttcgctcagcacttcccccgtgtagatcaggccgatgagtcaccgcaatccccacgggcgaccgtggcggtggctgcgttggcggcctgcctatggggaaacccataggacgctcaaatacagacatggtgcgaagagtctattgagctagttagtactcctccggcccctgaatgcggctaatcctaactgcggagcaagtactcacaatccagtgggcagcttgtcgtaacgggtaactctgcagcggaaccgactactttgggtgtccgtgtttccttttattcctacattggctgcttatggtgacaatcaaagagttgttaccatatagctattggattggccatccggtgactaataaagcaattatatttctttttgttgggtttgtaccccttaatacaaccagcttcaccaccttgtgttacatcattagactgaacaaggcaaa

SEQ ID NO: 19438 - DNA, 741 bp, synthetic construct
  source 1..741: mol_type = other DNA
aaaacagcctgtgggttgttcccacccacagggcccaccgggcgtcagcacactggtattgcggtacctttgtgcgcctgttttatatatccctacccgaacgtaacctagaagcaaattaacgaggatcgatagtcagcacggcacaccagccgtgttttgatcaagcacttctgttaccccggaccgagtatcaataggctactcacgtggctgaaggagaaagtgttcgttacccggccaattacttcgagaaacccagtaacaccatgaaggttgcgcagcgtttcgctccgcacaaccccagtgtagatcaggtcgatgagtcaccgcattccccacgggcgaccgtggcggtggctgcgctggcggcctgcccatagggtgacctatgggacgcttcaatactgacatggtgcgaagagtctattgagctaattggtagtcctccggcccctgaatgcggctaatcctaactgcggagcaggtgcccacaagccagtgggtagtctgtcgtaatgggcaactctgcagcggaaccgactactttgggtgtccgtgtttccttttattcttatactggctgcttatggtgacaattgaaaggttgttaccatatagctattggattggccatccggtgacaaacagagcgattatatacttgtttgttggtttcataccactaaatcacaagactttaaacacccttaatttcataatagcattaaatacagcaag

SEQ ID NO: 19439 - DNA, 736 bp, synthetic construct
  source 1..736: mol_type = other DNA
ctggggttgtacccaccccagaggcccacgtggcggctagcactccggtattacggtacccttgtgcgcctgttttatactcccctcccgcaacttagaagcacgaaaccaagttcaatagaagggggtacaaaccagtaccactacgaacaagcacttctgtttccccggtgacattgcatagactgctcacgcggttgaaagtgatcgatccgttacccgcttgtgtacttcgaaaagcctagtatcgccttggaatcttcgacgcgttgcgctcagcacccgaccccggggtgtagcttaggccgatgagtctggacattcctcaccggtgacggtggtccaggctgcgttggcggcctacctatggctaacgccataggacgttagatgtgaacaaggtgtgaagagcctattgagctacataagagtcctccggcccctgaatgcggctaatcctaaccacggagcaggcggtcgcgaaccagtgactggcttgtcgtaacgcgcaagtctgtggcggaaccgactactttgggtgtccgtgtttcctgttatttttatcatggctgcttatggtgacaatcagagattgttatcataaagcgaattggattggccatccggtgagtgttgtgtcaggtatacaactgtttgttggaaccactgtgttagctttgcttctcatttaaccaattaatcaaaaacaatacgaggataaaacaacaatactaca

SEQ ID NO: 19440 - DNA, 745 bp, synthetic construct
  source 1..745: mol_type = other DNA
tttaaaacaagcctgtgggttgaacccacccacagggcccaatgggcgctagcacactggtatcacggtacctttgtgcgcctgttttatccacccttccccgaacgaaacttagaagtttgaattaaacggtcaataggaaacccagtacaccaactgggctgtgaccaagcacttctgtgaccccggaccgagtatcaataagctactcacgtggctgaaggagaaaacgttcgttacccggccaattacttcgagaaacttagtaccaccatgaaagttgcgcagcgtttcgctccgcacgaccccagtgtagatcaggccgatgagtcaccgcgtaccccacgggtgaccgtggcggtggctgcgttggcggcctgcccttggggcaacccaagggacgcttcaatactgacatggtgcgaagagtctattgagctaattggtagtcctccggcccctgaatgcggctaatcccaactgcggagcagatacccacataccagtgggcagtctgtcgtaatgggcaactctgcagcggaaccgactactttgggtgtccgtgtttcctttatttcttacactggctgcttatggtgacaattgagagattgttgccatatagctattggattggccatccggtgtctaatagagcaattatctacctttttgttggatttattccacttaactataaagcactcaaaacacttatatacattgtagatctcaacacagcaaa

SEQ ID NO: 19441 - DNA, 767 bp, synthetic construct
  source 1..767: mol_type = other DNA
ccgtgataccagtgtgctagcgcccagtaggccctgtgggttgttcccacccacagggcctactgggcgctagcacactggtatcacggtacctttgtgcgcctgttttatagtccctccccccggacgcaacttagaagctgaacctaaacggtcaacaggcggctcagaacaccatctgggtctcgaccaagcacttctgtttccccggactgagtatcaataagctgcccacgcggctgaaggaaaaaacgtccgttatccggccaattacttcaagaaacccagtaccaccatgaaggttgcgcagcgtttcgctccgcacaaccccagtgtagatcaggtcgatgagtcaccgcattccacacgggcgaccgtggcggtggctgcgctggcggcctgcccatggggcaacccatgggacgcttcaatactaacatggtgcgaagagtcaattgagctaattggtagtcctccggcccctgaatgcggctaatcctaactgtggagcagatgcccacgtgccagtgggtagtctgtcgtaacgggcaactccgcagcggaaccgactactttgggtgtccgtgtttctctttattcttatgttggctgcttatggtgacaattgagagattgttaccatttagctattggattggccatccggtgacaaatagagcgattgtatatctttttgttggattcgtaccattaaacaaaacaaattacaaaaccttgtgttacattattagattgaacacagcaaa

SEQ ID NO: 19442 - DNA, 742 bp, synthetic construct
  source 1..742: mol_type = other DNA
ttaaaacagcctgtgggttgatcccacccacagggcctattgggcgctagcacactggtatcacggtacctttgtgcgcctgttttacccacccttccccgaaagaaacttagaagctcaacttgtgtggtcaacagcaagctcagtacgccaactgggccacgaccaagcacttctgttaccccggactgagtatcaataagctgctcgcgtggctgaaggagaaaacgttcgttatccggccaattacttcaagaaacccagtaccaccatgaaagttgcgcggcgtttcgttccgcacaaccccagtgtagatcaggccgatgagccaccgcgttccccacgggcgaccgtggcggtggctgcgttggcggcctgcccatggggcaacccatgggacgcttcaatactgacatggtgcgaagagtctattgagctaattggtagtcctccggcccctgaatgcggctaatcctaaccgcggagcagatacccacatgccagtgggcagtctgtcgtaacgggcaacttcgcggcggaaccgactactttgggtgtccgtgtttccttttattttatactggctgcttatggtgacaattgagagattgttaccatatagctattggattggccaaccggtgtccaacagagcgatcgtttacttgtttgttggattcgtgcccttgaactacaaagcactcgtaacgcttaaatacattatagacctcaacacagcaaa

SEQ ID NO: 19443 - DNA, 742 bp, synthetic construct
  source 1..742: mol_type = other DNA
ttaaaacagcctgtgggttgatcccacccacagggcccattgggcgctagcacactggtatcacggtacctttgtgcgcctgttttacccacccttccccgaaagaaacttagaagctcaacttgtgtggtcaacagcaagctcagtacgccaactgggccacgaccaagcacttctgttaccccggactgagtatcaataagctgctcgcgtggctgaaggagaaaacgttcgttatccggccaattacttcgagaaacccagtaccaccatgaaagttgcgcggcgtttcgttccgcacagccccagtgtagatcaggccgatgagccaccgcgttccccacgggcgaccgtggcggtggctgcgttggcggcctgcccatggggcaacccatgggacgcttcaatactgacatggtgcgaagagtctattgagctaattggtagtcctccggcccctgaatgcggctaatcctaaccgcggagcagatacccacatgccagtgggcagtctgtcgtaacgggcaacttcgcggcggaaccgactactttgggtgtccgtgtttccttttattttatactggctgcttatggtgacaattgagagattgttaccatatagctattggattggccaaccggtgtccaacagagcgatcgtttacttgtttgttggattcgtgcccttgaactacaaagcactcgtaacgcttaaatacattatagacctcaacacagcaaa

SEQ ID NO: 19444 - DNA, 742 bp, synthetic construct
  source 1..742: mol_type = other DNA
ttaaaacagcctgtgggttgatcccacccacagggcctattgggcgctagcacactggtatcacggtacctttgtgcgcctgttttacccacccttccccgaaagaaacttagaagctcaacttgtgtggtcaacagcaagctcagtacgccaactgggccacgaccaagcacttctgttaccccggactgagtatcaataagctgctcgcgtggctgaaggagaaaacgttcgttatccggccaattacttcgagaaacccagtaccaccatgaaagttgcgcggcgtttcgttccgcacaaccccagtgtagatcaggccgatgagccaccgcgttccccacgggcgaccgtggcggtggctgcgttggcggcctgcccatggggcaacccatgggacgcttcaatactgacatggtgcgaagagtctattgagctaattggtagtcctccggcccctgaatgcggctaatcctaaccgcggagcagatacccacatgccagtgggcagtctgtcgtaacgggcaacttcgcggcggaaccgactactttgggtgtccgtgtttccttttattttatactggctgcttatggtgacaattgagagattgttaccatatagctattggattggccaaccggtgtccaacagagcgatcgtttacttgtttgttggattcgtgcccttgaactacaaagcactcgtaacgcttaaatacattatagacctcaacacagcaaa

SEQ ID NO: 19445 - DNA, 742 bp, synthetic construct
  source 1..742: mol_type = other DNA
ttaaaacagcctgtgggttgatcccacccacagggcctattgggcgctagcacactggtatcacggtacctttgtgcgcctgttttacccacccctccccgaaagaaacttagaagctcaacttgtgtggtcaacagcaagctcagtacgccaactgggccacgaccaagcacttctgttaccccggactgagtatcaataagctgctcgcgtggctgaaggagaaaacgttcgttatccggccaattacttcaagaaacccagtaccaccatgaaagttgcgcggcgtttcgttccgcacaaccccagtgtagatcaggccgatgagccaccgcgttccccacgggcgaccgtggcggtggctgcgttggcggcctgcccatggggcaacccatgggacgcttcaatactgacatggtgcgaagagtctattgagctaattggtagtcctccggcccctgaatgcggctaatcctaaccgcggagcagatacccacatgccagtgggcagtctgtcgtaacgggcaacttcgcggcggaaccgactactttgggtgtccgtgtttccttttattttatactggctgcttatggtgacaattgagagattgttaccatatagctattggattggccaaccggtgtccaacagagcgatcgtttacttgtttgttggattcgtgcccttgaactacaaagcactcgtaacgcttaaatacattatagacctcaacacagcaaa

SEQ ID NO: 19446 - DNA, 742 bp, synthetic construct
  source 1..742: mol_type = other DNA
ttaaaacagcctgtgggttgatcccacccacagggcccattgggcgtcagcaccctggtatcacggtacctttgtgcgcctgttttatatcccttcccccaattgtaacttagaagaaacacacaccgatcaacagcaagcgtggcacaccagccatgttttggtcaagcacttctgttaccccggactgagtatcaatagactgctcacgcggttgaaggagaaagcgtccgttatccggccagctacttcgagaaacctagtaacaccatggaagttgcggagtgtttcgctcagcactaccccagtgtagatcaggtcgatgagtcaccgctttccccacgggcgaccgtggcggtggctgcgttggcggcctgcctatgggggaacccataggacgctctaatacagacatggtgcgaagagtctattgagctagctggtattcctccggcccctgaatgcggctaatcctaactgtggagcacatgcccctaatccaaggggtagtgtgtcgtaatgagcaattccgcagcggaaccgactactttgggtgtccgtgtttcctcttattcttgtactggctgcttatggtgacaattgagagattgttaccatatagctattggattggccatccggtgactaatagagctattgtgtatctctttgttggatttgtaccacttaatttgaaagaaatcaggacactacgctacattttactattgaacaccgcaaa

SEQ ID NO: 19447 - DNA, 742 bp, synthetic construct
  source 1..742: mol_type = other DNA
ttaaaacagcctgtgggttgatcccacccacagggcccactgggcgctagcactctggtatcacggtacctttgtgcgcctgttttatacttcctcccccaactgcaacttagaagtaacacaaaccgatcaacagtcagcgtggcacaccagccacgttttgatcaaacacttctgttaccccggactgagtatcaatagactgctcacgcggttgaaggagaaaacgttcgttatccggccaactacttcgagaaacctagtaacgccatggaagttgtggagtgtttcgctcagcactaccccagtgtagatcaggttgatgagtcaccgcattccccacgggtgaccgtggcggtggctgcgttggcggcctgcccatggggaaacccatgggacgctcttatacagacatggtgcgaagagtctattgagctagttggtagtcctccggcccctgaatgcggctaatcccaactgcggagcatacactctcaagccagagggtagtgtgtcgtaatgggcaactctgcagcggaaccgactactttgggtgtccgtgtttcattttattcctatactggctgcttatggtgacaattgagagattgttaccatatagctattggattggccatccggtgactaacagagctattatatatctttttgttgggtttataccacttagcttgaaagaggttaaaactctacattacattttaatactgaacaccgcaaa

SEQ ID NO: 19448 - DNA, 742 bp, synthetic construct
  source 1..742: mol_type = other DNA
ttaaaacagcctgtgggttgtacccacccacagggcccattgggcgtcagcaccctggtatcacggtacctttgtgcgcctgttttatatcccttcccccaattgtaacttagaagaaacacacaccgatcaacagcaagcgtggcacaccagccatgttttggtcaagcacttctgttaccccggactgagtatcaatagactgctcacgcggttgaaggagaaagcgtccgttatccggccagctacttcgagaaacctagtaacaccatggaagttgcggagtgtttcgctcagcactaccccagtgtagatcaggtcgatgagtcaccgctttccccacgggcgaccgtggcggtggctgcgttggcggcctgcctatgggggaacccataggacgctctaatacagacatggtgcgaagagtctattgagctagctggtattcctccggcccctgaatgcggctaatcctaactgtggagcacatgcccctaatccaaggggtagtgtgtcgtaatgagcaattccgcagcggaaccgactactttgggtgtccgtgtttcctcttattcttgtactggctgcttatggtgacaattgagagattgttaccatatagctattggattggccatccggtgactaatagagctattgtgtatctctttgttggatttgtaccacttaatttgaaagaaatcaggacactacgctacattttactattgaacaccgcaaa

SEQ ID NO: 19449 - DNA, 745 bp, synthetic construct
  source 1..745: mol_type = other DNA
ttaaaacagcctgtgggttgcacccacccgcagggcccactgggcgctagtacactggtaccccggtacccttgtacgcctgttttatttctccctcccccaaccagtaacctagaagtaaagcaaacccgatcaatagcaggtgcgacacaccagtcgtatcttgatcaagcacttctgtaaccccgggccgagtatcaatagactgctcacgcggttgagggagaaaacgctcgttatccggctgactacttcgagaaacccagtaacaccatagaagttgcagagtgtttcgctcagcactttccccgtgtagatcaggtcgatgagtcaccgcattccccacgggtgaccgtggcggtggctgcgttggcggcctgcctatggggcaacccatgggacgctctaatacagacatggtgtgaagagtcaattgagctagtcagtattcctccggcccctgaatgcggctaatcctaactgcggagcacgtgcctccaatccagggggtggcgtgtcgtaacgggtaactctgcagcggaaccgactactttgggtgtccgtgtttccttttattcttatcttggctgcttatggtgacaattgaaggattgttaccatatagctattggattggccatccggtgactaacagagcaatcatataccaatttgttggttttataccattgaattacaaagttctaatcacccttaaattcattttaacacttaatacgtcaaa

SEQ ID NO: 19450 - DNA, 741 bp, synthetic construct
  source 1..741: mol_type = other DNA
ttaaaacagcctgtgggttgtacccacccacagggcccattgggcgctagcacactggtatcacggtacccttgtgcgcctgttttatccgcccctccccattgtaacttagaagataactaaacacggtcgttaggtggctcagtacgccaactgagtcttgaccaagcacttctgttaccccggactgagtatcaataggctgctcacgcggctgaaggagaaaacgttcgttatccggccaattacttcgagaaacctagtaccaccatggaggttgcgcagtgtttcgctccgcacaaccccagtgtagatcaggccgatgagtcaccgcattccccacgggcgaccgtggcggtggctgcgctggcggcccgcccatgggtaacccatgggacgcttcaatactgacatggtgtgaagagtctattgagctaattggtagtcctccggcccctgaatgcggctaatcccaactgcggagcagatacccacacaccagtgggcagtctgtcgtaacgggcaactctgcagcggaaccgactactttgggtgtccgtgtttccttttattccaatactggctgcttatggtgacaattgaaagattgttaccatatagctattggattggccatccggtgacaaacagagcgattgtttacctatttgtaggtttcataccattgaattttaaagttttaagaacccttaactttatattagcacttaacacaacaaa

SEQ ID NO: 19451 - DNA, 741 bp, synthetic construct
  source 1..741: mol_type = other DNA
ttaaaacagcctgtgggttgttcccacccgcagggcccactgggcgctagcacactggtattacggtacctttgtgcgcctgttttatttcccttccccaaaacgtaatttagaagcagcacttcacgaccaatagcaggcgtggcacaccagccatgtcttggtcaagcacttctgtaaccccggactgagtatcaataaactgctcacgcggtcgaaggagaaaacgtccgttacccggctaactacttcgagaaacttagtaacgccatgaaaattgcgaagtgtttcgctcagcacatccccagtgtagatcaggttgatgagtcaccgcattccccacaggtaactgtggcggtggctgcgttggcggcctgcccatggggtgacccatgggacgcttcaatacggacatggtgtgaagagtctattgagctagttagtagtcctccggcccctgaatgcggctaatcctaactgtggagcatgcgcccccactccagagggtagcgtgtcgtaatgggtaactccgcagcggaaccgactactttgggtgtccgtgtttcctcttattttatattggctgcttatggtgacaattgaaagattgttaccatatagctattggattggccatccggtgacaaacagagctataatttaccagtttgtgggatttgttccgttaagtttgaaagtctttgatacatttagtttaatattattacttaatagtgcaaa

SEQ ID NO: 19452 - DNA, 747 bp, synthetic construct
  source 1..747: mol_type = other DNA
ttaaaacagctctggggttgtacccaccccagaggcccacgtggcggctagcactccggtattacggtacccttgtgcgcctgttttatactcccctcccgcaacttagaagcacgaaaccaagttcaatagaagggggtacaaaccagtaccactacgaacaagcacttctgtttccccggtgacattgcatagactgctcacgcggttgaaagtgatcgatccgttacccgcttgtgtacttcgaaaagcctagtatcgccttggaatcttcgacgcgttgcgctcagcacccgaccccggggtgtagcttaggctgatgagtctggacattcctcaccggtgacggtggtccaggctgcgttggcggcctacctatggctaacgccataggacgttagatgtgaacaaggtgtgaagagcctattgagctacataagagtcctccggcccctgaatgcggctaatcctaaccacggagcaggcggtcgcgaaccagtgactggcttgtcgtaacgcgcaagtctgtggcggaaccgactactttgggtgtccgtgtttcctgttatttttatcatggctgcttatggtgacaatcagagattgttatcataaagcgaattggattggccatccggtgagtgttgtgtcaggtatacaactgtttgttggaaccactgtgttagctttacttctcatttaaccatttaatcaaaaacaatacgaggataaaacaacaatactaca

SEQ ID NO: 19453 - DNA, 747 bp, synthetic construct
  source 1..747: mol_type = other DNA
ttaaaacagctctggggttgtacccaccccagaggcccacgtggcggctagcactccggtattacggtacccttgtgcgcctgttttatactcccctcccgcaacttagaagcacgaaaccaagttcaatagaagggggtacaaaccagtaccactacgaacaagcacttctgtttccccggtgacattgcatagactgctcacgcggttgaaagtgatcgatccgttacccgcttgtgtacttcgaaaagcctagtatcgccttggaatcttcgacgcgttgcgctcagcacccgaccccggggtgtagcttaggctgatgagtctggacattcctcaccggtgacggtggtccaggctgcgttggcggcctacctatggctaacgccataggacgttagatgtgaacaaggtgtgaagagcctattgagctacataagagtcctccggcccctgaatgcggctaatcctaaccacggagcaggcggtcgcgaaccagtgactggcttgtcgtaacgcgcaagtctgtggcggaaccgactactttgggtgtccgtgtttcctgttatttttatcatggctgcttatggtgacaatcagagattgttatcataaagcgaattggattggccatccggtgagtgttgtgtcaggtatacaactgtttgttggaaccactgcgttagctttacttctcatttaaccaattaatcaaaaacaatacgaggacaaaacaacaatactaca

SEQ ID NO: 19454 - DNA, 734 bp, synthetic construct
  source 1..734: mol_type = other DNA
ctgtgggttgtacccacccacagggcccacgtggcgctagcacactggtattccggtacctttgtgcgcctgttttatccaccccatcccccactgtaacttagaagatatgcaaccctgatcaacagcaggtgtgacactccagtcacatcacgatcaagcacttctgttgccccggaccgagtatcaataagccactcgcgtggctgaaggagaaaacgttcgttatccgaccaactacttcgagaaacctagtaccaccctggaagttgcgtagcgtttcgctccacacaaccccagtgtagatcgggtcgatgagtcaccgcgttcctcacgggcgaccgtggcggtggctgcgttggcggcctgcccatggggcaacccatgggacgcttcaatactgacatggtgcgaagagtctattgagctagttggtagtcctccggcccctgaatgcggctaatcctaactgcggagcagatacccacatgccagtgggcgatctgtcgtaatgggtaactctgcagcggaaccgactactttgggtgtccgtgtttccttttattcttatattggctgcttatggtgacaattgagaagttgttaccatatagctattggattggccatccggtgacaaatagagcgattgtttatttgtttgttggatttataccactgaacttcaaggttttaaacaccctcaattttgtactagttcttaatacattaaa

SEQ ID NO: 19455 - DNA, 744 bp, synthetic construct
  source 1..744: mol_type = other DNA
ttaaaacagcctgtgggttgctcccacccgcagggcccactgggcgccagcactctggtattgcggtacctttgtgcgcctgttttatgtacccttccctcaaatgtaatttagatgcctgcgaacagggaccaacagtaaacgcagcacaccagttgcgtctcggtcaagcacttctgttaccccggactgagtaccaataggctactcacgtggctgaaggggaaaacgttcgttacccggccaattacttcgagaaacctagtaccaccatggaggttgcgcagcgtttcgttccgcacagccccagtgtagatcaggtcgatgagccaccgcattccccacgggtgaccgtggcggtggctgcgttggcggcctgcccatggggtaacccatgggacgcttcaatactgacatggtgcgaagagtctattgagctaattggtagtcctccggcccctgaatgcggctaatcctaactgcggagcagatacccacataccagtgggcagtctgtcgtaacgggcaactctgcagcggaaccgactactttgggtgtccgtgtttctttttgttcctatactggctgctaatggtgacaattgagagattgttaccatatagctattggattggccatccggtgacaaacagagcaattgtatatttgtttgttggttttataccactaaattataaggttttaaacacccttaactttgttatagcactcaatacagcaaa

SEQ ID NO: 19456 - DNA, 744 bp, synthetic construct
  source 1..744: mol_type = other DNA
ttaaaacagcctgtgggttgttcccacccgcagggcccactgggcgccagcactctggtattgcggtacctttgtgcgcctgttttatgtacccttcccttaaatgtaatttagatgcctgcgaacagggaccaacagtaaacgcagcacaccagttgcgtctcggtcaagcacttctgttaccccggactgagtaccaataggctactcacgtggctgaaggggaaaacgttcgttacccggccaattacttcgagaaacctagtaccaccatggaggttgcgcagcgtttcgttccgcacagccccagtgtagatcaggtcgatgagccaccgcattccccacgggtgaccgtggcggtggctgcgttggcggcctgcccatggggtaacccatgggacgcttcaatactgacatggtgcgaagagtctattgagctaattggtagtcctccggcccctgaatgcggctaatcctaactgcggagcagatacccacataccagtgggcagtctgtcgtaacgggtaactctgcagcggaaccgactactttgggtgtccgtgtttctttttgttcctatactggctgctaatggtgacaattgagagattgttaccatatagctattggattggccatccggtgacaaacagagcaattgtatatttgtttgttggttttataccactaaattataaggttttaaacacccttaactttgttatagcactcaatacagcaaa

SEQ ID NO: 19457 - DNA, 738 bp, synthetic construct
  source 1..738: mol_type = other DNA
aacagctctggggttgttcccaccccagaggcccacgtggcggctagtacactggtatcacggtacctttgtacgcctgttttatactccctcccccgcaacttagaagcatacaattcaagctcaataggagggggtgcaagccagcgcctccgtgggcaagcactactgtttccccggtgaggccgcatagactgttcccacggttgaaagtgtccgatccgttatccgctcatgtacttcgagaagcctagtatcgctctggaatcttcgacgcgttgcgctcagcactcaaccccggagtgtagcttgggccgatgagtctggacagtccccactggcgacagtggtccaggctgcgctggcggcccacctgtggcccaaagccacgggacgctagttgtgaacagggtgtgaagagcctattgagctacatgagagtcctccggcccctgaatgcggctaatcctaaccatggagcaggcagctgcaacccagcagccagcctgtcgtaacgcgcaagtccgtggcggaaccgactactttgggtgtccgtgtttccttttatccttgaatggctgcttatggtgacaatcatagattgttatcataaagcgagttggattggccatccagtgtgaatcagattaattactcccttgtttgttggatccactcccgaaacgttttactccttaacttattgaaattgtttgaagacaggatttcagtgtcaca

SEQ ID NO: 19458 - DNA, 738 bp, synthetic construct
  source 1..738: mol_type = other DNA
aacagctctggggttgttcccaccccagaggcccacgtggcggctagtacactggtatcacggtacctttgtacgcctgttttatactccctcccccgcaacttagaagcatacaattcaagctcaataggagggggtgcaagccagcgcctccgtgggcaagcactactgtttccccggtgaggccgcatagactgttcccacggttgaaagtgtccgatccgttatccgctcatgtacttcgagaagcctagtatcgctctggaatcttcgacgcgttgcgctcagcactcaaccccggagtgtagcttgggccgatgagtctggacagtccccactggcgacagtggtccaggctgcgctggcggcccacctgtggcccaaagccacgggacgctagttgtgaacagggtgtgaagagcctattgagctacatgagagtcctccggcccctgaatgcggctaatcctaaccatggagcaggcagctgcaacccagcagccagcctgtcgtaacgcgcaagtccgtggcggaaccgactactttgggtgtccgtgtttccttttattcttgaatggctgcttatggtgacaatcatagattgttatcataaagcgagttggattggccatccggtgtgaatcagattaattactcccttgtttgttggatccactcccgaaacgtcttactccttaacttattgaaattgtttgaagacaggatttcagtgtcaca

SEQ ID NO: 19459 - DNA, 741 bp, synthetic construct
  source 1..741: mol_type = other DNA
ttaaaacagcctgtgggttgttcccacccacagggcccactgggcgccagcacactggtatcttggtacctttgtgcgcctgttttatccaccctgccccatgcaacttagaagctcaacttaaacggtcaatagatagtccggtgcaccaaccgggccatgaccaggcacttctgttaccccggaccgagtatcaataggctgcttgcgtggctgaaggagaaaacgttcgttacccggccaattacttcgagaaacccagtaccaccatggaggttgcgaggtgtttcgctccacacaaccccagtgtagatcgggccgatgagtcaccgcgttccccacgggcgaccgtggcggtggctgcgttggcggcctgcccatggggcaacccatgggacgcttcaatactgacatggtgcgaagagtctattgagctaattggtagtcctccggcccctgaatgcggctaatcccaactgcggagcagatgcccgcacgccagcgggtattctgtcgtaatgggcaactctgcagcggaaccgactactttgggtgtccgtgtttccttttattactacattggctgcttatggtgacaattgagagattgttaccatatagctattggattggccatccggtaacaaatagagcacttgtttatttgtttgtgggttttgtaccattgaatcgcaaagtactaaacactctcaatttcattatattacttaactcagcgaa

SEQ ID NO: 19460 - DNA, 741 bp, synthetic construct
  source 1..741: mol_type = other DNA
taaaacagcctgtgggttgttcccacccacagggcccactgggcgccagcacactggtatcttggtacctttgtgcgcctgttttatctaccctgccccatgcaacttagaagttcaacttaaacggtcgacagatagtccagtacaccaactgggccgtgaccaagcacttctgttatcccggaccgagtatcaataggctgcttgcgcggctgaaggagaaagcgttcgttacccggccaattacttcgaaaaacccagtaccaccatggaggttgcgaggtgtttcgctccacacagccccagtgtagatcaggtcgatgagtcaccgcattccccacgggcgaccgtggcggtggctgcgttggcggcctgcccatggggcgacccatgggacgcttcaacactgacatggtgcgaagagtctattgagctaattggtagtcctccggcccctgaatgcggctaatcctaactgcggagcagatgcccacacaccagtgggtattctgtcgtaacgggcaactctgcagcggaaccgactactttgggtgtccgtgtttcctttttatctttacattggctgcttatggtgacaattgagagattgttaccatatagctattggattggccatccggtgtcaaatagagcactcgtttatctatttgttggttttgtgccactgaactgtaaagtactagatactcttaatctcattatattgcttaattcagtgaa

SEQ ID NO: 19461 - DNA, 741 bp, synthetic construct
  source 1..741: mol_type = other DNA
taaaacagcctgtgggttgttcccacccacagggcccactgggcgccagcacactggtatctcggtacctttgtgcgcctgttttatctaccctgccccatgcaacttagaagttcaacttaaacggtcgacagatagtccagtacaccaactgggccgtgaccaagcacttctgttatcccggaccgagtatcaataggctgcttgcgcggctgaaggagaaagcgttcgttacccggccaattacttcgaaaaacccagtaccaccatggaggttgcgaggtgtttcgctccacacagccccagtgtagatcaggtcgatgagtcaccgcattccccacgggcgaccgtggcggtggctgcgttggcggcctgcccatggggcgacccatgggacgcttcaacactgacatggtgcgaagagtctattgagctaattggtagtcctccggcccctgaatgcggctaatcctaactgcggagcagatgcccacacaccagtgggtattctgtcgtaacgggcaactctgcagcggaaccgactactttgggtgtccgtgtttcctttttatctttacattggctgcttatggtgacaattgagagattgttaccatatagctattggattggccatccggtgtcaaatagagcactcgtttatctatttgttggttttgtgccactgaactgtaaagtactagatactcttaatctcattatattgcttaattcagtgaa

SEQ ID NO: 19462 - DNA, 741 bp, synthetic construct
  source 1..741: mol_type = other DNA
ttaaaacagctctggggttgctcccacccacagggcccactgggcgccagcacactggtatttcggtacctttgtgcgcctgttttatccaccctgccccacgtaacttagaagttcaacttgagcggtcaataggcagtccggtgcaccaaccgggccatgaccaagcacttctgttaccccggaccgagtatcaataggctgcttgcgcggctgaaggagaaagcgttcgttatccggccaattacttcgaaaaacctagtaacaccatggaggttgcgaggcgtttcgctccacacaaccccagtgtagatcaggtcgatgagtcaccgcattccccacgggcgaccgtggcggtggctgcgttggcggcctgcccatggggcaacccatgggacgctttaatactgacatggtgcgaagagtctattgagctaattggtagtcctccggcccctgaatgcggctaatcctaactgcggagcagatgcccacatgccagtgggtattctgtcgtaacgggtaactctgcagcggaaccgactactttgggtgtccgtgtttccttttatctttatattggctgcttatggtgacaattgagagattgttaccatatagctattggattggccacccggtgtcaaatagagcacttatttatttgtttgtcggctttgtgccactgaattacaaagtattgaatactctcaattttattttactacttaacgcagtgaa

SEQ ID NO: 19463 - DNA, 744 bp, synthetic construct
  source 1..744: mol_type = other DNA
taaaacagcctgtgggttgttcccacccacagggcccactgggcgccagcactctggtattatggtaccttagtgcgcctgttttatacaccccttccccaaatgtaatttagatgcatgtaaacaaaggccaatagcaggcgcagcataccagctgtgtctcggtcaagcacttctgttaccccggactgagtatcaataggctactcacgtggctgaaggagaaaacgttcgttatccggccaattacttcgagaaacctagtaataccatgaaggttgcgaagtgtttcgctcagcacaaccccagtgtagatcaggtcgatgagtcaccgcattccccacgggtgaccgtggcggtggctgcgctggcggcctgcccatgggattacccatgggacgcttcaatattgacatggtgtgaagagtctattgagctaattggtattcctccggcccctgaatgcggctaatcccaactgcggagcaggtacccacatgccagtgggcagcctgtcgtaatgggcaactctgcagcggaaccgactactttgggtgtccgtgtttctctttattcttatactggctgcttatggtgacaattgagaaattgttgccatatagctattggattggccatccggtgacaaatagagcaattgtgcatccatttgttggttttatactaactcaatcttaaagttttaactaccctcaatctcattatatcattcaatacagcaaa

SEQ ID NO: 19464 - DNA, 744 bp, synthetic construct; identical to SEQ ID NO: 1075
  source 1..744: mol_type = other DNA

SEQ ID NO: 19465 - DNA, 743 bp, synthetic construct
  source 1..743: mol_type = other DNA
ttaaaaccgcactgtgggttggacccacccacagggcccaatgggcgctagcacactggtatcacggtacctttgtgcgcctgttttatccacccctccccgaacgaaacttagaagtttgagttaaacggtcaataggagacccagtacaccaactgggccgtgaccaagcacttctgtgaccccggaccgagtatcaataagctactcacgtggctgaaggagaaacgttcgttacccggccaattacttcgagaaacttagtaccaccatgaaggttgcgcagcgtttcgctccgcacaaccccagtgtagatcaggccgatgagtcaccgcgttccccacgggtgaccgtggcggtggctgcgttggcggcctgcccttggggcaacccaagggacgcttcaatactgacatggtgcgaagagtctattgagctaattggtagtcctccggcccctgaatgcggctaatcccaactgcggagcagatacccacataccagtgggcagtctgtcgtaatgggcaactctgcagcggaaccgactactttgggtgtccgtgtttcctttatttcttacactggctgcttatggtgacaattgagagattgttaccatatagctattggattggccatccggtgtctaatagagcaattatctacctttttgttggatttattccacttgactataaagcactcaaaacacttgaatacattgtggatcttaacacgacaaa

SEQ ID NO: 19466 - DNA, 734 bp, synthetic construct
  source 1..734: mol_type = other DNA
ctgtgggttgtacccacccacagggcccacgtggcgctagcacactggtattccggtacctttgtgcgcctgttttatccaccccatcccccactgtaacttagaagatatgcaaccctgatcaacagcaggtgtgacactccagtcacatcacgatcaagcacttctgttaccccggaccgagtatcaataagccactcgcgtggctgaaggagaaagcgttcgttatccgaccaactacttcgagaaacctagtaccaccctggaagttgcgtagcgtttcgctccacacaaccccagtgtagatcgggtcgatgagtcaccgcgttcctcacgggcgaccgtggcggtggctgcgttggcggcctgcccatggggcaacccatgggacgcttcaatactgacatggtgcgaagagtctattgagctagttggtagtcctccggcccctgaatgcggctaatcctaactgcggagcagatacccacatgccagtgggcgatctgtcgtaatgggtaactctgcagcggaaccgactactttgggtgtccgtgtttccttttattcttatattggctgcttatggtgacaattgaggagttgttaccatatagctattggattggccatccggtgacaaatagagcgattgtttatttgtttgttggatttataccactgagcttcaaggttttaaacaccctcaattttgtactagttcttaatacattaaa

SEQ ID NO: 19467 - DNA, 736 bp, synthetic construct
  source 1..736: mol_type = other DNA
cagctctggggttgttcccaccccagaggcccacgtggcggctagtacactggtatcacggtacctttgtacgcctgttttatactccctcccccgcaacttagaagcatacaattcaagctcaataggagggggtgcaagccagcgcctccgtgggcaagcactactgtttccccggtgaggccgcatagactgttcccacggttgaaagtgtccgatccgttatccgctcatgtacttcgagaagcctagtatcgctctggaatcttcgacgcgttgcgctcagcactcaaccccggagtgtagcttgggccgatgagtctggacagtccccactggcgacagtggtccaggctgcgctggcggcccacctgtggcccaaagccacgggacgctagttgtgaacagggtgtgaagagcctattgagctacatgagagtcctccggcccctgaatgcggctaatcctaaccatggagcaggcagctgcaacccagcagccagcctgtcgtaacgcgcaagtccgtggcggaaccgactactttgggtgtccgtgtttccttttattcttgaatggctgcttatggtgacaatcatagattgttatcataaagcgagttggattggccatccagtgtgaatcagattaatcactcccttgtttgttggatccactcccgaaacgttttactccttaacttattgaaattgtttgaagacaggatttcagtgtcaca

SEQ ID NO: 19468 - DNA, 734 bp, synthetic construct
  source 1..734: mol_type = other DNA
gctctggggttgttcccaccccagaggcccacgtggcggctagtacactggtatcacggtacctttgtacgcctgttttatactccctcccccgcaacttagaagcatacaattcaagctcaataggagggggtgcaagccagcgcctccgtgggcaagcactactgtttccccggtgaggccgcatagactgttcccacggttgaaagtgtccgatccgttatccgctcatgtacttcgagaagcctagtatcgctctggaatcttcgacgcgttgcgctcagcactcaaccccggagtgtagcttgggccgatgagtctggacagtccccactggcgacagtggtccaggctgcgctggcggcccacctgtggcccaaagccacgggacgctagttgtgaacagggtgtgaagagcctattgagctacatgagagtcctccggcccctgaatgcggctaatcctaaccatggagcaggcagctgcaacccagcagccagcctgtcgtaacgcgcaagtccgtggcggaaccgactactttgggtgtccgtgtttccttttattcttgaatggctgcttatggtgacaatcatagattgttatcataaagcgagttggattggccatccagtgtgaatcagattaattactcccttgtttgttggatccactcccgaaacgttttactccttaacttattgaaattgtttgaagacaggatttcagtgtcaca

SEQ ID NO: 19469 - DNA, 742 bp, synthetic construct
  source 1..742: mol_type = other DNA
tttaaaacagcctgtgggttgttcccacccacagggcccattgggcgctagcacactggtaatacggtatctttgtgcgcctgtttgcacatccgaatcgagtgtaacttagaagcttcacctagatggtcaataaaaggtccagcacaccagttggattccgaccaagcacttctgttaccccggactgagtatcaataggccgttcgcagggctgaaggagaaaacgatggttacccggccaattacttcgagaaacctagtatcatcatgaaagtcgcgcagtgtttcgctccgcacgaccccggtgtagatcaggtcgatgagccaccgcgttcccctcgggcgaccgtggtgtaggctgcgctggcggcctgcccatggggcaacccatgggacgcttcaatactgacatggtgcgaagagtctattgagctaattggtagtcctccggcccctgaatgcggttaatcctaactgcggagcaggctccctcaagccagagggcagcttgtcgtaacgggcaactctgcagcggaacagactactttgggcgtccgagttaccttttattcttgaactggctgcttatggtgacaattgaaagattgttaccatatagctattggattggccatccagtgacaaacagagcgattatatatttgtttgttggttttgttccattaaactgtaaagttttaaacacacttaaatttgtcttactactcaactcagcaaa

SEQ ID NO: 19470 - DNA, 734 bp, synthetic construct
  source 1..734: mol_type = other DNA
ctgtgggttgtacccacccacagggcccacgtggcgctagcacactggtattccggtacctttgtgcgcctgttttatccaccccatcccccactgtaacttagaagatatgcaaccctgatcaacagcaggtgtgacactccagtcacatcacgatcaagcacttctgttgccccggaccgagtatcaataagccactcgcgtggctgaaggagaaaacgttcgttatccgaccaactacttcgagaaacctagtaccaccctggaagttgcgtagcgtttcgctccacacaaccccagtgtagatcgggtcgatgagtcaccgcgttcctcacgggcgaccgtggcggtggctgcgttggcggcctgcccatggggcaacccatgggacgcttcaatactgacatggtgcgaagagtctattgagctagttggtagtcctccggcccctgaatgcggctaatcctaactgcggagcagatacccacatgccagtgggcgatctgtcgtaatgggtaactctgcagcggaaccgactactttgggtgtccgtgtttccttttattcttatattggctgcttatggtgacaattgagaagttgttaccatatagctattggattggccatccggtgacaaatagagcgattgtttatttgtttgttggatttgtaccactgaacttcaaggttttaaacaccctcaattttgtactagttcttaacacattaaa

SEQ ID NO: 19471 - DNA, 726 bp, synthetic construct
  source 1..726: mol_type = other DNA
ttgttcccaccccagaggcccacgtggcggctagtactccggtattacggtacccttgtacgcctgttttatactcccctccccgtaacttagaagaaacaaaataagttcaataggagggggtacaaaccagtaccaccacgaacaagcacttctgtctccccggtgacattgcatagactgtccccacggttgaaagcaattgatccgttacccgctcttgtacttcgagaagcctagtaccatcttggaatcatcgatgcgttgcgctccacactcagtcccagagtgtagcttaggctgatgagtctggacgttcctcaccggcgacggtggtccaggctgcgttggcggcctacctgtggcccaaagccacaggacgctagatgtgaacaaggtgtgaagagcctattgagctataagagagtcctccggcccctgaatgcggctaatcccaaccacggatcaagggtgcacgaaccagtgtataccttgtcgtaacgcgcaagtccgtggcggaaccgactactttgggtgaccgtgtttccttttattatttcaatggctgcttatggtgacaatcattgattgttatcataaagcgaattggactggccatccggtgaaagtgaaacatattgtttgcctcctcgttgggtctacttcaaccaatctctacttacaatcttaccactacagttttgctggttagaagtgtgcttcacg

SEQ ID NO: 19472 - DNA, 734 bp, synthetic construct
  source 1..734: mol_type = other DNA
gctctggggttgttcccaccccagaggcccacgtggcggctagtacactggtatcacggtacctttgtacgcctgttttatactccctcccccgcaacttagaagcatacaattcaagctcaataggagggggtgcaagccagcgcctccgtgggcaagcactactgtttccccggtgaggccacatagactgttcccacggttgaaagtgtccgatccgttatccgctcatgtacttcgagaagcctagtatcgctctggaatcttcgacgcgttgcgctcagcactcaaccccggagtgtagcttgggccgatgagtctggacagtccccactggcgacagtggtccaggctgcgctggcggcccacctgtggcccaaagccacgggacgctagttgtgaacagggtgtgaagagcctattgagctacatgagagtcctccggcccctgaatgcggctaatcctaaccatggagcaggcagctgcaacccagcagccagcctgtcgtaacgcgcaagtccgtggcggaaccgactactttgggtgtccgtgtttccttttattcttgaatggctgcttatggtgacaatcatagattgttatcataaagcgaattggattggccatccagtgtgaatcagattaattactcccttgtttgttggatccactcccgaaacgttttactccttaacttattgaaattgtttgaagacaggatttcagtgtcaca

SEQ ID NO: 19473 - DNA, 736 bp, synthetic construct; identical to SEQ ID NO: 952
  source 1..736: mol_type = other DNA

SEQ ID NO: 19474 - DNA, 743 bp, synthetic construct
  source 1..743: mol_type = other DNA
ttaaaacagcctgtgggttgttcccacccgcagggcccactgggcgctagcacactggtatcccggtacccttgtgcgcctgttttatataccctcccccttatgtaacttagaagtatgattcaaacggtcgacaggcggctcagtgcaccaactgagtcatgaccaagcacttctgttaccccggactgagtatcaataagctgttcacacggctgaaggagaaaacgttcgttacccggccaattacttcgagaaacctagtaccaccatgaaggttgcgcagtgtttcgctccacacaaccccagtgtagatcaggtcgatgagtcaccgcattccccacgggcgaccgtggcggtggctgcgttggcggcctgcccatggggcaacccatgggacgcttcaatactgacatggtgtgaagagtctattgagctaattggtagtcctccggcccctgaatgcggctaatcccaactgtggagcagatactcacaaaccagtgagcggtctgtcgtaacgggcaactccgcagcggaaccgactactttgggtgtccgtgtttctttttattcttacattggctgcttatggtgacaattgacaaattgttaccatatagctattggattggccatccggtgacaaacagagctattgtttacttgtttgttggtttcataccattaaattacaaggtcttagaaactctcaactttattttgacactcaatacagcaaa

SEQ ID NO: 19475 - DNA, 743 bp, synthetic construct
  source 1..743: mol_type = other DNA
ttaaaaccaggctgtgggttgttcccacccatagggcccactgggcgccagcactctggtattccggtacctttgtgcgcctgttttatccacccctcccccaaacgtaacttagaagctcaacacatgtggtcagtaggtagcccagtatgccaactgggtcttgaccaagcacttctgttaccccggaccaagtatcaataggctgctcacgcggctgaaggagaaagtgttcgttacccggccgattacttcgagaaacctagtaccaccatggaagttgcgcagcgtttcgctccgcacgaccccagtgtagatcaggccgatgagtcaccgcactcctcacgggcgaccgtggcggtggctgcgctggcggcctgcccatggggcaacccatgggacgcttcaatactgacatggtgtgaagagtctattgagctaattggtagtcctccggcccctgaatgcggctaatcctaaccgcggagcagatacccacacgccagtgggcagtctgtcgtaacgggcaactctgcggcggaaccgactactttgggtgtccgtgtttcattttattctttattggctgcttatggtgacaattgaaagattgttgccatatagctatggattggccatccagtgacaaacagagcgattgtttatctatttgttggtttcataccattaaattttaaagttttaagaactatcaacttgatcatactacttaatacaacaaa

SEQ ID NO: 19476 - DNA, 743 bp, synthetic construct
  source 1..743: mol_type = other DNA
ttaaaacagcctgtgggttgttcccacccacagggcccactgggcgctagcacactggtattacggtacctttgtgcgcctgttttatataccccccccaagtgcaacttagaagcaagacatgaccggtcagcaggtgattcagtaaaccaactgagtcttgaccaagcacttctgtttccccggaccgagtatcaataggctgcttacgcggctgaaggagaaagtgttcgttacccggccaattacttcgagaagcctagtaccaccatggaggttgcgcggcgtttcgctccgcacacccccagtgtagatcaggccgatgagccaccgcattccccacgggtgaccgtggcggtggctgcgttggcggcctgcccatggggtaacctatgggacgcttcaatactgacatggtgcgaagagcctattgagctaattggtagtcctccggcccctgaatgcggctaatcctaactgcggagcaggtacccacacaccagtgggcagcctgtcgtaacgggtaactctgcagcggaaccgactactttgggtgaccgtgtttccttttattttttccattggctgcttatggtgacaatcgaggaattgttgccatatagctattggattggccatccggtgtcaaatagagcgattatttacctgtttgttggatttgtaccactgaactttaaggcgcttatcactctcaactatattttatcccttaacgcaacaaa

SEQ ID NO: 19477 - DNA, 743 bp, synthetic construct
  source 1..743: mol_type = other DNA
ttaaaacagcctgtgggttgttcccacccacagggcccactgggcgctagcacactggtattacggtacctttgtgcgcctgttttatataccccccccaagtgcaacttagaagcaaaacatgaccggtcagcaggtgattcagtaaaccaactgagtcttgaccaagcacttctgtttccccggaccgagtatcaataggctgcttacgcggctgaaggaaaaagtgttcgttacccggccaattacttcgagaagcctagtaccaccatggaggttgcgcggcgtttcgctccgcacacccccagtgtagatcaggccgatgagccaccgcattccccacgggtgaccgtggcggtggctgcgttggcggcctgcccatggggtaacccatgggacgcttcaataccgacatggtgcgaagagcctattgagctaattggtagtcctccggcccctgaatgcggctaatcctaactgcggagcaggtacccacataccagtgggcagcctgtcgtaacgggtaactctgcagcggaaccgactactttgggtgaccgtgtttccttttatttttcccattggctgcttatggtgacaatcgaggaattgttgccatatagctattggattggccatccggtgtcaaatagagcgattatttacctgtttgttggatttgtaccactgaactttaaggcgctcatcactctcaactatattttatcccttaacgcaacaaa

SEQ ID NO: 19478 - DNA, 743 bp, synthetic construct
  source 1..743: mol_type = other DNA
ttaaaacagcctgtgggttgttcccacccacagggcccactgggcgctagcacactggtattacggtacctttgtgcgcctgttttatataccccccccaagtgcaacttagaagcaagacatgaccggtcagcaggtgattcagtaaaccaactgagtctcgaccaagcacttctgtttccccggaccgagtatcaataggctgcttacgcggctgaaggagaaagtgttcgttacccggccaattacttcgagaagcctagtaccaccatggaggttgcgcggcgtttcgctccgcacacccccagtgtagatcaggccgatgagccaccgcattccccacgggtgaccgtggcggtggctgcgttggcggcctgcccatggggtaacctatgggacgcttcaatactgacatggtgcgaagagcctattgagctaattggtagtcctccggcccctgaatgcggctaatcctaactgcggagcaggtacccacacaccagtgggcagcctgtcgtaacgggtaactctgcagcggaaccgactactttgggtgaccgtgtttccttttattttttccattggctgcttatggtgacaatcgaggaattgttgccatatagctattggattggccatccggtgtcaaatagagcgattatttacctgtttgttggatttgtaccactgaactttaaggcgcttatcactctcaactatattttatcccttaacgcaacaaa

SEQ ID NO: 19479 - DNA, 743 bp, synthetic construct
  source 1..743: mol_type = other DNA
ttaaaacagcctgtgggttgttcccacccacagggcccatagggcgccagcactctggtatcccggtacctttgtgcgcctgttttatccacccttccccaagcgtaacttagaagcccatcatacacggtcaataggtggttcagtatgccaactgagtcttgaccaagcacttctgttaccccggactgagtatcaataagctgctcacgcggctgaaggagaaaacgttcgttatccggccaattacttcgagaaacctagtaacaccatgaaggttgcgcagcgtttcgctccgcacaaccccagtgtagatcaggtcgatgagtcaccgcactccccacgggcgaccgtggcggtggctgcgttggcggcctgcccatggggcaacccatgggacgcttcaatactgacatggtgcgaagagtctattgagataattggtagtcctccggcccctgaatgcggctaatcctaactgcggagcagatacccacatgccagtgggcagtctgtcgtaacgggcaactctgcagcggaaccgactactttgggtgtccgtgtttccttttatttctatactggctgcttatggtgacaattgacagattgttaccatatagctattggattggccatccggtgacgaacagagcaattatttacttatttgttggttttataccattaaatttcaaagttttaaaaaccctcaacttagttttgtcactcaactcagcaaa

SEQ ID NO: 19480 - DNA, 724 bp, synthetic construct
  source 1..724: mol_type = other DNA
tgcacccaccccagaggcccacgtggcggctagtactccggtattgcggtacccttgtacgcctgttttatactcccttcccgtaacttagacgcacaaaaccaagttcaatagaagggggtacaaaccagtaccaccacgaacaagcacttctgtttccccggtgatgttgtatagactgcttgcgtggttgaaagcgacggatccgttatccgcttatgtacttcgagaagcccagtaccacctcggaatcttcgatgcgttgcgctcagcactcaaccccagagtgtagcttaggctgatgagtctggacatccctcaccggtgacggtggtccaggctgcgttggcggcctacctatggctaacgccatgggacgctagttgtgaacaaggtgtgaagagcctattgagctacataagaatcctccggcccctgaatgcggctaatcccaacctcggggcaggtggtcacaaaccagtgattggcctgtcgtaacgcgcaagtccgtggcggaaccgactactttgggtgtccgtgtttccttttattttattgtggctgcttatggtgacaatcacagattgttatcataaagcgaattggattggccatccggtgaaagtgagattcattatctatctgtttgctggattcgctccattgagtgtgtttactctaagtacaatttcaacagttatttcaatcagacaattgtatcata

SEQ ID NO: 19481 - DNA, 734 bp, synthetic construct
  source 1..734: mol_type = other DNA
ctgtgggttgtacccacccacagggcccacgtggcgctagcacactggtattccggtacctttgtgcgcctgttttatccaccccgtcccccactgcaacttagaagatatgcaaccctgatcaacagcaggtgtgacactccagtcacatcacgatcaagcacttctgttgccccggaccgagtatcaataagccactcgcgtggctgaaggagaaaacgttcgttatccgaccaactacttcgagaaacctagtaccaccctggaagttgcgtagcgtttcgctccacacaaccccagtgtagatcgggtcgatgagtcaccgcgttcctcacgggcgaccgtggcggtggctgcgttggcggcctgcccatggggcaacccatgggacgcttcaatactgacatggtgcgaagagtctattgagctagttggtggtcctccggcccctgaatgcggctaatcctaactgcggagcagatacccacatgccagtgggcgatctgtcgtaatgggtaactctgcagcggaaccgactactttgggtgtccgtgtttccttttattcttatattggctgcttatggtgacaattgagaagttgttaccatatagctattggattggccatccggtgacaaatagagcgattgtttatttgtttgttggatttataccactgaacttcaaggttttaaacaccctcaattttgtactagttcttaatacattaaa

SEQ ID NO: 19482 - DNA, 734 bp, synthetic construct
  source 1..734: mol_type = other DNA
ctgtgggttgtacccacccacagggcccacgtggcgctagcacactggtattccggtacctttgtgcgcctgttttatccaccccgtcccccactgtaacttagaagatatgcaaccctgatcaacagcaggtgtgacactccagtcacatcacgatcaagcacttctgttgccccggaccgagtatcaataagccactcgcgtggctgaaggagaaaacgttcgttatccgaccaactacttcgagaaacctagtaccaccctggaagttgcgtagcgtttcgctccacacaaccccagtgtagatcgggtcgatgagtcaccgcgttcctcacgggcgaccgtggcggtggctgcgttggcggcctgcccatggggcaacccatgggacgcttcaatactgacatggtgcgaagagtctattgagctagttggtggtcctccggcccctgaatgcggctaatcctaactgcggagcagatacccacatgccagtgggcgatctgtcgtaatgggtaactctgcagcggaaccgactactttgggtgtccgtgtttccttttattcttatattggctgcttatggtgacaattgagaagttgttaccatatagctattggattggccatccggtgacaaatagagcgattgtttatttgtttgttggatttataccactgaacttcaaggttttaaacaccctcaattttgtactagttcttaatacattaaa

SEQ ID NO: 19483 - DNA, 749 bp, synthetic construct
  source 1..749: mol_type = other DNA
ttaaaacaggcttgttgggttgttcccacccacaaggcccactgggcgctagcacactggtattccggtacctttgtgcgcctgttttataccccctcccccccccgtaacaaacttagaagcaaagtaaactcgatcaatagccggtgtgacaaaccagtcgcatcttgatcaagcacttctgtctccccggaccgagtatcaataaactgctcacgcggttgaaggagaaagcgttcgttacccgaccaattacttcgaaaaacctagtaccaccatgaaagttgcggggtgtttcgctcagcacaaccccagtgtagatcaggtcgatgagtcaccgcattccccacgggcgaccgtggcggtggctgcgctggcggcctgcctatggggcaacccataggatgctctaaaacggacatggtgcgaagagtctattgagctagttggtagtcctccggcccctgaatgcggctaatcctaactgcggagcaggcacctacaagccagtgggcagcctgtcgtaacgggcaactctgcagcggaaccgactactttgggtgtccgtgtttccttttacctcaattttggctgcttatggtgacaattgaaagattgttaccatatagctattggattggccatccggtgactaacagagctattgtgtaccttttcgttggttttataccactcaccctcgcggaggttaagattttactttatataatacacttgaacacattaaa

SEQ ID NO: 19484 - DNA, 743 bp, synthetic construct; identical to SEQ ID NO: 1043
  source 1..743: mol_type = other DNA

SEQ ID NO: 19485 - DNA, 742 bp, synthetic construct
  source 1..742: mol_type = other DNA
ttaaaacagcctgtgggttgttcccacccacagggcccaatgggcgccagcactctggtattacggtacctttgtgcgcctgttttatatcccctcccccaattgtaacttagaagcaacacgcaccgaccaacagtgggcgtggcacaccagccacgtcttggtcaagcacatctgtttccccggactgagtatcaatagactgctcacgcggtcgaaggagaaaacgttcgttatccggccaactacttcgagaagcccagtaacaccatgaatattgcgaagtgtttcgctcagcacactcccagtgtagatcaggtcgatgagtcaccgcattccccacgggcgaccgtggcggtggctgcgttggcggcctgcctatggggcaacccgtaggacgcttcaatatggacatggtgtgaagagtctattgagctagttggtagtcctccggcccctgaatgcggctaatcctaaccgcggagcaggcacccacaaaccagtgggcagcttgtcgtaacgggtaactctgcggcggaaccgactactttgggtgtccgtgtttccttttattcttatactggctgcttatggtgacaattgagagattgttgccatatagctattggattggccatccggtgacaaacagagcaattgtttatctatttgttggttttataccgttaagttttaaagtcctaaaaacccttaacttggtcatactactcaactcagcaaa

SEQ ID NO: 19486 - DNA, 742 bp, synthetic construct
  source 1..742: mol_type = other DNA
ttaaaacagcctgtgggttgttcccacccacagggcccactgggcgctagcacactggtattacggtacctttgtgcgcctgttttatataccccccccaagtgcaacttagaagcaagacatgaccggtcagcaggtgattcagtaaaccaactgaatcttgaccaagcacttctgtttccccggaccgagtatcaataggctgcttacgcggctgaaggagaaagtgttcgttacccggccaattacttcgagaagcctagtaccaccatggaggttgcgcggcgtttcgctccgcacacccccagtgtagatcaggccgatgagccaccgcattccccacgggtgaccgtggcggtggctgcgttggcggcctgcccatggggtaacctatgggacgcttcaatactgacatggtgcgaagagcctattgagctaattggtagtcctccggcccctgaatgcggctaatcctaactgcggagcaggtacccacataccagtgggcagcctgtcgtaacgggtaactctgcagcggaaccgactactttgggtgaccgtgtttccttttatttttccattggctgcttatggtgacaatcgaggaattgttgccatatagctattggattggccatccggtgtcaaatagagcgattatttacctgtttgttggatttgtaccactgaactttaaggcgctcatcactctcaactatattttatcccttaacgcaataaa

SEQ ID NO: 19487 - DNA, 730 bp, synthetic construct; identical to SEQ ID NO: 930
  source 1..730: mol_type = other DNA

SEQ ID NO: 19488 - DNA, 730 bp, synthetic construct
  source 1..730: mol_type = other DNA
ttgtacccaccccagaggcccacgtggcggctagcactccggtattacggtacccttgtgcgcctgttttatactcccctcccgcaacttagaagcacgaaaccaagttcaatagaagggggtacaaaccagtaccactacgaacaagcacttctgtttccccggtgacattgcatagactgctcacgcggttgaaagtgatcgatccgttacccgcttgtgtacttcgagaagcctagtatcgccttggaatcttcgacgcgttgcgctcagcacccgaccccggggtgtagcttaggctgatgagtctggacattcctcaccggtgacggtggtccaggctgcgttggcggcctacctatggctaacgccataggacgctagatgtgaacaaggtgtgaagagcctattgagctacataagagtcctccggcccctgaatgcggctaatcctaaccacggagcaggcggtcgcgaaccagtgactggcttgtcgtaacgcgcaagtctgtggcggaaccgactactttgggtgtccgtgtttcctgttatttttattatggctgcttatggtgacaatcagagattgttatcataaagcgaattggattggccatccggtgagtgttgtgtcaggtatacaactgtttgttggaaccactgtgttagttttacttctcatttaaccaattaaccaaaaacaatacgaggataaaacaacattactata

SEQ ID NO: 19489 - DNA, 730 bp, synthetic construct
  source 1..730: mol_type = other DNA
ttgttcccaccccagaggcccacgtggcggctagtactccggtatcacggtacccttgtacgcctgttttatactcccttcccccgtaacttagaagaaacaaacaaagttcaatagaagggggtacaaaccagtaccaccacgaacaagcacttctgtctccccggtgacgttgtatagactgtacccacggtcgaaaacgattgatccgttatccgcttttgtacttcgagaagcctagtatcatcttggaatcttcgatgcgttgcgctcagcactcaatcccagagtgtagcttaggtcgatgagtctggacgttcctcaccggcgacggtggtccaggctgcgttggcggcctacctgtggcccaaagccacaggacgctagtcgtgaacaaggtgtgaagagcctattgagctacaaaagagtcctccggcccctgaatgcggctaatcctaaccacggagcaagggtgcgtgagccaacacataccttgtcgtaacgcgtaagttcgtggcggaaccgactactttgggtgtccgtgtttccttttattcttgtattggctgcttatggtgacaatcatagattgttatcataaagcgacttggattggccatccagtggaagtgaaatactttgtctacctgtctgttggttttactccatttgactaattcacttacaagcttattgctataatttttattgactaaacaacaataccaca

SEQ ID NO: 19490 - DNA, 730 bp, synthetic construct
  source 1..730: mol_type = other DNA
ttgttcccaccccagaggcccacgtggcggctagtacactggtatcacggtacctttgtacgcctgttttatactccttcccccgcaatttagaagcatacaattcaagctcaataggagggggtgcaagccagcgcctccgtgggcaagcactactgtttccccggtgaggccacatagactgttcccacggttgaaagtgtccgatccgttatccgctcatgtacttcgagaagcctagtatcgctctggaatcttcgacgcgttgcgctcagcactcaaccccggagtgtagcttgggccgatgagtctggacagtccccactggcgacagtggtccaggctgcgctggcggcccacctgtggcccaaagccacgggacgctagttgtgaacagggtgtgaagagcctattgagctacatgagagtcctccggcccctgaatgcggctaatcctaaccatggagcaggcagccgcaatccagcagccagcctgtcgtaacgcgcaagtccgtggcggaaccgactactttgggtgtccgtgtttccttttattcttgaatggctgcttatggtgacaatcatagattgttatcataaagcgagttggattggccatccagtgtgaatcggattatttactcccttgtttgttggattcactcccgaaacgttttaccttaccccttaacttattgaaattgtttgaagacaggatttcagtgtcaca

SEQ ID NO: 19491 - DNA, 730 bp, synthetic construct
  source 1..730: mol_type = other DNA
tggggttgttcccaccccagaggcccacgtggcggctagtacactggtatcacggtacctttgtacgcctgttttatactccctcccccgcaacttagaagcatacaattcaagctcaataggagggggtgcaagccagcgcctccgtgggcaagcactactgtttccccggtgaggccgcatagactgttcccacggttgaaagcgtccgatccgttatccgctcatgtacttcgagaagcctagtatcgctctggaatcttcgacgcgttgcgctcagcactcaaccccggagtgtagcttgggccgatgagtctggacagtccccactggcgacagtggtccaggctgcgctggcggcccacctgtggcttaaagccacgggacgctagtagtgaacagggtgtgaagagcctattgagctacatgagagtcctccggcccctgaatgcggctaatcctaaccatggagcaggcagctgcaacccagcagccagcctgtcgtaacgcgcaagtccgtggcggaaccgactactttgggtgtccgtgtttccttttattcttgaatggctgcttatggtgacaatcatagattgttatcataaagcgagttggattggccatccagtgtgaatcaggttaattactcccttgtttgttggaaccactcccgaaacgtttttctccttaatttattgaaattgtttgaagacaggatttcagtgtcaca

SEQ ID NO: 19492 - DNA, 742 bp, synthetic construct
  source 1..742: mol_type = other DNA
ttaaaacagcctgtgggttgctcccacccacagggcccaatgggcgccagcacactagtattacggtacttttgtgcgcctgttttatccaccctccccccacgtaacatagaagcaaaacctacacggtcaataggtggctcagtaagccaactgagcggtgaccaagcacctctgttaccccggaccgagtatcaataggctgctcacgcggctgaaggagaaaacgttcgttacccggccaattacttcgagaaacccagtatcaccatgaagattgcgaagtgtttcgctccgcacaaccccagtgtagatcgggctgatgagtcaccgcattcctcacgggcgaccgtggcggtggctgcgctggcggcccgcctatggggcaacccatgggacgcttcaatattgacatggtgtgaagagtctattgagctaattggtagtcctccggcccctgaatgcggctaatcctaactgtggagcagatacccacgcaccagtgggcagtctgtcgtaacgggcaactctgcagcggaaccgactactttgggtgtccgtgtttccttttattcttatactggctgcttatggtgacaattgagagattgttaccatatagctattggattggccatccggtgacaaacagagcaattgtctacttattcattggtttcgtaccactaaattacacagcattaaacactctcaattttattttaacacttaatacattaaa

SEQ ID NO: 19493 - DNA, 742 bp, synthetic construct
  source 1..742: mol_type = other DNA
ttaaaacagcctgtgggttgctcccacccacagggcccaatgggcgctagcacactagtattacggtacttttgtgcgcctgttttatccaccctccccccacgtaacatagaagcaaaacctacccggtcaataggtggctcagtaagccaactgagcggtgaccaagcacctctgttaccccggaccgagtatcaataggctgctcacgcggctgaaggagaaaacgttcgttacccggccaattacttcgagaaacccagtatcaccatgaagattgcgaagtgtttcgctccgcacaaccccagtgtagatcaggctgatgagtcaccgcattcctcacgggcgaccgtggcggtggctgcgctggcggcctgcccatggggcaacccatgggacgcttcaatattgacatggtgtgaagagtctattgagctaattggtagtcctccggcccctgaatgcggctaatcctaactgtggagcagatacccacgcaccagtgggcagtctgtcgtaacgggcaactctgcagcggaaccgactactttgggtgtccgtgtttccttttgttcttatactggctgcttatggtgacaattgaaagattgttaccatatagctattggattggccatccggtgacaaacagagcaattgtctacttattcattggtttcgtaccactaaattacacagcattaaacactctcaattttattctaacacttaatacattaaa

SEQ ID NO: 19494 - DNA, 735 bp, synthetic construct
  source 1..735: mol_type = other DNA
gctcttggttgttcccacccacagggcccactgggcgccagcactctggtattgcggtaccttagtgcgcctgttttatacaccccttccctaaatgtaatttagatgcatgtaaacaaaggccaatagcaggcgcagcacaccagctgtgtctcggtcaagcactcctgttaccccggactgagtatcaataggctactcacgtggctgaaggagaaaacgttcgttacccggccaattacttcgagaaacctagtaataccatgaaggttgcgaagtgtttcgctcagcacaaccccagtgtagatcaggtcgatgagtcaccgcattccccacgggtgaccgtggcggtggctgcgttggcggcctgcccatgggattacccatgggacgcttcaatattgacatggtgtgaagagtctattgagctaattggtattcctccggcccctgaatgcggctaatcccaactgcggagcaggtacccacataccagtgggcagcctgtcgtaatgggcaactctgcagcggaaccgactactttgggtgtccgtgtttctctttattcttatactggctgcttatggtgacaattgagaaattgttgccatatagctattggattggccatccggtgacaaatagagcaattgtgcatccatttgttggttttataccattgaattacaaagttttaagtacccttaatcctattatatcattcaatacagcaaa

SEQ ID NO: 19495 - DNA, 740 bp, synthetic construct
  source 1..740: mol_type = other DNA
aacagcctgtgggttgtccccacccacagggcccactgggcgccagcactctggtattgcggtaccttagtgcgcctgttttatacaccccttccctaaatgtaatttagatgcatgtaaacaaaggccaatagcaggcgcagcacaccagctgtgtctcggtcaagcacttctgttaccccggactgagtatcaataggctactcacgtggctgaaggagaaaacgttcgttatccggccaattacttcgagaaacctagtaataccatgaaggttgcgaagtgtttcgctcagcacaaccccagtgtagatcaggtcgatgagtcaccgcattccccacgggtgaccgtggcggtggctgcgttggcggcctgcccatgggattacccatgggacgcttcaatattgacatggtgtgaagagtctattgagctaattggtattcctccggcccctgaatgcggctaatcccaactgcggagcaggtacccacataccagtgggcagcctgtcgtaatgggcaactctgcagcggaaccgactactttgggtgtccgtgtttctctttattcttatactggctgcttatggtgacaattgagaaattgttgccatatagctattggattggccatccggtgacaaatagagcaattgtgcatccatttgttggttttataccattgaattacaaagttttaagtacccttaatcctattatatcattcaatacagcaaa

SEQ ID NO: 19496 - DNA, 751 bp, synthetic construct
  source 1..751: mol_type = other DNA
ggggtttaaaacagctctggggttgttcccaccccagaggcccacgtggcggctagtacactggtattacggtacccttgtacgcctgttttacacccctttcccccgtaacttagaagctttaaatccaagttcaacagtcagtggtacaacccagtactactacgaacaagcacttctgtcaccccggtgagattgcataggccgtccccacggctaaaagcgattgatccgttatccgctcttgtacttcgagaagcctagtaagaccttgggatcctcgatgcgttgcgctcaacactcaaccccagagtgtagcttgggctgatgagtctggacattcctcaccggtgacggtggtccaggctgcgttggcggcctacctgtggcccaaagccacaggacgctagttgtgaacaaggtgtgaagagcctattgagctacaagagagtcctccggcccctgaatgcggctaatcccaaccacggagcaggcgattgcaacccagcaactagcctgtcgtaacgcgcaagtccgtggcggaaccgactactttgggtgtccgtgtttccttttattacataatggctgcttatggtgacaatcacagattgttgtcataaagcgaattggattggccatccggtgagaattaaaacaactatttacttatttgttggatttgttcctatacacacccaaacaccttgcttgattgaagtaattctgttgataagacaacactattaca

SEQ ID NO: 19497 - DNA, 744 bp, synthetic construct
  source 1..744: mol_type = other DNA
ttaaaacagcctgtgggttgttcccacccacagggcccacagggcgccagcacactggtatcacggtacctttgtgcgcctgttttatacaccctcacccccgatgtaacttagaagcacaactaaagcggtcaacagaaagctcagtaatccaactgagcgccgaccaagcacttctgttaccccggaccgagtatcaataagctgctcgcgcggctgaaggagaaaacgttcgttacccggccaattacttcgagaaacctagtaacaccatgaaagttgcgtagtgtttcgctccgcacaaccccagtgtagatcaggtcgatgagtcaccgcaatccccacgggcgaccgtggcggtggctgcgttggcggcctgcccatggggcaacccatgggacgcttcaatactgacatggtgtgaagagtctattgagctaattggtagtcctccggcccctgaatgcggctaatcccaactgcggagcagacgctcgcatgccagcgagtagtctgtcgtaacgggcaactctgcagcggaaccgactactttgggtgtccgtgtttccctttatttttatattggctacttatggtgacaattgaaagattgttaccatatagctattggattggccatccggtgacaaacagagcgatcatctactcttttgttgggttcgttccattgaatcacgaggtattgaacacactcaatttcattttaacccttaatacactaag

SEQ ID NO: 19498 - DNA, 744 bp, synthetic construct
  source 1..744: mol_type = other DNA
ttaaaacagtctgtgggttgttcccacccacagggcccacgtggcgccagcacactggtatctcggtacctttgtgcgcctgttttatccaccctaaaccccgttgtaacttagaagatgagcaacactgatcaatagtgggtgcaacatgccagttgcatcacgatcaagcacttctgtatccccggactgagtatcaataggctgctcacgcggctgaaggagaaaacgttcgttatccggccagttacttcgagaaacctagtaacatcatggaggttgcgcagtgtttcgctccgcacacccccagtgtagatcaggtcgatgagtcaccgcgttccccacgggcgaccgtggcggtggctgcgttggcggcctgcccatgggataacccatgggacgcttcaatactgacatggtgtgaagagtctattgagctaactggtagtcctccggcccctgaatgcggctaatcctaactgtggagcagacacccacatgccagtgggcagtctgtcgtaacgggcaactccgcagcggaaccgactactttgggtgtccgtgtttccttttattcctatattggctgcttatggtgacaattgaaagattgttaccatatagctattggattggccatccggtgtcaaacagagcaatcatttatttgtttgttggttttatacctctgaactttaaagtgctaaagactctcaattttatattatatctcaacaaatcagg

SEQ ID NO: 19499 - DNA, 729 bp, synthetic construct
  source 1..729: mol_type = other DNA
ttgttcccaccccagaggcccacgtggcggctagtacactggtatcacggtacctttgtacgcctgttttatactccctcccccgcaacttagaagcatacaattcaagctcaataggaggggtgcaagccagcgcctccgtgagcaagcactactgtttccccggtgaggccgcatagactgttcccacggttgaaagtgtccgatccgttatccgctcatgtacttcgagaagcctagtaccgctctggaatcttcgacgcgttgcgctctgcactcaaccccggagtgtagcttgggccgatgagtctggacagtccccactggcgacagtggtccaggctgcgctggcggcccacctgtggcccaaagccacgggacgctagttgtgaacagggtgtgaagagcctattgagctacatgagagtcctccggcccctgaatgcggctaatcctaaccatggagcaggcagctgcaacccagcagccagcctgtcgtaacgcgcaagtccgtggcggaaccgactactttgggtgtccgtgtttccttttattcttgaatggctgcttatggtgacaatcatagattgttatcataaagcgagttggattggccatccagtgtgaatcagattaattactcccttgtttgttggatccactcccgtcccgaaacgttttattccttaacttattgaaattgtttaaagacaggatttcagtgtcaca

SEQ ID NO: 19500 - DNA, 729 bp, synthetic construct
  source 1..729: mol_type = other DNA
ttgttcccaccccagaggcccaagtggcggctagtactccggtattacggtacccttgtacgcctgttttatactcccttcccccgtaacttagaaggaataaaccaagttcaatagaagggggtacaagccagtaccaccacgaacaagcacttctgtttccccggtgaagttgtatagactgtatccacggttgaaagcgactgatccgttatccgcttttgtacttcgagaagcctagtatcatcttggaatcttcgatgcgttgcgctcagcactcaaccccagagtgtagcttgggctgatgagtctggacactcctcaccggtgacggtggtccaggctgcgttggcggcctacctgcggcctaaagccacaggacgctagttgtgaacaaggtgtgaagagcctattgagctacaaaagagtcctccggcccctgaatgcggctaatcctaaccacggagcaagggtgtgcgaaccagtgcataccttgtcgtaacgcgcaagtctgtggcggaaccgactactttgggtgtccgtgtttctttttattcttgtaatggctgcttatggtgacaatcatagattgttatcataaagcgaattggattagccatccggagaaagcgaaatacattatttatccttttgttggatttactccattcacttccctttctttaaagttcatcactacaaccttgttgattagagacttatattata

SEQ ID NO: 19501 - DNA, 741 bp, synthetic construct
  source 1..741: mol_type = other DNA
ttaaaacagcctgtgggttgttcccacccacagggcccaatgggcgctagcacactagtattacggtacttttgtgcgcctgttttatccacccccccccacgtaacatagaagcaaaacctacacggtcaataggtgactcagtaagccaactgagcggtgaccaagcacctctgttaccccggaccgagtatcaataggctgctcacgcggctgaaggagaaaacgttcgttacccggccaattacttcgagaaacccagtatcaccatgaagattgcgaagtgtttcgctccgcacaaccccagtgtagatcaggctgatgagtcaccgcattcctcacgggcgaccgtggcggtggctgcgctggcggcctgcccatggggcaacccatgggacgcttcaatattgacatggtgtgaagagtctattgagctaattggtagtcctccggcccctgaatgcggctaatcctaactgtggagcagatacccacgcaccagtgggcagtctgtcgtaacgggcaactctgcagcggaaccgactactttgggtgtccgtgtttccttttattcttatactggctgcttatggtgacaattgaaagattgttaccatatagctattggattggccatccggtgacaaacagagcaattatctacttattcattggtttcgtaccactaaactacacagcattaaacactctcaattttatcttaacacttaatacattaaa

SEQ ID NO: 19502 - DNA, 741 bp, synthetic construct
  source 1..741: mol_type = other DNA
ttaaaacagcctgtgggttgctcccacccacagggcccaatgggcgctagcacactagtattacggtacttttgtgcgcctgttttatccacccccccccacgtaacatagaagcaaaacctactcggtcaataggtggctcagtaagccaactgagcggtgaccaagcacctctgttaccccggaccaagtatcaataggctgctcacgcggctgaaggagaaaacgttcgttacccggccaattacttcgagaaacccagtaccaccatgaagattgcgaagtgtttcgctccgcacaaccccagtgtagatcaggctgatgagtcaccgcattcctcacgggcgaccgtggcggtggctgcgctggcggcctgcccatggggcaacccatgggacgcttcaatattgacatggtgtgaagagtctattgagctaattggtagtcctccggcccctgaatgcggctaatcctaactgtggagcagatacccacgcaccagtgggcagtctgtcgtaatgggcaactctgcagcggaaccgactactttgggtgtccgtgtttccttttattcttatactggctgcttatggtgacaattgaaagattgttaccatatagctattggatcggccatccggtgacaaacagagcaattgtctacttattcattggtttcgtaccactaaattacatagcattaaacactctcaactttattttaacacttaatacattaaa

SEQ ID NO: 19503 - DNA, 744 bp, synthetic construct
  source 1..744: mol_type = other DNA
ttaaaacagcctgtgggttgtccccacccacagggcccacagggcgctagcacactggtattacggtacccttgtgcgcctgttttatctacccttccccttaaagtaacttagaagcacaacccaggcggtcaatagaaagctcagcaacccagctgagttctggccaagcacttctgttaccccggaccgagtatcaataggctgcttgcgcggctgaaggagaaaacgttcgttatccggccaattacttcgagaaacccagtatcaccatgaaggttgcgcagtgtttcgctccgcacaaccccagtgtagatcaggccgatgagtcaccgcattccccacgggcgaccgtggcggtggctgcgctggcggcctgcccatggggcaacccatgggacgcttcaatactgacatggtgtgaagagtctattgagctaattggtagtcctccggcccctgaatgcggctaatcctaactgcggagcagacgctcgcaagccagcgagtggtctgtcgtaatgggtaactctgcagcggaaccgactactttgggtgtccgtgtttccttttattcctatactggctgcttatggtgacaattgagagattgttaccatatagctattggattggccatccggtgacaaacagagcaattgtttttctattcgttggtttcataccattggattttaaggctttaagaactctcaacttgatcttactgtttaatacatcaaa

SEQ ID NO: 19504 - DNA, 744 bp, synthetic construct
  source 1..744: mol_type = other DNA
ttaaaacagggcctgtgggttgttcccactcacagggcccactgggcgttagcacactggtattacggtacccttgtgcgcctgttttattcaccctaccccattgcaacttagaagtcaaccaagcacggtcattaggcagctcagtatgccaactgagttctgaccaagcacttctgttaccccggactgagtatcaataggctgtttgcacggctgaaggagaaaacgttcgttacccgaccaattacttcgagaaacccagtatcaccatgaaggttgcgcagtgtttcgctccgcacaaccccagtgtagatcaggtcgatgagtcaccgcactcctcacgggcgaccgtggcggtggctgcgctggcggcctgcccatgggccaacccatgggacgcttcaaaactgacatggtgtgaagagtctattgagctaattggtagtcctccggcccctgaatgcggctaatcccaactgcggagcagatacccacatgccagtgggcggtctgtcgtaacgggcaactctgcagcggaaccgactactttgggtgtccgtgtttccttttattcttatactggctgcttatggtgacaattgagagattgttaccatatagctattggattggccatccggtgacaaacagggcgattgtttacctatttgttggtttcgtaccattgaattttaaagttttaaaaacccttaaccttattttagcacttaatacagcgaa

SEQ ID NO: 19505 - DNA, 739 bp, synthetic construct; identical to SEQ ID NO: 963
  source 1..739: mol_type = other DNA

SEQ ID NO: 19506 - DNA, 739 bp, synthetic construct
  source 1..739: mol_type = other DNA
ctgtgggttgttcccacccacagggcccactgggcgctagcacactggtattacggtacctttgtgcgcctgttttatattcctccccctcaatgtaacttagaagtttgtcacaagtggtcaatagaaagctcagcaatccagctgggtgcagaccaagcactcctgttaccccggaccgagtatcaataagctgctcacgcggctgaaggagaaaacgttcgttacccggcctactacttcgagaaacctagtaccaccatgaaagttgcgcagtgtttcgctccgcacaaccccagtgcagatcaggtcgatgagtcaccgcaatccccacgggcgaccgtggcggtggctgcgttggcggcctgcccatggggcaacccatgggacgcttcaatactgacatggtgtgaagagtctattgagctagttggtagtcctccggcccctgaatgcggctaatcccaactgcggagcagatgcccgtgcaccaacgggtggtctgtcgtaatgggcaactctgcagcggaaccgactactttgggtgtccgtgtttctctttattcttatattggctgcttatggtgacaattgaaagattgttaccatatagctattggattggccatccggtgactaatagagcaattattctctcttttgttggatttgttccattgaactactcggtactaaacacacttaatctcattttaacacttaacacaataaaaagaaa

SEQ ID NO: 19507 - DNA, 732 bp, synthetic construct
  source 1..732: mol_type = other DNA
tctggggttgttcccaccccagaggcccacgtggcggctagtacactggtatcacggtacctttgtacgcctgttttatactccctcccccgcaacttagaagcatacaattcaagctcaataggagggggtgcaagccagcgcctccgtgggcaagcactactgtttccccggtgaggccgcatagactgttcccacggttgaaagtgtccgatccgttatccgctcatgtacttcgagaagcctagtatcgctctggaatcttcgacgcgttgcgctcagcactcaaccccggagtgtagcttgggccgatgagtctggacagtccccactggcgacagtggtccaggctgcgctggcggcccacctgtggcccaaagccacgggacgctagttgtgaacagggtgtgaagagcctattgagctacatgagagtcctccggcccctgaatgcggctaatcctaaccatggagcaggcagctgcaacccagcagccagcctgtcgtaacgcgcaagtccgtggcggaaccgactactttgggtgtccgtgtttccttttattcttgaatggctgcttatggtgacaatcatagattgttatcataaagcgagttggattggccatccagtgtgaatcagagtaattactcccttgtttgttggatccactcccgaaacgttttactccttaacttattgaaattgtttgaagacaggatttcagtgtcaca

SEQ ID NO: 19508 - DNA, 727 bp, synthetic construct
  source 1..727: mol_type = other DNA
tacccaccccagaggcccacgtggcggctagcactccggtattacggtacccttgtgcgcctgttttatactcccctcccgcaacttagaagcacgaaaccaagttcaatagaagggggtacaaaccagtaccactacgaacaagcacttctgtctccccggtgacattgcatagactgctcacgcggttgaaagtgatcgatccgttacccgcttgtgtacttcgaaaagcctagtatcgccttggaaacttcaacgcgttgcgctcagcacccgaccccggggtgtagcttaggctgatgagtctggacagtcctcaccggtgacggtggtccaggctgcgttggcggcctacctatggctaacgccataggacgctagatgtgaacaaggtgtgaagagcctattgagctacataagagtcctccggcccctgaatgcggctaatcctaaccacggagcaggcggtcgcgaaccagtgactggcttgtcgtaacgcgcaagtctgtggcggaaccgactactttgggtgtccgtgtttcctgttatttttatcatggctgcttatggtgacaatcagagattgttatcataaagcgaattggattggccatccggtgagtgttgtgtcaggtatacaactgtttgttggaaccactgtgttagctttacttctcatttaaccaattactcaaaaacaatacgaggataaaacaacaatactaca

SEQ ID NO: 19509 - DNA, 742 bp, synthetic construct
  source 1..742: mol_type = other DNA
ttaaaacaggcctgtgggttgttcccacccacagggcctactgggcgccagcacactggtatcacggtacctttgtgcgcctgttttatcttcccttccccaatgcaacttagaagcataaattgaacggtcaataggtagcccagtgcgccaactgggtttggaccaagtacttctgttgccccggaccgagtatcaataagctgcccccgcggctgaaagagaaaacgttcgttacccggccaattacttcgagaaacccagtaccaccatgaaggttgcgcagtgtttcgctcagcacaatcccagtgtagatcaggtcgatgagtcaccgcaatccccacgggtgaccgtggcggtggctgcgttggcggcctgcccatggggcaacccatgggacgcttcaattccgacatggtgcgaagagtctattgagctaattggtagtcctccggcccctgaatgcggctaatcctaactgcggagcaaacacccacaaacagtgggcagtttgtcgtaacgggcaactctgcagcggaaccgactactttgggtgtccgtgtttccttttattcttacattggctgcttatggtgacaattgaaaggttgttaccatatagctattggattggccatccggtgacaaacagagctattatttacctttttgttggttttgtgccattaaatcttaaaatcttaaaaaccataaactttatcttaacacttaactcagcaaa

SEQ ID NO: 19510 - DNA, 742 bp, synthetic construct
  source 1..742: mol_type = other DNA
ttaaaacagcctgtgggttgttcccacccacagggcccactgggcgctagcacactggtattacggtacccttgtgcgcctgttttattcaccctaccccattgcaacttagaagctaaccaagtacggtcattaggcagctcagtaagccaactgagttttgaccaagcacttctgttaccccggactgagtatcaataggctgtttgcacggctgaaggagaaaacgttcgttacccgaccaattacttcgagaaacctagtatcaccatgaaggttgcgcagtgtttcgctccgcacaaccccagtgtagatcaggccgatgagtcaccgcactccccacgggcgaccgtggcggtggctgcgctggcggcctgcccatgggccaacccatgggacgcttcaaaactgacatggtgtgaagagtctattgagctaattggtagtcctccggcccctgaatgcggctaatcctaactgcggagcagatacctacatgccagtgggcggtctgtcgtaacgggcaactctgcagcggaaccgactactttgggtgtccgtgtttccttttattcctatactggctgcttatggtgacaattgagagattgttaccatatagctattggattggccatccggtgacaaacagagcgattgtttacctatttgttggtttcgtaccattgaattttaaagttttaaaaaccctcaatcttgttttagcacttaacgcagcaaa

SEQ ID NO: 19511 - DNA, 692 bp, synthetic construct
  source 1..692: mol_type = other DNA
cacactggtattacggtacccttgtgcgcctgttttattcaccctaccccattgcaacttagaagctaaccaagtacggtcattaggcagctcagtaagccaactgagttttgaccaagcacttctgttaccccggactgagtatcaataggctgtttgcacggctgaaggagaaaacgttcgttacccgaccaattacttcgagaaacctagtatcaccatgaaggttgcgcagtgtttcgctccgcacaaccccagtgtagatcaggccgatgagtcaccgcactccccacgggcgaccgtggcggtggctgcgctggcggcctgcccatgggccaacccatgggacgcttcaaaactgacatggtgtgaagagtctattgagctaattggtagtcctccggcccctgaatgcggctaatcctaactgcggagcagatacctacatgccagtgggcggtctgtcgtaacgggcaactctgcagcggaaccgactactttgggtgtccgtgtttccttttattcctatactggctgcttatggtgacaattgagagattgttaccatatagctattggattggccatccggtgacaaacagagcgattgtttacctatttgttggtttcgtaccattgaattttaaagttttaaaaaccctcaatcttgttttagcacttaacgcagcaaa

SEQ ID NO: 19512 - DNA, 742 bp, synthetic construct
  source 1..742: mol_type = other DNA
ttaaaacagcctgtgggttgttcccacccacagggcccactgggcgctagcacactggtattacggtacccttgtgcgcctgttttattcaccctaccccattgcaacttagaagctaaccaagtacggtcattaggcagctcagtaagccaactgggttttgaccaagcacttctgttaccccggactgagtatcaataggctgtttgcacggctgaaggagaaaacgttcgttacccgaccaattacttcgagaaacctagtatcaccatgaaggttgcgcagtgtttcgctccgcacaaccccagtgtagatcaggccgatgagtcaccgcactccccacgggcgaccgtggcggtggctgcgctggcggcctgcccatgggccaacccatgggacgcttcaaaactgacatggtgtgaagagtctattgagctaattggtagtcctccggcccctgaatgcggctaatcctaactgcggagcagatacctacatgccagtgggcggtctgtcgtaacgggcaactctgcagcggaaccgactactttgggtgtccgtgtttccttttattcctatactggctgcttatggtgacaattgagagattgttaccatatagctattggattggccatccggtgacaaacagagcgattgtttacctatttgttggtttcgtaccattgaattttaaagttttaaaaaccctcaatcttgttttagcacttaacgcagcaaa

SEQ ID NO: 19513 - DNA, 727 bp, synthetic construct
  source 1..727: mol_type = other DNA
tacccaccccagaggcccacgtggcggctagcactccggtattacggtacccttgtgcgcctgttttatactcccctcccgcaacttagaagcacgaaaccaagttcaatagaagggggtacaaaccagtaccactacgaacaagcacttctgtttccccggtgacattgcatagactgctcacgcggttgaaagtgatcgatccgttacccgcttgtgtacttcgaaaagcctagtatcgccttggaatcttcgacgcgttgcgctcagcacccgaccccggggtgtagcttaggctgatgagtctggacattcctcaccggtgacggtggtccaggctgcgttggcggcctacctatggctaacgccataggacgttagatgtgaacaaggtgtgaagagcctattgagctacataagagtcctccggcccctgaatgcggctaatcctaaccacggagcaggcggtcgcgaaccagtgactggcttgtcgtaacgcgcaagtctgtggcggaaccgactactttgggtgtccgtgtttcctgttatttttatcatggctgcttatggtgacaatcagagattgttatcataaagcgaattggattggccatccggtgagtgttgtgtcaggtatacaactgtttgttggaaccactgtgttagctttacttctcatttaaccaattaatcaaaaacaatacgaggataaaacaacaatactaca

SEQ ID NO: 19514 - DNA, 727 bp, synthetic construct
  source 1..727: mol_type = other DNA
tacccaccccagaggcccacgtggcggctagcactccggtattacggtacccttgtgcgcctgttttatactcccctcccgcaacttagaagcacgaaaccaagttcaatagaagggggtacaaaccagtaccactacgaacaagcacttctgtttccccggtgacattgcatagactgctcacgcggttgaaagtgatcgatccgttacccgcttgtgtacttcgaaaagcctagtatcgccttggaatcttcgacgcgttgcgctcagcacccgaccccggggtgtagcttaggctgatgagtctggacattcctcaccggtgacggtggtccaggctgcgttggcggcctacctatggctaacgccataggacgctagatgtgaacaaggtgtgaagagcctattgagctacataagagtcctccggcccctgaatgcggctaatcctaaccacggagcaggcggtcgcgaaccagtgactggcttgtcgtaacgcgcaagtctgtggcggaaccgactactttgggtgtccgtgtttcctgttatttttatcatggctgcttatggtgacaatcagagattgttatcataaagcgaattggattggccatccggtgagtgttgtgtcaggtatacaactgtttgttggaaccactgtgttagctttacttctcatttaaccaattaatcaaaaacaatacgaggataaaacaacaatactaca

SEQ ID NO: 19515 - DNA, 727 bp, synthetic construct
  source 1..727: mol_type = other DNA
tacccaccccagaggcccacgtggcggctagcactccggtattacggtacccttgtgcgcctgttttatactcccctcccgcaacttagaagcacgaaaccaagttcaatagaagggggtacaaaccagtaccaccacgaacaagcacttctgtttccccggtgacattgcatagactgctcacgcggttgaaagtgatcgatccgttacccgcttgtgtacttcgaaaagcctagtatcgccttggaatcttcgacgcgttgcgctcagcacccgaccccggggtgtagcttaggctgatgagtctggacattcctcaccggtgacggtggtccaggctgcgttggcggcctacctatggctaacgccataggacgctagatgtgaacaaggtgtgaagagcctattgagctacataagagtcctccggcccctgaatgcggctaatcctaaccacggagcaggcggtcgcgaaccagtgactggcttgtcgtaacgcgcaagtctgtggcggaaccgactactttgggtgtccgtgtttcctgttatttttatcatggctgcttatggtgacaatcagagattgttatcataaagcgaattggattggccatccggtgagtgttgtgtcaggtatacaactgtttgttggaaccactgtgttagctttacttctcatttaaccaattaatcaaaaacaatacgaggataaaacaacaatactaca

SEQ ID NO: 19516 - DNA, 727 bp, synthetic construct
  source 1..727: mol_type = other DNA
tacccaccccagaggcccacgtggcggctagcactccggtattacggtacccttgtgcgcctgttttatactcccctcccgcaacttagaagcacgaaaccaagttcaatagaagggggtacaatccagtaccactacgaacaagcacttctgtttccccggtgacattgcatagactgctcacgcggttgaaagtgatcgatccgttacccgcttgtgtacttcgaaaagcctagtatcgccttggaatcttcgacgcgttgcgctcagcacccgaccccggggtgtagcttaggctgatgagtctggacattcctcaccggcgacggtggtccaggctgcgttggcggcctacctatggctaacgccataggacgttagatgtgaacaaggtgtgaagagcctattgagctacataagagtcctccggcccctgaatgcggctaatcctaaccacggagcaggcggtcgcgaaccagtgactggcttgtcgtaacgcgcaagtctgtggcggaaccgactactttgggtgtccgtgtttcctgttatttttatcatggctgcttatggtgacaatcagagattgttatcataaagcgaattggattggccatccggtgagtgttgtgtcaggtatacaactgtttgttggaaccactgtgttagctttacttctcatttaaccaattaatcaaaaacaatacgaggataaaacaacaatactaca

SEQ ID NO: 19517 - DNA, 727 bp, synthetic construct
  source 1..727: mol_type = other DNA
tacccaccccagaggcccacgtggcggctagcactccggtattacggtacccttgtgcgcctgttttatactcccctcccgcaacttagaagcacgaaaccaagttcaatagaagggggtacaaaccagtaccactacgaacaagcacttctgtttccccggtgacattgcatagactgctcacgcggttgaaagtgatcgatccgttacccgcttgtgtacttcgaaaagcctagtatcgccttggaatcttcgacgcgttgcgctcagcacccgaccccggggtgtagcttaggctgatgagtctggacattcctcaccggtgacggtggtccaggctgcgttggcggcctacctatggctaacgccataggacgttagatgtgaacaaggtgtgaagagcctattgagctacataagagtcctccggcccctgaatgcggctaatcctaaccacggagcaggcggtcgcgaaccagtgactggcttgtcgtaacgcgcaagtctgtggcggaaccgactactttgggtgtccgtgtttcctgttatttttatcatggctgcttatggtgacaatcagagattgttatcataaagcgaattggattggccatccggtgagtgttgtgtcaggtatacaactgtttgttggaaccactgtgttagcttcacttctcatttaaccaattaatcaaaaacaatacgaggataaaacaacaataccaca

SEQ ID NO: 19518 - DNA, 732 bp, synthetic construct
  source 1..732: mol_type = other DNA
gtgggttgttcccacccacagggcccactgggcgccagcactctggtattgcggtaccttagtgcgcctgttttatacaccccttccctaaatgcaatttagatgcatgtaaataaagaccaatagcaggcgcagcacaccagctgtgtctcggtcaagcactcctgttaccccggactgagtatcaataggctactcacgtggctgaaggagaaaacgttcgttacccggccaattacttcgagaaacctagtaacaccatgaaggttgcgaagtgtttcgctccgcacaaccccagtgtagatcaggtcgatgagtcaccgcattccccacgggtgaccgtggcggtggctgcgttggcggcctgcccatgggattacccatgggacgcttcaatactgacatggtgtgaagagtctattgagctaattggtattcctccggcccctgaatgcggctaatcccaactgcggagcagatacccacacaccagtgggcagtctgtcgtaatgggcaactctgcagcggaaccgactactttgggtgtccgtgtttctctttattcttatactggctgcttatggtgacaattgagagattgttgccatatagctattggattggccatccggtgacaaatagagcaattgtgtatctatttgttggttttataccattaaattacaaagttttaagcacccttaatcttattatagcattcaatacagcaaa

SEQ ID NO: 19519 - DNA, 731 bp, synthetic construct
  source 1..731: mol_type = other DNA
ctggggttgttcccaccccagaggcccacgtggcggctagtacactggtatcacggtacctttgtacgcctgttttatactccctcccccgcaacttagaaacatacaattcaagctcaataggagggggtgcaagccagcgcctccgtgagcaagcactactgtttccccggtgaggccgcatagactgttcccacggttgaaagtgtccgatccgttatccgctcatgtacttcgagaagcctagtatcgctctggaatcttcgacgcgttgcgctcagcactcaaccccggagtgtagcttgggccgatgagtctggacagtccccactggcgacagtggtccaggctgcgctggcggcccacctgtggcccaaagccacaggacgctagttgtgaacagggtgtgaagagcctattgagctacatgagagtcctccggcccctgaatgcggctaatcctaaccacggagcaggcagctgcaacccagcagccagcctgtcgtaacgcgcaagtccgtggcggaaccgactactttgggtgtccgtgtttccttttattcttgaatggctgcttatggtgacaatcacagattgttatcataaagcgagttggattggccatccagtgtgaatcagattaattactcccttgtttgttggatccactcccgaaacgttttactccttaacttattgaaattgtttgaagacaggatttcagtgtcaca

SEQ ID NO: 19520 - DNA, 742 bp, synthetic construct
  source 1..742: mol_type = other DNA
ttaaaacagcctgtgggttgcccccacccgcagggcccattgggcgctagcacactggtatcacggtacctttgtgcgcctgttttatcctccctccccaagtgcaacgtagaagcaagacacaaaaggtcaacagatagcccagcacaccagttgggtttcgaccaagcacttctgtctccccggaccgagtatcaataagctgctcacgcggctgaaggagaaagtgttcgttacccggctagttacttcgagaaacctagtaccaccatgaaggttgcgcagcgtttcgctccgcacaaccccagtgtagatcaggtcgatgagtcaccgcgttccccacgggcgaccgtggcggtggctgcgttggcggcctgcccatggggcaacccatgggacgcttcaatactgacatggtgcgaagagtctattgagctaactagtagtcctccggcccctgaatgcggataatcttaactgcggagcaggtgctcacaatccagtgggtggcctgtcgtaacgggcaactctgcagcggaaccgactactttgggtgtccgtgtttccttttatctctttgttggctgcttatggtgacaattgaacgattgttgccatatagctattggattggccatccggtgagcagcagatccattatttaccagtttgttggatttgtaccacttgatcacatagtctttagaacacttgtctttattctaaatcttaacaaggcaag

SEQ ID NO: 19521 - DNA, 727 bp, synthetic construct
  source 1..727: mol_type = other DNA
tacccaccccagaggcccacgtggcggctagcactccggtattacggtacccttgtgcgcctgttttatactcccttcccgcaacttagaagcacgaaaccaagttcaatagaagggggtacaaaccagtaccactacgaacaagcacttctgtttccccggtgacatcgcatagactgctcacgcggttgaaagtgatcgatccgttacccgcttgtgtacttcgaaaagcctagtatcgccttggaatcttcgatgcgttgcgctcagcacccgaccccggggtgtagcttaggctgatgagtctggacattcctcaccggtgacggtggtccaggctgcgttggcggcctacctatggctaacgccataggacgctagatgtgaacaaggtgtgaagagcctattgagctacataagagtcctccggcccctgaatgcggctaatcctaaccacggagcaggcggtcacgaaccagtgactggcttgtcgtaacgcgcaagtctgtggcggaaccgactactttgggtgtccgtgtttcctgttatttttatcatggctgcttatggtgacaatcagagattgttatcataaagcgaattggattggccatccggtgagtgttgtgtcaggtgtacaactgtttgttggaaccactgtgttagctttacttctcatttaaccaattaatcaaaaacaacacgaggataaaacaacaatactaca

SEQ ID NO: 19522 - DNA, 742 bp, synthetic construct
  source 1..742: mol_type = other DNA
ttaaaacagcctgtgggttgttcccacccacagggcctactgggcgttagcacactggtattacggtacccttgtgcgcctgttttattcaccctaccccattgcaacttagaagctaaccaagcacggtcattaggcagctcagtatgccaactgagttttgaccaagcacttctgttaccccggactgagtatcaataggctgtttgcacggccgaaggagaaaacgttcgttacccgaccaattacttcgagaaacccagtatcaccatgaaggttgcgcagtgtttcgctccgcacaaccccagtgtagatcaggccgatgagtcaccgcattccccacgggcgaccgtggcggtggctgcgctggcggcctgcccatgggccaacccatgggacgcttcaaaactgacatggtgtgaagagtctattgagctaattggtagtcctccggcccctgaatgcggctaatcctaactgcggagcagatacccacatgccagtgggcggtctgtcgtaacgggcaactctgcagcggaaccgactactttgggtgtccgtgtttccttttattcctttactggctgcttatggtgacaattgagagattgttaccatatagctattggattggccatccggtgacaaacagagcaattatttacctatttgttggttacgtaccattgaattttaaagttttaaaaacccttaacattgttttaacacttaacgcagcaaa

SEQ ID NO: 19523 - DNA, 721 bp, synthetic construct
  source 1..721: mol_type = other DNA
cccaccccagaggcccacgtggcggctagtactccggtattacggtacccttgtacgcctgttttatactcccctccccgtaacttagaagacacaaaataagttcaataggagggggtacaaaccagtaccaccacgaacaagcacttctgtctccccggtgacattgcatagactgtccccacggttgaaagcaattgatccgttacccgctcttgtacttcgagaagcctagtaccatcttggaatcatcgatgcgttgcgctccacactcagtcccagagtgtagcttaggctgatgagtctggacattcctcaccggcgacggtggtccaggctgcgttggcggcctacctgtggtccaaagccacaggacgctagatgtgaacaaggtgtgaagagcctattgagctataagagagtcctccggcccctgaatgcggctaatcccaaccacggatcaagggtgcacgaaccagtgtataccttgtcgtaacgcgcaagtccgtggcggaaccgactactttgggtgaccgtgtttccttttattatctcaatggctgcttatggtgacaatcattgattgttatcataaagcgaattggactggccgtccggtgaaagtgaaacatattgtttgcctccttgttgggtctactccaaccaatctttacttacaatcttaccactacagttttgctggttagaagtgtgtttcacg

SEQ ID NO: 19524 - DNA, 726 bp, synthetic construct
  source 1..726: mol_type = other DNA
ttcccaccccagaggcccacgtggcggccagtactctggtattacggtacctttgtacgcctgttttatactccctcccccgtaacttagaagaaacaaatcaagttcaacaggagggggtacgaaccagtaccaccacgaacaagcacttctgtctccccggtgacgttgcatagactgtacccacggtcgaaagcgattgatccgttatccgctcttgtacttcgagaagcctagtatcatcttggaatcttcgatgcgttgcgctcagcactcaaccccagagtgtagcttaggtcgatgagtctggacgttcctcaccggcgacggtggtccaggctgcgttggcggcctacctgtggcccaaaaccacaggacgctagttgtgaacaaggtgtgaagagcctattgagctacaggagagtcctccggcccctgaatgcggctaatcccaaccacggagcaggggtgcataaaccaatgcacaccttgtcgtaacgcgcaagtctgtggcggaaccgactactttgggtgtccgtgtttccttttatttttacattggctgcttatggtgacaatcatagattgttatcataaagcgacttggattggccatccggtgagagtgaaatacattgtttacttgttcattggatttactccactcaactctttcgcttacaaactcattacaataacactgttaattaaaacaacaatattaca

SEQ ID NO: 19525 - DNA, 741 bp, synthetic construct
  source 1..741: mol_type = other DNA
ttaaaacagcctgtgggttgcccccacccgcagggccattgggcgctagcacactggtatcacggtacctttgtgcgcctgttttatcctccctccccaagtgcaacgtagaagcaagacacaaaaggtcaacagatagcccagcacaccagttgggtttcgaccaagcacttctgtctccccggaccgagtatcaataagctgctcacgcggctgaaggagaaagcgttcgttacccggctagttacttcgagaaacccagtaccaccatgaaggttgcgcagcgtttcgctccgcacaaccccagtgtagatcaggtcgatgagtcaccgcgttccccacgggcgaccgtggcggtggctgcgttggcggcctgcctatggggcaacccatgggacgcttcaatactgacatggtgcgaagagtctattgagctaactagtagtcttccggcccctgaatgcggctaatcttaactgcggagcaggtgctcacaatccagtgggtggcctgtcgtaacgggcaactctgcagcggaaccgactactttgggtgtccgtgtttccttttatctctttgttggctgcttatggtgacaattgaatgattgttgccatatagctattggattggccatccggtgagcagcagatccattatttaccagtttgttggatttgtaccacttgatcacatagtctttagaacacttgtctttattctaaatcttaacaaggcaag

SEQ ID NO: 19526 - DNA, 726 bp, synthetic construct
  source 1..726: mol_type = other DNA
gttgttcccacccgcagggcccactgggcgccagcacactggtattacggtacccttgtgcgcctgttttacatacccctccccaccgcaacgtagaagtacaatacaagaggtctatagggggctcagtacaccaactgagtcatgaccaagcacttctgttaccccggaccgagtatcaataagctgctcgcgcggctgaaggagaaagcgttcgttacccggccacttacttcgagaaacccagtaacaccatggaggttgcgcggcgtttcgttccacacgaccccggtgtagatcaggccgatgagtcaccgcactcctcacgggcgaccgtggcggtggctgcgctggcggcctgcccatggggtaacccatgggacgcttcaatactgacatggtgtgaagagtctattgagctaagtggtagtcctccggcccctgaatgcggctaatcctaactgcggagcagatacctgcaaaccagtgggcagtctgtcgtaatgggtaactctgcagcggaaccgactactttgggtgaccgtgtttctttttattcttatattggctgcttatggtgacaattgagagattgttgccatatagctattggattggccatccggtgtctaatagagcaattatataccaatttgttggttttgtacccctaaacctcaaagtaataagaacactgaattttgtgttactgttaaatacactaaa

SEQ ID NO: 19527 - DNA, 741 bp, synthetic construct
  source 1..741: mol_type = other DNA
ttaaaacagctctggggttgctcccacccacagggcccaatgggcgctagcacactagtattgaggtacttttgtgcgcctgttttatccaccctctccccacgtaacttagaagcaaaactcattcggtcaatagacagcccagtaagccaactgggcaatgaccaagcacttctgttccccggactgagtatcaatagactgctcacgcggttgaaggagaaatcgttcgttacccggccaattacttcgagaaacctagtaccaccatggagattgcgaagtgtttcgctccgcacaaccccagtgtagatcaggctgatgagtcaccgcattcctcacgggcgaccgtggcggtggctgcgctggcggcctgcccatggggcaacccatgggacgcttcaatattaacatggtgtgaagagtctattgagctaattggtagtcctccggcccctgaatgcggctaatcctaactgcggagcagacacccacacgccagtgggcagtctgtcgtaacgggaaactctgcagcggaaccgactactttgggtgtccgtgtttccttttattcttatattggctgcttatggtgacaattgaaagattgttaccatatagctattggattggccatccagtgacaaatcgagcgatcatttacttgtttgttggtttcgtcccgctaaactttaaagttgtgaatactcttaactttattatagcacagaacacatcact

SEQ ID NO: 19528 - DNA, 741 bp, synthetic construct
  source 1..741: mol_type = other DNA
ttaaaacagctctggggttgctcccacccacagggcccaatgggcgctagcacactagtattgaggtacttttgtgcgcctgttttatccaccctctccccacgtaacttagaagcaaaactcattcggtcaatagacagcccagtaagccaactgggcaatgaccaagcacttctgttccccggactgagtatcaatagactgctcacgcggttgaaggagaaatcgttcgttacccggccaattacttcgagaaacctagtaccaccatggagattgcgaagtgtttcgctccgcacaaccccagtgtagatcaggctgatgagtcaccgcattcctcacgggcgaccgtggcggtggctgcgctggcggcctgcccatggggcaacccatgggacgcttcaatattaacatggtgtgaagagtctattgagctaattggtagtcctccggcccctgaatgcggctaatcctaactgcggagcagacacccacacgccagtgggcagtctgtcgtaacgggaaactctgcagcggaaccgactactttgggtgtccgtgtttccttttattcttatactggctgcttatggtgacaattgaaagattgttaccatatagctattggattggccatccagtgacaaatcgagcgatcatttacttgtttgttggtttcgttccgctaaactttaaagttgtgaatactcttaactttattatagcacagaacacatcact

SEQ ID NO: 19529 - DNA, 822 bp, synthetic construct
  source 1..822: mol_type = other DNA
tttaaaacagcctgggggttgtacccacccctggggcccacgcggcgccagtactctggtacgctagtacctttgtacgcctgttttcccctcccttaaataaattaagattaccactactgaggggagtggtccgactccgctccggcactgccgcaccagtagactggtacgtctagtacccttctacggagtagatggtaccccccccctgaaacttagaagtatgcaaacaaaccgaccaataggcgcgtggcatccagtcacgttacggtcaagcacttctgtctccccggtccgaaaggatcgttacccgcccgacccactacgaaaagcctagtagtccgccaagtgtctgcgaagttgcgatcaaccacaaccccagtggtagctctggaagatggggctcgcgtttcccccgtggtaacacggtcgcctgcccgcgcgcgcttccgggttcggtcttgtgccgatcacttcaatgtcacgcaactgacgaagagcctattgtgctgggacggttttcctccggggccgtgaatgctgctaatcccaacctccgagcgtgtgcgcacaatccagtgttgctacgtcgtaacgcgtaagttggaggcggaacagactactttcggaaccccgtgtttcttattttacactttatcaatatatggtgacaattgctgaaatttgcgatctagcgactttaccactgaatattgcactgtactacttgattgcatttcacaaaacctctgacatccctagctcttatattgaacttttggtttatttgaatctgaaatataacttagaaagaacaaa

SEQ ID NO: 19530 - DNA, 725 bp, synthetic construct
  source 1..725: mol_type = other DNA
ttgttcccaccccagaggcccacgtggcggctagtacactggtatcacggtacctttgtacgcctgttttatactccctcccccgcaacttagaagcatacaattcaagctcaataggagggggtgcaagccagcacctccgtgggcaagcactactgtttccccggtgaggccgtatagactgttcccacggttgaaagcgtccgatccgttatccgctcatgtacttcgagaagcctagtatcgctctggaatcttcgacgcgttgcactcagcactcaaccccggagtgtagcttgggccgatgagtctggacagtccccactggcgacagtggtccaggctgcgctggcggcccacctgtggcctaaagccacgggacgctagtagtgaacagggtgtgaagagcctattgagctacatgagagtcctccggcccctgaatgcggctaatcctaaccatggagcaggcagctgcaacccagcagccagcctgtcgtaacgcgcaagtccgtggcggaaccgactactttgggtgtccgtgtttccttttattcttgaatggctgcttatggtgacaatcatagattgttatcataaagcgagttggattggccatccagtgtgaatcagattaattactcccttgtttgttggatccaatcccgaaacgttttactctttaacttattgaaattgtttgaagacaggatttcagtgtcaca

SEQ ID NO: 19531 - DNA, 730 bp, synthetic construct
  source 1..730: mol_type = other DNA
gggttgttcccacccacagggcccactgggcgccagcactctggtattgtggtaccttagtgcgcctgttttatacaccccttccctaaatgtaatttagatgcatgtaaacaaaggccaatagcaggcgcagcacaccagctgtgtctcggtcaagcacttctgttaccccggactgagtatcaataggctactcacgtggctgaaggagaaaacgttcgttatccggccaattacttcgagaaacctagtaataccatgaaggttgcgaagtgtttcgctcagcacaaccccagtgtagatcaggtcgatgagtcaccgcattccccacgggtgaccgtggcggtggctgcgctggcggcctgcccatgggattacccatgggacgcttcaatattgacatggtgtgaagagtctattgagctaattggtattcctccggcccctgaatgcggctaatcccaactgcggagcaggtacccacataccagtgggcagcctgtcgtaatgggcaactctgcagcggaaccgactactttgggtgtccgtgtttctctttattcttatactggctgcttatggtgacaattgagaaattgttgccatatagctattggattggccatccggtgacaaatagagcaattgtgcatccatttgttggttttatactattgtattacaaagttttaagtacccttaatcctattatatcattcaatacagcaaa

SEQ ID NO: 19532 - DNA, 743 bp, synthetic construct
  source 1..743: mol_type = other DNA
ttaaaacagccctgtgggttgtacccacccacagggcccaccgggcgctagcacactggtatctaggtacccttgtgcgcctgttttattcgccccaccccatcgtaacttagaagttgatcaataatggtcgttaggtagcccagcacgccagctgggtcttgaccaagcacttctgttaccccggaccgagtatcaatacgctgctcacgcggctgaaggagaaaacgttcgttacccggccaattacttcgagaagcctagtaccaccatgaaggttgcgcagcgtttcgctccgcacaaccccagtgtagatcaggccgatgagtcaccgcactcctcacgggcgaccgtggcggtgactgcgttggcggcctgcccatggggtgacccatgggacgcttcaatactgacatggtgcgaagagcctattgagctaattggtagtcctccggcccctgaatgcggctaatcctaactgcggagcagatacccacacaccagtgggcagtctgtcgtaacgggcaactctgcagcggaaccgactactttgggtgtccgtgtttccttttattctaatattggctgcttatggtgacaattgaaaaattgttaccatatagctattggattggccatccggtgacaaatagagcgattgtttacctgtttgttggtttcataccattaaatcttaaagtcttaaaaacccttgattttatactagcactcaattcagcaaa

SEQ ID NO: 19533 - DNA, 725 bp, synthetic construct
  source 1..725: mol_type = other DNA
ttgatcccacccacagggcccatagggcgttagcactctggtattgcggtacctttgtgcgcctgttttatattcccacccccaatcgcaacttagaagcagtacttcacgaccaacagtgggcgtgacacaccagccacgtctcggtcaagcacttctgtctccccggactgagtatcaataagctgctcacgcggctgaaggagaaaacgtccgttatccggccaattacttcgagaaacctagtaccgccatgaaagttgcgcagcgtttcgatccgcacaaccccagtgtagatcaggtcgatgagtcaccgcgttccccacgggtgaccgtggcggtggctgcgttggcggcctgcccatgggagaacccatgggacgcttcaatactgacatggtgtgaagagtctattgagctaattggtagccctccggcccctgaatgcggctaatcctaactgcggagcagattcccgcatgccagcgggtggtctgtcgtaacgggcaactctgcagcggaaccgactactttgggtgtccgtgtttccttttattcctgtatcggctgcttatggtgacaattgagagattgttaccatatagctattggattggccatccggtgacaaacagagcaattatttaccaatttattggttttgtaccattgaattttaacgtattcaaaactcttaaccttattttggctcttaatacagcaaa

SEQ ID NO: 19534 - DNA, 725 bp, synthetic construct
  source 1..725: mol_type = other DNA
ttgatcccacccacagggcccatagggcgttagcactctggtatcacggtacctttgtgcgcctgttttatattcccacccccaatcgcaacttagaagcagtacttcacgaccaacagtgggcgtgacacaccagccacgtctcggtcaagcacttctgtctccccggactgagtatcaataagctgctcacgcggctgaaggaaaaaacgtccgttatccggccaattacttcgagaaacctagtaccgccatgaaagttgcgcagcgtttcgatccgcacaaccccagtgtagatcaggccgatgagtcaccgcgttccccacgggtgaccgtggcggtggctgcgttggcggcctgcccatgggggaacccatgggacgcttcaatactgacatggtgtgaagagtctattgagctaattggtagccctccggcccctgaatgcggctaatcctaactgcggagcagattcccgcatgccagcgggtggtctgtcgtaacgggcaactctgcagcggaaccgactactttgggtgtccgtgtttccttttattcctatatcggctgcttatggtgacaattgagagattgttaccatatagctattggattggccatccggtgacaaacagagcaattatttaccaatttattggttttgtaccattgaattttaacgtattcaaaactcttaaccttattttggctcttaatacagcaaa

SEQ ID NO: 19535 - DNA, 725 bp, synthetic construct
  source 1..725: mol_type = other DNA
ttgatcccacccacagggcccatagggcgctagcactctggtattgcggtacctttgtgcgcctgttttatattcccacccccaatcgcaacttagaagcagtacttcacgaccaacagtgggcgtgacaaaccagccacgtctcggtcaagcacttctgtctccccggactgagtatcaataagctgctcacgcggctgagggagaaaacgtccgttatccggccaattacttcgagaaacccagtaccaccacgaaagttgcgcagcgtttcgatccgcacaaccccagtgtagatcaggtcgatgagtcaccgcgttccccacgggtgaccgtggcggtggctgcgttggcggcctgcccatgggggaacccatgggacgcttcaatactgacatggtgtgaagagtctattgagctaattggtagtcctccggcccctgaatgcggctaatcctaactgtggagcagattcccgcatgccagcgggtggtctgtcgtaacgggcaactctgcagcggaaccgactactttgggtgtccgtgtttccctttaatcctatattggctgcttatggtgacaattgagagattgttaccatatagctattggattggccatccggtgacaaacagagcaattatttaccaatttattggttttgtaccattgaatttcaacgcattcaaaactcttaaccttattttgactcttaatacagcaaa

SEQ ID NO: 19536 - DNA, 732 bp, synthetic construct
  source 1..732: mol_type = other DNA
gggttgttcccaccccagaggcccacgtggcggctagtactccggtatcacggtacccttgtacgcctgttttatactcccttccccgtaacttagaagtatacaagccaagttcaatagaagggggtacaaaccagtaccaccacgaacaagcacttctgtttccccggtgaagttgcatagattgttcccacggtcgaaagcgactgatccgttacccgctcatgtacttcgggaagcctagtatcaccttcggatcttcgatgcgttgcgctcagcactcaaccccagagtgtagcttaggtcgatgagtctggacaaacctcactggcgacagtggtccaggctgcgttggcggcctacctgtggcccaaagccacaggacgctagttgtgaacaaggtgtgaagagcctactgagctacatgagagtcctccggcccctgaatgcggctaatctcaaccacggagcaggtggtcacaaaccagtgatttgcctgtcgtaacgcgaaagtctgtggcggaaccgactactttgggtgtccgtgtttccttttactctcattatggctgcttatggtgacaatcctagattgttatcataaagcgagttggattggccatccggtgaaaatcaagcacatcatatatttgtttgttgggtttaaccctctgattgcacgcactcttggcttggttaggattattgtgtggaaaaggcaccatagttaca

SEQ ID NO: 19537 - DNA, 727 bp, synthetic construct
  source 1..727: mol_type = other DNA
tacccaccccagaggcccacgtggcggctagcactccggtattacggtacccttgtgcgcctgttttatactcccctcccgcaacttagaagcacgaaaccaagttcaatagaagggggtacaaaccagtaccactacgaacaagcacttctgtttccccggtgacattgcatagactgctcacgcggttgaaagtgatcgatccgttacccgcttgtgtacttcgagaagcctagtatcgccttggaatcttcgacgcgttgcgctcagcacccgaccccggggtgtagcttaggctgatgagtctggacattcctcaccggtgacggtggtccaggctgcgttggcggcctacctatggctaacgccataggacgttagatgtgaacaaggtgtgaagagcctattgagctacataagagtcctccggcccctgaatgcggctaatcctaaccacggagcaggcggtcgcgaaccagtgactggcttgtcgtaacgcgcaagtctgtggcggaaccgactactttgggtgtccgtgtttcctgttatttttatcatggctgcttatggtgacaatcagagattgttatcataaagcgaattggattggccatccggtgagtgttgtgtcaggtatacaactgtttgttggaaccactgtgttagctttacttctcatttaaccaattaatcaaaagcaacacgaggataaaacaacaatactaca

SEQ ID NO: 19538 - DNA, 724 bp, synthetic construct; identical to SEQ ID NO: 908
  source 1..724: mol_type = other DNA

SEQ ID NO: 19539 - DNA, 742 bp, synthetic construct
  source 1..742: mol_type = other DNA
ttaaaacagcctgtgggttgtacccacccacagggcccattgggcgctagcacactggtattccggtacccttgtgcgcctgttttatctacccttccctactgcaacttagaagttaaacagtcacggtcgataggcggttcagtaaaccaactggatcttgaccaagcacttctgttaccccggactgagtatcaataagctgcttacgtggctgaaggagaaaacgttcgttacccggccaattacttcgagaaacctagtaccaccatgaaggttgcgcagcgtttcgctccgcacaaccccagtgtagatcaggtcgatgagtcaccgcactcctcacgggcgaccgtggcggtggctgcgctggcggcctgcccatggggcaacccatgggacgcttcaatactgacatggtgcgaagagtctattgagctaattggtaatcctccggcccctgaatgcggctaatcccaactgcggagcaggtacccacacaccagtgggcagcctgtcgtaacgggcaactctgcagcggaaccgactactttgggtgtccgtgtttccttttattcctatactggctgcttatggtgacaattgaaagattgttaccatatagctattggattggccatccagtgacaaacagagcaattgtctatctatttgtcggttttgtaccaataaatttcaaagtcctaaaaaccctcaatttcatattgttacttaacacaacaag

SEQ ID NO: 19540 - DNA, 716 bp, synthetic construct
  source 1..716: mol_type = other DNA
ccccagaggcccacgtggcggctagtactccggtattgcggtacccttgtacgcctgttttatactcccttcccgtaacttagacgcacaaaaccaagttcaataggagggggtacaaaccagtaccaccacgaacaagcacttctgtttccccggtgatgttgtatagactgcttgcgtggttgaaagcgacggatccgtcatccgcttatgtacttcgagaagcccagtaccacctcggaatcttcgatgcgttgcgctcagcactcaaccccagagtgtagcttaggctgatgagtctggacatccctcaccggtgacggtggtccaggctgcgttggcggcctacctatggctaacgccatgggacgctagttgtgaacaaggtgtgaagagcctattgagctacataagaatcctccggcccctgaatgcggctaatcccaacctcggagcaggcggtcacaaaccagtgattggcctgtcgtaacgcgcaagtccgtggcggaaccgactactttgggtgtccgtgtttccttttattttattgtggctgcttatggtgacaatcacagattgttatcataaagcgaattggattggccatccggtgaaagtgagatttattatctatctgtttactggactcgctccattgagtgtgttcattctaagaataatctcaacagttattccaatcagacagttgtatcata

SEQ ID NO: 19541 - DNA, 716 bp, synthetic construct
  source 1..716: mol_type = other DNA
ccccagaggcccacgtggcggctagtactccggtattgcggtacccttgtacgcctgttttatactcccttcccgtaacttagacgcacaaaaccaagttcaataggagggggtacaaaccagtaccaccacgaacaagcacttctgtttccccggtgatgttgtatagactgcttgcgtggttgaaagcgacggatccgtcatccgcttatgtacttcgagaagcccagtaccacctcggaatcttcgatgcgttgcgctcagcactcaaccccagagtgtagcttaggctgatgagtctggacatccctcaccggtgacggtggtccaggctgcgttggcggcctacctatggctaacgccatgggacgctagttgtgaacaaggtgtgaagagcctattgagctacataagaatcctccggcccctgaatgcggctaatcccaacctcggagcaggcggtcacaaaccagtgattgacctgtcgtaacgcgcaagtccgtggcggaaccgactactttgggtgtccgtgtttccttttattttattgtggctgcttatggtgacaatcacagattgttatcataaagcgaattggattggccatccggtgaaagtgagatttattatctatctgtttactggactcgctccattgagtgtgttcattctaagaacaatctcaacagttattccagtcagacagttgtatcata

SEQ ID NO: 19542 - DNA, 716 bp, synthetic construct
  source 1..716: mol_type = other DNA
ccccagaggcccacgtggcggctagtactccggtattgcggtacccttgtacgcctgttttatactcccttcccgtaacttagacgcacaaaaccaagttcaataggagggggtacaaaccagtaccaccacgaacaagcacttctgtttccccggtgatgttgtatagactgcttgcgtggttgaaagcgacggatccgtcatccgcttatgtacttcgagaagcccagtaccacctcggaatcttcgatgcgttgcgctcagcactcaaccccagagtgtagcttaggctgatgagtctggacatccctcaccggtgacggtggtccaggctgcgttggcggcctacctatggctaacgccatgggacgctagttgtgaacaaggtgtgaagagcctattgagctacataagaatcctccggcccctgaatgcggctaatcccaacctcggagcaggcggtcacaaaccagtgattgacctgtcgtaacgcgcaagtccgtggcggaaccgactactttgggtgtccgtgtttccttttattttattgtggctgcttatggtgacaatcacagattgttatcataaagcgaattggattggccatccggtgaaagtgagatttattatctatctgtttactggactcgctccattgagtgtgttcattctaagaataatctcaacagttattccaatcagacagttgtatcata

SEQ ID NO: 19543 - DNA, 716 bp, synthetic construct
  source 1..716: mol_type = other DNA
ccccagaggcccacgtggcggctagtactccggtattgcggtacccttgtacgcctgttttatactcccttcccgtaacttagacgcacaaaaccaagttcaataggagggggtacaaaccagtaccaccacgaacaagcacttctgtttccccggtgatgttgtatagactgcttgcgtggttgaaagcgacggatccgtcatccgcttatgtacttcgagaagcccagtaccacctcggaatcttcgatgcgttgcgctcagcactcaaccccagagtgtagcttaggctgatgagtctggacatccctcaccggtgacggtggtccaggctgcgttggcggcctacctatggctaacgccatgggacgctagttgtgaacaaggtgtgaagagcctattgagctacataagaatcctccggcccctgaatgcggctaatcccaacctcggagcaggtggtcacaaaccagtgattgacctgtcgtaacgcgcaagtccgtggcggaaccgactactttgggtgtccgtgtttccttttattttattgtggctgcttatggtgacaatcacagattgttatcataaagcgaattggattggccatccggtgaaagtgagatttattatctatctgtttactggactcgctccattgagtgtgtttattctaagaataatctcaacagttattccaatcagacagttgtatcata

SEQ ID NO: 19544 - DNA, 716 bp, synthetic construct
  source 1..716: mol_type = other DNA
ccccagaggcccacgtggcggctagtactccggtattgcggtacccttgtacgcctgttttatactcccttcccgtaacttagacgcacaaaaccaagttcaataggagggggtacaaaccagtaccaccacgaacaagcacttctgtttccccggtgatgttgtatagactgcttgcgtggttgaaagcgacggatccgttatccgcttatgtacttcgagaagcccagtaccacctcggaatcttcgatgcgttgcgctcagcactcaaccccagagtgtagcttaggctgatgagtctggacatccctcaccggtgacggtggtccaggctgcgttggcggcctacctatggctaacgccatgggacgctagttgtgaacaaggtgtgaagagcctattgagctacataagaatcctccggcccctgaatgcggctaatcccaacctcggagcaggtggtcacaaaccagtgattgacctgtcgtaacgcgcaagtccgtggcggaaccgactactttgggtgtccgtgtttccttttattttattgtggctgcttatggtgacaatcacagattgttatcataaagcgaattggattggccatccggtgaaagtgagatttattatctatctgtttactggactcgctccattgagtgtgtttattctaagaataatctcaacagttattccaatcagacagttgtatcata

SEQ ID NO: 19545 - DNA, 716 bp, synthetic construct
  source 1..716: mol_type = other DNA
ccccagaggcccacgtggcggctagtactccggtattgcggtacccttgtacgcctgttttatactcccttcccgtaacttagacgcacaaaaccaagttcaataggagggggtacaaaccagtaccaccacgaacaagcacttctgtttccccggtgatgttgtatagactgcttgcgtggttgaaagcgacggatccgttatccgcttatgtacttcgagaagcccagtaccacctcggaatcttcgatgcgttgcgctcagcactcaaccccagagtgtagcttaggctgatgagtctggacatccctcaccggtgacggtggtccaggctgcgttggcggcctacctatggctaacgccatgggacgctagttgtgaacaaggtgtgaagagcctattgagctacataagaatcctccggcccctgaatgcggctaatcccaacctcggagcaggtggtcacaaaccagtgattgacctgtcgtaacgcgcaagtccgtggcggaaccgactactttgggtgtccgtgtttccttttattttattgtggctgcttatggtgacaatcacagattgttatcataaagcgaattggattggccatccggtgaaagtgagatttattatctatctgtttactggactcgctccattgagtgtgtttattctaagaatactctcaacagttattccaatcagacagttgtatcata

SEQ ID NO: 19546 - DNA, 716 bp, synthetic construct
  source 1..716: mol_type = other DNA
ccccagaggcccacgtggcggctagtactccggtattgcggtacccttgtacgcctgttttatactcccttcccgtaacttagacgcataaaaccaagttcaataggagggggtacaaaccagtaccaccacgaacaagcacttctgtttccccggtgatgttgtatagactgcttgcgtggttgaaagcgacggatccgtcatccgcttatgtacttcgagaagcccagtaccacctcggaatcttcgatgcgttgcgctcagcactcaaccccagagtgtagcttaggctgatgagtctggacatccctcaccggtgacggtggtccaggctgcgttggcggcctacctatggctaacgccatgggacgctagttgtgaacaaggtgtgaagagcctattgagctacataagaatcctccggcccctgaatgcggctaatcccaacctcggagcaggtggtcacaaaccagtgattgacctgtcgtaacgcgcaagtccgtggcggaaccgactactttgggtgtccgtgtttccttttattttattgtggctgcttatggtgacaatcacagattgttatcataaagcgaattggattggccatccggtgaaagtgagatttattatctatctgtttactggactcgctccattgagtgtgtttattctaagaataatctcaacagttattccaatcagacagttgtatcata

SEQ ID NO: 19547 - DNA, 716 bp, synthetic construct
  source 1..716: mol_type = other DNA
ccccagaggcccacgtggcggctagtactccggtattgcggtacccttgtacgcctgttttatactcccttcccgtaacttagacgcataaaaccaagttcaataggagggggtacaaaccagtaccaccacgaacaagcacttctgtttccccggtgatgttgtatagactgcttgcgtggttgaaagcgacggatccgtcatccgcttatgtacttcgagaagcccagtaccacctcggaatcttcgatgcgttgcgctcaacactcaaccccagagtgtagcttaggctgatgagtctggacatccctcaccggtgacggtggtccaggctgcgttggcggcctacctatggctaacgccatgggacgctagttgtgaacaaggtgtgaagagcctattgagctacataagaatcctccggcccctgaatgcggctaatcccaacctcggagcaggtggtcacaaaccagtgattgacctgtcgtaacgcgcaagtccgtggcggaaccgactactttgggtgtccgtgtttccttttattttattgtggctgcttatggtgacaatcacagattgttatcataaagcgaattggattggccatccggtgaaagtgagatttattatctatctgtttactggactctctccattgagtgtgtttattctaagaataatctcaacagttgttccaatcagacagttgtattaca

SEQ ID NO: 19548 - DNA, 742 bp, synthetic construct
  source 1..742: mol_type = other DNA
ttaaaacagcctgtgggttgatcccacccacagggcccattgggcgctagcactctggtatcacggtacctttgtgcgcctgttttataccccctcccccaactgtaacttagaagtaacacacgccgatcaacagtcagcgtggcacaccagccacgttttgatcaagcacttctgttaccccggactgagtatcaatagactgctcacgcggttgaaggagaaagcgttcgttatccggccaactacttcgaaaaacctagtaacaccgtggaagttgcagagtgtttcgctcagcactaccccagtgtagatcaggtcgatgagtcaccgcattccccacgggcgaccgtggcggtggctgcgttggcggcctgcccatggggaaacccatgggacgctctaatacagacatggtgcgaagagtctattgagctagttggtagtcctccggcccctgaatgcggctaatcctaactgcggagcacacaccctcaagccagagggcagtgtgtcgtaacgggcaaccctgcagcggaaccgactactttgggtgtccgtgtttcattttattcctgtactggccgcttatggtgacaattgagagattgttaccatatagctattggattggccatccggtgaccaatagagctattatatatctctttgttgggtttataccacttagcttgaaagaggttaaaacattacaattcattgttaagttgaatacagcaaa

SEQ ID NO: 19549 - DNA, 742 bp, synthetic construct
  source 1..742: mol_type = other DNA
ttaaaacagcctgtgggttgatcccacccacagggcccattgggcgctagcactctggtatcacggtacctttgtgcgcctgttttataccccctcccccaactgtaacttagaagtaacacacaccgatcaacagtcagcgtggcacaccagccacgttttgatcaagcacttctgttaccccggactgagtatcaatagactgctcacgcggttgaaggagaaagcgttcgttatccggccaactacttcgaaaaacctagtaacaccgtggaagttgcagagtgtttcgctcagcactaccccagtgtagatcaggtcgatgagtcaccgcattccccacgggcgaccgtggcggtggctgcgttggcggcctgcccatggggaaacccatgggacgctctaatacagacatggtgcgaagagtctattgagctagttggtagtcctccggcccctgaatgcggctaatcttaactgcggagcacacaccctcaagccagagggcagagtgtcgtaacgggcaactctgcagcggaaccgactactttgggtgtccgtgtttcattttattcctatactggctgcttatggtgacaattgagagattgttaccatatagctattggattggccatccggtgaccaatagagctattatatatctctttgttgggtttataccacttagcttgaaagaggttaaaacattacaattcattgttaagttgaatacagcaaa

SEQ ID NO: 19550 - DNA, 727 bp, synthetic construct
  source 1..727: mol_type = other DNA
ttcccaccccagaggcccacgtggcggctagtacactggtattacggtacccttgtacgcctgttttacaccccctttcccccgtaacttagaagttttaaattcaagttcaacagtcagtggtacaacccagtactactacgaacaagcacttctgttaccccggtgagattgcataggctgttcccacggctaaaagcgattgatccgttatccgctcttgtacttcgagaagcctagtaagaccttgggatcctcgatgcgttgcgttcaacactcaaccccagagtgtagcttgggctgatgagtctggacattccccaccggtgacggtggtccaggctgcgttggcggcctacctgtggcccaaagccacaggacgctagttgtgaacaaggtgtgaagagcctattgagctacaagagagtcctccggcccctgaatgcggctaatcccaaccacggagcaggcgattgcaacccagcaactagcctgtcgtaacgcgcaagtctgtggcggaaccgactactttgggtgtccgtgtttccttttattacataatggctgcttatggtgacaatcacagattgttgtcataaagcgaattggattggccatccggtgagaattaaaacaatcatttatttatttgttggatttgttcctatacacacccaaacactttgcttgattgaagtaattctgttgataagacaacactattata

SEQ ID NO: 19551 - DNA, 727 bp, synthetic construct
  source 1..727: mol_type = other DNA
ttcccaccccagaggcccacgtggcggctagtacactggtatcacggtacccttgtacgcctgttttacaccccctttcccccgtaacttagaagttttaaattcaagttcaacagtcagtggtacaacccagtactattacgaacaagcacttctgttaccccggtgagattgcataggctgtccccacggctaaaagcgattgatccgttatccgctcttgtacttcgagaagcctagtaagaccttgggatcctcgatgcgttgcgttcaacactcaaccccagagtgtagcttgggctgatgagtctggacattccccaccggtgacggtggtccaggctgcgttggcggcctacctgtggcccaaagccacaggacgctagttgtgaacaaggtgtgaagagcctattgagctacaagagagtcctccggcccctgaatgcggctaatcccaaccacggagcaggcgattgcaacccagcaactagcctgtcgtaacgcgcaagtctgtggcggaaccgactactttgggtgtccgtgtttccttttattacataatggctgcttatggtgacaatcacagattgttgtcataaagcgaattggattggccatccggtgagaattaaaacaatcatttatttatttgttggatttgttcctatacacacccaaacactttgcttgattgaagtaattctgttgataagacaacactattata

SEQ ID NO: 19552 - DNA, 727 bp, synthetic construct
  source 1..727: mol_type = other DNA
ttcccaccccagaggcccacgtggcggctagtacactggtatcacggtacccttgtacgcctgttttacaccccctttcccccgtaacttagaagttttaaattcaagttcaacagtcagtggtacaacccagtactactacgaacaagcacttctgttaccccggtgagattgcataggctgtccccacggctaaaagcgattgatccgttatccgctcttgtacttcgagaagcctagtaagaccttgggatcctcgatgcgttgcgttcaacactcaaccccagagtgtagcttgggctgatgagtctggacattccccaccggtgacggtggtccaggctgcgttggcggcctacctgtggcccaaagccacaggacgctagttgtgaacaaggtgtgaagagcctattgagctacaagagagtcctccggcccctgaatgcggctaatcccaaccacggagcaggcgattgcaacccagcaactagcctgtcgtaacgcgcaagtctgtggcggaaccgactactttgggtgtccgtgtttccttttattacataatggctgcttatggtgacaatcacagattgttgtcataaagcgaattggattggccatccggtgagaattaaaacaatcatttatttatttgttggatttgttcctatacacacccaaacactttgcttgattgaagtaattctgttgataagacaacactattata

SEQ ID NO: 19553 - DNA, 722 bp, synthetic construct
  source 1..722: mol_type = other DNA
ttcccaccccagaggcccacgtggcggctagtacactggtatcacggtacctttgtacgcctgttttataccccctcccccgcaacttagaagcatacaattcaagctcaataggagggggtgcaagccagcgcctccgtgggcaagcactactgtttccccggtgaggccgcatagactgttcccacggttgaaagtgtccgatccgttatccgcccatgtacttcgagaagcctagtatcgctctggaatcttcgacgcgttgcgctcagcactcaaccccggagtgtagcttgggccgatgagtctggacagtccccactggcgacagtggtccaggctgcgctggcggcccacctgtggcccaaagccacaggacgctagttgtgaacagggtgtgaagagcctattgagctacatgggagtcctccggcccctgaatgcggctaatcctaaccatggagcaggcagctgcaacccagcagccagcctgtcgtaacgcgcaagtccgtggcggaaccgactactttgggtgtccgtgtttccttttattcttgaatggctgcttatggtgacaatcatagattgttatcataaagcgagttggattggccatccagtgtgaatcagattaattactcccttgtttgttggatccactccccaaacgttttattccttaacttattgaaattgtttgaagacaggatttcagtgtcaca

SEQ ID NO: 19554 - DNA, 722 bp, synthetic construct
  source 1..722: mol_type = other DNA
ttcccaccccagaggcccacgtggcggctagtacactggtatcacggtacctttgtacgcctgttttatactccctcccccgcaacttagaagcaaacaattcaagctcaataggagggggtgcaagccagcgcctccgtgggcaagtactactgtttccccggtgaggccgcatagactgttcccacggttgaaagtgtccgatccgttatccgctcatgtacttcgagaagcctagtatcgctctggaatcttcgacgcgttgcgctcagcactcaaccccggagtgtagcttgggccgatgagtctggacagtccccactggcgacagtggtccaggctgcgctggcggcccacctgtggcccaaagccacgggacgctagttgtgaacagggtgtgaagagcctattgagctacatgagagtcctccggcccctgaatgcggctaatcctaaccatggagcaggcagctgcaacccagcaaccagcctgtcgtaacgcgcaagtccgtggcggaaccgactactttgggtgtccgtgtttccttttattcttgaatggctgcttatggtgacaatcatagattgttatcataaagcgaattggattggccatccagtgtgaatcagattaattactcccctgtttgttggatccactcccgaaacgttttactccttaacttattgaaattgtttgaagacaggatttcagtgtcaca

SEQ ID NO: 19555 - DNA, 722 bp, synthetic construct
  source 1..722: mol_type = other DNA
ttcccaccccagaggcctacgtggcggctagtacactggtatcacggtacctttgtacgcctgttttatactccctcccccgcaacttagaagcatacaattcaagctcaataggagggggtgcaagccagcgcctccgtgggcaagcactactgtttccccggtgaggccgcatagactgttcccacggttgaaagtgtccgatccgttatccgctcatgtacttcgagaagcctagtatcgctctggaatcttcgacgcgttgcgctcagcactcaaccccggagtgtagcttgggccgatgagtctggacagtccccactggcgacagtggtccaggctgcgctggcggcccacctgtggcccaaagccacgggacgctagttgtgaacagggtgtgaagagcctattgagctacatgagagtcctccggcccctgaatgcggctaatcctaaccatggagcaggcagctgcaacccagcagccagcctgtcgtaacgcgcaagtccgtggcggaaccgactactttgggtgtccgtgtttccttttattcttgaatggctgcttatggtgacaatcatagattgttatcataaagcgagttggattggccatccagtgtgaatcagattaattactcccttgtttgttggatccactcccgaaacgttttactccttaacttattgaaattgtttgaagacaggatttcagtgtcaca

SEQ ID NO: 19556 - DNA, 743 bp, synthetic construct
  source 1..743: mol_type = other DNA
ttataacagcctgtgggttgtacccacccagagggcccaccgggcgctagcagggtggtatctcggtacctttgtgcgcctgttttatccgcccttctcccatttaatttagaagcacgcgccaagacggtcaatagggagcccagtaagccaattgggccatgaccaagcacttctgtaaccccgggccgagtatcaataagctgctcgcgcggctgaaggagaaaaagctcgttacccggccaattacttcgagaagcccagtagcatcatgaaagttgcgcagtgtttcgctccgcacaaccccagtgtagatcaggccgatgagtcaccgcgttccccacgggtgaccgtggcggtggctgcgctggcggcctgcccatggggccacccatgggacgcttcaatactgacatggtgtgaagagtctattgagctaattggtagtcctccggcccctgaatgcggctaatcctaactgcggagcagatgcccacgcaccagtgggaagtctgtcgtaatgggtaactctgcagcggaaccgactactttgggtgtccgtgtttccttttatttctactctggctgcttatggtgacaattgaaaggttgttaccatatagctattggattggccatccggtgacaaatagagcgattatttacttgtttgttgggtttgtgccactgaactacaaagctttaaacactcttaactacattttaatccttaactcattaaa

SEQ ID NO: 19557 - DNA, 821 bp, synthetic construct; identical to SEQ ID NO: 1274
  source 1..821: mol_type = other DNA

SEQ ID NO: 19558 - DNA, 743 bp, synthetic construct
  source 1..743: mol_type = other DNA
ttataacagcctgtgggttgtacccacccacagggcccaccgggcgctagcacactggtatctcggtacctttgtgcgcctgttttatccgcccttctcccatttaatttagaagcacgcgccaagacggtcaatagggagcccagtaagccaattgggccatgaccaagcacttctgtaaccccgggccgagtatcaataagctgctcgcgcggctgaaggagaaaaagctcgttacccggccaattacttcgagaagcccagtagcatcatgaaagttgcgcagtgtttcgctccgcacaaccccagtgtagatcaggccgatgagtcaccgcgttccccacgggtgaccgtggcggtggctgcgctggcggcctgcccatggggccacccatgggacgcttcaatactgacatggtgtgaagagtctattgagctaattggtagtcctccggcccctgaatgcggctaatcctaactgcggagcagatgcccacgcaccagtgggaagtctgtcgtaatgggtaactctgcagcggaaccgactactttgggtgtccgtgtttccttttatttctactctggctgcttatggtgacaattgaaaggttgttaccatatagctattggattggccatccggtgacaaatagagcgattatttacttgtttgttgggtttgtgccactgaactacaaagctttaaacactcttaactacattttaatccttaactcattaaa

SEQ ID NO: 19559 - DNA, 743 bp, synthetic construct
  source 1..743: mol_type = other DNA
ttataacagcctgtgggttgtacccacccagagggcccaccgggcgctagcacactggtatctcggtacctttgtgcgcctgttttatccacccttctcccatttaatttagaagcacgcgccaagacggtcaatagggagcccagtaagccaattgggccatgaccaagcacttctgtaaccccgggccgagtatcaataagctgctcgcgcggctgaaggagaaaaagctcgttacccggccaattacttcgagaagcccagtagcatcatgaaagttgcgcagtgtttcgctccgcacaaccccagtgtagatcaggccgatgagtcaccgcgttccccacgggtgaccgtggcggtggctgcgctggcggcctgcccatggggccacccatgggacgcttcaatactgacatggtgtgaagagtctattgagctaattggtagtcctccggcccctgaatgcggctaatcctaactgcggagcagatgcccacgcaccagtgggaagtctgtcgtaatgggtaactctgcagcggaaccgactactttgggtgtccgtgtttccttttatttctactctggctgcttatggtgacaattgaaaggttgttaccatatagctattggattggccatccggtgacaaatagagtgattatttacttgtttgttgggtttgtaccattgaactacaaagctttaaacacttttaactacattttaatccttaactcattaaa

SEQ ID NO: 19560 - DNA, 743 bp, synthetic construct
  source 1..743: mol_type = other DNA
ttataacagcctgtgggttgtacccacccagagggcccaccgggcgctagcacactggtatctcggtacctttgtgcgcctgttttatccgcccttctcccatttaatttagaagcacgcgccaagacggtcaatagggagcccagtaagccaattgggccatgaccaagcacttctgtaaccccgggccgagtatcaataagctgctcgcgcggctgaaggagaaaaagctcgttacccggccaattacttcgagaaacccagtagcaccatgaaagttgcgcagtgtttcgctccacacaaccccagtgtagatcaggccgatgagtcaccgcgttccccacgggtgaccgtggcggtggctgcgctggcggcctgcccatggggccacccatgggacgcttcaatactgacatggtgtgaagagtctattgagctaattggtagtcctccggcccctgaatgcggctaatcctaactgcggagcagatgcccacgcaccagtgggaagtctgtcgtaacgggtaactctgcagcggaaccgactactttgggtgtccgtgtttccttttatttctactctggctgcttatggtgacaattgaaaggttgttaccatatagctattggattggccatccggtgacaaatagagcgattatttacttgtttgttgggtttgtaccactgaactacaaagctttgaacactctttactacattttaatccttaactcattgaa

SEQ ID NO: 19561 - DNA, 743 bp, synthetic construct
  source 1..743: mol_type = other DNA
ttataacagcctgtgggttgtacccacccacagggcccaccgggcgctagcacactggtatctcggtacctttgtgcgcctgttttatccacccttctcccatttaatttagaagcacgcgccaagacggtcaatagggagcccagtaagccaattgggccatgaccaagcacttctgtaaccccgggccgagtatcaataagctgctcgcgcggctgaaggagaaaaagctcgttacccggccaattacttcgagaagcccagtagcatcatgaaagttgcgcagtgtttcgctccgcacaaccccagtgtagatcaggccgatgagtcaccgcgttccccacgggtgaccgtggcggtggctgcgctggcggcctgcccatggggccacccatgggacgcttcaatactgacatggtgtgaagagtctattgagctaattggtagtcctccggcccctgaatgcggctaatcctaactgcggagcagatgcccacgcaccagtgggaagtctgtcgtaatgggtaactctgcagcggaaccgactactttgggtgtccgtgtttccttttatttctactctggctgcttatggtgacaattgaaaggttgttaccatatagctattggattggccatccggtgacaaatagagcgattatttacttgtttgttgggtttgtaccactgaactacaaagctttaaacactcttaactacattttaatccttaactcgttaaa

SEQ ID NO: 19562 - DNA, 743 bp, synthetic construct; identical to SEQ ID NO: 1046
  source 1..743: mol_type = other DNA

SEQ ID NO: 19563 - DNA, 743 bp, synthetic construct
  source 1..743: mol_type = other DNA
ttaaaacagcttgtgggttgttcccacccacagggcccactgggcgctagcacactggtatctcggtacctttgtgcgcctgttttatccacccttttcccatttaacttagaagcacgcgccaagacggtcaatagggagcccagtaagccaattgggctatgaccaagcacttctgtaaccccgggccgagtatcaataagctgctcgcgcggctgaaggagaaaaagctcgttacccggccaattacttcgagaaacctagtagcatcatgaaagttgcgcagtgtttcgctccacacaaccccagtgtagatcaggccgatgagttaccgcgttccccacgggtgaccgtggcggtggctgcgctggcggcctgcccatggggccacccatgggacgcttcaatactgacatggtgtgaagagtctattgagctaattggtagtcctccggcccctgaatgcggctaatcctaactgcggagcagatgcccacgtaccagtgggaagtctgtcgtaacgggtaactctgcagcggaaccgactactttgggtgtccgtgtttccttttatttctactctggctgcttatggtgacaattgaaaggttgttaccatatagctattggattggccatccggtgtcaaatagagcgattatttacttgtttgttgggtttgtaccactggactacaaagctttaaacactcttgactacattttaatccttaactcattaaa

SEQ ID NO: 19564 - DNA, 743 bp, synthetic construct
  source 1..743: mol_type = other DNA
ttataacagcctgtgggttgttcccacccacagggcccaccgggcgctagcacaccggtatctcggtacctttgtgcgcctgttttatccacccttttcccatttaacttagaagcacgcgccaagacggtcaatagggagcccagtaaaccaattgggctatgaccaagcacttctgtaaccccgggccgagtatcaataagctgctcacgcggctgaaggagaaaaagctcgttacccggccaattacttcgagaaacccagtagcatcatgaaagttgcgcagcgtttcgctccacacaaccccagtgtagatcaggccgatgagccaccgcgttccccacgggtgaccgtggcggtggctgcgctggcggcctgcccatggggccacccatgggacgcttcaatactgacatggtgtgaagagtctattgagctaattggtagtcctccggcccctgaatgcggctaatcctaactgcggagcagatgcccacgcaccagtgggaagtctgtcgtaacgggtaactctgcagcggaaccgactactttgggtgtccgtgtttccttttatttttactctggctgcttatggtgacaattgaaaggttgttaccatatagctattggattggccatccggtgtcaaatagagcgattatttacttgtttgttgggtttgtgccactgaactacaaagttttgaacactcttaactacattctaatccttaacttattaaa

SEQ ID NO: 19565 - DNA, 743 bp, synthetic construct
  source 1..743: mol_type = other DNA
ttataacagcctgtgggttgttcccactcacagggcccaccgggcgctagcacaccggtatctcggtacctttgtgcgcctgttttatccacccttttcccatttaacttagaagcacgcgccaagacggtcaatagggagcccagtaaaccaattgggctatgaccaagcacttctgtaaccccgggccgagtatcaataagctgctcacgcggctgaaggagaaaaagctcgttacccggccaattacttcgagaaacccagtagcatcatgaaagttgcgcagcgtttcgctccacacaaccccagtgtagatcaggccgatgagccaccgcgttccccacgggtgaccgtggcggtggctgcgctggcggcctgcccatggggccacccatgggacgcttcaatactgacatggtgtgaagagtctattgagctaattggtagtcctccggcccctgaatgcggctaatcctaactgcggagcagatgcccacgcaccagtgggaagtctgtcgtaacgggtaactctgcagcggaaccgactactttgggtgtccgtgtttccttttatttttactctggctgcttatggtgacaattgaaaggttgttaccatatagctattggattggccatccggtgtcaaatagagcgattatttacttgtttgttgggtttgtgccactgaactacaaagttttgaacactcttaactacattctaatccttaacttattaaa

SEQ ID NO: 19566 - DNA, 742 bp, synthetic construct
  source 1..742: mol_type = other DNA
ttaaaacagcctgtgggttgttcccacccacagggcccactgggcgccagcacactggtatcacggtacctttgtgcgcctgttttatccacccttccccaatgtaacttagaagtaaaactagaaagatcaatagcaagcacagtatgccaactgtgttatgatcaagcacttctgttaccccggactgagtatcaataagctgctaaagcggctgaaggagaaaacgttcgttacccggccaactacttcgagaaacccagtaccaccatgaaggttgcgcagtgtttcgctccacacaatcccagtgtagatcaggtcgatgagtcaccgcgttccccacgggcgaccgtggcggtggctgcgttggcggcctgcccatgggatgacccatgggacgcttcaatactgacatggtgcgaagagtctattgagctagttggtagtcctccggcccctgaatgcggctaatcctaactgcggagcagatacccacacaccagtgggcagtctgtcgtaacgggtaactctgcagcggaaccgactactttgggtgtccgtgtttctttttatcctcaaattggctgcttatggtgacaattgataagttgttaccatatagctattggattggccatccggtgtctaacagagctattgtttatttatttgttggtttcgtgccactaaattacaaagtttttgaaactctcaacttcattttgacactcaataaagcaaa

SEQ ID NO: 19567 - DNA, 742 bp, synthetic construct; identical to SEQ ID NO: 1013
  source 1..742: mol_type = other DNA

SEQ ID NO: 19568 - DNA, 743 bp, synthetic construct
  source 1..743: mol_type = other DNA
ttaaaacagcctgtgggttgtccccatccacagggcccaccgggcgctagcacactggtatctcggtacctttgtgcgcctgttttatccacccttttcccatccaacttagaagcacgcaccaaaacggtcaataggaagcctagtaagccaactgggttttgaccaagcacttctgtttccccggaccgagtatcaataggctgctcgcgcggctgaaggagaaaacgttcgttacccggccaattacttcgagaaacccagtagcaccatgaaggttgcgcagtgtttcgctccgcacatccccagtgcagatcaggccgatgagccaccgcgtcccccacgggcgaccgtggcggtggctgcgttggcggcctgcccatgggaccacccatgggacgcttcaatactgacatggtgtgaagagtctattgagctaattggtagtcctccggcccctgaatgcggctaatcctaactgcggagcagatgcccacacaccagtgggaagtctgtcgtaatgggtaactctgcagcggaaccgactactttgggtgtccgtgtttccttttattcttactctggctgcttatggtgacaattgaaaggttgttaccatatagctattggattggccacccggtgacaagtaaagcgattatttatttgtttgttgggtttgtaccactgaactataaggctttaaacactcttaacttcattctaatccttaattcactaaa

SEQ ID NO: 19569 - DNA, 820 bp, synthetic construct
  source 1..820: mol_type = other DNA
ttaaaacagcctgggggttgtacccacccctggggcccacgtggcgccagtactctggttcgcttagaacctttgtacgcctgttttcccctcccttaaacaaattaagatctctgccaatgtggggagtagcccgactccgcaccgatacgtcgcaccagcagactggttcgcttagaacctttctgcggattggtatgaggcccccccccgaaacttagaagtaagtacaaaccgaccaataggtgcgcggcagccagccgtgtaaaggtcaagcacttctgtttccccggccagaaatggtcgttacccgccctacccactacgagaagcctagtaactacccaaacaagtgaggagttgcgttcatccacaaccccagtggtagctctgagagatggggctcgcatcttccccccgtggtaacacggttgcttgcccgcgcgtgctctcgggttcagcccaatggctgttcactccgatcttgatgtaacctagccaagagcctattgtgctgggaaggttttcctccggagccgtgaatgctgctaatcccaacctccgagcgcgtgcgcacaatccagtgttgctgcgtcgtaatgcgtaagttggaggcggaacagactactttcggtactccgtgtttccttttattcatttattgattttatggtgacattgacagatattgttcagtttgctcgattaccactgaatattgctttgtattacctcgtagcattcaacaggaccacagaactcacccttgagctcattgacttcgctgtttatttgaatcaaatacataaatcctgtaaac

SEQ ID NO: 19570 - DNA, 737 bp, synthetic construct
  source 1..737: mol_type = other DNA
cagcctgggggttgtacccacccacagggcccactgggcgctagcacaccggtatcacggtacccttgtgcgcctgttttatccacccctccccaacgtaacctagaagcataactcaaacggtcaacagttagctcagtaagccaactgagctctgaccaagcacttctgttaccccggactgagtatcaataagctgctcacgcggccgaaggagaaaacgttcgttacccggccaattacttcgagaaacctagtaccaccatgaaggttgcgcaacgtttcgctcagcacaaccccagtgtagatcaggtcgatgagtcaccgcgttccccacgggcgaccgtggcggtggctgcgctggcggcctgctcatggggcaacccatgagacgcttcaatactgacatggtgcgaagagtctattgagctaattggtagtcctccggcccctgaatgcggctaatcccaactgcggagcagatacccacgcaccagtgggcagtctgtcgtaacgggcaactctgcagcggaaccgactactttgggtgtccgtgtttctttttatccttatatttggctgcttatggtgacaattgagagattgttgccatatagctattggattggccatccggtgacgaacagagctattgtttacctgttcatcggttttataccattgaattataaagttttaaacactctaaattttatcttactactaaatacatcaaa

SEQ ID NO: 19571 - DNA, 744 bp, synthetic construct
  source 1..744: mol_type = other DNA
ttaaaacagcctgtgggttgtacccacctacagggcccactgggcgtcagcacactggtatcccggtacctttgtgcgcctgttttatattccccaccccacgttgtaacttagaagcaatgcaatttcggtcagtagtagacgcggcaacccagtcgtgtttcgaccaagcacttctgtaaccccggaccgagtatcaataagctgctcgcgcggctgaaggagaaaccgttcgttacccggctaactacttcgagaagcctactaacaccatgaacgttgcagagtgtttcactcagcacttcccccgtgtagatcaggtcgatgagtcaccgcgatccccacgggcgaccgtggcggtggctgcgttggcggcctgcctgtggggcaacccacaggacgctctaatacagacatggtgcgaagagcctattgagctagttagtagtcctccggcccctgaatgcggctaatcctaactgcggagcacatgcccacaaaccagtgggtggtgtgtcgtaacgggcaactctgcagcggaaccgactactttgggtgtccgtgtttctttttattctcatactggctgcttatggtgacaattgaaagattgttgccatatagctattggattagccatccggtgtcaaacagagcaattatttacctattcgttggttttgcacccttgaattttaaggttcttaaaacacttaatctcatattaaaactcaattcagcaaa

SEQ ID NO: 19572 - DNA, 819 bp, synthetic construct
  source 1..819: mol_type = other DNA
ttaaaacagcctgggggttgtacccacccccggggcccacgcggcgctagtactctggttcgtttagaacccttgtacgcctgtttttccccccttaaataaattaagatctctgccaatgtggggagtagtccgactccgcaccgatacgtcgcaccagcagaccggttcgcctaggacccttatgcggattggtatgagtcccccccccgaaacttagaagcacattacaaactggccaataggagcgtggtatccaaccgcgttgcggtcaagcacttctgtttccccggtcagaaatgatcgttacccgccctccccactacgagaagcctattaaccactgaaagtgatgatgagttgcgctcagccacaaccccggtggtagctctgagagatggggctcgcaccacccccgtggtgacacggttgcttgcccgcgtgtgctctcgggttcagtcgcgagactgttcactctgactcattgtaggtggccaagagcctattgtgctggggaggttttcctccggagccgtgaatgctgctaatcccaacctccgagcgtgtgcgcacaatccagtgttgctacgtcgtaacgcgtaagttggaggcggaacagactactttcggtactccgtgtttccttaattttattgttcaaatttatggtgacattgtctgacatttgtgaattcgctcgcctgccacttaatatcgctttatatcatctgatagcattccataagactacagaactcactttggaactcatcgactttgctgttttcctgaatactgttcacaaccaaacaaaacaaa

SEQ ID NO: 19573 - DNA, 724 bp, synthetic construct
  source 1..724: mol_type = other DNA
tgttcccacccacggggtccactgggcgctagcacactggtatcacggtacctttgtgcgcctgttttatccaccctccccccacgtaacttagaagcaaaacctacccggtcaacagacaactcagtgagccaactgagcaatgaccaagcacttctgttaccccggaccaagtatcaatagactgctggcgcggttgaaggagaaaacgtccgttacccggccaattacttcgagaaacctagtaccaccatggaggttgcgcagtgtttcgctccgcacatccccagtgtagatctggccgatgagccaccgcactccccacgggtgaccgtggcggtggctgcgctggcggcctgcccatggggcaacccatgggacgcttcaatactgacatggtgcgaagagtctattgagctaattggtaatcctccggcccctgaatgcggctaatcctaactgcggagcagatacccacgtgccagtgggcagtctgtcgtaacgggcaactctgcagcggaaccgactactttgggtgtccgtgtttccttttattcttacattggctgcttatggtgacaattgaaagattgttaccatatagctattggattggccatccggtgacaaatagagcgatcatttatttgtttgttggctttgttccattgaacctcaaagttttgaacactcttaactttattatatcactcaacacaacaaa

SEQ ID NO: 19574 - DNA, 741 bp, synthetic construct
  source 1..741: mol_type = other DNA
ttaaaacagcctgtgggttgctcccacccacagggcccaatgggcgctagcacactagtattacggtacttttgtgcgcctgttttatccctcacccccgatgtaacttagaagcataattaaagcggtcaatagaaagctcagtaatccaactgagtgccgaccaagcacttctgttaccccggaccgagtatcaataagctgttcgcgcggctgaaggagaaaacgttcgttacccggccaattacttcgagaaacctagtaacaccatgaaagttgcgtagtgtttcgctccgcacaaccccagtgtagatcaggtcgatgagtcaccgcaatccccacgggcgaccgtggcggtggctgcgttggcggcctgcccatggggcaacccatgggacgcttcaatactgacatggtgtgaagagtctattgagctaattggtagtcctccggcccctgaatgcggctaatcccaactgcggagcagacgctcgcatgccagcgagtagtctgtcgtaacgggcaactctgcagcggaaccgactactttgggtgtccgtgtttccctttatttttatattggctgcttatggtgacaattgaaagattgttaccatatagctattggattggccatccggtgacaaacagagcgatcatctactcttttgttgggttcgttccattgaatcacaaggtattgaacacactcaatttcattttaacccttaatacactaag

SEQ ID NO: 19575 - DNA, 717 bp, synthetic construct
  source 1..717: mol_type = other DNA
cacccacagggcccactgggcgctagcacactggtattacggtacctttgtgcgcctgttttatacacccttaccctacgtaacatagaagcaaaacaacaaggtcaatagagagcccagtgagccaactgggtcgagaccaagcacttctgtttccccggaccgagtatcaataggctgcttacgcggctgaaggagaaaacgttcgttacccggctaactacttcgaaaaacctagtaacgccatggaagttgcgaaccgtttcgctcggcacttccccagtgtagatcaggtcgatgagtcaccgcattccccacgggcgaccgtggcggtggctgcgttggcggcctgcctatggggcaacccataggacgcttcaatatggacatggtgtgaagagtctattgagctagttagtagtcctccggcccctgaatgcggctaatcctaactgcggagcacatgcccccaacccaggaggtggtgtgtcgtaatgggtaactctgcagcggaaccgactactttgggtgtccgtgtttccttttatcccaatgttggctgcttatggtgacgattgaaaggttgttaccatatagctattggattggccatccggtgactaacagagcaattgtatacctattcattggttacattccattaaatctcaaggaattaacgactctcaattacattttgctcttgaattctgcaaa

SEQ ID NO: 19576 - DNA, 742 bp, synthetic construct
  source 1..742: mol_type = other DNA
taaaacagcctgtgggttgttcccacccacagggcccacagggcgccagcacactggtatcacggtacctttgtgcgcctgttttatgcaccctcaccctcaatgtaacttagaagtacagccaagcggtcaatagaagcttagtaatccaactgagctctgaccaagcacttctgttgccccggaccgagtatcaataagctgctcgcgcggctgaaggagaaaacgttcgttatccggccaattacttcgagaaacctagtaacgccatgaaagttgcgcagtgtttcgctccgcacaaccccagtgtagatcaggtcgatgagtcaccgcaaaccccacgggcgaccgtggcggtggctgcgttggcggcctgcccatggggcaacccatgggacgcttcaatactgacatggtgtgaagagtctattgagctagttggtagtcctccggcccctgaatgcggctaatcctaactgcggagcagacgcttgcataccagcgagtagtctgtcgtaacgggcaactctgcagcggaaccgactactttgggtgtccgtgtttccttttatcttttacattggctgcttatggtgacaattgaaagattgttgccatatagctattggattggccatccggtgacaaacagagcgatcatctattctttcgttgggttcgttccattgaatcacgaggtattgaatacactcaacctcattctaacccttaatacactaaa

SEQ ID NO: 19577 - DNA, 744 bp, synthetic construct
  source 1..744: mol_type = other DNA
ttaaaacagcctgtgggttgtacccacccacagggcccactgggcgctagcacactggtatcacggtacctttgtgcgcctgttttataccccctaccccaactttaaacttagaagcaaagcaaacccgatcaatagcagatgtagcaagccagttgcatcttgatcaagtacttctgtctccccggactgagtatcaatagactgctcacgcggttgaaggagaaaacgttcgttacccgaccaactacttcgagaaacctagtaacaccatgaaagtagcagggtgtttcgatcagcacaaccccagtgtagatcaggctgatgagtcaccgcatcccccacgggcgaccgtggcggtggctgcgctggcggcctgcccatggggcaacccatgggacgctctaatatggacatggtgtgaagagtctattgagctagttggtagtcctccggcccctgaatgcggctaatcctaactgcggagcacataccccaaagccaaggggcagtgtgtcgtaacgggcaactctgcagcggaaccgactactttgggtgtccgtgtttccttttattctcaaactggctgcttatggtgacaatctcagagttgttaccatatagctattggattggccatccggtgagcaacagagcaattgtctaccaatttgttggatttattccactcaatctagcggttttcagaacattgaattatattctaaccctcaacaagacgaa

SEQ ID NO: 19578 - DNA, 742 bp, synthetic construct
  source 1..742: mol_type = other DNA
ttaaaacagcctgtgggttgttcccacccacagggcccactgggcgctagcacactggtattacggtacctttgcgcgcctgttttatctaccctccccctacgtaacttagaagtataagcccaaaggtcaacaggtaactcagcacgccagctgagttgtgaccaagcacttctgtaaccccggaccgagtatcaataagctgctcacgcggctgaaggagaaaacgttcgttacccgaccaattacttcgagaaacccagtaccaccatgaaagttgcgcggcgtttcgctccgcacaaccccagtgcagatcaggccgatgagtcaccgcactcctcacgggtgaccgtggcggtggctgcgctggcggcctgcccatggggtaacccatgggacgcttcaatactgacatggtgcgaagagtctattgagctaattggtagtcctccggcccctgaatgcggctaatcctaaccgcggagcaggcactcacacgccagtgagcagtctgtcgtaatgggcaactctgcggcggaaccgactactttgggtgaccgtgtttccttttattcttacattggctgcttatggtgacaattgataaattgttaccatatagctattggattggccatccggtgacaaacagagcaataatttactcgtttgttggctttgtaccactaaactataaagtgttaaatactctcaactttatcctaaaactcaacaaagcaaa

SEQ ID NO: 19579 - DNA, 742 bp, synthetic construct
  source 1..742: mol_type = other DNA
ttaaaacagcctgtgggttgttcccacccacagggcccactgggcgctagcacactggtattacggtacccttgtgcgcctgttttatccaccctccccctacgcaacttagaagtatgagcctagaggtcaacaggtaactcagcacgccagctgggttgtggccaagcacttctgtaaccccggaccgagtatcaataagctgttcacacggctgaaggagaaaacgttcgttacccggccaattacttcgagaaacccagtaccaccatgaaagttgcgcggcgtttcgctccgcacaaccccagtgtagatcaggccgatgagtcaccgcactcctcacgggtgaccgtggcggtggctgcgctggcggcctgcccatggggtaacccatgggacgcttcaatactgacatggtgcgaagagtctattgagctaattggtagtcctccggcccctgaatgcggctaatcctaaccgcagagcagatactcacacgccagtgagcagtctgtcgtaatgggcaactctgcggcggaaccgactactttgggtgaccgtgtttccttttattcttgcattggctgcttatggtgacaattgataaattgttaccatatagctattggattggccatccggtgacaaacagagcaataatttactcgtttgttggctttgtaccactaaactataaagtgttaaatactctcaactttatcctaaaacttaacaaagcaaa

SEQ ID NO: 19580 - DNA, 743 bp, synthetic construct
  source 1..743: mol_type = other DNA
ttaaaacagcctgtgggttgttcccacccacagggcccactgggcgctagcacactggtattctggtacctttgtgcgcctgttttatacacccttccccaatcgtaacttagaagctcaccacatacggtcaataggtgactcagtatgccaattgggtcttgaccaagcacttctgttaccccggactgagtatcaataggccgctcacgtggctgaaggagaaaacgttcgttaaccggccaattacttcgagaaacctagtaacaccatggaggttgcgcagcgtttcgctccgcacaaccccagtgtagatcaggccgatgagtcaccgcactcctcacgggcgaccgtggcggtggctgcgctggcggcctgcccatggggcaacccatgggacgcttcaatactgacatggtgtgaagagtctattgagctaattggtagtcctccggcccctgaatgcggctaatcctaactgcggagcagatacccacacgccagtgggcagtctgtcgtaatgggtaactctgcagcggaaccgactactttgggtgtccgtgtttccttttattcttatactggctgcttatggtgacaattgagagattgttaccatatagctattggattggccatccggtgacaaatagagcaattgtttatttatttgtcggttttgtgccattaaattttaaagttctaaaaactctcaacttggtcatattgtttaattcagcaaa

SEQ ID NO: 19581 - DNA, 743 bp, synthetic construct
  source 1..743: mol_type = other DNA
ttaaaacagcctgtgggttgttcccacccacagggcccactgggcgctagcacactggtatcttggtacctttgtgcgcctgttttatacacccttccccaatcgtaacttagaagctcaccacatacggtcaataggtgactcagtatgccaattgggttttgaccaagcacttctgttaccccggactgagtatcaataggctgctcacgtggctgaaggagaaaacgttcgttaaccggccaattacttcgagaaacctagtaacaccatggaggttgcgcagcgtttcgctccgcacaaccccagtgtagatcaggccgatgagtcaccgcactcctcacgggcgaccgtggcggtggctgcgctggcggcctgcccatggggcaacccatgggacgcttcaatactgacatggtgcgaagagtctattgagctaattggtagtcctccggcccctgaatgcggctaatcctaactgcggagcagatacccacacgccagtgggcagtctgtcgtaatgggtaactctgcagcggaaccgactactttgggtgtccgtgtttccttttattcttatactggctgcttatggtgacgattgagagattgttaccatatagctattggattggccatccggtgacaaatagagcaattgtttacttatttgtcggttttgtaccattaaattttaaagttctaaagactctcaacttggttatattgtttaattcagcaaa

SEQ ID NO: 19582 - DNA, 743 bp, synthetic construct
  source 1..743: mol_type = other DNA
ttaaaacagcctgtgggttgttcccacccacagggcccactgggcgctagcacactggtatcttggtacctttgtgcgcctgttttatacacccttccccaatcgtaacttagaagctcaccacatacggtcaataggtgactcagtatgccaattgggtcttgaccaagcacttctgttaccccggactgagtatcaataggctgctcacgtggctgaaggagaaaacgttcgttaaccggccaattacttcgagaaacctagtaacaccatggaggttgcgcagcgtttcgctccgcacaaccccagtgtagatcaggccgatgagtcaccgcactcctcacgggcgaccgtggcggtggctgcgctggcggcctgcccatggggcaacccatgggacgcttcaatactgacatggtgcgaagagtctattgagctaattggtagtcctccggcccctgaatgcggctaatcctaactgcggagcagatacccacacgccagtgggcagtctgtcgtaatgggtaactctgcagcggaaccgactactttgggtgtccgtgtttccttttattcttatactggctgcttatggtgacgattgagagattgttaccatatagctattggattggccatccggtgacaaatagagcaattgtttacttatttgtcggttttgtaccattaaattttaaagttctaaagactctcaacttggttatattgtttaaatcagcaaa

SEQ ID NO: 19583 - DNA, 743 bp, synthetic construct
  source 1..743: mol_type = other DNA
ttaaaacagcctgtgggttgttcccacccacagggcccactgggcgctagcacactggtatcctggtacctttgtgcgcctgttttatacacccttccccaatcgtaatttagaagctcaccacatacggtcaataggtgactcagtatgccaattgggtcttgaccaagcacttctgttaccccggactgagtatcaataggctgctcacgtggctgaaggagaaaacgttcgttaaccggccaattacttcgagaaacctagtaacaccatggaggttgcgcagcgtttcgctccgcacaaccccagtgtagatcaggccgatgagtcaccgcactcctcacgggcgaccgtggcggtggctgcgctggcggcctgcccatggggcaacccatgggacgcttcaatactgacatggtgcgaagagtctattgagctaattggtagtcctccggcccctgaatgcggctaatcctaactgcggagcagatacccacacgccagtgggcagtctgtcgtaatgggtaactctgcagcggaaccgactactttgggtgtccgtgtttccttttattcttatactggctgcttatggtgacaattgagagattgttaccatatagctattggattggccacccggtgacaaatagagcaattgtttacttatttgtcggctttgtgccattaaattttaaagttctaaaaactctcaacttggttatattgtttaattcagcaaa

SEQ ID NO: 19584 - DNA, 818 bp, synthetic construct
  source 1..818: mol_type = other DNA
ttaaaacagcctgggggttgtaccacccctagggcccacgtggcgccagtactctggttcgcgtagaacctttgtacgcctgttttcccccccttaaataaattaagatctctgccaatgtggggagtagtccgactccgcaccgatacgtcgcaccagcagaccagttcgtttagaactcttctgcggattggcacgagcacccaccccgtaacttagaagcattacacaaaccggccaataggagcgcggcaaccagccgcgtagcggtcaagcacttctgtctccccggtcagtaatgatcgttatccgccctctccactacgagaagcccattaactgccgaaagtgatgatgagttgcgctcaaccgcacccccagcggtagctctgagagatggggctcgcagcctcccccgtggtaacacggatgcttgcccgcgcgtgctctcgggtttggtccttgaccattcactcagattcgccgtacgcagccaagagcctattgtgctggagaggttttcctccggagccgtgaatgctgctaatcctaacctccgagcgtgtgcgcacaatccagtgttgctacgtcgtaacgcgtaagttggaggcggaacagactactttcggtactccgtgtttccactattaaaaacatttttaatttatggtgacgttgactgatattgttgagcttgctcgtttgcccttgaacatcgctttgtattatattgttggattccataagacttccctactcactgttgaatttattgattttgttgttttatttgaatagcattcataagcataatcaac

SEQ ID NO: 19585 - DNA, 732 bp, synthetic construct
  source 1..732: mol_type = other DNA
tgtgggttgtacccacccacagggcccactgggcgccagcactctggtattacggtacctttgtgcgcctgttttatgtccccctcccccacttgaaacttagaagcaaaacacactgatcagcagttggcgtggcaaaccagtcatgtcttgatcaagcacttctgtttccccggaccgagtatcaatagactgcccacgcggttgaaggagaaagcgttcgttatccgatcagctacttcgagaaacctagtaacaccatgaaagttgcggagtgtttcgctcagcacatccccagtgtagatcaggtcgatgagtcaccgcgttccccacgggcgaccgtggcggtggctgcgttggcggcctgcctgtggggcaacccacaggacgctctaatacagacatggtgcgaagagtctattgagctagttggtattcctccggcccctgaatgcggctaatcctaactgcggagcacgtgcctccaatccagggggtggcgtgtcgtaacgggtaactctgcagcggaaccgactactttgggtgtccgtgtttccttttattcttatattgactgcttatggtgacaattgaaagattgttaccatatagctattggattggtcatccggtgtcgcacagagctattatatatctctttgttggatacattccgttgaattataaggaattaagaaccctcaattacatcttggctttaaactccgcaaa

SEQ ID NO: 19586 - DNA, 743 bp, synthetic construct
  source 1..743: mol_type = other DNA
ttaaaacagcctgtgggttgttcccacccatagggcccattgggcgctagcacactggcatcacggtacctttgtgcgcctgttttatccaccccctccccaatgtaacgtagaagcacgaaccaagtggtcaataggtggctcagtaaaccaactgggcttagaccaagcacttctgttaccccggactgagtatcaataggctgctcacgcggctgaaggagaaaacgttcgttacccggccaactacttcgagaagcccagtaccaccatgaaggatgcgcagtgtttcgttcagcacaaccccagtgtagatcaggtcgatgagtcaccgcaatccccacgggtgaccgtggcggtggctgcgctggcggcctgcccatggggcaacccatgggacgcttcaatttcgacatggtgcgaagagtctattgagctagttggtagtcctccggcccctgaatgcggctaatcccaactgcggagcagacacccacaaaccagtgggcagtttgtcgtaacgggcaactctgcagcggaaccgactactttgggtgtccgtgtttccttttatttctacgttggctgcttatggtgacaattgagagattgttaccatatagctattggattggccatccggtaacaaacagagctattatttatcttcttgttggcttcgtgccgttgaatttcgaagttataacaactataaacttcatcttgacactcaatacagcaaa

SEQ ID NO: 19587 - DNA, 720 bp, synthetic construct
  source 1..720: mol_type = other DNA
ttcccacccacagggcccactgggcgcttgcacactggtatcacggtacctttgtgcgcctgttttatccaccccccctgcgtaacttagaagtggaactcacacggtcaatagacaactcggtaagccaaccgggcaatgaccaagcactactgttaccccggaccaagtatcaataaactgctagcgcggttgaaggagaaaacgtccgttacccggccaattacttcgagaaacctagtatcaccatggatgttgcgcagtgtttcgctccgcacaaccccagtgtagatcaggccgatgagccaccgcattccccacgggcgaccgtggcggtggctgcgctggcggcctgcccatggggcaacccatgggacgcttcaatactgacatggtgcgaagagtctattgagctaattggtagtcctccggcccctgaatgcggctaatcctaactgcggagcagatacccacatgccagtgggcagtctgtcgtaacgggcaactctgcagcggaaccgactactttgggtgtccgtgtttccttttaatcttatattggctgcttatggtgacaattgaaagattgttgccatatagctattggattggccatccggtgacaaacagagcaatcatttatttgttcgttggttttattccattgaaccttaaagttttgaacactctaaactttatcatttcactcaacacaacaaa

SEQ ID NO: 19588 - DNA, 715 bp, synthetic construct; identical to SEQ ID NO: 882
  source 1..715: mol_type = other DNA

SEQ ID NO: 19589 - DNA, 744 bp, synthetic construct
  source 1..744: mol_type = other DNA
ttaaaacaaggcctgtgggttgttcccacccacagggcctactgggcgttagcacactggtatcacggtacccttgtgcgcctgttttattcaccctaccctattgcaacttagaagttaaccaagtacggtcattaggcagctcagcatgccagctgggttttgaccaagcacttctgttaccccggactgagtatccttaggctgcttgcgcggctgaaggagaaaacgttcgttacccgaccaattacttcgagaaacctagtatcaccatgaaagttgcgcagtgtttcgctccgcacaaccccagtgtatatcaggccgatgagtcaccgcattccccacgggcgaccgtggcggtggctgcgctggcggcctgcccatgggttaacccatgggacgcttcaaaactgacatggtgtgaagagtctattgagctaattggtactcctccggcccctgaatgcggctaatcctaactgcggagcagatactcacacgccagtgggtggtctgtcgtaacgggcaactctgcagcggaaccgactactttgggtgtccgtgtttcctattattcatatactggctgcttatggtgacaattgagagattgttgccatatagctattggattggccatccggtgacaaacagagcgattgtatacctatttgttggtttactaccattgaattttaaagtttcataaactctcaaccttgttttaacacttaacgcagcaag

SEQ ID NO: 19590 - DNA, 744 bp, synthetic construct
  source 1..744: mol_type = other DNA
ttaaaacaaggcctgtgggttgttcccacccacagggcctactgggcgttagcacactggtatcacggtacccttgtgcgcctgttttattcaccctaccctattgcaacttagaagttaaccaagtacggtcattaggcagatcagcatgccagctgggttttgaccaagcacttctgttaccccggactgagtatcaataggctgcttgcgcggctgaaggagaaaacgttcgttacccgaccaattacttcgagaaacctagtatcaccatgaaagttgcgcagtgtttcgctccgcacaaccccagtgtagatcaggccgatgagtcaccgcattccccacgggcgaccgtggcggtggctgcgctggcggcctgcccatgggttaacccatgggacgcttcaaaactgacatggtgtgaagagtctattgagctaattggtagtcctccggcccctgaatgcggctaatcctaactgcggagcagatactcacacgccagtgggtggtctgtcgtaacgggcaactctgcagcggaaccgactactttgggtgtccgtgtttcctattattcatatactggctgcttatggtgacaattgagagattgttgccatatagctattggattggccatccggtgacaaacagagcgattgtatacctatttgttggtttcgtaccattgaattttaaagttttaaaaaccctcaaccttgttttaacacttaacgcagcaag

SEQ ID NO: 19591 - DNA, 742 bp, synthetic construct
  source 1..742: mol_type = other DNA
ttaaaacagcctgtgggttgatcccacccacagggcccactgggcgctagcacactggtatcacggtacccttgtgcgcctgttttatcttcccctccccactgtaacttagaagaatgacataaacggtcaacagatagctcagtacaccaactgagccccgaccaagcacttctgttaccccggaccgagtaacaataggctgctcgcgcggctgaaggtgaaaacgttcgttacccggccaattacttcgagaaacctagtaccaccatgaaggttgcgcagcgtttcgctccgcacaaccccagtgtagatcaggtcgatgagtcaccgcactccccacgggcgaccgtggcggtggctgcgctggcggcctgcctatggggcaacccatgggacgcttcaatactgacatggtgcgaagagtctattgagctaattggtagtcctccggcccctgaatgcggctaatcctaactgcggggcaagtgcccacaaaccagtgggtggcttgtcgtaacgggtaaccctgcagcggaaccgactactttgggtgtccgtgtttccttttattcttattctggctgcttatggtgacaattgagagattgttaccatatagctattggattggccatctggtgagtaacagagcaatcatattcctctttgttggatttataccacttgattccactagttacaacactctgctacatattatttgcttaaatacaagaag

SEQ ID NO: 19592 - DNA, 716 bp, synthetic construct
  source 1..716: mol_type = other DNA
ttaaaacagcctgggggttgttcccacccctagggtccaatggacgctagtacaccggtatcacggtacccttgtacgcctgttttataatccccttcccccgtaacgttagaagcacaaaagcaaccgctcaatagacaccatacatccagtgtggttacgagcaagcacttctgtctccccggttgcgccctatatgctgtgtgaacggcaaaaaggggcaatatcgttacccgcttgactactacgggaaacccagtatcatctgcgattgatttgagagttgcgctcagcgcctgacccccggcgtagctcaggctgatgaggctccgaacaccccacaggtgactgtgtcggagcctgcgttggcggcctgcccataccccgtggtatgggacgctcacttcatgacatggtgcgaagagtctactgtgctagtcaagattcctccggcccctgaatgtggataatcctaaccaccgatcctatgttcgcaatccagcgttcggtaggtcgtaacgcgcaagtcggtggcggaaccaactactttgggtgtccgtgtttcctttatttcctactgaatgcttatggtgacaattgtttgatcagttgttgccattactcgcattcagtgtgcaattacgaaaacaaaactatcagttgttatcatccctcacgttcagtgtacaatcacaaaaacgagtttttctgtcata

SEQ ID NO: 19593 - DNA, 742 bp, synthetic construct
  source 1..742: mol_type = other DNA
ataaaacagcctgtgggttgtacccacccacagggcccactgggcgctagcactctggtattacggtacccttgtgcgcctgttttatcttcccttccctcagtgcaacttagaagtaaatcttaatgatcagtaggtggctcagcatgccagctgggtcttgatcaagcacttctgttaccccggactgagtatcaataagctgctcgcgcggctgaaggagaaagcgttcgttacccggccaattacttcgagaaacctagtaccaccatggaagttgcgcggcgtttcgctccgcacaatcccagtgtagatcaggtcgatgagtcaccgcattccccacgggcgaccgtggcggtggctgcgttggcggcctgcccatggggcaacccatgggacgcttcaatactgacatggtgcgaagagtctattgagctaattggtagtcctccggcccctgaatgcggctaatcctaactgcggagcagatacccacaagccagtgggcgatctgtcgtaacgggcaactctgcagcggaaccgactactttgggtgtccgtgtttctttttattcctatactggctgcttatggtgacaattgagaaattgttaccatatagctattggattggccatccggtgactaacagagcaattgtatacctgtttgttggttttgtgccattgaacttcaaagttttaaaaacactcaatttaataattctacttaatacaacaag

SEQ ID NO: 19594 - DNA, 744 bp, synthetic construct
  source 1..744: mol_type = other DNA
tttaaaacagcctgtgggttgttcccacccacagggcccactgggcgctagcactctggtattacggtacctttgtgcgcctgttttacatccctcccccagatgcaacttagaagcagtacaccaagaccaatagtaggcatggcataccagccatgtgtcggtcaagcacttctgttcccccgggctgagtatcaataaactgctcacgtggttgaaggagaaagcgcccgttacccggctaactacttcgagaagcctattaacaccatgaaagttgcggagtgtttcgctcagcacgatcccggtgtagatcaggccgatgagtcaccgcgttccccacaggtgactgtggcggtggctgcgttggcggcctgcccatggggcaacccatgggacgcttcaatatggacatggtgtgaagagcccattgagctagttagtagtcctccggcccctgaatgcggctaatcccaactgcggagcacgcgtcccccgctccagggggtagcgtgtcgtaacgggcaactctgcagcggaaccgactactttgggtgtccgtgtttccctttttccttttcattggctgcttatggtgacaattgaaagattgttaccatatagctattggattggccatccagtgtcaagcagagctataatttaccaatttatagggtttgtcccgttggatctgaaagctttaaaaacccttaacttggtactactattaaacagtgtaaa

SEQ ID NO: 19595 - DNA, 719 bp, synthetic construct
  source 1..719: mol_type = other DNA
cacccacagggcccactgggcgctagtacactggtatcacggtacctttgtgcgcctgtttgaccctccctccccaaacgcaacttagaagcacaacataaatggtcattagacggctcagtatgccaactgagtctcgatcaagcacttctgttaccccggactgagtaccaataggctgctcacgcggctgaaggggaaaccgttcgttacccgaccaactacttcgagaaacctagtaccaccatgaaagttgcgcagcgtttcgctccgcacaaccccagtgtagatcaggccgatgagtcaccgcaaaccccacgggcgactgtggcggtggctgcgctggcggcctgcccatgggacaactcatgggacgctacaatactgacatggtgcgaagagtctattgagctagttggtagtcctccggcccctgaatgcggctaatcctaactgtggagcagatacccacgcaccagtgggcagtctgtcgtaatgggcaactccgcagcggaaccgactactttgggtgtccgtgtttctttttattcctacgctggctacttatggtgacaattgagagactgtaaccatattgctatcgggttggccacctggtgaagaatagaacagttgctcacttgtttgtcagtcttgcaccgttgtaccataaagccttaactgcccctcaacaccgtcataacacttaacacgctgaa

SEQ ID NO: 19596 - DNA, 717 bp, synthetic construct
  source 1..717: mol_type = other DNA
cccacgtggcggccagtacaccggtatcacggtacccttgtacgcctgttttatactccctttcccctgtaacttagaagcaaacaaaccaagttcaatagaagggggtacaaaccagtaccaccacgaacaagcacttctgtttccccggtgaggttgtataaactgtccccacggttgaaaacgactgatccgttacccgctcttgtacttcgagaagcctagtatcatcctggaatcttcgatgcgttgcgctcagcactcgaccccggagtgtagcttaggctgatgagtctggacgttccccaccggcgacggtggtccaggctgcgttggcggcctacctgtggcccaaagccacaggacgctagttgtgaacagggtgtgaagagcctattgagctacaagagagtcctccggcccctgaatgcggctaatcccaaccacggagcaggtggttgcaatccagcaactagcctgtcgtaacgcgcaagtctgtggcggaaccgactactttgggtgtccgtgtttccttttattcttacaatggctgcttatggtgacaatcatagattgttatcataaagcgaattggattggccatccggtgaaagtcagatcaactatttatttgtttgttggaaccactgtgttagcttcacttctcacttaaccaattaatcaaaaacagtacgaggattaaacaacaatactaca

SEQ ID NO: 19597 - DNA, 717 bp, synthetic construct
  source 1..717: mol_type = other DNA
cccacgtggcggccagtacaccggtatcacggtacccttgtacgcctgttttatactccctttcccctgtaacttagaagcaaacaaaccaagttcaatagaagggggtacaaaccagtaccaccacgaacaagcacttctgtttccccggtgaggttgtataaactgtccccacggttgaaaacgactgatccgttacccgctcttgtacttcgagaagcctagtatcatcctggaatcttcgatgcgttgcgctcagcactcggccccggagtgtagcttaggctgatgagtctggacgttccccaccggcgacggtggtccaggctgcgttggcggcctacctgtggcccaaagccacaggacgctagttgtgaacagggtgtgaagagcctattgagctacaagagagtcctccggcccctgaatgcggctaatcccaaccacggagcaggtggttgcaatccagcaactagcctgtcgtaacgcgcaagtctgtggcggaaccgactactttgggtgtccgtgtttccttttattcttacaatggctgcttatggtgacaatcatagattgttatcataaagcgaattggattggccatccggtgaaagtcagatcagctatttatttgtttgttggaaccactgtgttagcttcacttctcatttaaccaattaattaaaaacagtacgaggattaaacaacaatactaca

SEQ ID NO: 19598 - DNA, 717 bp, synthetic construct
  source 1..717: mol_type = other DNA
ttaaaacagcttgggggttgttcccacccccagggtccaacggacgctagtacaccggtatcacggtacccttgtacgcctgttttataatccccttcccccgtaacattagaagcacaaaagcaaccgctcaatagacaccatacatccagtgtggttacgagcaagcacttctgtctccccggttgtgccctatatgctgtgcgaacggcaaaaaggggcaatatcgttacccgcttgactactacgggaaacccagtatcatcttcgattgatttgagagttgcgttcagcgccttacccccggcgtagctcaggctgatgaggctccgaacaccccacaggcgactgtgtcggagcctgcgttggcggcctgcccataccctgcggtatgggacgctcacttcatgacatggtgcgaagagtctactgtgctagtcaagattcctccggcccctgaatgtggataatcccaaccactgatcctacgttcgcaatccagcgttcagtaggtcgtaacgcgcaagtcggtggcggaaccaactactttgggtgtccgtgtttcctttatttcctactgaatgcttatggtgacaattgttttgatcagttgttgccattactcgcgttcagtgtgtaattacaaaaacaagattatcagttattacaatccctcacgttcagtgcacaattacgaaaacgagattttctgtcata

SEQ ID NO: 19599 - DNA, 717 bp, synthetic construct
  source 1..717: mol_type = other DNA
ttaaaacagcttgggggttgttcccacccccagggtccaatggacgctagtacaccggtatcacggtacccttgtacgcctgttttataatccccttcccccgcaacattagaagcacaaaaacaaccgctcaatagacaccatacatccagtgtggttacgagcaagcacttctgtctccccggttgcgccctatatgctgtgcgaacggcaaaaaggggcaatatcgttacccgcttgactactacgggaaacccagtatcatcttcgattgatttgagagttgcgttcagcgccttacccccggcgtagctcaggccgatgaggctccgaacaccccacaggcgactgtgtcggagcctgcgttggcggcctgcccataccctacggtatgggacgctcacttcatgacatggtgcgaagagtctactgtgctagtcaagattcctccggcccctgaatgtggataatcccaaccactgatcctacgttcgcaatccagcgttcagtaggtcgtaacgcgcaagtcggtggcggaaccaactactttgggtgtccgtgtttcctttatttcctactgaatgcttatggtgacaattgttttgatcagttgttgccattactcgcgttcagtgtgcaattacaaaaacaagattatcagttattacaatccctcacgttcagtgcacaattacgaaaacgagattttctgtcata

SEQ ID NO: 19600 - DNA, 717 bp, synthetic construct
  source 1..717: mol_type = other DNA
ttaaaacagcttgggggttgttcccacccccagggtccaatggacgctagtacaccggtatcacggtacccttgtacgcctgttttataatccccttcccccgtaacattagaagcacaaaagcaaccgctcaatagacaccatacatccagtgtggttacgagcaagcacttctgtctccccggttgcgccctatatgctgtgcgaacggcaaaaaggggcaatatcgttacccgcttgactactacgggaaacccagtatcatcttcgattgatttgagagttgcgttcagcgccttacccccggcgtagctcaggctgatgaggctccgaacaccccacaggcgactgtgtcggagcctgcgttggcggcctgcccataccctgcggtatgggacgctcacttcatgacatggtgcgaagagtctactgtgctagtcaagattcctccggcccctgaatgtggataatcccaaccactgatcctacgttcgcaatccagcgttcagtaggtcgtaacgcgcaagtcggtggcggaaccaactactttgggtgtccgtgtttcctttatttcctactgaatgcttatggtgacaattgttttgatcagttgttgccattactcgcgttcagtgtgtaattacaaaaacaagattatcagttattaccatccctcacgttcagtgcacaattacaaaaacgagattttctgtcata

SEQ ID NO: 19601 - DNA, 717 bp, synthetic construct
  source 1..717: mol_type = other DNA
ttaaaacagcttgggggttgttcccacccccagggtccaatggacgctagtacaccggtatcacggtacccttgtacgcctgttttataatccccttcccccgtaacattagaagcacaaaagcaaccgctcaatagacaccatacatccagtgtggttacgagcaagcacttctgtctccccggttgcgccctatatgctgtgcgaacggcaaaaaggggcaatatcgttacccgcttgactactacgggaaacccagtatcatcttcgattgatttgagagttgcgttcagcgccttacccccggcgtagctcaggctgatgaggctccgaacaccccacaggcgactgtgtcggagcctgcgttggcggcctgcccataccctgcggtatgggacgctcacttcatgacatggtgcgaagagtctactgtgctagtcaagaatcctccggcccctgaatgtggataatcccaaccactgatcctacgttcgcaatccagcgttcagtaggtcgtaacgcgcaagtcggtggcggaaccaactactttgggtgtccgtgtttcctttatttcctactgaatgcttatggtgacaattgttttgatcagttgttgccattactcgcgttcagtgtgtaattacaaaaacaagattatcagttatcaccatccctcacgttcagtgcacaattacaaaaacgagattttctgtcata

SEQ ID NO: 19602 - DNA, 717 bp, synthetic construct
  source 1..717: mol_type = other DNA
ttaaaacagcttgggggttgttcccacccccagggtccaatggacgctagtacaccggtatcacggtacccttgtacgcctgttttataatccccttcccccgtaacattagaagcacaaaagcaaccgctcaatagacaccatacatccagtgtggttacgagcaagcacttctgtctccccggttgcgccctatatgctgtgcgaacggcaaaaaggggcaatatcgttacccgcttgactactacgggaaacccagtatcatcttcgattgatttgagagttgcgttcagcgccctacccccggcgtagctcaggctgatgaggctccgaacaccccacaggcgactgtgtcggagcctgcgttggcggcctgcccataccctgcggtatgggacgctcacttcatgacatggtgcgaagagtctactgtgctagtcaagattcctccggcccctgaatgtggataatcccaaccactgatcctacgttcgcaatccagcgttcagtaggtcgtaacgcgcaagtcggtggcggaaccaactactttgggtgtccgtgtttcctttatttcctactgaatgcttatggtgacaattgttttgatcagttgttgccattactcgcgttcagtgtgtaattacaaaaacaagattatcagttactacaatccctcacgttcagtgcacaattacgaaaacgagattttctgtcata

SEQ ID NO: 19603 - DNA, 717 bp, synthetic construct
  source 1..717: mol_type = other DNA
ttaaaacagcttgggggttgttcccacccccagggtccaatggacgctagtacaccggtatcacggtacccttgtacgcctgttttataatccccttcccccgtaacattagaagcacaaaagcaaccgctcaatagacaccatacatccagtgtggttacgagcaagcacttctgtctccccggttgcgccctatatgctgtgcgaacggcaaaaaggggcaatatcgttacccgcttgactactacgggaaacccagtatcatcttcgattgatttgagagttgcgttcagcgccttacccccggcgtagctcaggctgatgaggctccgaacaccccacaggcgactgtgtcggagcctgcgttggcggcctgcccataccctgcggtatgggacgctcacttcatgacatggtgcgaagagtctactgtgctagtcaagaatcctccggcccctgaatgtggataatcccaaccactgatcctacgttcgcaatccagcgttcagtaggtcgtaacgcgcaagtcggtggcggaaccaactactttgggtgtccgtgtttcctttatttcctactgaatgcttatggtgacaattgttttgatcagttgttgccattactcgcgttcagtgtgtaattacaaaaacaagattatcagttattaccatccctcacgttcagtgcacaattacaaaaacgagattttctgtcata

SEQ ID NO: 19604 - DNA, 722 bp, synthetic construct
  source 1..722: mol_type = other DNA
ttcccacccacagggcccactgggcgctagcacactggtatcacggtacctttgtgcgcctgttttatccaccctcccccaatgtaacttagaagcacaccaaacgcggtcaataggcggctcagtacaccaactgagtctcgaccaagcacttctgttaccccggactgagtatcaataggctgctcacgcggctgaaggagaaaacgttcgttacccggccaattacttcgagaaacctagtaccaccatgaaggttgcgcggcgtttcgctccacacaaccccagtgtagatcaggtcgatgagccaccgcattccccacgggcgaccgtggcggtggctgcgctggcggcctgcccatggggcaacccatgggacgcttcaatactgacatggtgtgaagagtctattgagctaattggtagtcctccggcccctgaatgcggctaatcctaactgcggagcagacacccacatgccagtgggcagtctgtcgtaacgggtaactctgcagcggaaccgactactttgggtgtccgtgtttccttttattctcatactggctgcttatggtgacaattgaaagattgttgccatatagctattggattggccatccggtgacaaacagagcggttgtttacctatttgtcggttttataccattgaattacaaggttctgaaaaccctcaatttcattttagcacttaataccacaaa

SEQ ID NO: 19605 - DNA, 724 bp, synthetic construct
  source 1..724: mol_type = other DNA
tgatcccacccacagggcccatagggcgttagcactctggtatcacggtacctttgtgcgcctgttttatattcccacccccaatcgcaacttagaagcagtacttcacgaccaacagtgggcgtgacacaccagccacgtctcggtcaagcacttctgtctccccggactgagtatcaataagctgctcacgcggctgaaggaaaaaacgtccgttatccggccaattacttcgagaaacctagtaccgccatgaaagttgcgcagcgtttcgatccgcacaaccccagtgtagatcaggccgatgagtcaccgcgttccccacgggtgaccgtggcggtggctgcgttggcggcctgcccatgggggaacccatgggacgcttcaatactgacatggtgtgaagagtctattgagctaattggtagccctccggcccctgaatgcggctaatcctaactgcggagcagattcccgcatgccagcgggtggtctgtcgtaacgggcaactctgcagcggaaccgactactttgggtgtccgtgtttccttttattcctatatcggctgcttatggtgacaattgagagattgttaccatatagctattggattggccatccggtgacaaacagagcaattatttaccaatttattggttttgtaccattgaattttaacgtattcaaaactcttaaccttattttggctcttaatacagcaaa

SEQ ID NO: 19606 - DNA, 743 bp, synthetic construct
  source 1..743: mol_type = other DNA
ttaaaacagcctgtgggttgtacccacccacaggacccattgggtgctagcactctggtatcacggtacctttgtgcgcctgttttacatccccctcccctaattgcaacttagaagctgcacacaccgatcaatagcgggcatagcaaaccagctatgtcttgatcaagcactcctgtatccccggaccgagtatcaatagactgctcacgcggttgaaggagaaaacgttcgtcacccggctaactacttcgagaaacccagtagtatcatgaaagttgcgaggcgtttcgctcagcacattcccagtgtagatcaggtcgatgagtcaccgcgttccccacgggcgaccgtggcggtggctgcgttggcggcctgcctacggggcgactcgtaggacgccttaatacagacatggtgcgaagagtcgattgagctagttagtattcctccggcccctgaatgcggctaatcctaactgcggagcacatgccctcaacccagggggtattgtgtcgtaacgggcaactctgcagcggaaccgactactttgggtgtccgtgtttccttttattcttacattggctgcttatggtgacaattgaaaagttgttgccatatagctattgggttggccatccagtgtctaatagagctatcatatacctctttgttggattcataccacttaatttaaaagaagttaagacactacaactcattgtacaactgaatacagcaag

SEQ ID NO: 19607 - DNA, 743 bp, synthetic construct
  source 1..743: mol_type = other DNA
tttaaaacagcctgtgggttgttcccacccacagggcccactgggcgctagcactctggtattacggtacctttgtgcgcctgttttacatccctcccccagatgcaacttagaagcagtacaccaagaccaatagtaggcatggcataccagccatgtgtcggtcaagcacttctgttcccccgggctgagtatcaataaactgctcacgtggttgaaggagaaagcgcccgttacccggctaactacttcgagaagcctattaacaccatgaaagttgcggagtgtttcgctcagcacgatcccggtgtagatcaggccgatgagtcaccgcgttccccacaggtgactgtggcggtggctgcgttggcggcctgcccacggggcaacccatgggacgcttcaatatggacatggtgtgaagagcccattgagctagttagtagtcctccggcccctgaatgcggctaatcccaactgcggagcacgcgcccccgctccagggggtagtgtgtcgtaacgggcaactctgcagcggaaccgactactttgggtgtccgtgtttccttttttccttttcattggctgcttatggtgacaattgaaagattgttaccatatagctattggattggccatccagtgtcaagcagagctataatttaccaatttatagggtttgtcccgttggatctgaaagctttaaaaacccttaacttggtactactattaaacagtgtaaa

SEQ ID NO: 19608 - DNA, 743 bp, synthetic construct
  source 1..743: mol_type = other DNA
tttaaaacagcctgtgggttgttcccacccacagggcccactgggcgctagcactctggtattacggtacctttgtgcgcctgttttacatccctcccccagatgcaacttagaagcagtacaccaagaccaatagtaggcatggcataccagccatgtgtcggtcaagcacttctgttcccccgggctgagtatcaataaactgctcacgtggttgaaggagaaagcgcccgttacccggctaactacttcgagaagcctattaacaccatgaaagttgcggagtgtttcgctcagcacgatcccggtgtagatcaggccgatgagtcaccgcgttccccacaggtgactgtggcggtggctgcgttggcggcctgcccatggggcaacccatgggacgcttcaatatggacatggtgtgaagagcccattgagctagttagtagtcctccggcccctgaatgcggctaatcccaactgcggagcacgcgcccccgctccagggggtagcgtgtcgtaacgggcaactctgcagcggaaccgactactttgggtgtccgtgtttccttttttccttttcattggctgcttatggtgacaattgaaagattgttaccatatagctattggattggccatccagtgtcaagcagagctataatttaccaatttatagggtttgtcccgttggatctgaaagctttaaaaacccttaacttggtactactattaaacagtgtaaa

SEQ ID NO: 19609 - DNA, 743 bp, synthetic construct
  source 1..743: mol_type = other DNA
tttaaaacagcctgtgggttgttcccacccacagggcccactgggcgctagcactctggtattacggtacctttgtgcgcctgttttacatccctcccccaggtgcaacttagaagcagtacaccaagaccaatagtaggcatggcataccagccatgtgtcggtcaagcacttctgttcccccgggctgagtatcaataaactgctcacgtggttgaaggagaaagcgcccgttacccggctaactacttcgagaagcctattaacaccatgaaagttgcggagtgtttcgctcagcacgatcccggtgtagatcaggccgatgagtcaccgcgttccccacaggtgactgtggcggtggctgcgttggcggcctgcccatggggcaacccatgggacgcttcaatatggacatggtgtgaagagcccattgagctagttagtagtcctccggcccctgaatgcggctaatcccaactgcggagcacgcgcccccactccagggggtagcgtgtcgtaacgggcaactctgcagcggaaccgactactttgggtgtccgtgtttcctttttaccttttcattggctgcttatggtgacaattgaaagattgttaccatatagctattggattggccatccagtgtcaagcagagctataatttaccaatttatagggtttatcccgttggatctgaaagctttaaaaacccttaacttggtactactattaaacagcgtaaa

SEQ ID NO: 19610 - DNA, 743 bp, synthetic construct
  source 1..743: mol_type = other DNA
tttaaaacagcctgtgggttgttcccacccacagggcccactgggcgctagcactctggtattacggtacccttgtgcgcctgttttacatccctcccccaaatgcaacttagaagcagtacaccgagaccaatagtaggcatggcataccagccatgtatcggtcaagcatttctgttcccccgggctgagtaccaataaactgctcacgtggttgaaggggaaagcgcccgttacccggctaactacttcgagaagcctattaacaccatgaaagttgcggagtgtttcgctcagcacgatcccggtgtagatcaggccgatgagtcaccgcgttccccacaggtgactgtggcggtggctgcgttggcggcctgcccatggggcaacccatgggacgcttcaatatggacatggtgtgaagagcctattgagctagttagtagtcctccggcccctgaatgcggctaatcccaactgcggagcacgcgcccccgcaccagagggtagcgtgtcgtaacgggcaactctgcagcggaaccgactactttgggtgtccgtgtttccttttttccttttcattggctgcttatggtgacaattgaaagattgttaccatatagctattggattggccatccagtgtcaagcagagctataatttaccaatttatagggtttgtcccgttggatctgaaaactttaaaaacccttaacttggtactactattaaacagtgtaaa

SEQ ID NO: 19611 - DNA, 717 bp, synthetic construct
  source 1..717: mol_type = other DNA
ttaaaacagcttgggggttgttcccacccccagggtccaatggacgctagtacaccggtatcacggtacccttgtacgcctgttttataacccccttcctccgtaacattagaagcacaaaggcaaccgctcaatagacaccatacatccagtgtggttacgagcaagcacttctgtctccccggttgcgccctatatgctgtgtgaacggcaaaaaggggcaatatcgttacccgcttgactactacgggaaacccagtatcatcttcgattgatttgagagttgcgttcagcgcctgacccccggcgtagctcaggccgatgaggctccgaacaccccacaggcgactgtgtcggagcctgcgttggcggcctgcccataccctgcggtatgggacgctcacttcatgacatggtgcgaagagtctactgtgctagtcaagattcctccggcccctgaatgtggataatcctaaccactgatcctacgttcgcaatccagcgttcggtaggtcgtaacgcgcaagtcggtggcggaaccaactactttgggtgtccgtgtttcctttatttcctactgaatgcttatggtgacaattgttttgatcagttgttgccattgctcgcgttcagtgtgtaattacaaaaacaagactatcagttgttaccaccccccacgttcagtgcataatcacaaaaacgagattttctgtcata

SEQ ID NO: 19612 - DNA, 747 bp, synthetic construct
  source 1..747: mol_type = other DNA
cgattttaaaacagcctgtgggttgttccctcccacagggcccaatgggcgccagcacactggtatcatggtacctttgtgcgcctgttttattcaccccctcccaatgtaacgtagaagcataagctaagaggtcaatagatggctcagtacaccaactgggtttagaccaagcacttctgttaccccggaccgagtatcaataggctgctcacgcggctgaaggagaaaacgttcgttacccggccaactacttcgagaagcccagtaccaccatgaaggatgcgcagtgtttcgttcagcacaaccccagtgtagatcaggccgatgagtcaccgcaatccccacgggtgaccgtggcggtggctgcgctggcggcctgcccatgggataacccatgggacgcttcaattccgacatggtgcgaagagtctattgagctagttggtagtcctccggcccctgaatgcggctaatcctaactgcggagcagacgcccacaaaccagtgggctgtttgtcgtaacgggcaactctgcagcggaaccgactactttgggtgtccgtgtttccttttattcttatattggctgcttatggtgacaattgaaagattgttgccatatagctattggattggccatccggtaacaaacagagctattatttacctttttgttggctttgtgccgttgaatttcaaagtcataaaaaccataaacttcattttgacattcaatacagcaaa

SEQ ID NO: 19613 - DNA, 742 bp, synthetic construct
  source 1..742: mol_type = other DNA
ataaaacagcctgtgggttgttcccacccacagggcccactgggcgtttgcacactggtatcgcggtacctttgtgcgcctgttttatccaccctcccctaattgaatttagaagtcaagcacaaccggtcaacagatagcccagcataccagctgggtttcgaccaagcacttctgtttacccgggctgagtatcaataggctgctcacgcggctgaaggagaaaacgttcgttacccggccaattacttcgagaaacctagtaccgccatggacgttgcgcagcgtttcgttccacacaaccccagtgtagatcaggtcgatgagtcaccgcatcccccacgggtgaccgtggcggtggctgcgctggcggcctgcccatggggtaacccatgggacgcttcaatgctgacatggtgcgaagagtctattgagctaattggtagtcctccggcccctgaatgcggctaatcctaactgcggagcagacacccacacgccagtgggcagtctgtcgtaacgggcaactccgcagcggaaccgactactttgggtgtccgtgtttccttttattctttcattggctgcttatggtgacaattgagaggttgttaccatatagctattggattggccatccggtgagcaacagagcaattatatttctttttgttggatatataccacttgactctaataactacaataccctgctttatattctccaattgaatacgaaaag

SEQ ID NO: 19614 - DNA, 742 bp, synthetic construct
  source 1..742: mol_type = other DNA
ataaaacagcctgtgggttgttcccacccacagggcccactgggcgcttgcacactggtatcacggtacctttgtgcgcctgttttatccacccccccctaatcgagtttagaagtcaagcacaactggtcgacaggaagcccagcacaccagctgggttctgaccaagcacttctgtttacccggaccgagtatcaataggctgctcgcgcggctgaaggagaaaacgttcgttacccggccaattacttcgagaaacctagtaccgctatgaacgctgcgcggcgtttcgttccgcacaaccctagtgcagatcaggtcgatgagtcaccgcgttccccacgggtgaccgtggcggtggctgcgctggcggcctgcccatggggtaacccatgggacgcttcaatgctgacatggtgcgaagagtctattgagctaattggtagtcctccggcccctgaatgcggctaatcctaactgcggagcagacactcacacgccagtgggcagtctgtcgtaacgggcaactccgcagcggaaccgactactttgggtgtccgtgtttccttttattcttgcactggctgcttatggtgacaattgaaaggttgttaccatatagctattggattggccatccggtgagcaacagagcaattatatttctatttgttggatatataccatttgattttattaactacaatactctgctttatattctccaattgaatacgaaaag

SEQ ID NO: 19615 - DNA, 742 bp, synthetic construct
  source 1..742: mol_type = other DNA
ataaaacagcctgtgggttgttcccacccacagggcccactgggcgcttgcacactggtatcacggtacctttgtgcgcctgttttatccacccccccctaatcgagtttagaagtcaagcacaactggtcgacaggtagcccagcacaccagctgggttctgaccaagcacttctgtttacccggactgagtatcaataggctgctcgcgcggctgaaggagaaaacgttcgttacccggccaattacttcgagaaacctagtaccgccatgaacgctgcgcggcgtttcgttccgcacaaccctagtgtagatcaggtcgatgagtcaccgcgttccccacgggtgaccgtggcggtggctgcgctggcggcctgcccatggggtaacccatgggacgcttcaatgctgacatggtgcgaagagtctattgagctaattggtagtcctccggcccctgaatgcggctaatcctaactgcggagcagacactcacacgccagtgggcagtctgtcgtaacgggcaactctgcagcggaaccgactactttgggtgtccgtgtttccttttattcttgcactggctgcttatggtgacaattgaaaggttgttaccatatagctattggattggccatccggtgagcaacagagcaattatatttctattcgttggatatataccatttgattttattaactacaatactctgctttatattctccaattgaatacgaaaag

SEQ ID NO: 19616 - DNA, 742 bp, synthetic construct
  source 1..742: mol_type = other DNA
ataaaacagcctgtgggttgttcccacccacagggcccactgggcgcttgcacactggtatcacggtacctttgtgcgcctgttttatccacccccccctaatcgagtttagaagtcaagcacaactggtcgacaggtagcccagcacaccagctgggttctgaccaagcacttctgtttacccggactgagtatcaataggctgcttgcgcggctgaaggagaaaacgttcgttacccggccaattacttcgagaaacctagtaccgccatgaacgctgcgcggcgtttcgttccgcacaaccctagtgtagatcaggtcgatgagtcaccgcgttccccacgggtgaccgtggcggtggctgcgctggcggcctgcccatggggtaacccatgggacgcttcaacgctgacatggtgcgaagagtctattgagctaattggtagtcctccggcccctgaatgcggctaatcctaactgcggagcagacactcacatgccagtgggcagtctgtcgtaacgggcaactccgcagcggaaccgactactttgggtgtccgtgtttccttttattcttgcactggctgcttatggtgacaattgaaaggttgttaccatatagctattggattggccatccggtgagcaacagagcaattatatttctatttgttggatatataccatttggttttattaactacaatactctgctttatattctccaattgaatacgaaaag

SEQ ID NO: 19617 - DNA, 742 bp, synthetic construct
  source 1..742: mol_type = other DNA
ataaaacagcctgtgggttgttcccacccacagggcccactgggcgcttgcacactggtatcacggtacctttgtgcgcctgttttatccacccccccctaatcgagtttagaagtcaagcacaactggtcgacaggtagcccagcacaccagctgggttctgaccaagcacttctgtttacccggactgagtatcaataggctgctcgcgcggctgaaggagaaaacgttcgttacccggccaattacttcgagaaacctagtaccgccatgaacgctgcgcggcgtttcgttccgcacaaccctagtgtagatcaggtcgatgagtcaccgcgttccccacgggtgaccgtggcggtggctgcgctggcggcctgcccatggggtaacccatgggacgcttcaatgctgacatggtgcgaagagtctattgagctaattggtagtcctccggcccctgaatgcggctaatcctaactgcggagcagacactcacacgccagtgggcagtctgtcgtaacgggcaactccgcagcggaaccgactactttgggtgtccgtgtttccttttattcttgcactggctgcttatggtgacaattgaaaggttgttaccatatagctattggattggccatccggtgagcaacagagcaattatatttctatttgttggatatataccatttgattttattaactacaatactctgctttatattctccaattgaatacgaaaag

SEQ ID NO: 19618 - DNA, 742 bp, synthetic construct
  source 1..742: mol_type = other DNA
ataaaacagcctgtgggttgttcccactcacagggcccactgggcgcttgcacactggtatcacggtacctttgtgcgcctgttttatccacccccccctaatcgagtttagaagtcaagcacaactggtcgacaggtagcccagcacaccagctgggttctgaccaagcacttctgtttacccggactgagtatcaataggctgctcgcgcggctgaaggagaaaacgttcgttacccggccaattacttcgagaaacctagtaccgccatgaacgctgcgcggcgtttcgttccgcacaaccctagtgtagatcaggtcgatgagtcaccgcgttccccacgggtgaccgtggcggtggctgcgctggcggcctgcccatggggtaacccatgggacgcttcaatgctgacatggtgcgaagagtctattgagctaattggtagtcctccggcccctgaatgcggctaatcctaactgcggagcagacactcacacgccagtgggcagtctgtcgtaacgggcaactccgcagcggaaccgactactttgggtgtccgtgtttccttttatccttgcactggctgcttatggtgacaattgaaaggttgttaccatatagctattggattggccatccggtgagcaacagagcaattatatttctatttgttggatatataccatttgattttattaactacaatactctgctttatattctccaattgaatacgaaaag

SEQ ID NO: 19619 - DNA, 731 bp, synthetic construct
  source 1..731: mol_type = other DNA
tgtgggttgctcccacctacagggcccactgggcgccagcacactggtattacggtacctttgtgcgcctgttttatccacccctccccactgcaaattagaagataatcacacgcggtcaataggtgacccaacacgccaattgggtcgtgaccaagcacttctgttgccccggaccgagtatcaataagctgctcgcgcggctgaaggagaaaacgttcgttacccggccaattacttcgagaaacctagtaccaccatggaggttgcgcagcgtttcgttccgcacaaccccagtgtagatcaggtcgatgagtcaccgcaatccccacaggcgactgtggcggtggctgcgttggcggcctgcccatggggaaacccatgggacgcttcaatatcgacatggtgcgaagagtctattgagctaattggtagtcctccggcccctgaatgcggctaatcctaactgcggagcagatacccacactccagtgggcagtctgtcgtaatgggtaactctgcagcggaaccgactactttgggtgtccgtgtttccttttattcctatactggctgcttatggtgacaattaacagattgttaccatatagctactggattggccatccggtgacaaacagagcgatcgtttacttatttgttggtttcgtaccactcaattacaaagttttaaacactcttaattttattataaccctaaacacgttaaa

SEQ ID NO: 19620 - DNA, 711 bp, synthetic construct
  source 1..711: mol_type = other DNA
agggcccattgggcgccagcacactggtatcacggtacctttgtgcgcctgttttatacaccctccccgaatgtaacttagaagctttacctagatggtcaatagaaggtccagcacaccagttggattctgaccaagtacttctgttaccccggactgagtatcaataggctgttcacacggctgaaggagaaaacgttcgttacccggccaattacttcgagaaacctagtaacaccatggaagttgcgtagtgtttcgctccgcacaaccccggtgtagatcaggtcgatgagccaccgcgttccccacgggcgaccgtggcggtggctgcgctggcggcctgcccatggggcaacccatgggacgcttcaatactgacatggtgcgaagagtctattgagctaattggtagtcctccggcccctgaatgcggctaatcctaactgcggagcaggcacccgcaagccagtgggcagtctgtcgtaacgggcaactctgcagcggaaccgactactttgggtgtccgtgtttccttttattcttgaactggctgcttatggtgacaattgaaagattgttaccatatagctattggattggccatccagtgacaagtagagcaattatatatctgtttgttggttttgttccattaaactataaagttttaaacacacttgaatttgtcttgctactcaactcaacaaa

SEQ ID NO: 19621 - DNA, 742 bp, synthetic construct
  source 1..742: mol_type = other DNA
tttaaaacagcctgtgggttgttcccacccacagggcccactgggcgctagcactctggtattacggtacctttgtgcgcctgttttacatccctcccccagatgcaacttagaagcagtacaccaagaccaatagtaggcatggcataccagccatgtgtcggtcaagcacttctgtttccccgggctgagtatcaataaactgctcacgtggttgaaggagaaaacgcccgttacccggctaactacttcgagaagcctattaacaccatgaaagttgcggagtgtttcgctcagcacgatcccggtgtagatcaggccgatgagtcaccgcgttccccacaggtgactgtggcggtggctgcgttggcggcctgcccatggtgcaacccatgggacgcttcaatatggacatggtgtgaagagcccattgagctagttagtagtcctccggcccctgaatgcggctaatcccaactgcggagcacgcgcccccgctccagggggtagtgtgtcgtaacgggcaactctgcagcggaaccgactactttgggtgtccgtgtttcctttttccttttcattggctgcttatggtgacaattgaaagattgttaccatatagctattggattggccatccagtgtcaagcagagctataatttaccaatttatagggtttgtcccgttggatctgaaagctttaaaaacccttaacttggtactactattaaacagtgtaaa

SEQ ID NO: 19622 - DNA, 742 bp, synthetic construct
  source 1..742: mol_type = other DNA
tttaaaacagcctgtgggttgttcccacccacagggcctactgggcgccagcactctggtattacggtacctttgtgcgcctgttttacatccctcccccgaatgcaacttagaagcagtacaccaagaccaatagtaggcatggcataccagccatgtgtcggtcaagcacttctgttcccccgggctgagtatcaataaactgctcacgtggttgaaggagaaagcgcccgttacccggctaactacttcgagaagcctattaacaccatgaaagttgcggagtgtttcgctcagcacgatcccggtgtagatcaggccgatgagtcaccgcgttccccacaggtgactgtggcggtggctgcgttggcggcctgcccatggggcaacccatgggacgcttcaatatggacatggtgtgaagagcccattgagctagttagtagtcctccggcccctgaatgcggctaatcccaactgcggagcacgcgcccccgctccagggggtagcgtgtcgtaacgggcaactctgcagcggaaccgactactttgggtgtccgtgtttcctttttccttttcattggctgcttatggtgacaattgaaagattgttaccatatagctattggattggccatccagtgacaagcagagctataacttaccaatttatagggtttgtcccgttggatctgaaagctttaaaaacccttaacttggtactactattgaacagcgtaaa

SEQ ID NO: 19623 - DNA, 742 bp, synthetic construct
  source 1..742: mol_type = other DNA
tttaaaacagcctgtgggttgttcccgctcacagggcccactgggcgctagcactctggtattacggtacctttgtgcgcctgttttacatccctcccccagatacaacttagaagcagtacaccaagaccaatagtaggcatggcaaaccagccatgtatcggtcaagcacttctgttcccccgggctgagtatcaataaactgctcacgtggttgaaggagaaagcgcccgttacccggctaactacttcgagaagcctattaacaccatgaaagttgcggagtgtttcgttcagcacgatcccggtgtagatcaggccgatgagtcaccgcgttccccacaggtgactgtggcggtggctgcgttggcggcctgcccatggggcaacccatgggacgcttcaatatggacatggtgtgaagagcccattgagctagttagtagtcctccggcccctgaatgcggctaatcccaactgcggagcatgcgcccccactccagggggtagcgtgtcgtaacgggcaactctgcagcggaaccgactactttgggtgtccgtgtttccattttccttttcattggctgcttatggtgacaattgaaagattgttaccatatagctattggattggccatccagtgtcaagcagagctataatttaccaatttatagggtttgtcccgttggatctgagagctttaaaaacccttaatttggtactactattaaacagtgtaaa

SEQ ID NO: 19624 - DNA, 714 bp, synthetic construct
  source 1..714: mol_type = other DNA
ttaaaacagcctgtgggttgttcccaccccagaggcccacgtggcggctagtactctggtatcacggtacctttgtacgcctgttttatatcccttccccccgcaactttagaagcttaacaaaagttcaacagcaggggtgcaaaccagtacctctacgaacaagcacttctgtttccccggtgaaattacatagactgtacccacggtcaaaagtgattgatccgttatccgcttgagtacttcgagaagcctagtatcaccttggaatcttcgacgcgttgcgctcaacactctaccccgggtgtagcttaggctgatgagcctgggcactccccaccggtgacggtggcccaggctgcgttggcggcctacccatggctaatgccatgggacgctagttgtgaacaaggtgtgaagagcctattgagctactcaagaatcctccggcccctgaatgcggctaatcctaaccacggagcaatcgctcacgacccagtgagtaggttgtcgtaatgcgcaagtccgtggcggaaccgactactttgggtgtccgtgtttccctttttattcatactggctgcttatggtgacaatttacagattgttaccatatagctattggattggccatccagtattgtgttacacatattaaaatacttttctacaagcaacaacaacattgtgtttgaaccacaatagccattacaa

SEQ ID NO: 19625 - DNA, 718 bp, synthetic construct
  source 1..718: mol_type = other DNA
cccacgtggcggccagtacaccggtatcacggtacccttgtacgcctgttttatactccctttcccctgcaacttagaagcaaataaaccaagttcaatagaaagggggtacaaaccagtaccaccacgaacaagcacttctgtttccccggtgaggttgtataaactgtctccacggttgaaaacgactgatccgttacccgctcttgtacttcgagaagcctagtatcatcttggaatcttcgatgcgttgcgctcagcactcgaccccggagtgtagcttaggctgatgagtctggacgttccccgccggcgacggtggtccaggctgcgttggcggcctacctgtggcccaaagccacaggacgctagttgtgaacagggtgagaagagcctattgagctacaagagagtcctccggcccctgaatgcggctaatcccaaccacggagcaggtggttgcaatccagcaactagcctgtcgtaacgcgcaagtctgtggcggaaccgactactttgggtgtccgtgtttccttttattcttacaatggctgcttatggtgacaatcatagattgttatcataaagcgaattggattggccatccggtgaaagtcagatcaactattcatttgtttgttggaaccactgtgttagctttacttctcatttaaccaattaatcaaaaacaatacgaggataaaacaacaatactaca

SEQ ID NO: 19626 - DNA, 743 bp, synthetic construct
  source 1..743: mol_type = other DNA
tttaaaacagcctgtgggttgttcccacccatagggcccactgggcgttagcacactggtattacggtacccttgtgcgcctgttttattcaccctaccccattgtaacctagaagctgatcaagtacggtcattaggcagctcagtatgccaactgagtcttgaccaagcacttctgttaccccggactgagtatcaataggctgcttgcgcggctgaaggagaaaacgttcgttatccgaccaattacttcgagaaacctagtaccaccatgaaagttgcgcagtgtttcgctccgcacaaccccagtgtagatcaggccgatgagccaccgcattccccacgggcgaccgtggcggtggctgcgttggcggcctgcccatgggtcaacccatgggacgcttcaaaactgacatggtgtgaagagtctattgagctaattggtagtcctccggcccctgaatgcggctaatcctaactgcggagcagatacccacatgccagtgggcagtctgtcgtaacgggcaactctgcagcggaaccgactactttgggtgtccgtgtttccttttatttctatactggctgcttatggtgacaattgagagattgttaccatatagctattggactggccatctggtgacaaacagagcgattgtttacctatttgttggtttcgtaccattgaattttaaagttttaaaaaccctcaaccttgttttagcatttaacgcagcaaa

SEQ ID NO: 19627 - DNA, 743 bp, synthetic construct
  source 1..743: mol_type = other DNA
ttaaaacagcctgtgggttgtacccacccacagggcccactgggcgttagtacactggtatcccggtacctttgtgcgcctgttttgtgttcccttccccatgttgtaacttagaagcgatacaattttggtcgacagttagcgcaacaaaccagttgcgttttgaccaagcacctctgtgatcccggaccgagtatcaataagctgcttgcgcggctgaaggagaaaccgtccgttacccggctaactacttcgagaaacctagtaacaccatgaacgttgcggagtgtttcgctcagcacaacccccgtgtagatcaggccgatgagtcaccgcattccccacgggcgaccgtggcggtggctgcgttggcggcctgcctgtggggcaacccacaggacgctctaatacagacatggtgcgaagagtctattgagctagttagtagtcctccggcccctgaatgcggctaatcctaactgcggagcacatgcccacgaaccagtgggtggtgtgtcgtaacgggtaactctgcagcggaaccgactactttgggtgtccgtgtttcctttatttctatactggctgcttatggtgacaattgagagattgttgccatatagctattggactggccatctggtgtcaaatagagcaattatttacttgtttgctggctttataccctcaaaccttaaagttttcaaaactctcagtctcattttaaaacttaactcagtaaa

SEQ ID NO: 19628 - DNA, 743 bp, synthetic construct
  source 1..743: mol_type = other DNA
ttaaaacagcttgtgggttgttcccacccacagggcccactgggcgctagtacactggtattacggtacctttgtgcgcctgtttgacccaccttccccaaacgcaacttagaagcacaacttaaatggtcattagacggctcagtatgccaactgagtctcgatcaagcacttctgttaccccggactgagtaccaataggctgctcacgcggctgaaggggaaaccgttcgttacccgaccaactacttcgagaaacctagtaccaccatgaaagttgcgcagcgtttcgctccgcacaaccccagtgtagatcaggccgatgagtcaccgcaaaccccacgggcgactgtggcggtggctgcgctggcggcctgcccatgggacaactcatgggacgctacaatactgacatggtgcgaagagtctattgagctagttggtagtcctccggcccctgaatgcggctaatcctaactgtggagcagatacccacgcaccagtgggcagtctgtcgtaatgggcaactccgcagcggaaccgactactttgggtgtccgtgtttctttttattcctacgctggctacttatggtgacaattgagagactgtaaccatattgctatcgggttggccacctggtgaagaatagaacagttgctcacttgtttgtcagtcttgcaccgttgtaccataaagccttaactgcccctcaacaccgtcataacacttaacacgctgaa

SEQ ID NO: 19629 - DNA, 715 bp, synthetic construct; identical to SEQ ID NO: 883
  source 1..715: mol_type = other DNA

SEQ ID NO: 19630 - DNA, 713 bp, synthetic construct
  source 1..713: mol_type = other DNA
ttaaaacagctctggggttgttcccaccccagaggcccacgtggcggctagtactctggtattacggtacctttgtacgcctgttttgtatcccttcccccgtaactttagaagcttatcaaaagttcaatagcaggggtacaaaccagtacctctacgaacaagcacttctgtttccccggtgatatcacatagactgtacccacggtcaaaagtgattgatccgttatccgcttgagtacttcgagaagcctagtatcaccttggaatcttcgatgcgttgcgctcaacactctgccccgagtgtagcttaggctgatgagtctgggcactccccaccggcgacggtggcccaggctgcgttggcggcctacccatggctgatgccgtgggacgctagttgtgaacaaggtgtgaagagcctattgagctactcaagagtcctccggcccctgaatgcggctaatcctaaccacggagcaaccgctcacaacccagtgagtaggttgtcgtaatgcgtaagtctgtggcggaaccgactactttgggtgtccgtgtttccctttatattcatactggctgcttatggtgacaatttacaaattgttaccatatagctattggattggccacccagtattgtgcaatatatttgagtgtttctttcataagccttattaacatcacatttttaatcacaataaacagtgcaa

SEQ ID NO: 19631 - DNA, 718 bp, synthetic construct
  source 1..718: mol_type = other DNA
acccacagggcccactgggcgctagtacactggtatcacggtacctttgtgcgcctgtttgacccaccttccccaaacgcaacttagaagcacaacttaaatggtcattagacggctcagtatgccaactgagtctcgatcaagcacttctgttaccccggactgagtaccaataggctgctcacgcggctgaaggggaaaccgttcgttacccgaccaactacttcgagaaacctagtaccaccatgaaagttgcgcagcgtttcgctccgcacaaccccagtgtagatcaggccgatgagtcaccgcaaaccccacgggcgactgtggcggtggctgcgctggcggcctgcccatgggacaactcatgggacgctacaatactgacatggtgcgaagagtctattgagctagttggtagtcctccggcccctgaatgcggctaatcctaactgtggagcagatacccacgcaccagtgggcagtctgtcgtaatgggcaactccgcagcggaaccgactactttgggtgtccgtgtttctttttattcctacgctggctacttatggtgacaattgagagactgtaaccatattgctatcgggttggccacctggtgaagaatagaacagttgctcacttgtttgtcagtcttgcaccgttgtaccataaagccttaactgcccctcaacaccgtcataacacttaacacgctgaa

SEQ ID NO: 19632 - DNA, 743 bp, synthetic construct
  source 1..743: mol_type = other DNA
ttaaaacaggcctgtgggttgttcccacccacagggcccactgggcgttagcacactggtatcacggtacccttgtgcgcctgttttatctaccctaccctattgtaacttagaagctaaccaagtacggtcattaggcagctcagtatgccaactgagttttgaccaagcacctctgttaccccggactgagtatcaataggctgcttgcgcggctgaaggagaaaacgttcgttacccgaccaattacttcgagaaacccagtatcaccatggaagttgcgcagtgtttcgctccacacaaccccagtgtagatcaggccgatgagtcaccgcattccccacgggcgaccgtggcggtggctgcgctggcggcctgcccatgggtcaacccatgggacgcttcaaaactgacatggtgtgaagagtctattgagctaattggtagtcctccggcccctgaatgcggctaatcctaactgcggagcagatacccacacgccagtgggcggtctgtcgtaacgggcaactctgcagcggaaccgactactttgggtgtccgtgtttccttttatccctatactggctgcttatggtgacaattgagagattgttaccatatagctattggattggccatccggtgacaaacagagcgattatttacctatttgttggttttgtaccattaaattttaaagttttgaaaactctcaaccttgttttggaatttaacgcagcaag

SEQ ID NO: 19633 - DNA, 713 bp, synthetic construct
  source 1..713: mol_type = other DNA
ttaaaacagcctgtgggttgttcccaccccagaggcccacgtggcggctagtactctggtattacggtacctttgtacgcctgttttgtatcccttcccccgtaactttagaagcttatcaaaagttcaatagcaggggtacaaaccagtacctctacgaacaagcacttctgtttccccggtgatatcacatagactgtacccacggtcaaaagtgattgatccgttatccgcttgagtacttcgagaagcctagtatcaccttggaatcttcgatgcgttgcgctcaacactctgccccgagtgtagcttaggctgatgagtctgggcactccccaccggcgacggtggcccaggctgcgttggcggcctacccatggctgatgccgtgggacgctagttgtgaacaaggtgtgaagagcctattgagctactcaagagtcctccggcccctgaatgcggctaatcctaaccacggagcaaccgctcacaacccagtgagtaggttgtcgtaatgcgtaagtctgtggcggaaccgactactttgggtgtccgtgtttccctttatattcatactggctgcttatggtgacaatttacaaattgttaccatatagctattggattggccacccagtattgtgcaatatatttgagtgtttctttcataagccttattaacatcacatttttaatcacaataaacagtgcaa

SEQ ID NO: 19634 - DNA, 712 bp, synthetic construct
  source 1..712: mol_type = other DNA
ttaaaacagcctgtgggttgttcccaccccagaggcccacgtggcggctagtactctggtatcacggtacctttgtacgcctgttttatatcccttcccccgcaactttagaagcttaacaaaagttcaacagcaggggtacaaaccagtgcctctacgaacaagcacttctgtctccccggtgagaacacatagactgtacccacggtcaaaagtgattgatccgttatccgcttgagtacttcgagaagcctagtatcaccttggaatcttcgacgcgttgcgctcaacactctaccccgggtgtagcttaggctgatgagtctgggtactccccaccggtgacggtgacccaggctgcgttggcggcctacccatggctaatgccatgggacgctagttgtgaacaaggtgtgaagagcctattgagctactcaagaatcctccggcccctgaatgcggctaatcttaaccacggagcaatcgctcacgacccagtgagtaggttgtcgtaatgcgtaagtccgtggcggaaccgactactttgggtgtccgtgtttcctttttattcatattggctgcttatggtgacaatttacagattgttaccatatagctattggattggccatccagtattgtgttacacatattaaaatacttttctacaagcaataacaacattgtatttgaaccacaatagccattacaa

SEQ ID NO: 19635 - DNA, 712 bp, synthetic construct
  source 1..712: mol_type = other DNA
ttaaaacagcctgtgggttgttcccgccccagaggcccacgtggcggctagtactctggtatcacggtacctttgtacgcctgttttatatcccttccccgcaactttagaagcttaacaaaagttcaacagcaggggtacaaaccagtgcctctacgaacaagcacttctgtttccccggtgaaatcacatagactgtacccacggtcaaaagtgattgacccgttatccgcttgagtacttcgagaagcctagtatcaccttggaatcttcgacgcgttgcgctcaacactctaccccgagtgtagcttaggctgatgagtctgggcactccccaccggtgacggtggcccaggctgcgttggcggcctacccatggctaatgccatgggacgctagttgtgaacaaggtgtgaagagcctattgagctactcaagagtcctccggcccctgaatgcggctaatcctaaccacagagcaatcgctcacgacccagtgagtaggttgtcgtaatgcgtaagtccgtggcggaaccgactactttgggtgtccgtgtttccttttttattcatactggctgcttatggtgacaatttacagattgttaccatatagctattggattggccatccagtactgtgttatatacatcagaatacttttctacaagtaacatcaacattgtatttgaaccacaatagccattacaa

SEQ ID NO: 19636 - DNA, 732 bp, synthetic construct
  source 1..732: mol_type = other DNA
cctgtgggttgatcccacccacagggcccattgggcgctagcacactggtatcacggtacctttgtgcgcctgttttatctacccttcccaatgcaacttagaagcatgcaacaaacggtcaataggcggttcagtgaaccaactgagcctcgaccaagtacttctgttaccccggactgagtatcaataggctgctcacgtggctgatggagaaaacgtccgttacccggccaattacttcgagaaacctagtaccaccatgaaggttgcgcagcgtttcgctccgcacaaccccagtgtagatcaggtcgatgagtcactgcgctccccacgggcgaccgtggcggtgactgcgttggcggcctgcccatggggcatcccatgggacgcttcaatactgacatggtgtgaagagtctattgagctaattggtagtcctccggcccctgaatgcggctaatcctaactgcggagcagatacccacgcaccagtgggcagtctgtcgtaacgggcaactctgcagcggaaccgactactttgggtgaccgtgtttccttttattctaatgctggctgcttatggtgacaattgaaagattgttaccatatagctattggattggccatccggtaacaaacagagcaattatttacctgtttattggttttatacctctcaactacaaggttataaatactcttaactttattttagcacttaacacagcaaa

SEQ ID NO: 19637 - DNA, 722 bp, synthetic construct
  source 1..722: mol_type = other DNA
ttcccacccacagggcccattgggcgccagcacactggtatcacggtacctttgtgcgcctgttttatacaccctccccgaatgcaacttagaagctttacctagatggtcaatagaaggtccagcacaccagttggattccgaccaagcacttctgttaccccggactgagtatcaataggccgtttgcacggctgaaggagaaaacgttcgttacccggccaattacttcgagaaacctagtaacaccattaaagttgcgcagtgtttcgctccacacgaccccggtgtagatcaggtcgatgagtcaccgcgttccccacgggcgaccgtggcggtggctgcgctggcggcctgcccatggggcaacccatgggacgcttcaatactgacatggtgcgaagagtctattgagctaattggtaatcctccggcccctgaatgcggctaatcctaactgcggagcaggcaccctcaagccagagggcagtctgtcgtaacgggcaactctgcagcggaaccgactactttgggtgtccgtgtttccttttattcttgaactggctgcttatggtgacaattggaagattgttaccatatagctattggattggccatccagtgacaaacagagcgattatatatttgtttgttggctttgttccattaaactataaagctttaaacacacttaaatttgtcttactactcaactcagcaaa

SEQ ID NO: 19638 - DNA, 713 bp, synthetic construct
  source 1..713: mol_type = other DNA
ttaaaacagctctggggttgttcccaccccagaggcccacgtggcggctagtactctggtatcacggtacctttgtacgcctgttttatatcccttcccccgtaactttagaagtttaacaaaagttcaatagcaggggtgcaaaccagtacctccacgaacaagcacttctgtctccccggtgaagtcacatagactgtacccacggtcaaaagtgattgatccgttatccgcttgagtacttcgagaagcctagtaccaccttgggatcttcgatgcgttgcgctcaacactataccccgagtgtagcttaggctgatgagtctgggcgtcccccaccggtgacggtggcccaggctgcgttggcggcctacccatggctaacgccacgggacgctagttgtgaacaaggtgtgaagagcctattgagctactcaagagtcctccggcccctgaatgcggctaatcccaaccacggagcaatcgctcacgacccagtgagtaggttgtcgtaatgcgcaagtccgtggcggaaccgactactttgggtgtccgtgtttccctttttacttatactggctgcttatggtgacaatttacagattgttaccatatagctattggattggccatccagtattgtgttacatatattaaaatactttactacaagcaacaacaacattgtgtttgaaccacaatagctactaaga

SEQ ID NO: 19639 - DNA, 742 bp, synthetic construct
  source 1..742: mol_type = other DNA
ttaaaacaccctgtgggttgttcccacccacagggcccatagggcgctagcacactggtattgcggtacctttgtgcgcctgttttattcatccttccccaatggaacttagaagcttaactcaaccggtcaatagacagcccagtacaccaactgggttacgaccaggcactcctgtttccccggactgagtatcaataagctgctcacgcggctgaaggagaaaacgttcgttacccggccaattacttcgagaaacctagtaccgccatggacgttgcgcagtgtttcgctccgcacaaccccagtgtagatcaggtcgatgagtcaccgcgatcctcacgggcgaccgtggcggtggctgcgctggcggcctgcccatggggcaacccatgggacgcttcaatactgacatggtgtgaagagtctatcgagctaattggtagtcctccggcccctgaatgcggctaatcctaactgcggggcagatacccacacgccagtgggcagtctgtcgtaacgggcaactccgcagcggaaccgactactttgggtgtccgtgtttccttttattcttatattggctgcttatggtgacaattgaaagattgttgccatatagctattggattggccatccagtcagtaatagagcaattatatttctttttgttgggtttgtaccacttgatattaacaattataacaccttactatacatcgtccatttgaacacaagaaa

SEQ ID NO: 19640 - DNA, 713 bp, synthetic construct
  source 1..713: mol_type = other DNA
ttaaaacagctctggggttgttcccaccccagaggcccacgtggcggctagtactctggtatcacggtacctttgtacgcctgttttatatcccttcccccgcaactttagaagcttaacaaaagttcaatagcaggggtgcaagccagtacctctatgaacaagcacttctgtctccccggtgaaattacatagactgtacccacggtcaaaagtaattgatccgttatccgcttgagtacttcgagaagcctagtatcaccttggaatcttcgacgcgttgcgctcaacactctaccccgggtgtagcttaggctgatgagtctgggcaccccccaccggtgacggtggcccaggctgcgttggcggcctacccatggctaacgccatgggacgctagttgtgaacaaggtgtgaagagcctattgagctactcaagagtcctccggcccctgaatgcggctaatcccaaccacggagcaattgctcacgatccagtgagtaggttgtcgtaatgcgcaagttcgtggcggaaccgactactttgggtgtccgtgtttccctttttacttatactggctgcttatggtgacaatttacagattgttaccatatagctattggattggccatccagtattgtgttacacatattaaaatacttttctacaagcatcaacaacattgtgtttggaccacaataatcactacaa

SEQ ID NO: 19641 - DNA, 731 bp, synthetic construct
  source 1..731: mol_type = other DNA
tgtgggttgtacccacccacagggcccattgggcgtcagcaccctggtatcacggtacctttgtgcgcctgttttatatcccttcccccaattgtaacttagaagaaacacacaccgatcaacagcaagcgtggcacaccagccatgttttggtcaagcacttctgttaccccggactgagtatcaatagactgctcacgcggttgaaggagaaagcgtccgttatccggccagctacttcgagaaacctagtaacaccatggaagttgcggagtgtttcgctcagcactaccccagtgtagatcaggtcgatgagtcaccgctttccccacgggcgaccgtggcggtggctgcgttggcggcctgcctatgggggaacccataggacgctctaatacagacatggtgcgaagagtctattgagctagctggtattcctccggcccctgaatgcggctaatcctaactgtggagcacatgcccctaatccaaggggtagtgtgtcgtaatgagcaattccgcagcggaaccgactactttgggtgtccgtgtttcctcttattcttgtactggctgcttatggtgacaattgagagattgttaccatatagctattggattggccatccggtgactaatagagctattgtgtatctctttgttggatttgtaccacttaatttgaaagaaatcaggacactacgctacattttactattgaacaccgcaaa

SEQ ID NO: 19642 - DNA, 726 bp, synthetic construct
  source 1..726: mol_type = other DNA
tttgatcccacccacagggcccatagggcgctagcactctggtattgcggtacctttgtgcgcctgttttatattcccacccccaatcgcaacttagaagcagtacttcacgaccaacagtgggcgtgacaaaccagccacgtctcggtcaagcacttctgtctccccggactgagtatcaataagctgctcacgcggctgagggagaaaacgtccgttatccggccgattacttcgagaaacccagtaccaccacgaaagttgcgcagcgtttcgatccgcacaaccccagtgtagatcaggtcgatgagtcaccgcgttccccacgggtgaccgtggcggtggctgcgttggcggcctgcccatgggggaacccatgggacgcttcaatactgacatggtgtgaagagtctattgagctaattggtagtcctccggcccctgaatgcggctaatcctaactgtggagcagattcccgcatgccagcgggtggtctgtcgtaacgggcaactctgcagcggaaccgactactttgggtgtccgtgtttccctttaatcctatattggctgcttatggtgacaattgagagattgttaccatatagctattggattggccatccggtgacaaacagagcaattatttaccaatttattggttttgtgccattgaatttcaacgcattcaaaactcttaaccttattttgactcttaatacagcaaa

SEQ ID NO: 19643 - DNA, 720 bp, synthetic construct
  source 1..720: mol_type = other DNA
ccactcacagggcccactgggcgttagctcactggtattgcggtacctttgtgcgcctgttttatacaccctctccccatattaacttagaagtacattttatatgatcaataggcggctcagtatgccaactgagtctcgatcaagcacttctgttgtcccggaccgagtatcaataagctactcacgtggctgaaggagaaaacgttcgttacccggccagctacttcgagaaacctagtaccaccatgaatgttgcgcggcgtttcgctccgcactaccccagtgtagatcaggtcgatgagtcaccgcactcctcacgggcgaccgtggcggtggctgcgctggcggcctgcccgtggggcaacccatgggacgcttcaatacagacatggtgtgaagagtctattgagctagttggtagtcctccggcccctgaatgcggctaatcctaactgcggagcagatccccacaagccagtgggcagtctgtcgtaatgggcaactctgcagcggaaccgactactttgggtgtccgtgtttccttttattcttatactggctgcttatggtgacaattgaaggattgttgccatatagctattggattggccatccggtgtctaacagagcaataatttatctttttgttggattcgtcccacttaaccacagagcacttgcaacgctcaattacatcatagatctcaacacaacaaa

SEQ ID NO: 19644 - DNA, 812 bp, synthetic construct
  source 1..812: mol_type = other DNA
ttaaaacagcctgggggttgtacccacccctggggcccacgtggcgctagtactctggtttgcttaaaacctttgtacgcctgttttcccctcccttaaataaattaagatctctgccaatgtggggagtagtccgactccgcaccgatacgtcgcaccagcagaccggttcgcataggacccttctgcggattggtatgagtacccccccgaaacttagaagttattacacaccgaccaatagcggcgttgcagccggcagcgcaacggtcaagcacttctgtttccccggcgccaagcgtcgttacccgcccagcctactacgggaagcctagtatggtcccaatcaattgcgcagttgcgttcagccacaaccccagtggtagctctgaggaatggggctcgcctcccccccacagtaatgtggtggcctgcccgcgcgtgtcctcgggttcactcctagagtgttcactgcaattttgagtaagatccgaagagcctactgtgctaggttggttttcctccggagccgtgaatgctgctaatcccaacctccgagcgtgtgcgcacaatccagtgttgctacgtcgtaacgcgtaagttggaggcggaacagactactttcggtactccgtgtttccttattttatttacttattttatggtgacactgactgatatttgtgagtttgctcggctgcccttgaatattgctttgtactatttaatagcatttcacagaactactcagctttcaattgagcttattgacttcgctgtctttcttaatcagatacacaaaaccacacata

SEQ ID NO: 19645 - DNA, 711 bp, synthetic construct
  source 1..711: mol_type = other DNA
ttaaaacagcctgtgggttgttcccaccccagaggcccacgtggcggctagtactctggtatcacggtacctttgtacgcctgttttatatcccctcccccgcaactttagaagcttaataaaagttcaacagcaggggtacaaaccagtgcctctacgaacaagcacttctgtttccccggtgaaatcacatagactgtacccacggtcaaaagtgatcgatccgttatccgcttgagtacttcgagaagcctagtatcaccttggaatcttcgacgcgttgcgctcaacactctaccccgagtgtagcttaggctgatgagtctgggcactccccaccggtgacggtggcccaggctgcgttggcggcctacccacggctaatgccgtgggacgctagttgtgaacaaggtgtgaagagcctattgagctgctcaagagtcctccggcccctgaatgcggctaatcctaaccatggagcaatcgctcacgacccagtgagtaggttgtcgtaatgcgtaagtccgtggcggaaccgactactttgggtgtccgtgtttccctttttattcatactggctgcttatggtgacaacttacagattgttaccatatagctattggattggccatccagtattgtgttatatatcagaatacttttctataagtaacaccaacattgtatttggaccacaataatcattacaa

SEQ ID NO: 19646 - DNA, 722 bp, synthetic construct
  source 1..722: mol_type = other DNA
ttcccacccacggggcccattgggcgccagcacactggtatcacggtacctttgtgcgcctgttttatacaccctccccgaatgtaacttagaagctttacccagatggtcaatagaaagtccagcacaccagttggattctgaccaagcacttctgttaccccggactgagtatcaataggctgttcacacggctgaaggagaaaacgttcgttacccggccaattacttcgagaaacctagtaacaccatgggagttgcgcagtgtttcgctccgcacaaccccagtgtagatcaggtcgatgagccaccgcgttccccacgggcgaccgtggcggtggctgcgctggcggcctgcccatggggcaacccatgggacgcttcaatactgacatggtgcgaagagtctattgagctaattggtagtcctccggcccctgaatgcggctaatcctaactgcggagcaggcacccgcaagccagtgggcagtctgtcgtaacgggcaactctgcagcggaaccgactactttgggtgtccgtgtttccttttattcttgaactggctgcttatggtgacaattgaaggattgttaccatatagctattggattggccatccagtgacaaatagagcaattatatatctgtttgttggttttgttccattaaactataaagttttgaacacacttgaatttgttatactactcaactcaacaaa

SEQ ID NO: 19647 - DNA, 722 bp, synthetic construct
  source 1..722: mol_type = other DNA
ttcccacccacagggcccattgggcgctagcacactggtattacggtacctttgtgcgcctgttttatacaccctccccgaatgtaacttagaagctttacctagatggtcaatagaaggtccagcacaccagctggattccgaccaagcacttctgttaccccggactgagtatcaataggctgtttgcacggctgaaggagaaaacgttcgttacccggccaattacttcgagaaacctagtaacaccatggaagttgcgcagtgtttcgttccgcacgaccccggtgtagatcaggccgatgagccaccgcgttccccacgggcgaccgtggcggtggctgcgctggcggcctgcccatggggcaacccatgggacgcttcaatactgacatggtgcgaagagtctattgagctaattggtagtcctccggcccctgaatgcggctaatcccaactgcggagcaggcaccctcaagccagagggcagtctgtcgtaacgggcaactctgcagcggaaccgactactttgggtgtccgtgtttccttttatccttgaactggctgcttatggtgacaattgaaagattgttaccatatagctattggattggccatccagtgacaaatagagcaattatatatctgtttgttggttttgtgccattaaactataaagttttaaacacgcttaaatttgtcttactactcaactcagcaaa

SEQ ID NO: 19648 - DNA, 743 bp, synthetic construct
  source 1..743: mol_type = other DNA
tttaaaacagcctgtgggttgttcccacccacagggcccaatgggcgctagcacactggtatcatggtacctttgtgcgcctgttttattcacccccacccaatgtaacgtagaagcataagccaagaggtcaatagatggctcagtacaccaactgggtttagaccaagcacttctgttaccccggaccgagtatcaataggctgctcacgcggctgaaggagaaaacgttcgttacccggccaactacttcgagaagcccagtaccaccatgaaggatgcgcagtgtttcgttcagcacaaccccagtgtagatcaggccgatgagccaccgtaatccccacgggcgaccgtggcggtggctgcgctggcggcctgcccatggggcaacccatgggacgcttcaattccgacatggtgcgaagagtctattgagctagttggtagtcctccggcccctgaatgcggctaatcctaactgcggagcagacacccacaaaccagtgggctgtttgtcgtaacgggcaactccgcagcggaaccgactactttgggtgtccgtgtttccttttattcttatattggctgcttatggtgacaattgaaagattgttgccatatagctattggattggccatccggtaacaaacagagctattatttacctttttgttggctttgtgccgttgaatttcaaagttataaaaaccataaacttcattttgacactcaatacagcaaa

SEQ ID NO: 19649 - DNA, 744 bp, synthetic construct
  source 1..744: mol_type = other DNA
ttaaaacagccccgtgggttgttcccacccacagggcccaccgggcgctagcacactggtatctcggtacctttgtgcgcctgttttatccacccttttcccatttaatttagaagcacgcgccaagacggtcaatagggagcccagtaagccaattgggctatgaccaagcacttctgtaaccccgggctgagtatcaataagctgctcgcgtggctgaaggagaaaaagctcgttacccggccaattacttcgagaaacccagtagcatcatgaaagttgcgcagtgtttcgctccacacaaccccagtgtagatcaggccgatgagtcaccgcgttccccacgggtgaccgtggcggtggctgcgctggcggcctgcccatggggccacccatgggacgcttcaatactgacatggtgtgaagagtctattgagctaattggtagtcctccggcccctgaatgcggctaatcctaactgcggagcagatgcccacgcaccagtggggagtctgtcgtaacgggtaactctgcagcggaaccgactactttgggtgtccgtgtttccttttatttctactctggctgcttatggtgacaattgaaaggttgttaccatatagctattggattggccatccggtgacaaatagagcgattatttacttgtttgttgggtttgtgccactgaactacaaagctttaaacactcttaactacattttaatccttaactcattaaa

SEQ ID NO: 19650 - DNA, 716 bp, synthetic construct
  source 1..716: mol_type = other DNA
ccacagggcccaccgggcgtcagcacactggtattgcggtacctttgtgcgcctgttttatatatccctacccgaacgtaacctagaagcaaattaatgaggatcgatagtcagcacggcacaccagccgtgttttgatcaagcacttctgttaccccggaccgagtatcaataggctactcacgtggccgaaggagaaagtgttcgttacccggccaattacttcgagaaacccagtaacaccatgaaggttgcgcagcgtttcgctccgcacaaccccagtgtagatcaggtcgatgagtcaccgcattccccacgggcgaccgtggcggtggctgcgctggcggcctgcccatagggtgacctatgggacgcttcaatactgacatggtgcgaagagtctattgagctaattggtagtcctccggcccctgaatgcggctaatcctaactgcggagcaggtgcccacaaaccagtgggtagtctgtcgtaatgggcaactctgcagcggaaccgactactttgggtgtccgtgtttccttttattcttatactggctgcttatggtgacaattgaaaggttgttaccatatagctattggattggccatccggtgacaaacagagcgattatatacttgtttgttggtttcataccactaaatcacaagactttaaacacccttaatttcataatagcattaaatacagcaag

SEQ ID NO: 19651 - DNA, 726 bp, synthetic construct
  source 1..726: mol_type = other DNA
ttcccacccacagggcccactgggcgctagcacactggtatcacggtacctttgtgcgcctgttttaggcttcctcccccactatagtaaattagaagcttgaactacacggccaacagacaacccggtacaccaaccgggccccggccaagcacttctgtatccccggactgagtatcagtaggctgctcgcgcggctgaaggagaaaacgttcgttacccggccacttacttcgagaaacctagtaacgccatgaaagttgcgtagcgtttcgctccgcacaaacccagtgtagatcaggtcgatgagtcaccgcatcccccacgggcgaccgtggcggtggctgcgttggcggcctgcccatggggtaacccatgggacgcttcaatactgacatggtgcgaagagtctattgagctaagtggtaatcctccggcccctgaatgcggctaatcctaactgcggagcagatacccacactccagtgggcagtctgtcgtaacgggtaactctgcagcggaaccgactactttgggtgtccgtgtttccttttgtcttttatactggctgcttatggtgacaattgaaagattgttaccatatagctattggattggccatccggtgtcaaacagagcaattatttacttgtttgttggttatatacctctcgacaccaaggttctaaaaacactcaactacatcttgttattgaatacgttgaa

SEQ ID NO: 19652 - DNA, 743 bp, synthetic construct
  source 1..743: mol_type = other DNA
ttaaaacagcctgtgggttgctcccacccacagggcctactgggcgctagcacactggtatcacggtacctttgtgcgcctgttttatctacccttccccagagaaacttagaagcttaacttgaacggtcaacaggaaacccagcataccagctgggtcgtgaccaagcacttctgtaaccccggaccgagtatcaataagctgctcacgcggctgaaggagaaaacgttcgttacccggccaattacttcgagaaacccagtaccaccatgaacgttgcgcagtgtttcgctccgcacaaccccagtgtagatcaggccgatgagtcaccgcattccccacgggcgaccgtggcggtggctgcgctggcggcctgcccatggggcaacccatgggacgcttcaatactgacatggtgtgaagagtctattgagctaattggtagtcctccggcccctgaatgcggctaatcccaactgcggagcagatacccgcatgccagcgggcagtctgtcgtaacgggcaactctgcagcggaaccgactactttgggtgtccgtgtttcctattattttttacactggctgcttatggtgacaattgagagattgttaccatatagctattggattggccatccggtatctaacagagcaatcatttatctgtttgttggattcatacccttaaattttaaagttctcaaaacattacaattcattatacaactgaatacagcaaa

SEQ ID NO: 19653 - DNA, 742 bp, synthetic construct
  source 1..742: mol_type = other DNA
ttaaaacagcctgtgggttgatcccacccacagggcccactgggcgctagcacactggtattacggtacctttgtgcgcctgttttatctacccttgcccaatgcaacatagaagcttagtccaaaaggtcaataggcagcccagtgcaccaactgggtccagaccaagcacttctgttaccccggaccaagtatcagtaggctgctcacgcggtgaaggagaaaacgttcgttacccggccaactacttcgagaaacctagtagcaccatgaaggttgcgcagtgtttcgctccgcacagccccagtgtagatcaggtcgatgagccaccgcattccccacggggtgaccgtggcgggtggctgcgttggcggcctgcccatggggtaacccatgggacgcttcaatactgacatggtgtgaagagtctattgagctagttggtagtcctccggcccctgaatgcggctaatcctaactgcggagcgtgcgcttgcaacccagtgagtagcacgtcgtaatgggtaactctgcagcggaaccgactactttgggtgtccgtgtttcctttattccttgtctggctgcttatggtgacaattgagagattgttgccatatagctattggattggccatccggtatctaacagggcgatcatttacctgtttgttggtttcatacccttgaatcttgaggtttataataccctcactcttataataaaactcaatacatcaag

SEQ ID NO: 19654 - DNA, 745 bp, synthetic construct
  source 1..745: mol_type = other DNA
ttaaaacagcctgtgggttgttcccacccacagggcccactgggcgctagcacactggtatcccggtacctttgtgcgcctgttttatctacccctccccccaatcgtaacttagaagttcatcacacgtggtcaataggtggctcagtatgccaactgggttctgaccaagcacttctgttaccccggaccaagtatcaataggctgctcacgcggctgaaggagaaaacgttcgttatccggccaattacttcgagaaacctagtaccaccatggaggttgcgcagcgtttcgctccgcacaaccccagtgtagatcaggccgatgagtcaccgcactcctcacgggcgaccgtggcggtgactgcgttggcggcctgcccatggggcaacccatgggacgcttcaatactgacatggtgcgaagagtctattgagctaattggtattcctccggcccctgaatgcggctaatcctaactgcggagcagatacccacatgccagtgggcagtctgtcgtaacgggtaactctgcagcggaaccgactactttgggtgtccgtgtttccttttattcttatattggctgcttatggtgacgattgagagattgttaccatatagctattggattggccatccggtgacaaacagagcaattgtttatctatttgttggtttcataccattaaattttaaagtcttgagaaccattaacttgattatactattcaattcagcaaa

SEQ ID NO: 19655 - DNA, 743 bp, synthetic construct
  source 1..743: mol_type = other DNA
ttaaaacagcctgtgggttgtacccacccacagggcccactgggcgctaccacactggtatcccggtacctttgtgcgcctgttttatccacccccaccctgaggcaacatagaagcataccactaaaggtcaataggcgatccagtactccaactgggtttggaccaagcacttctgttaccccggaccgagtaccaataagctgctcgcgtggctgaaggggaaagtgttcgttacccgaccaattacttcgaaaaacctagtaccaccatgaaagttgcgcagcgtttcgctccgcacaaccccagtgtagatcaggctgatgagtccccgcattccccacgggcgaccgtggcggtggctgcgttggcggcctgcccatggggcaacccgtgggacgcttcaacactgacatggtgtgaagagtctattgagctaattggtagtcctccggcccctgaatgcggctaatcctaactgcggagcagatacccacacgccagtgggcagtctgtcgtaacgggcaactctgcagcggaaccgactactttgggtgtccgtgtttcctttttattttacactggctgcttatggtgacaattgagagattgttaccatatagctattggattggccatccggtgacaagtagagcaattatctacctgtttgttggttttgttccattaaattttaaagttctaagaacccttaactttatcttagtactcaatacggcaaa

SEQ ID NO: 19656 - DNA, 738 bp, synthetic construct
  source 1..738: mol_type = other DNA
aacagcctgtgggttgttcccacccacagggcccactgggcgcttgcacactggtatcacggtacctttgtgcgcctgttttatccacccccccctaatcgagtttagaagtcaagcacaactggtcgacaggtagcccagcacaccagctgggttctgaccaagcacttctgtttacccggactgagtatcaataggctgctcgcgcggctgaaggagaaaacgttcgttacccggccaattacttcgagaaacctagtaccgccatgaacgctgcgcggcgtttcgttccgcacaaccctagtgtagatcaggtcgatgagtcaccgcgttccccacgggtgaccgtggcggtggctgcgctggcggcctgcccatggggtaacccatgggacgcttcaatgctgacatggtgcgaagagtctattgagctaattggtagtcctccggcccctgaatgcggctaatcctaactgcggagcagacactcacacgccagtgggcagtctgtcgtaacgggcaactccgcagcggaaccgactactttgggtgtccgtgtttccttttattcttgcactggctgcttatggtgacaattgaaaggttgttaccatttagctattggattggccatccggtgagcaacagagcaattatatttctatttgttggatatataccatttgattttattaactacaatactctgctttatattctccaattgaatacgaaaag

SEQ ID NO: 19657 - DNA, 725 bp, synthetic construct
  source 1..725: mol_type = other DNA
gttcccacccacagggcctactgggcgctagcacactggtatcacggtacctttgtgcgcctgttttataatccctccccccggacgcaacttagaagctgaacctaagcggtcaacaggcggctcagaacaccatctgggtctcgaccaagcacttctgtttccccggactgagtatcaataagctgcctacgcggctgaaggaaaaaacgtccgttatccggccaattacttcaagaaacccagtaccaccatgaaggttgcgcagcgtttcgctccgcacaaccccagtgtagatcaggtcgatgagtcaccgcattcctcacgggcgaccgtggcggtggctgcgctggcggcctgcccatggggcaacccatgggacgcttcaatactgacatggtgcgaagagtcaattgagctaattggtagtcctccggcccctgaatgcggctaatcctaactgtggagcagatgcccacgtaccagtgggtagtctgtcgtaacgggcaactccgcagcggaaccgactactttgggtgtccgtgtttctctttattcttatgttggctgcttatggtgacaattgagagattgttaccatatagctattggattggccatccagtgacgaatagagcgattgtatatctttttgttggattcgtaccattaaacaaaacaaattacaaaaccttgtgttacattattagattaaacacagcaaa

SEQ ID NO: 19658 - DNA, 742 bp, synthetic construct
  source 1..742: mol_type = other DNA
ttaaaacagctctggggtggttcccaccccagaggcccacgtggcggccagtactccggtattgcggtacccttgtacgcctgttttatactcccttcccccgtaacttagaagaaataaaccaagttcactaggagggggtacaaaccagtaccaccacgaacaagcacttctgtttccccggtgacattgcatagactgtacccacggttgaaagcgactgatccgttacccgctactgtacttcgagaagcctagtaccatcttggaatcttcgatgcgttgcgctcagcactcaaccccagagtgtagcttaggtcgatgagtctggacaatccccaccggtgacggtggtccaggctgcgttggcggcctacctgtggcccaaagccacaggacgctagttgtgaacaaggtgtgaagagcctattgagcttcagtagagtcctccggcccctgaatgcggctaatcccaaccacggagcaggtggtcataatccaatgactggcctgtcgtaacgcgcaagtctgtggcggaaccgactactttgggtgtccgtgtttccttttattttgtcaatggctgcttatggtgacaatctaagattgccatcatatagcttttggattggccatccggtattattttgagttatttgatttgttgtccacagctctttacagtatcacttaactattattgtttgtattttgctccttggatcacaaccaggtaatcaga

SEQ ID NO: 19659 - DNA, 743 bp, synthetic construct; identical to SEQ ID NO: 1049
  source 1..743: mol_type = other DNA

SEQ ID NO: 19660 - DNA, 744 bp, synthetic construct
  source 1..744: mol_type = other DNA
ttaaaacagtctgtgggttgttcccacccacagggcccacgtggcgctagcacaccggtattccggtacccttgtgcgcctgttttatacacccttgcccccatgtaacttagaaggaaagcaacaacgatcaacagcaggtgtggcatcccagtcacatcatgatcaagcacttctgtctccccggactgagtatcaacaagctgctcgcgcggctgaaggagaaaacgttcgttacccggccaattacttcgagaaacccagtaacgccatggaggttgcgcagtgtttcgctccacacaaccccagtgtagatcaggtcgatgagtcaccgcattcccccacgggtgaccgtggcggtggctgcgctggcggcctgcccatggggtaacccatgggacgcttcaatactgacatggtgtgaagagtctattgagctaattggtagtcctccggcccctgaatgcggctaatcctaactgcggagcagatactcacatgccagtgagcagtctgtcgtaacgggtaactctgcagcggaaccgactactttgggtgtccgtgtttccttttattccttatttggctgcttatggtgacaattgagagattgttgccatatagctattggattggccatccagtgacaaacagagcaattgtgtatctatttgttggttttgtaccactaaattacaataactacaacaccttactctacattgtccacttaaacacgcagaa

SEQ ID NO: 19661 - DNA, 743 bp, synthetic construct
  source 1..743: mol_type = other DNA
ttaaaacagcctgtgggttgatcccacccacagggcccactgggcgctagcacactggtattgcggtacctttgtgcgcctgttttatccacccccccccaacagtaacttagaagcacgaataatgtggtcaacaggaagctcagtaaaccaactgggtcttgaccaagcacctctgttaccccggactgagtatcaataagctgctcgcgtggctgaaggagaaaacgtccgttacccggccaattacttcgagaaacccagtaccaccatggaggttgcgcagcgtttcgctccgcacaaccccagtgtagatcaggtcgatgagtcaccgcaatcctcacgggtgaccgtggcggtggctgcgctggcggcctgcccatggggcaacctatgggacgcttcaatactgacatggtgcgaagagtctattgagctaattggtagtcctccggcccctgaatgcggctaatcctaactgcggagcagacatccacacaccagtggacagtctgtcgtaatgagcaattctgcagcggaaccgactactttgggtgtccgtgtttccttttatccttttattggctgcttatggtgacaattgagagattgttaccatatagctattggattggccatccggtgagcaacagagcaattgtatttctctttgtaggatttgtaccgttgaattacaacaactacaacaccttactctacattatccacttgaacacgcggaa

SEQ ID NO: 19662 - DNA, 743 bp, synthetic construct
  source 1..743: mol_type = other DNA
ttaaaacagcctgtgggttgttcccacccacagggcccattgggcgccagcacactggtattacggtacctttgtgcgcctgttttatccaccccctccccaatgtaacgtagaagcacaaaccaagtggtcaatagatggctcagtacaccaactgggcttagaccaagcacttctgttaccccggactgagtatcaataagctgctcacgcggctgaaggagaaaacgttcgttacccggccaactacttcgagaagcccagtaccaccatgaaggatgcgcagtgtttcgttcagcacaaccccagtgtagatcaggccgatgagtcaccgcaatccccacgggtgaccgtggcggtggctgcgctggcggcctgcccatggggcaacctatgggacgcttcaatttcgacatggtgcgaagagtctattgagctagttggtagtcctccggcccctgaatgcggctaatcccaactgcggagcagacacccacaaaccagtgggcggtttgtcgtaacgggcaactctgcagcggaaccgactactttgggtgtccgtgtttctttttattcctacattggctgcttatggtgacaattgagagattgttgccatatagctattggattggccatccggtaacaaacagagctattatttacctttttgttggcttcgtgccgttgaattttaaagttataaaaactataaacttcatcttgacgctcaacacagcaaa

SEQ ID NO: 19663 - DNA, 743 bp, synthetic construct
  source 1..743: mol_type = other DNA
ttaaaacagcctgtgggttgttcccacccacagggcccattgggcgccagcacactggtattacggtacctttgtgcgcctgttttatccaccccctccccaatgtaacgtagaagcacaaaccaagtggtcaatagatggctcagtacaccaactgggcttagaccaagcacttctgttaccccggactgagtatcaataggctgctcacgcggctgaaggagaaaacgttcgttacccgaccaactacttcgagaagcctagtaccatcatgaaggatgcgcagtgtttcgttcagcacaaccccagtgtagatcaggccgatgagtcaccgcaatccccacgggtgaccgtggcggtggctgcgctggcggcctgcccatggggcaacctatgggacgcttcaatttcgacatggtgcgaagagcctattgagctagttggtagtcctccggcccctgaatgcggctaatcccaactgcggagcagacacccacaaaccagtgggcagtttgtcgtaacgggcaactctgcagcggaaccgactactttgggtgtccgtgtttccttttatccctatattggctgcttatggtgacaattgagggattgttgccatatagctattggattggccatccggtaacaaacagagctattatttacctttttgttggcttcgtgccgttgaactttaaagttattaaaaccatatacttcatcttgacactcaacacagcaaa

SEQ ID NO: 19664 - DNA, 744 bp, synthetic construct
  source 1..744: mol_type = other DNA
ttttaaaacaggccctgtgggttgctcccacccgcagggcccactgggcgctagcacactggtattgcggtacctttgtgcgcctgttttatccacccccccaacagtaatttagaagcacgaacaatgtggccaacaggaagcccagtacaccaactgggttatggccaagcacttctgttaccccggactgagtatcaataagctgctcgcgtggctgaaggagaaaacgtccgttacccggccagttacttcgagaaacttagtatcatcatgaaggttgcgaggcgtttcgctccgcacaaccccagtgtagatcaggtcgatgagtcaccgcaatcctcacgggtgaccgtggcggtggctgcgctggcggcctgcccatggggcaacccatgggacgcttcaatactgacatggtgtgaagagtctattgagctaattggtagtcctccggcccctgaatgcggctaatcctaactgcggagcagatacccacacaccagtgggcagtctgtcgtaatgggcaactctgcagcggaaccgactactttgggtgtccgtgtttccttttatcttttattggctgcttatggtgacaattgagagattgttaccatatagctattggattggccatccggtgagtaacagagcaattgtgttcctctttgtcggatttgtgccattaaattacaataactataacaccttgctttacattatccacttaaactcgcagaa

SEQ ID NO: 19665 - DNA, 743 bp, synthetic construct
  source 1..743: mol_type = other DNA
ttaaaacagcctgtgggttgatcccacccacagggcccactgggcgctagcacactggtattgcggtacctttgtgcgcctgttttatccaccctcccccaacagtaacttagaagcacgaacaatgtggtcaacaggaagctcagtaaaccaactgggtctcgaccaagcacttctgttaccccggactgagtatcaaaaagctgctcgcgtggctgaaggagaaaacgtccgttacccggccaattacttcgagaaacccagtatcaccatggaggttgcgcagcgtttcgctccgcacaaccccagtgtagatcaggtcgatgagtcaccgcaatcctcacgggtgaccgtggcggtggctgcgctggcggcctgcccatggggcaacccatgggacgcttcaatactgacatggtgcgaagagtctattgagctaattggtagtcctccggcccctgaatgcggctaatcctaactgcggagcagatatccacacaccagtggacagtctgtcgtaatgggcaactctgcagcggaaccgactactttgggtgtccgtgtttccttttatccttttattggctgcttatggtgacaattgagagattgttaccatatagctattggattggccatccggtgagcaacagagcaattgtatttctctttgtaggatttgtaccgttgaattacaacaactacaacaccttactttacattatccacttaaacacgcggaa

SEQ ID NO: 19666 - DNA, 743 bp, synthetic construct; identical to SEQ ID NO: 1050
  source 1..743: mol_type = other DNA

SEQ ID NO: 19667 - DNA, 743 bp, synthetic construct
  source 1..743: mol_type = other DNA
ttaaaacagcctgtgggttgttcccacccacagggcccattgggcgctagcacactggtatcacggtacctttgtgctcctgttttattcaccccctccccaatgtaacgtagaagcgtaagccaagtggtcaatagatggctcagtacaccaactgggtttagaccaagcacttctgttaccccggaccgagtatcaataggctgctcacgcggctgaaggagaaaacgttcgttacccggccaactacttcgagaagcccagtaccaccatgaaggatgcgcagtgtttcgttcagcacaaccccagtgtagatcaggccgatgagtcaccgcaatccccacgggtgaccgtggcggtggctgcgctggcggcctgcccatggggagacccatgggacgcttcaattccgacatggtgcgaagagcctattgagctagttggtagtcctccggcccctgaatgcggctaatcccaactgcggagcagacacccacaagccagtgggctgtttgtcgtaacgggcaactctgcagcggaaccgactactttgggtgtccgtgtttccttttattcctacattggctgcttatggtgacagttgaaagattgttgccatatagctattggattggccatccggtaacaaacagagctattatttacctttttgttggctttgtgccgttgaatttcaaagttataaaaaccataaacttcatcttgacactcaatacagcaaa

SEQ ID NO: 19668 - DNA, 739 bp, synthetic construct
  source 1..739: mol_type = other DNA
ttaaaacaggctgtgggttggccatccggtgagcccactgggcgctagcacactggtatcacggtacctttgtgcgcctgttttacttcccttccctatatgtaacttagaagcagcactctacgaccaatagtaggcgtggcacaccagccatgtcttggtcaagcacttctgtaaccccggaccgagtatcaatagactgctcacgcggtcgaaggagaaaacgtccgttacccgaccaactacttcgagaaacctagtaacgccatgaaaattgcgaggtgtttcgctcagcacgcccccagtgtagatcaggtcgatgagtcaccgcgttccccacaggtgactgtggcggtggctgcgttggcggcctgcccatggggtgacccatgggacgcttcaatacggacatggtgtgaagagtctattgagctagttggtagtcctccggcccctgaatgcggctaatcctaactgtggagcacgcgcccccgctccagagggtagcgtgtcgtaacgggtaactccgcagcggaaccgactactttgggtgtccgtgtttccttttattcttatactggctgcttatggtgacaattgaaagattgttaccatatagctattggattggccacccggtgacaaacagagcaataatttatcaatttgtagggtttgttccaataaatttgaaagtcttgaagacacttaatttaatattactactcaatagtgcaaa

SEQ ID NO: 19669 - DNA, 747 bp, synthetic construct
  source 1..747: mol_type = other DNA
ttaaaacagctctggggttgttcccaccccagaggcccacgtggcggccagtactccggtattacggtacccttgtacgcctgttttatactcccttcccctgtaacttagaagcatacaaaccaagttcaatagaagggggtacaaaccagtaccaccacgaacaagcactcctgtttccccggtgacattgcatagactgtacccacggctgaaagcgatcgatccgttacccgctcctgtacttcgagaagcctagtatcatcttggaatcttcgatgcgttgcgctcagcactcaaccccagagtgtagcttaggctgatgagtctggacgtcccccaccggcgacggtggtccaggctgcgttggcggcctacctgtggcccaaagccacaggacgctagttgtgaacaaggtgtgaagagcctattgagctacaagagagtcctccggcccctgaatgcggctaatcctaaccacggagcaggcagttgcaaaccagcaaccggcctgtcgtaacgcgcaagtctgtggcggaaccgactactttgggtgtccgtgtttccttttatttttacaatggctgcttatggtgacaatcatagattgttatcataaagcgacttggattggccatccggtgaaagtaaaacacattgtttacttgtttgttggattcactccaattaactcttttacttacaaactcattacaacaactctattaattagagataagcatcaca

SEQ ID NO: 19670 - DNA, 713 bp, synthetic construct
  source 1..713: mol_type = other DNA
cagaggcccacgtggcggctagtacactggtatcacggtacctttgtacgcctgttttatactccctcccccgcaacttagaagcatacaattcaagctcaataggagggggtgcaagccagcgcctccgtgggcaagcactactgtttccccggtgaggccgcatagactgttcccacggttgaaagtgtccgatccgttatccgctcatgtacttcgagaagcctagtatcgctctggaatcttcgacgcgttgcgctcagcactcaaccccggagtgtagcttgggccgatgagtctggacagtccccactggcgacagtggtccaggctgcgctggcggcccacttgtggcccaaagccacgggacgctagttgtgaacagggtgtgaagagcctattgagctacatgagagtcctccggcccctgaatgcggctaattctaaccatggagcaggcagctgcaacccagcagccagcctgtcgtaacgcgcaagtccgtggcggaaccgactactttgggtgtccgtgtttccttttattcttgaatggctgcttatggtgacaatcatagattgttatcataaagcgagttggattggccatccagtgtgaatcagattaattactcccttgtttgttggatccactcccgaaacgttttactccttaacttattgaaattgtttgaagacaggatttcagtgtcaca

SEQ ID NO: 19671 - DNA, 713 bp, synthetic construct
  source 1..713: mol_type = other DNA
cagaggcccacgtggcggctagtacactggtatcacggtacctttgtacgcctgttttatactccctcccccgcaacttagaagcatacaattcacgctcaataggagggggtgcaagccagcgcctccgtgggcaagcactactgtttccccggtgaggccgcatagactgttcccacggttgaaagtgtccgatccgttatccgctcatgtacttcgagaagcctagtatcgctctggaatcttcgacgcgttgcgctcagcactcaaccccggagtgtagcttgggccgatgagtctggacagtccccactggcgacagtggtccaggctgcgctggcggcccacttgtggcccaaagccacgggacgctagttgtgaacagggtgtgaagagcctattgagctacatgagagtcctccggcccctgaatgcggctaattctaaccatggagcatgcagctgcaacccagcagccagcctgtcgtaacgcgcaagtccgtggcggaaccgactactttgggtgtccgtgtttccttttattcttgaatggctgcttatggtgacaatcatagattgttatcataaagcgagttggattggccatccagtgtgaatcagattaattactcccttgtttgttggatccactcccgaaacgttttactccttaacttattgaaattgtttgaagacaggatttcagtgtcaca

SEQ ID NO: 19672 - DNA, 715 bp, synthetic construct
  source 1..715: mol_type = other DNA
aggcccacgtggcggctagcactccggtattacggtacccttgtgcgcctgttttatactcccctcccgtaacttagaagcacgtaaccatgttcaacaggaggtggtacaaaccagtaccactacgaacaagcacttctgtttccccggtgacgttgcatagactgcttacgcggttgaaagcgatcgatccgttacccgcttgtgtacttcgaaaagcctagtatcgccttggaatcttcgacgcgttgcgctcaacacccgaccccggggtgtagcttaggctgatgagtctggacattcctcaccggtgacggtggtccaggctgcgttggcggcctacctatggctaacgccataggacgctagatgtgaacaaggtgtgaagagcctattgagctacatgagagtcctccggcccctgaatgcggctaatcctaaccacggagcaggcggtcgcgaaccagtgactggcttgtcgtaacgcgcaagtctgtggcggaaccgactactttgggtgtccgtgtttcctgttatttttatcatggctgcttatggtgacaatcagagattgttatcataaagcgaattggattggccatccggtgagtgttgtgtcacacatacaactgtttgttggaaccactgtgttagctttacttcccatttaaccaattgattaaaagcaatacaaggataaaacgacaatactaca

SEQ ID NO: 19673 - DNA, 729 bp, synthetic construct
  source 1..729: mol_type = other DNA
gtgggttgttcccacccacagggcccactgggcgccagcacactggtatcacggtacctttgtgcgcctgttttatccaccccgccccacgtaacttagaagtccaactcaaacggtcggtaggtggtccagtatgccaactgggccttgaccaagcacttctgttaccccggaccgagtatcaataggctgctcgcgcggctgaaggagaaaaagttcgttacccggccaattacttcgagaaacccagtaccgccatgaatgttgcgaggtgtttcgctcagcacacccccagtgtagatcaggtcgatgagtcaccgcattccccacgggcgaccgtggcggtggctgcgttggcggcctgcccatggggcaacccatgggacgcttcaacactgacatggtgcgaagagtctattgagctaattggtagtcctccggcccctgaatgcggctaatcctaactgcggagcagatgcccgcacgccagcgggtattctgtcgtaacgggtaactctgcagcggaaccgactactttgggtgtccgtgtttcctttttatcttttattggctgcatatggtgacaattgagagattgttaccatatagctattggattggccatccagtgacaaacagagcaattatttatttatttgttggttttgtaccgctgaactacaaagcactaaatactctcagttttataatatcacttaattcaataaa

SEQ ID NO: 19674 - DNA, 725 bp, synthetic construct
  source 1..725: mol_type = other DNA
tgttcccacccacggggcctactgggcgccagcacactggtatcacggtacctttgtgcgcctgttttataacccctcccccgaatgtaacgtagaagctgaacctaagtggtcaataggcggctcagaacaccatctgggtcttgaccaagcacttctgttaccccggactgagtatcaataagctgctcacgcggctgaaggagaaaacgtccgttacccggccaattacttcaagaaacccagtaccaccatgaaggttgcgcagcgtttcgctccgcacaaccccagtgtagatcaggtcgatgagtcaccgcattcctcacgggcgaccgtggcggtggctgcgctggcggcctgcccatggggcaacccatgggacgcttcaatactgacatggtgcgaagagtcaattgagctaattggtagtcctccggcccctgaatgcggctaatcctaactgcggagcagacgcccaagctccagtgggtagtctgtcgtaacgggtaactctgcagcggaaccgactactttgggtgtccgtgtttccttttattcttacattggctgcttatggtgacaattgagagattgttaccatatagctattggattggccatccggtgacaaatagagcaattgtatatctttttgttggattcataccactcggcaaaacaaatttcagaaccttgtgttatattattagattaaatacagcaaa

SEQ ID NO: 19675 - DNA, 711 bp, synthetic construct
  source 1..711: mol_type = other DNA
ttaaaacagctctggggttgctcccaccccagaggcccacgtggcggctagtaatctggtatcaggtacctttgtacgcctgttttatatcccttcccccgtaactttagaagcttatcaaaagttcaatagcaggggtacaagccagtacctctacgaacaagcacttctgtttccccggtgaaatcatatagactgtacccacggtcaaaagtgattgatccgttatccgcttgagtacttcgagaagcctagtatcgccttggaatcttcgacgcgttgcgctcaacactctgccccgagtgtagcttaggctgatgagtctgggcactccccaccggcgacggtggcccaggctgcgttggcggcctacccatggctgatgccgtgggacgctagttgtgaacaaggtgtgaagagcctattgagctactcaagagtcctccggcccctgaatgcggctaatcctaaccacggagcaatcgctcacgacccagtgagtaggttgtcgtaatgcgtaagtctgtggcggaaccgactactttgggtgtccgtgtttccctttatattcatactggctgcttatggtgacaatttacgaattgttaccatatagctattggattggccacccagtgctgtgcaatatatttgagtgcttctttcataggtgttaccaacatcacatttaaaccacaatagtcagtgcaa

SEQ ID NO: 19676 - DNA, 743 bp, synthetic construct
  source 1..743: mol_type = other DNA
ttaaaacagcctgtgggttgttcccacccacagggcccactgggcgctagtacactggtatcacggtacctttgtgcgcctgtttgacttaccctccccaaacgcaacttagaagcacaacttaaatggtcaatagacggctcagtatgccaactgagtctcgatcaagcacttctgttaccccggactgagtaccaataggctgctcacgcggctgaaggggaaaccgttcgttacccgactaactacttcgagaaacctagtaccaccatgaaagttgcgcagcgtttcgctccgcacaaccccagtgtagatcaggccgatgagtcaccgcaaaccccacgggcgaccgtggcggtggctgcgctggcggcctgcccatggggtaactcatgggatgcttcaatactgacatggtgcgaagagtctattgagctagttggtagtcctccggcccctgaatgcggctaatcctaactgcggagcagatacccacgcaccagtgggcagtctgtcgtaatgggcaactctgcagcggaaccgactactttgggtgtccgtgtttccttttattcttacactggctacttatggtgacaattgagagatcgtaaccatattgctattggattggccacccggtgacgaatagaacagttgcttacctgtttgttagtctcgtatcactgaactacaaagccttaaacacccattaatttcatcataacgctcaatacgttaaa

SEQ ID NO: 19677 - DNA, 743 bp, synthetic construct
  source 1..743: mol_type = other DNA
ttaaaacagcctgtgggttgttcccacccacagggcccactgggcgctagcacactggtatcacggtacctttgtgcgcctgtttgacttaccctccccaaacgcaacttagaagcacaacttaaatggtcaataggcggctcagtatgccaactgagtctcgatcaagcacttctgttaccccggactgagtaccaataggctgctcacgcggctgaaggggaaaccgttcgttacccgactaactacttcgagaaacctagtaccaccatgaaagttgcgcagcgtttcgctccgcacaaccccagtgtagatcaggccgatgagtcaccgcaaaccccacgggcgaccgtggcggtggctgcgctggcggcctgcccatggggcaactcatgggacgcttcaatactgacatggtgcgaagagtctattgagctagttggtagtcctccggcccctgaatgcggctaatcctaactgcggagcagatacccacgcaccagtgggcagtctgtcgtaatgggcaactctgcagcggaaccgactactttgggtgtccgtgtttccttttattcttatactggctacttatggttacaattgagagattgtaaccatattgctattagattggccatccggcgacgaatagaatagttgcttacctgtttgttagcctcgtatcactgaactacaaagccttgaacaccctttaatttcatcataacgctcaatacgttaaa

SEQ ID NO: 19678 - DNA, 742 bp, synthetic construct
  source 1..742: mol_type = other DNA
ttaaaacagcctgtgggttgatcccacccacagggcctactgggcgccagcatactggtatcatggtacctttatgtgcctgttttatccaccctcccccaacgtaacctagaagataatcgtagatgatcaatagggggctcagtatgccaactgagtctggatcaagcacttctgttaccccggaccgagtatcaataagctgctcacgcggctgaaggagaaaacgttcgttacccggccaattacttcgagaaacccagtaccaccatgaaggttgcgcagcgtttcgctccgcacaaccccagtgtagatcaggtcgatgagtcaccgcgttccccacgggcgaccgtggcggtggctgcgttggcggcctgcccatggggtaacccatgggacgcttcaatactgacatggtgtgaagagtctattgagctaattggtagtcctccggcccctgaatgcggctaatcctaactgcggagcagatgtccacaaaccagtgggtggtctgtcgtaacgggtaactctgcagcggaaccgactactttgggtgtccgtgtttccttttatacttacactggctgcttatggtgacaattgggagattgttgccatatagctattggattggccatccggtgacaaatagagcgattatctacttatttgttggctttgttccattaaacttcaaagttctaaaaaccctagattttatcttagaactcaatactgcaaa

SEQ ID NO: 19679 - DNA, 742 bp, synthetic construct
  source 1..742: mol_type = other DNA
ttaaaacagcctgtgggttgttcccacccacagggcccaatgagcgctagcacactggtatcatggtacgtttgtgcgcctgtcttattcaccggttcccaatgtaacgtagaagcataagctaagaggtcaatagatggcccagtacaccaactgggtttagaccaagcacttctgttaccccggaccgagtatcaataggctgctcacgcggctgaaggagaaaacgttcgttacccggccaactacttcgagaagcccagtaccaccatgaaggatgcgcagtgtttcgttcagcacaaccccagtgtagatcaggccgatgagtcaccgcaatccccacgggtgaccgtggcggtggctgcgctggcggcctgcccatggggtaacccatgggacgcttcaattccgacatggtgcgaagagtctattgagctagttggtagtcctccggcccctgaatgcggctaatcctaactgcggagcagacacccacaaaccagtgggctgtttgtcgtaacgggcaactctgcagcggaaccgactactttgggtgtccgtgtttccttttattcttatattggctgcttatggtgacaattgaaagattgttgccatatagctattggattggccatccggtaacaaacagagctattatttacctttttgttggctttgtgccgttgaatttcaaagttataaaaaccataaacttcattttgacactcaatacagcaaa

SEQ ID NO: 19680 - DNA, 742 bp, synthetic construct
  source 1..742: mol_type = other DNA
ttaaaacagcctgtgggttgatcccacccacagggcccactgggcgctagcacactggtattgcggtacccttgtgcgcctgttttatccaccccaaccccaaggcaacatagaagcataccacaaaaggtcaataggcgacccagtactccaactgggttttgaccaagcacttctgttaccccggaccgagtaccaataggctgctcgcgcggctgaaggggaaaacgttcgttacccggccaattacttcgagaaacctagtaccgccatgaaggttgcgcagcgtttcgctccgcacaaccccagtgtagatcaggccgatgagccaccgcattccccacgggcgaccgtggcggtggctgcgctggcggcctgcctatggggcaacccatgggacgcttcaatactgacatggtgtgaagagtctattgagctaattggtaatcctccggcccctgaatgcggctaatcctaactgcggagcagatacccacataccagtgggcagtctgtcgtaatgggcaactctgcagcggaaccgactactttgggtgtccgtgtttccttttattttacactggctgcttatggtgacaattgagagattgttaccatatagctattggattggccatccggtgacaagtagagcaattgtctacctatttgttggttttgttccattgaattttaaagttctaaaaactcttgaccttatcttagtactcaatacggcaaa

SEQ ID NO: 19681 - DNA, 743 bp, synthetic construct
  source 1..743: mol_type = other DNA
ttaaaacagcctgtgggttgttcccacccgcagggcccactgggcgctagcacactggtatcacggtacctttgtgcgcctgttttatccaccccctcccaaatgtaacgtagaagcacaaaccaagtggtcaatagatggctcagtacaccaactgggtttagaccaagtacttctgttaccccggactgagtatcaataggctgctcacgcggctgaaggagaaaacgttcgttacccggccaactacttcgagaagcccagtaccaccatgaaggttgcgcagtgtttcgttcagcacaaccccagtgtagatcaggccgatgagtcaccgcaatccccacgggtgaccgtggcggtggctgcgctggcggcctgcccatggggtaacccatgggacgcttcaattccgacatggtgtgaagagtctattgagctagttggtagtcctccggcccctgaatgcggctaatcctaactgcggagcaaacacccacaaaccagtgggcagtttgtcgtaacgggcaactctgcagcggaaccgactactttgggtgtccgtgtttcctttcattcctacattggctgcttatggtgacaattgaaagattgttgccatatagctattggattggccatccggtaacaaacagagctattatttacctttttgttggctttgtgccattgaatttcaaagttataaaaaccataaactttatcttgacactcaacacagcaaa

SEQ ID NO: 19682 - DNA, 743 bp, synthetic construct
  source 1..743: mol_type = other DNA
ttaaaacagcctgtgggtgggaacaacccacagggcccattgggcgctagcacactggtattacggtacctttgtgcgcctgttttatccaccccctccccaatgtaacgtagaagcacaaaccaagtggtcaatagatggctcagtgcaccaactgggcttagaccaagcacttctgttaccccggactgagtatcaataggctgctcacgcggctgaaggagaaaacgttcgttacccggccaactacttcgagaagcccagtaccaccatgaaggatgcgcagtgtttcgttcagcacaaccccagtgtagatcaggccgatgagtcaccgcaatccccacgggtgaccgtggcggtggctgcgctggcggcctgcccatggggcaacctatgggacgcttcaattccgacatggtgcgaagagtctattgagctagttggtagtcctccggcccctgaatgcggctaatcccaactgcggagcagacacccacaaaccagtgggcagtttgtcgtaacgggcaactctgcagcggaaccgactactttgggtgtccgtgtttccttttattcctacattggctgcttatggtgacaattgagagattgttgccatatagctattggattggccatccggtaacaaacagagctattatttatctttttgttggcttcgtgccgttgagttttaaagttataaaaactataaacttcatcttgacacttaatacagcaaa

SEQ ID NO: 19683 - DNA, 742 bp, synthetic construct
  source 1..742: mol_type = other DNA
ttaaaacagcctgtgggttgttcccacccacagggcccactgggcgctagcacactggtattgcggtacctttgtgcgcctgttttatccaccctccccaacagtaacttagaagcacgaataatgtggtcaacaggaagctcagtaaaccaactgggtctcgaccaagcacttctgttaccccggactgagtatcaagaagctgctcgcgtggctgaaggagaaaacgtccgttacccgaccaattacttcgagaaacccagtatcaccatgaaggttgcgcagcgtttcgctccacacaaccccagtgtagatcaggtcgatgagtcaccgcaatcctcacgggtgaccgtggcggtggctgcgctggcggcctgcccatggggcaacccatgggacgctccaatactgacatggtgcgaagagtctattgagctaattggtagtcctccggcccctgaatgcggctaatcctaactgcggagcagatatccacacaccagtggacagtctgtcgtaatgggcaactctgcagcggaaccgactactttgggtgtccgtgtttccttttatccttttattggctgcttatggtgacaattgagagattgttaccatatagctattggattggccatccggtgagtaacagagcaattgtatttctctttgtaggatttgtaccgtcgaattacaacaactataacaccttactctacattatccacttaaacacgcggaa

SEQ ID NO: 19684 - DNA, 743 bp, synthetic construct
  source 1..743: mol_type = other DNA
ttaaaacagcctgtgggttgttcccacccacagggcccactgggcgctagcacactggtatcacggtacctttgtgcgcctgtttgacttaccctccccaaacgcaacttagaagcacaacttaaatggtcaataggcggctcagtatgccaactgagtctcgatcaagcacttctgttaccccggactgagtaccaataggctgctcacgcggctgaaggggaaaccgttcgttacccgactaactacttcgagaaacctagtaccaccatgaaagttgcgcagcgtttcgctccgcacaaccccagtgtagatcaggtcgatgagtcaccgcaaaccccacgggcgaccgtggcggtggctgcgctggcggcctgcccatggggcaactcatgggacgcttcaatactgacatggtgcgaagagtctattgagctagttggtagtcctccggcccctgaatgcggctaatcctaactgcggagcagatacccacgcaccagtgggcagtctgtcgtaatgggcaactctgcagcggaaccgactactttgggtgtccgtgtttccttttgttcttatactggctacttatggtgacaattgagagattgtaaccatattgctattggattggccacccggcgacgaatagaacagttgcttacctgtttgttagtctcgtatcactgaactacaaatccttaaacaccctttaatttcgtcataacgctcaatacgttaaa

SEQ ID NO: 19685 - DNA, 730 bp, synthetic construct
  source 1..730: mol_type = other DNA
tgggttgtccccactcacagggcccactgggcgccagcacactggtatcaaggtacctttgtgcgcctgttttatagccccttccccgaatgtaacgtagaagctgaacccaagcggtcaacaggcggctcagaacaccatctgggtcttgaccaagcacttctgttaccccggactgagtatcaataagctgctcacgcggctgaaggagaaaatgttcgttatccggccaattacttcgagagacctagtaccaccatgaaggttgcgcagcgtttcgctccgcacaatcccagtgtagatcaggtcgatgagtcaccgcattcctcacgggcgaccgtggcggtggctgcgctggcggcctgcccatggggcaacccatgggacgcttcaatactgacatggtgcgaagagttaattgagctaattggtagtcctccggcccctgaatgcggctaatcctaactgcggagcagatgcccaagctccagtgggtagtctgtcgtaacgggtaactctgcagcggaaccgactactttgggtgtccgtgtttccttttattcttacattggctgcttatggtgacaattgagagattgttaccatatagctattggattggccatccggtgacgaatagagcaattgtgtatctttttgttggattcataccactagacaatacaaacttcaaaaccttgtgttacatcattagattaaacacagcaag

SEQ ID NO: 19686 - DNA, 725 bp, synthetic construct
  source 1..725: mol_type = other DNA
ttgatcccacccacagggcccatagggcgctagcactctggtattgcggtacctttgtgcgcctgttttatattcccacccccaattgcaacttagaagcagtacttaacgaccaacagtgggcgtgacacaccagccacgtctcggtcaagcacttctgtctccccggactgagtatcaaaaagctgctcacgcggctgaaggagaaaacgtccgttatccggccaattacttcgagaaacctagtaccgccatgaaagttgcgcagcgtttcgatccgcacaaccccagtgtagatcaggtcgatgagtcaccgcgttccccacgggtgaccgtggcggtgactgcgttggcggcctgcccatgggagaacccatgggacgcttcaatactgacatggtgtgaagagtctattgagctaattggtagtcctccggcccctgaatgcggctaatcctaactgcggagcagattcccgcatgccagcgggtggtctgtcgtaacgggcaactctgcagcggaaccgactactttgggtgtccgtgtttccttttattcttatattggctgcttatggtgacaattgagagattgttaccatatagctattggattggccatccggtaacaaacagagcaattatttaccaatttattggtttcgtaccattgaattttaacacattcaaaactcttaaccttatcttggctcttaatacagcaaa

SEQ ID NO: 19687 - DNA, 742 bp, synthetic construct
  source 1..742: mol_type = other DNA
ttaaaacagcctgtgggttgttcccacccacagggcccactgggcgctagcacactggtatcacggtacctttgtgcgcctgtttgacttaccctccccaaacgcaacttagaagcacaacttaaatggtcaataggcggctcagtatgccaactgagtctcgatcaagcacttctgttaccccggactgagtaccaataggctgctcacgcggctgaaggggaaaccgttcgttacccgactaactacttcgagaaacctagtaccaccatgaaagttgcgcacgtttcgctccgcacaaccccagtgtagatcaggtcgatgagtcaccgcaaaccccacgggcgaccgtggcggtggctgcgctggcggcctgcccatggggcaactcatgggacgcttcaatactgacatggtgcgaagagtctattgagctagttggtagtcctccggcccctgaatgcggctaatcctaactgcggagcagatacccacgcaccagtgggcagtctgtcgtaatgggcaactctgcagcggaaccgactactttgggtgtccgtgtttccttttgttcttatactggctacttatggtgacaattgagagattgtaaccatattgctattggattggccacccggcgacgaatagaacagttgcttacctgtttgttagtctcgtatcactgaactacaaatccttaaacaccctttaatttcgtcataacgctcaatacgttaaa

SEQ ID NO: 19688 - DNA, 742 bp, synthetic construct
  source 1..742: mol_type = other DNA
ttaaaacagcctgtgggttgatcccacccacagggcctattgggcgctagcactctggtatcacggtacctttgtgcgcctgttttatatcccctcccccaactgtaacttagaagtaacacactccgatcaacagtcagcgtggcacaccagccatgttttgatcaagcacttctgttaccccggactgagtatcaatagactgctcacgcggttgaaggagaaagcgttcgttatccggccaactacttcgaaaaacccagtaacaccatagaggttgcagagtgtttcgctcagcactaccccagtgtagaccaggccgatgagtcaccgcattccccacgggcgaccgtggcggtggctgcgttggcggcctgcctatggggaaacccataggacgctctaatacagacatggtgcgaagagtctattgagctagttggtaatcctccggcccctgaatgcggctaatcctaactgcggacagcacaccctcaaaccagagggcagtgtgtcgtaacgggcaactctgcagcggaaccgactactttgggtgtccgtgtttcattttattcctatactggctgcttatggtgacaattgagagattgttaccatatagctattggattggccatccggtgtctaatagagctattatatatctctttgttggatttataccacttagcttgagagaggttaaaacattacaattcattgttaaattgaatacaacaaa

SEQ ID NO: 19689 - DNA, 742 bp, synthetic construct
  source 1..742: mol_type = other DNA
ttaaaacagcctgtgggttgttcccacccgcagggcccactgggcgccagcactctggtatcacggtacctttgtgcgcctgttttaaaaccctctccccaatttgaaacttagaagcaatacacctcgatcaatagtaggcatgacacgccagccatgtcttgatcaagcacttctgtttccccggactgagtatcaataaactgcttgcgcggtcgaaggagaaaacgtccgttacccgactaactacttcgagaaacccagtaacaccatggaaattgcggagtgtttcactcagcacattcccagtgtagatcaggtcgatgagtcaccgcattccccacgggtgaccgtggcggtggctgcgctggcggcctgcccatggggcaacccatgggacgcttcaatatggacatggtgtgaagagtctattgagctagttagtagtcctccggcccctgaatgcggctaatcctaactgcggagcacgtgcctccattccagggggtggcgtgtcgtaacgggcaactctgcagcggaaccgactactttgggtgtccgtgtttcttttaattttatactggctgcttatggtgacaattgaaagattgttgccatatagctattggattggccatccggtatccaacagagcaattgtgtacctttttgttggatttgtaccacttaccagaacaagttttcatacactgtgttacattattagactaaacacagaaaa

SEQ ID NO: 19690 - DNA, 742 bp, synthetic construct
  source 1..742: mol_type = other DNA
ttaaaacagcctgtgggttgatcccacccacagggcccattgggcgctagcactctggtatcacggtacctttgtgcgcctgttttataccccctcccccaactgtaacttacaagcaacacacaccgatcaacagtcagcgtggcacaccagccacgttttgatcaagcacttctgttaccccggactgagtatcaatagactgctcacgcggttgaaggagaaagcgttcgttatccggccaactacttcgaaaaacctagtaacactgtggaagttgcagagtgtttcgctcagcactaccccagtgtagatcaggtcgatgagtcaccgcattccccacgggcgaccgtggcggtggctgcgttggcggcctgcccatggggaaacccatgggacgctctaatacagacatggtgcgaagagtctattgagctagttggtagtcctccggcccctgaatgcggctaatcctaactgcggagcacacaccctcaagccagagggcagtgtgtcgtaacgggcaactctgcagcggaaccgactactttgggtgtccgtgtttcattttattcctatactggctgcttatggtgacaattgagagattgttaccatatagttattggattggccatccggtgaccaatagagctattatatatctctttgttgggtttataccacttagcttgaaagaggttaaaacattacaattcattgttaagttgaatacagcaaa

SEQ ID NO: 19691 - DNA, 742 bp, synthetic construct
  source 1..742: mol_type = other DNA
ttaaaacagcctgtgggttgatcccacccacagggcccattgggcgctagcactctggtatcacggtacctttgtgcgcctgttttataccccctcccccaactgtaacttagaagtaacacacaccgatcaacagtcagcgtggcacaccagccacgttttgatcaagcacttctgttaccccggactgagtatcaatagactgctcacgcggttgaaggagaaagcgttcgttatccggccaactacttcgaaaaacctagtaacaccgtggaagttgcagagtgtttcgctcagcactaccccagtgtagatcaggtcgatgagtcaccgcattccccacgggcgaccgtggcggtggctgcgttggcggcctgcccatggggaaacccatgggacgctccaatacagacatggtgcgaagagtctattgagctagttggtagtcctccggcccctgaatgcggctaatcctaactgcggagcacacaccctcaagccagagggcagtgtgtcgtaacgggcaactctgcagcggaaccgactactttgggtgtccgtgtttcattttattcctatactggctgcttatggtgacaattgagagatcgttaccatatagctattggattggccatccggtgaccaatagagctattatatatctctttgttgggtttataccacttagcttgaaagaggttaaaacattacaattcattgttaagttgaatacagcaaa

SEQ ID NO: 19692 - DNA, 742 bp, synthetic construct
  source 1..742: mol_type = other DNA
ttaaaacagcctgtgggttgatcccacccacagggcccattgggcgctagcactctggtatcacggtacctttgtgcgcctgttttataccccctcccccaactgtaacttagaagcaacacacaccgatcaacagtcagcgtggcacaccagccacgttttgatcaagcacttctgttaccccggactgagtatcaatagactgctcacgcggttgaaggagaaagcgttcgttatccggccaactatttcgaaaaacctagtaacaccgtggaagttgcagagtgtttcgctcagcactaccccagtgtagatcaggtcgatgagtcaccgcattccccacgggcgaccgtggcggtggctgcgttggcggcctgcccatggggaaacccatgggacgctctaatacagacatggtgcgaagagtctattgagctagttggtagtcctccggcccctgaatgcggctaatcctaactgcggagcacacaccctcaagccagagggcagtgtgtcgtaacgggcaactctgcagcggaaccgactactttgggtgtccgtgtttcattttattcctatactggctgcttatggtgacaattgagagatcgttaccatatagctattggattggccatccggtgaccaatagagctattatatatctctttgttgggtttataccacttagcttgaaagaggttaaaacattacaattcattgttaagttgaatacagcaaa

SEQ ID NO: 19693 - DNA, 743 bp, synthetic construct; identical to SEQ ID NO: 1052
  source 1..743: mol_type = other DNA

SEQ ID NO: 19694 - DNA, 742 bp, synthetic construct
  source 1..742: mol_type = other DNA
ttaaaacagcctgtgggttgatcccacccacagggcccattgggcgctagcactctggtatcacggtacctttgtgcgcctgttttataccccctcccccaactgtaacttagaagtaacacacaccgatcaacagtcagcgtggcacaccagccacgttttgatcaagcacttctgttaccccggactgagtatcaatagactgctcacgcggttgaaggagaaagcgttcgctatccggccaactacttcgaaaaacctagtaacaccgtggaagttgcagagtgtttcgctcagcactaccccagtgtagatcaggtcgatgagtcaccgcattccccacgggcgaccgtggcggtggctgcgttggcggcctgcccatggggaaacccatgggacgctctaatacagacatggtgcgaagagtctattgagctagttggtagtcctccggcccctgaatgcggctaatcctaactgcggagcacacaccctcaagccagagggcagtgtgtcgtaacgggcaactctgcagcggaaccgactactttgggtgtccgtgtttcattttattcctatactggctgcttatggtgataattgagagattgttaccatatagctattggattggccatccggtgaccaatagagctattatatatctctttgttgggtttataccacttagcttgaaagaggttaaaacattacaattcattgttaagttgaatacagcaaa

SEQ ID NO: 19695 - DNA, 742 bp, synthetic construct
  source 1..742: mol_type = other DNA
ttaaaacagcctgtgggttgtacccacccacagggcccactgggcgctagcacactggtattacggtacccttgtgcgcctgttttatttacccctcccccacgcaacctagaagcatgacttaagcggtcaatagatggctcagtatgccaactgagttatgaccaagcacttctgttaccccggaccgagtatcaataggctgctcacgcggctgaaggagaaagtgttcgttacccggccagttacttcgagaaacctagtatcatcatgaaggttgcgaggcgtttcgctccacacgaccccggtgtagatcaggctgatgagtcaccgcattccccacgggcgaccgtggcggtggctgcgctggcggcctgcccatggggcaacccatgggacgcttcaatattgacatggtgcgaagagtctattgagctaactggtagtcctccggcccctgaatgcggctaatcctaactgcggagcagacacccacatgccagtgggcagtctgtcgtaacgggcaactctgcagcggaaccgactactttgggtgtccgtgtttccttttattcttatattggctgcttatggtgacaattgaaagattgttgccatatagctattggattggccatccagtgactaacagagcaattgtctacctgttcgttggttacgtaccactaaattataaagttttgaacacacttaattttattatagcacttaacaccttaaa

SEQ ID NO: 19696 - DNA, 742 bp, synthetic construct
  source 1..742: mol_type = other DNA
ttaaaacagcctgtgggttgatcccacccatagggcccattgggcgctagcactctggtatcacggtacctttgtgcgcctgttttataccccctcccccaactgtaacttagaagtaacacacaccgatcaacagtcaacgtggcacaccagccacgttttgatcaagcacttctgttaccccggactgagtatcaatagactgctcacgcggttgaaggagaaagcgttcgttatccggccaactacttcgaaaaacctagtaacaccgtggaagttgcagagtgtttcgctcagcactaccccagtgtagatcaggtcgatgagtcaccgcattccccacgggcgactgtggcggtggctgcgttggcggcctgcccatggggaaacccatgggacgctctaatacagacatggtgcgaagagtctattgagctagttggtagtcctccggcccctgaatgcggctaatcctaactgcggagcacacaccctcaagccagagggcagtgtgtcgtaacgggcaactctgcagcggaaccgactactttgggtgtccgtgtttcattttattcctatactggctgcttatggtgacaattgagagattgttaccatatagctattggattggccatccggtgaccaatagagctattatatatctctttgttgggtttataccacttagcttgaaagaggttaaaacattacaattcattgttaagttgaatacagcaaa

SEQ ID NO: 19697 - DNA, 742 bp, synthetic construct
  source 1..742: mol_type = other DNA
taaaacagcctgtgggttgttcccacccacagggcccactgggcgctagcacactggtatcacggtacctttgtgcgcctgttttatccaccccctccccaatgtaacgtagaagcacaaaccaaatggtcaatagatggctcagtacaccaactgggtttagaccaagcacttctgttaccccggactgagtatcaataggctgctcacgcggctgaaggagaaaacgttcgttacccggccaactacttcgagaagcccagtaccaccatgaaggttgcgcagtgtttcgttcagcacaaccccagtgtagatcaggccgatgagtcaccgcaatccccacgggtgaccgtggcggtggctgcgctggcggcctgcccatggggcaacccatgggacgcttcaattccgacatggtgcgaagagtctattgagctagttggtagtcctccggcccctgaatgcggctaatcccaactgcggagcagacacccacaaaccagtgggcagtttgtcgtaacgggcaactctgcagcggaaccgactactttgggtgtccgtgtttccttttattcctacattggctgcttatggtgacaattgaaagattgttgccatatagctattggattggccatccggtgacaaacagagctattatttacctttttgttggctttgtgccattgaatttcaaagttataaaaaccataaactttatcttgacactcaacacagcaaa

SEQ ID NO: 19698 - DNA, 743 bp, synthetic construct; identical to SEQ ID NO: 1053
  source 1..743: mol_type = other DNA

SEQ ID NO: 19699 - DNA, 743 bp, synthetic construct
  source 1..743: mol_type = other DNA
ttaaaacagcctgtgggttgctcccacccatagggcccatagggcgctagcactctggtatcacggtacctttgtgcgcctgttttatacaccctccccctaatgtaacttagaagcttaacctaaatggccaatagacaacccaacacaccagttgggtctcggccaagcacttctgttaccccggaccgagtatcaataggctgcccacgcggccgaaggagaaaacgttcgttacccggccaattacttcgaaaaacctagtaacaccatgaaagttgcgcagtgtttcgttcagcactaccccagtgtagatcaggtcgatgagtcaccgcatccctcacgggcgaccgtggcggtggctgcgttggcggcctgcccatggggcaacccatgggacgcttcaatactgacatggtgcgaagagtctattgagctaattggtagtcctccggcccctgaatgcggctaatcctaactgcggagcaggcactcacaaaccagtgagcagtctgtcgtaacgggcaactctgcagcggaaccgactactttgggtgtccgtgtttccttttattcttgacttggctgcttatggtgacaattgagagattgttaccatatagctattggattggccatccggtgacaaacagagcaattatctatttgtttgtaggttttattccattaaactacaaagttttaaacaccctcagattcatcattgtacttaactcgtcaaa

SEQ ID NO: 19700 - DNA, 743 bp, synthetic construct
  source 1..743: mol_type = other DNA
ttaaaacagcctgtgggttgctcccacccatagggcccatagggcgctagcactctggtatcacggtacctttgtgcgcctgttttatacaccctccccctaatgtaacttagaagcttaacccaaatggccaatagataacccaacacaccagttgggtctcggccaagcacttctgttaccccggaccgagtatcaataggctgcccacgcggccgaaggagaaaacgttcgttacccggccaattacttcgaaaaacctagtaacaccatgaaagttgcgcagtgtttcgttcagcactaccccagtgtagatcaggtcgatgagtcaccgcatcccccacgggcgaccgtggcggtggctgcgttggcggcctgcccatggggcaacccatgggacgcttcaatactgacatggtgcgaagagtctattgagctaattggtagtcctccggcccctgaatgcggctaatcctaactgcggagcaggcactcacaaaccagtgagcagcctgtcgtaacgggcaactctgcagcggaaccgactactttgggtgtccgtgtttccttttattcttgacttggctgcttatggtgacaattgagagattgttaccatatagctattggattggccatccggtgacaaacagagcaattatctatttgtttgtaggttttatcccattaaactacaaagttttaaacaccctcagattcatcattgtgcttaactcgtcaaa

SEQ ID NO: 19701 - DNA, 743 bp, synthetic construct
  source 1..743: mol_type = other DNA
ttaaaacagcctgtgggttgctcccacccatagggcccatagggcgctagcactctggtatcacggtacctttgtgcgcctgttttatacaccctccccctaatgtaacttagaagcttaacccaaatggccaatagataacccaacacaccagttgggtctcggccaagcacttctgttaccccggactgagtatcaataggctgcctacgcggccgaaggagaaaaagttcgttacccggccaattacttcgaaaaacctagtaacaccatgaaagttgcgcagtgtttcgttcagcactaccccagtgtagatcaggtcgatgagtcaccgcatcccccacgggcgaccgtggcggtggctgcgttggcggcctgcccatggggcaacccatgggacgcttcaatactaacatggtgcgaagagtctattgagctaattggtagtcctccggcccctgaatgcggctaatcctaactgcggagcaggcactcacaaaccagtgagcagcttgtcgtaacgggcaactctgcagcggaaccgactactttgggtgtccgtgtttccttttattcttgacttggctgcttatggtgacaattgagagattgttgccatatagctattggattggccatccggtgacaaacagagcaattatctatttgtttgtaggttttatcccattaaactacaaagttttaaacaccctcagatacatcattgtgcttaactcgtcaaa

SEQ ID NO: 19702 - DNA, 743 bp, synthetic construct
  source 1..743: mol_type = other DNA
ttaaaacagcctgtgggttgctcccacccatagggcccatagggcgctagcactctggtatcacggtacctttgtgcgcctgttttatacaccctccccctaatgtaacttagaagcttaacccaaatggccaatagacaacccaacacaccagttgggtctcggccaagtacttctgttaccccggaccgagtatcaataggctgcctacgcggccgaaggagaaaacgttcgttacccggccaattacttcgaaaaacctagtaacaccatgaaagttgcgcagtgtttcgttcagcactaccccagtgtagatcaggtcgatgagtcaccgcatccctcacgggcgaccgtggcggtggctgcgttggcggcctgcccatggggcaacccatgggacgcttcaatactgacatggtgcgaagagtctattgagctaattggtagtcctccggcccctgaatgcggctaatcctaactgcggagcaggcactcacaaaccagtgagcagtctgtcgtaacgggcaactctgcagcggaaccgactactttgggtgtccgtgtttccttttattcttgacttggctgcttatggtgacaattgagagattgttaccatatagctattggattggccatccggtgacaaacagagcaattatctatttgtttgtaggttttatcccattaaactacaaagttttaaacaccctcagattcatcatcgtgcttaactcgtcaaa

SEQ ID NO: 19703 - DNA, 743 bp, synthetic construct
  source 1..743: mol_type = other DNA
ttaaaacagcctgtgggttgctcccacccatagggcccatagggcgctagcactctggtatcacggtacctttgtgcgcctgttttatacaccctccccctaatgtaacttagaagcttaacccaaatggccaatagacaacccaacacaccagttgggtctcggccaagtacttctgttaccccggaccgagtatcaataggctgcctacgcggccgaaggagaaaacgttcgttacccggccaattacttcgaaaaacctagtaacaccatgaaagttgcgcagtgtttcgttcagcactaccccagtgtagatcaggtcgatgagtcaccgcatccctcacgggcgaccgtggcggtggctgcgttggcggcctgcccatggggcaacccatgggacgcttcaatactgacatggtgcgaagagtctattgagctaattggtagtcctccggcccctgaatgcggctaatcctaactgcggagcaggcactcacaaaccagtgagcagtctgtcgtaacgggcaactctgcagcggaaccgactactttgggtgtccgtgtttccttttatccttgacttggctgcttatggtgacaattgagagattgttaccatatagctattggattggccatccggtgacaaacagagcaattatctatttgtttgtaggttttatcccattaaactacaaagttttaaacaccctcagattcatcatcgtgcttaactcgtcaaa

SEQ ID NO: 19704 - DNA, 743 bp, synthetic construct
  source 1..743: mol_type = other DNA
ttaaaacagcctgtgggttgctcccacccatagggcccatagggcgctagcactctggtatcacggtacctttgtgcgcctgttttatacaccctccccctaatgtaacttagaagcttaacctaaatggccaatagacaacccaacacaccagttgggtctcggccaagtacttctgttaccccggaccgagtatcaataggctgcccacgcggccgaaggagaaaacgttcgttacccggccaattacttcgaaaaacctagtaacaccatgaaagttgcgcagtgtttcgttcagcactaccccagtgtagatcaggtcgatgagtcaccgcatccctcacgggcgaccgtggcggtggctgcgttggcggcctgcccatggggcaacccatgggacgcttcaatactgacatggtgcgaagagtctattgagctaattggtagtcctccggcccctgaatgcggctaatcctaactgcggagcaggcactcacaaaccagtgagcagtctgtcgtaacgggcaactctgcagcggaaccgactactttgggtgtccgtgtttccttttattcttgacttggctgcttatggtgacaattgagagattgttaccatatagctattggattggccatccggtgacaaacagagcaattatctatttgtttgtaggttttatcccattaaactacaaagttttaaacaccctcagattcatcattgtgcttaactcgtcaaa

SEQ ID NO: 19705 - DNA, 743 bp, synthetic construct
  source 1..743: mol_type = other DNA
ttaaaacagcctgtgggttgctcccacccatagggcccatagggcgctagcactctggtatcacggtacctttgtgcgcctgttttatacaccctccccctaatgtaacttagaagcttaacccaaatggccaatagataacccaacacaccagttgggtctcggccaagcacttctgttaccccggaccgagtatcaataggctgcttacgcggccgaaggagaaaacgttcgttacccggccaattacttcgaaaaacctagtaacaccatgaaagttgcgcagtgtttcgttcagcactaccccagtgtagatcaggtcgatgagtcaccgcatcccccacgggcgaccgtggcggtggctgcgttggcggcctgcccatggggcaacccgtgggacgcttcaatactgacatggtgcgaagagtctattgagctaattggtagtcctccggcccctgaatgcggctaatcctaactgcggagcaggcactcacaaaccagtgagcggtctgtcgtaacgggcaactctgcagcggaaccgactactttgggtgtccgtgtttccttttattcttgacttggctgcttatggtgacaattgagagattgttaccatatagctattggattggccatccggtgacaaacagagcaattatctacttgtttgtaggttttatcccattgaactacaaagttttaaacaccctcagattcatcattgtgcttaattcgtcaaa

SEQ ID NO: 19706 - DNA, 743 bp, synthetic construct
  source 1..743: mol_type = other DNA
ttaaaacagcctgtgggttgctcccacccatagggcccatagggcgctagcactctggtatcacggtacctttgtgcgcctgttttatacaccctccccctaatgtaacttagaagcttaacccaaatggccaatagacaacccaacacaccagttgggtctcggccaagtacttctgttaccccggaccgagtatcaataggctgcctacgcggccgaaggagaaaacgttcgttacccggccaattacttcgaaaaacctagtaacaccatgaaagttgcgcagtgtttcgttcagcactaccccagtgtagatcaggtcgatgagtcaccgcatccctcacgggcgaccgtggcggtggctgcgttggcggcctgcccatggggcaacccatgggacgcttcaatactgacatggtgcgaagagtctattgagctaattggtagtcctccggcccctgaatgcggctaatcctaactgcggagcaggcactcacaaaccagtgagcagtctgtcgtaatgggcaactctgcagcggaaccgactactttgggtgtccgtgtttccttttattcttgacttggctgcttatggtgacaattgagagattgttaccatatagctattggattggccatccggtgacaaacagagcaattatctatttgtttgtaggttttatcccattaaactacagagttttaaacaccctcagattcatcattgtgcttaactcgtcaaa

SEQ ID NO: 19707 - DNA, 743 bp, synthetic construct
  source 1..743: mol_type = other DNA
ttaaaacagcctgtgggttgctcccacccatagggcccatagggcgctagcactctggtatcacggtacctttgtgcgcctgttttatacaccctccccctaatgtaacttagaagcttaacccaaatggccaatagacaacccaacacaccagttgggtctcggccaagtacttctgttaccccggaccgagtatcaataggctgcctacgcggccgaaggagaaaacgttcgttacccggccaattacttcgaaaaacctagtaacaccatgaaagttgcgcagtgtttcgttcagcactaccccagtgtagatcaggtcgatgagtcaccgcatccctcacgggcgaccgtggcggtggctgcgttggcggcctgcccatggggcaacccatgggacgcttcaatactgacatggtgcgaagagtctattgagctaattggtagtcctccggcccctgaatgcggctaatcctaactgcggagcaggcactcacaaaccagtgagcagtctgtcgtaacgggcaactctgcagcggaaccgactactttgggtgtccgtgtttccttttattcttgacttggctgcttatggtgacaattgagagattgttaccatatagctattggattggccatccggtgacaaacagagcaattatctatttgtttgtaggttttattccattaaactacaaagttttaaacaccctcagattcatcattgtacttaactcgtcaaa

SEQ ID NO: 19708 - DNA, 743 bp, synthetic construct
  source 1..743: mol_type = other DNA
ttaaaacagcctgtgggttgctcccacccatagggcccatagggcgctagcactctggtatcacggtacctttgtgcgcctgttttatacaccctccccctaatgtaacttagaagcttaacccaaatggccaatagacaacccaacacaccagttgggtctcggccaagtacttctgttaccccggaccgagtatcaataggctgcctacgcggccgaaggagaaaacgttcgttacccggccaattacttcgaaaaacttagtaacaccatgaaagttgcgcagtgtttcgttcagcactaccccagtgtagatcaggtcgatgagtcaccgcatccctcacgggcgaccgtggcggtggctgcgttggcggcctgcccatggggcaacccatgggacgcttcaatactgacatggtgcgaagagtctattgagctaattggtagtcctccggcccctgaatgcggctaatcctaactgcggagcaggcactcacaaaccagtgagcagtctgtcgtaacgggcaactctgcagcggaaccgactactttgggtgtccgtgtttccttttattcttgacttggctgcttatggtgacaattgagagattgttaccatatagctattggattggccatccggtgacaaacagagcaattatctatttgtttgtaggttttatcccattaaactacagagttttaaacaccctcagattcatcatcgtgcttaactcgtcaaa

SEQ ID NO: 19709 - DNA, 743 bp, synthetic construct
  source 1..743: mol_type = other DNA
ttaaaacagcctgggggttgttcccacccacagggcccactgggcgctagcacactggtatcacggtacctttgtgcgcctgttttatccaccctaaccccaaggcaacatagaagcataccacaaaaggtcaataggtgacccagtactccaactgggttttgaccaagcacttctgttaccccggactgagtaccaataggctgcccgcgcggctgaaggggaaaacgttcgttacccggccaattacttcgagaaacctagtaccaccatgaaggttgcgcagcgtttcgctccgcacaaccccagtgtagatcaggctgatgagccaccgcattccccacgggcgaccgtggcggtggctgcgctggcggcctgcccatggggcaacccatgggacgcttcaatactgacatggtgtgaagagtctattgagctaattggtagtcctccggcccctgaatgcggctaatcctaactgcggagcagatacccacacaccagtgggcagtctgtcgtaatgggcaactctgcagcggaaccgactactttgggtgtccgtgtttccttttattcttacactggctgcttatggtgacaattgagagattgttaccatatagctattggattggccatctggtgacaaatagagcaattgtctacctatttgttggttttattccattgaatttcaaagttctaaaaacccttgactttatcttagcactcaacgcggcaaa

SEQ ID NO: 19710 - DNA, 721 bp, synthetic construct
  source 1..721: mol_type = other DNA
tcccacccacagggcccatagggcgctagcactctggtattgcggtacctttgtgcgcctgttttatattcccacccccaatcgcaacttagaagcagtacttcacgaccaacagtgggcgtgacacaccagccacgtctcggtcaagcacctctgtctccccggactgagtatcaataagctgctcacgcggctgagggagaaaacgtccgttacccggccaattacttcgagaaacctagtaccaccacgaaagttgcgcagcgtttcgatccgcacaaccccagtgtagatcaggtcgatgagtcaccgcattccccacgggcgaccgtggcggtggctgcgttggcggcctgcccatgggagaacccgtgggacgcttcaatactgacatggtgtgaagagtctattgagctaattggtagtcctccggcccctgaatgcggctaatcctaactgtggagcagattcccgcatgccagcgggtggtctgtcgtaacgggcaactctgcagcggaaccgactactttgggtgtccgtgtttccttttattcctatattggctgcttatggtgacaattgagagattgttaccatatagctattggattggccatccggtgacaaacagagcaattatctaccaatttgttggttttgtaccattgaatttcaacgcattcaaaactcttaactttattttgactcttaatacagcaaa

SEQ ID NO: 19711 - DNA, 742 bp, synthetic construct
  source 1..742: mol_type = other DNA
ttaaaacagcctgtgggttgttcccacccacagggcccactgggcgctagcacactggtattgcggtacctttgtgcgcctgttttatccaccctccccaaccgtaatttagaagcacgaacaatgtggtcaacaggcaacccagtgcaccaactgggtcttgaccaagcacttctgttacccccggactgagtatcaataagctgctcgcgtggctgaaagagaaaacgttcgttacccggccaattacttcgagaaacctagtatcaccatggaagttgcgcagtgtttcgctccgcacaaccccagtgtagatcaggtcgatgagtcaccgcaaccctcacgggtgaccgtggcggtggctgcgctggcggcctgcccgtggggcaacccatgggacgcttcaatactgacatggtgtgaagagtctattgagctaattggtagtcctccggcccctgaatgcggctaatcctaactgcggagcagatatccacacaccagtggacagtctgtcgtaatgggcaactctgcagcggaaccgactactttgggtgtccgtgtttccttttatcttttattggctgcttatggtgacaattgagagattgttaccatatagctattggattggccatccggtgagcaacagagcagttgtattcctctttgttggatttgtaccattaaactataataactacaacaccctactttacattatccacttaaacacacggaa

SEQ ID NO: 19712 - DNA, 741 bp, synthetic construct
  source 1..741: mol_type = other DNA
ttaaaacagcctgtgggttgatcccacccacaggcccattgggcgctagcactctggtatcacggtacctttgtgcgcctgttttataccccctcccccaactgtaacttagaagtaacacacaccgatcaacagtcagcgtggcacaccagccacgttttgatcaagcacttctgttaccccggactgagtatcaatagactgctcacgcggttgaaggagaaagcgttcgttatccggccaactacttcgaaaaacctagtaacaccgtggaagttgcagagtgtttcgctcagcactaccccagtgtagatcaggtcgatgagtcaccgcattccccacgggcgaccgtggcggtggctgcgttggcggcctgcccatggggaaacccatgggacgctctaatacagacatggtgcgaagagtctattgagctagttggtagtcctccggcccctgaatgcggctaatcctaactgcggagcacacaccctcaagccagagggcagtgtgtcgtaacgggcaactctgcagcggaaccgactactttgggtgtccgtgtttcattttattcctatactggctgcttatggtgacaattgagagatcgttaccatatagctattggattggccatccggtgactaatagagctattatatatccctttgttgggtttataccacttagcttgaaagaggttaaaacattacaattcattgttaagttgaatacagcaaa

SEQ ID NO: 19713 - DNA, 741 bp, synthetic construct
  source 1..741: mol_type = other DNA
ttaaaacagcctgtgggttgatcccacccacagggcccactgggcgctagcacactggtattgcggtacctttgtgcgcctgttttatccaccctccccaacagtaacttagaagcagaacaatgtggtcaacaggaagctcagtaaaccaactgggtctcgaccaagcacttctgttaccccggactgagtatcaaaaagctgctcgcgtggctgaaggagaaaacgtccgttacccggccaattacttcgagaaacccagtatcaccatggaggttgcgcagcgtttcgctccgcacaaccccagtgtagatcaggtcgatgagtcaccgcaatcctcacgggtgaccgtggcggtggctgcgctggcggcctgcccatggggcaacccatgggacgcttcaatactgacatggtgcgaagagtctattgagctaattggtagtcctccggcccctgaatgcggctaatcctaactgcggagcagatatccacataccagtggacagtctgtcgtaatgggcaactctgcagcggaaccgactactttgggtgtccgtgtttccttttatccttttattggctgcttatggtgacaattgagagattgttaccatatagctattggattggccatccggtgagcaacagagcaattgtatttctctttgtaggatttgtaccgttgaattacaacaattacaacaccttactttacattatccacttaaacacgcggaa

SEQ ID NO: 19714 - DNA, 742 bp, synthetic construct
  source 1..742: mol_type = other DNA
ttaaaacagcctgtgggttgatcccacccacagggcccattgggcgctagcactctggtatcacggtacctttgtgcgcctgttttataccccctcccccaactgtaacttagaagtaacacacaccgatcaacagtcagcgtggcacaccagccacgttttgatcaagcacttctgttaccccggactgagtatcaatagactgctcacgcggttgaaggagaaagcgttcgttatccggccaactacttcgaaaaacctagtaacaccgtggaagttgcagagtgtttcgctcagcactaccccagtgtagatcaggtcgatgagtcaccgcattccccacgggcgaccgtggcggtggctgcgttggcggcctgcccatggggaaacccatgggacgctctaatgcagacatggtgcgaagagtctattgagctagttggtagtcctccggcccctgaatgcggctaatcctaactgcggagcacacaccctcaagccagagggcagtgtgtcgtaacgggcaactctgcagcggaaccgactactttgggtgtccgtgtttcattttattcctatattggctgcttatggtgacaattgagagattgttaccatatagctattggattggccatccggtgaccaatagagctattatatatctctttgttgggtttataccacttagcttgaaagaggttaaaacattacaattcattgttaagttgaatacagcaaa

SEQ ID NO: 19715 - DNA, 743 bp, synthetic construct
  source 1..743: mol_type = other DNA
ttaaaacagcctgtgggttgttcccacccacagggcccactgggcgctagcacactggtatcacggtacctttgtgcgcctgttttatccaccccctccccaatgtaacgtagaagcacaaaccaagtggtcaatagatggctcagtacaccaactgggtttagaccaagtacttctgttaccccggactgagtatcaataggctgctcacgcggctgaaggagaaaacgttcgttacccggccaactacttcgagaagcccagtaccgccatggaggatgcgcagtgtttcgttcagcacaaccccagtgtagatcaggccgatgagtcaccgctaaccccacgggtgaccgtggcggtggctgcgctggcggcctgcccatggggtaacccatgggacgcttcaattccgacatggtgcgaagagcctattgagctagttggtagtcctccggcccctgaatgcggctaatcccaactgcggagcagacacccacaaaccagtgggcagtttgtcgtaacgggcaactctgcagcggaaccgactactttgggtgtccgtgtttccttttattcctacattgactgcttatggtgacaattgaaagattgttaccatatagctattggattggtcatccggtgacaaacagagctattatttacctttttattggctttgtgccattgaatttcaaagttataaaaaccataaactttatcttgattcttaacacagcaaa

SEQ ID NO: 19716 - DNA, 742 bp, synthetic construct
  source 1..742: mol_type = other DNA
ttaaaacagcctgtgggttgatcccacccacagggcccattgggcgctagcactctggtatcacggtacctttgtgcgcctgttttataccccctctcccaactgtaacttagaagtaacacacaccgatcaacagtcagcgtggcacaccagccacgttttgatcaagcacttctgttaccccggactgagtatcaatagactgctcacgcggttgaaggagaaagcgttcgttatccggccaactacttcgaaaaacctagtaacaccgtggaagttgcagagtgtttcgctcagcactaccccagtgtagatcaggtcgatgagtcaccgcattccccacgggcgaccgtggcggtggctgcgttggcggcctgcccatggggaaacccatgggacgctctaatacagacatggtgcgaagagtctattgagctagttggtagtcctccggcccctgaatgcggctaatcctaactgcggagcacacaccctcaagccagagggcagtgtgtcgtaacgggcaactctgcagcggaaccgactactttgggtgtccgtgtttcattttattcctatactggctgcttatggtgacaattgagagattgttaccatatagctattggattggccatccggtgactaatagagctattatatatccctttgttgggtttataccacttagcttgaaagaggttaaaacattacaattcattgttaagttgaatacagcaaa

SEQ ID NO: 19717 - DNA, 741 bp, synthetic construct
  source 1..741: mol_type = other DNA
ttaaaacagcctgtgggttgatcccacccacagggcccactgggcgctagcacactggtattgcggtacctttgtgcgcctgttttatccaccctccccaacagtaacttagaagcagaacaatgtggtcaacaggaagctcagtaaaccaactgggtctcgaccaagcacctctgttaccccggactgagtatcaaaaagctgctcgcgtggctgaaggagaaaacgtccgttacccggccaattacttcgagaaacccagtaccaccatggaggttgcgcagcgtttcgctccgcacaaccccagtgtagatcaggtcgatgagtcaccgcaatcctcacgggtgaccgtggcggtggctgcgctggcggcctgcccatggggcaacccatgggacgcttcaatactgacatggtgcgaagagtctattgagctaattggtagtcctccggcccctgaatgcggctaatcctaactgcggagcagatatccacacaccagtggacagtctgtcgtaatgggcaactctgcagcggaaccgactactttgggtgtccgtgtttccttttatccttctattggctgcttatggtgacaattgagagattgttaccatatagctattggattggccatccggtgagcaacagagcaattgtattcctctttgtaggatttgtaccgttgaattacaacaactacaacaccttactctacattatccacttaaacacgcggaa

SEQ ID NO: 19718 - DNA, 742 bp, synthetic construct
  source 1..742: mol_type = other DNA
ttaaaacagcctgtgggttgctcccacccatagggcccattgggcgctagcactctggtattacggtacccttgtgcgcctgttttatacatccacccccacttgtaaattagaagcaacacttcacgaccaacagcaggcgtggcgtgccagccacgtcttggtcaagcacttctgtttccccggaccgagtatcaataggctgtccacacggctgaaggagaaaacgtccgttacccggccaattacttcgagaaacccagtaccaccatgaaggttgcgcagtgtttcgctccgcacaatcccagtgtagatcaggctgatgagtcaccgcattccccacgggcgaccgtggcggtggctgcgctggcggcctgcccatggggcaacccatgggacgctacaatactaacatggtgtgaagagtctattgagctaattggtagtcctccggcccctgaatgcggctaatcctaactgtggagcagatacccacatgccagtgggcagtctgtcgtaacgggcaactccgcagcggaaccgactactttgggtgtccgtgtttccttttattcttatattggctgcttatggtgacaattgagagattgttaccatatagctattggattggccatccagtgagcaacagagcaattgtatatctctttgctggatttgttcctcttaacttcaacagttacaaaactctgctttacattattcatttaaacacaagaag

SEQ ID NO: 19719 - DNA, 742 bp, synthetic construct
  source 1..742: mol_type = other DNA
ttaaaacagcctgtgggttgctcccacccatagggcccattgggcgctagcactctggtattacggtacccttgtgcgcctgttttatacatccaccctcacttgtaaattagaagcaacaattcacgaccaatagcaggcgtggcgtgccagccacgtctcggtcaagcacttctgtttccccggattgagtatcaataagctgttcacacggctgaaggagaaaacgtccgttacccggccaattacttcgagaaacccagtaccaccatggaggttgcgcagtgtttcgctccgcacaatcccagtgtagatcaggccgatgagtcaccgcgttccccacgggcgaccgtggcggtggctgcgctggcggcctgcccatggggcaacccatgggacgctacaatactgacatggtgcgaagagtctattgagctaattggtagtcctccggcccctgaatgcggctaatcctaactgtggagcagatacccacgtgccagtgggcagtctgtcgtaatgggcaactccgcagcggaaccgactactttgggtgtccgtgtttccttttattcttatattggctgcttatggtgacaattgagagattgttaccatatagctattggattggccatccggtgagcaatagagctattgtatatctctttgttggatttgttcctcttaacttcaacagttacaaaaccctgctttacatagttcacttgaatacaagaag

SEQ ID NO: 19720 - DNA, 742 bp, synthetic construct
  source 1..742: mol_type = other DNA
ttaaaacagcctgtgggttgctcccacccatagggcccattgggcgctagcactctggtattacggtacccttgtgcgcctgttttatacatccacccctactcgtaaattagaagcaacaaatcacgaccaatagtaggcgtggcgcgccagccacgtctcggtcaagcacttctgtttccccggatcgagtatcaataagctgtccacacggctgaaggagaaaacatccgttacccggccaattacttcgagaaacccagtaacaccatggaggttgcgcagtgtttcgctccgcacaatcccagtgtagatcaggctgatgagtcaccgcgttccccacgggcgaccgtggcggtggctgcgctggcggcctgcccatggggcaacccatgggacgctacaatgctgacatggtgcgaagagtctattgagctaattggtagtcctccggcccctgaatgcggctaatcctaactgtggagcagatacccacataccagtgggcagtctgtcgtaacgggcaactccgcagcggaaccgactactttgggtgtccgtgtttccttttgttcttgtattggctgcttatggtgacaattgaaagattgttaccatatagctattggattggccatccagtgagcaacagagcaattgtatatctctttgccggatttgttcctcttaacttcgacagttacacaaccctgctttacataattcacttaaatacaagaag

SEQ ID NO: 19721 - DNA, 744 bp, synthetic construct
  source 1..744: mol_type = other DNA
ttaaaacagccctgtgggttgttcccacccacagggcccaccgggcgctagcacactggtatctcggtacctttgtgcgcctgttttatccacccttttcccatttaatttagaagcacgcgccaagacggtcaatagggagcccagtaagccaattgggttatgaccaagcacttctgtatccccgggctgagtatcaataagctgctcgcgtggctgaaggagaaaaagctcgttacccggccaattacttcgagaaacccagtagcatcatgaaagttgcgcagtgtttcgctccacaccaccccagtgtagatcaggccgatgagtcaccgcgttccccacgggtgaccgtggcggtggctgcgctggcggcctgcccatggggccacccatgggacgcttcaatactgacgtggtgtgaagagtctattgagctaattggtagtcctccggcccctgaatgcggctaatcctaactgcggagcagatgcccacgcaccagtggggagtctgtcgtaacgggtaactctgcagcggaaccgactactttgggtgtccgtgtttccttttatttctactctggctgcttatggtgacaattgaaaggttgttaccatatagctattggattggccatccggtgacaaatagagcgattatttacttgtttgttgggtttgtgccactgaactacaaagctttacacactcttaactacattttaatccttagctcattaaa

SEQ ID NO: 19722 - DNA, 742 bp, synthetic construct
  source 1..742: mol_type = other DNA
ttaaaacagcctgtgggttgatcccacccacagggcccaacgggcgctagcacactggtattacggtacctttgtgcgcctgttttatccacccctccccaacgcaacttagaagcaaaggaatgatgatcaacaggaagctcagtatgccaactgagtgatgatcaagcacttctgttaccccggaccgagtatcaataagctgctcgcgcggctgaaggagaaaacgttcgttacccggccagctacttcgagaagcccagtaccaccatgaaagttgcgcggcgtttcgctccgcacaaccctagtgtagatcaggtcgatgagtcaccgcgttccccacgggcgaccgtggcggtggctgcgttggcggcctgcccatggggtaacccatgggacgcttcaatactgacatggtgcgaagagtctattgagctagttggtagtcctccggcccctgaatgcggctaatcctaactgcggagcagatacccacgaaccagtgggcagtctgtcgtaatgggcaactctgcagcggaaccgactactttgggtgtccgtgtttccttttattcatttattggctgcttatggtgacaattgagagattgttaccatatagctattggattggccatccggtgacaaacagagcaattgtttacctatttgtgggattcataccactagatcacaaagttctaaacaccctcaattacattcttgtacttaataaattaaa

SEQ ID NO: 19723 - DNA, 741 bp, synthetic construct
  source 1..741: mol_type = other DNA
ttaaaacagctctggggttgctcccacccatagggcccactgggcgctagcacactggtattgcggtacctttgtgcgcctgttttatccaccccccccaacggtaatttagaagcacgaacaatgtggccaacaggaagcccagtaaaccaactgggttatggtcaagcacttctgttaccccggactgagtatcaataagctgctcgcgtggctgaaggagaaaacgtccgttacccggccagttacttcgagaaacttagtaccaccatgaaagttgcgaggcgtttcgctccgcacaaccccagtgtagatcaggtcgatgagtcactgcaatccacacgggtgaccgtggcggtggctgcgctggcggcctgcccgtggggcaacccatgggacgcttcaatactgacatggtgtgaagagtctattgagctaattggtagtcctccggcccctgaatgcggctaatcctaactgcggagcagatatccacacaccagtggacagtctgtcgtaatgggcaactccgcagcggaaccgactactttgggtgtccgtgtttccttttatcttttattggctgcttatggtgacaattgagagattgttgccatatagctattggattggccatccggtaagcaacagagcaattgttttcctctttgttggatttataccattaaatttcaacacttataacactttactttacattatccacttaaactcgcagaa

SEQ ID NO: 19724 - DNA, 741 bp, synthetic construct
  source 1..741: mol_type = other DNA
ttaaaacagctctggggttgctcccacccatagggcccactgggcgctagcacactggtattgcggtacctttgtgcgcctgttttatccaccccccccaacggtaatttagaagcacgaacaatgtggccaacaggaagcccagtaaaccaactgggttatggtcaagcacttctgttaccccggactgagtatcaataagctgctcgcgtggctgaaggagaaaacgtccgttacccggccagttacttcgagaaacttagtaccaccatgaaagttgcgaggcgtttcgctccgcacaaccccagtgtagatcaggtcgatgagtcactgcaatccacacgggtgaccgtggcagtggctgcgctggcggcctgcccgtggggcaacccatgggacgcttcaatactgacatggtgtgaagagtctattgagctaattggtagtcctccggcccctgaatgcggctaatcctaactgcggagcagatatccacacaccagtggacagtctgtcgtaatgggcaactccgcagcggaaccgactactttgggtgtccgtgtttccttttatcttttattggctgcttatggtgacaattgagagattgttgccatatagctattggattggccatccggtaagcaacagagcaattgttttcctctttgttggatttataccattaaatttcaacacttataacactttactttacattatccacttaaactcgcagaa

SEQ ID NO: 19725 - DNA, 726 bp, synthetic construct
  source 1..726: mol_type = other DNA
ttcccacccacagggcccactgggcgctagcacactggtatcacggtacctttgtgcgcctgttttatgcttcctcccccactatagtaatttagaagcttgaaccacacggccaacagacaacccggtacaccaaccgggccccggccaagcacttctgtatccccggactgagtatcagtaggctgctcgcgcggctgaaggagaaaacgttcgttacccggccacttacttcgagaaacctagtaacgccatgaaagttgcgcagcgtttcgctccgcacaaacccagtgtagatcaggtcgatgagtcaccgcatcccccacgggcgaccgtggcggtggctgcgttggcggcctgcccatggggtaacccatgggacgcttcaatactgacatggtgcgaagagtctattgagctaagtggtagtcctccggcccctgaatgcggataatcctaactgcggagcagatacccacactccagtgggcagtctgtcgtaacgggcaactctgcagcggaaccgactactttgggtgtccgtgtttccttttgtcttttacactggctgcttatggtgacaattgaaagattgttaccatatagctattggattggccatccggtatcaaacagagcaattatttacttgtttgttggttatatacctctcgataccaaggttctaaaaacactcaactacatcttgttattgaatacgttgaa

SEQ ID NO: 19726 - DNA, 743 bp, synthetic construct
  source 1..743: mol_type = other DNA
ttaaaacagcctgtgggttgtacccacccacagggcccactgggcgctagcactctggtattgcggtacctttgtgcgcctgttttacccaccctcccccaacgtaacttagaagcctgacatatacggtcacaagccagcccagtacgccaactgggtaccgaccaagcacttctgttaccccggactgagtatcaataagctgccaaagcggctgaaggagaaaacgttcgttacccggccaattacttcgagaaacccagtaacaccatgaaagttgcgtagcgtttcattcagcacaatcccagtgtagatcaggtcgatgagtcaccgcattccccacaggcgactgtggcggtggctgcgttggcggccctgcccatggggcaacccatgggacgcttcaatactgacatggtgcgaagagtctattgagctaattggtagtcctccggcccctgaatgcggctaatcctaactgcggagcaggcactcgcagaccagcgagcagcttgtcgtaatgggcaactccgcagcggaaccgactactttgggtgtccgtgtttcctatttcctttacactggctgcttatggtgacaattgagaaattgttaccatatagctattggagtggccatccggtgactaacagagcaataatatatttgtttgttggctttgtgccacttaatttgaaggttgttaagacgctcaatctgatactacttctaaataaagcaaa

SEQ ID NO: 19727 - DNA, 732 bp, synthetic construct
  source 1..732: mol_type = other DNA
gggttgttcccaccccagaggcctacgtggcggctagtactccggtatcacggtacccttgtacgcctgttttatactcccttccccgtaacttagaagtaaacaagccaagttcaatagaagggggtacaaaccagtaccaccacgaacaagcacttctgtttccccggtgaagttgcatagattgttcccacggtcgaaagcgactgatccgttacccgctcatgtacttcgggaagcctagtatcaccttcggatcttcgatgcgttgcgctcagcactcaaccccagagtgtagcttaggtcgatgagtctggacaaacctcactggcgacagtggtccaggctgcgttggcggcctacctgtggcccaaagtcacaggacgctagttgtgaacaaggtgtgaagagcctactgagctacatgagagtcctccggcccctgaatgcggctaatctcaaccacggagcaggtagtcacaaaccagtgacttgcctgtcgtaacgcgaaagtctgtggcggaaccgactactttgggtgtccgtgtttccttttattctcattatggctgcttatggtgacaatcctagattgttatcataaagcgagttggattggccatccggtgaaaatcaagcacatcatatacttgtttgttgggtataaccctctgattgcacgcactcttggcttggttaggattattgtgtggaaaaggcaccatagttaca

SEQ ID NO: 19728 - DNA, 706 bp, synthetic construct
  source 1..706: mol_type = other DNA
tggtggctagcactccggtattacggtacccttgtgcgcctgttttatactcccctcccgcaacttagaagcacgaaaccaagttcaatagaagggggtacaaaccagtaccactacgaacaagcacttctgtttccccggtgacattgcatagactgctcacgcggttgaaagtgatcgatccgttacccgcttgtgtacttcgaaaagcctagtatcgccttggaatcttcgacgcgttgcgctcagcacccgaccccggggtgtagcttaggctgatgagtctggacattcctcaccggtgacggtggtccaggctgcgttggcggcctacctatggctaacgccataggacgttagatgtgaacaaggtgtgaagagcctattgagctacataagagtcctccggcccctgaatgcggctaatcctaaccacggagcaggcggtcgcgaaccagtgactggcttgtcgtaacgcgcaagtctgtggcggaaccgactactttgggtgtccgtgtttcctgttatttttatcatggctgcttatggtgacaatcagagattgttatcataaagcgaattggattggccatccggtgagtgttgtgtcaggtatacaactgtttgttggaaccactgtgttagctttacttctcatttaaccaattaatcaaaaacaatacgaggataaaacaacaatactaca

SEQ ID NO: 19729 - DNA, 744 bp, synthetic construct; identical to SEQ ID NO: 1080
  source 1..744: mol_type = other DNA

SEQ ID NO: 19730 - DNA, 742 bp, synthetic construct
  source 1..742: mol_type = other DNA
ttaaaacagcctgtgggttgttcccacccacagggcccaatgggcgctagcacactggtattacggtacctttgtgcgcctgttttatccaccccaccccaaagtaacttagaagcaaagagataacgatcaacagaaagctcagtatgccaactgggtggtgatcaagcacttctgttaccccggaccgagtatcaataagctgctcgcgcggctgaaggagaaaacgttcgttacccggccaactacttcgagaaacccagtaccaccatgaaagttgcgcggcgtttcgctccgcacaaccccagtgtagatcaggtcgatgagtcaccgcattccccacgggcgaccgtggcggtggctgcgttggcggcctgcccatggggcaacccatgggacgcttcaatactgacatggtgcgaagagtctattgagctagttggtagtcctccggcccctgaatgcggctaatcctaactgcggagcagatacccacgaaccagcgggcagtctgtcgtaacgggcaactctgcagcggaaccgactactttgggtgtccgtgtttccttttattcatttattggctgcttatggtgacaattgagagattgttaccatatagcttttggattggccatccggtgacaaacagagcgattgtttatctatttgtgggtttcgtaccattaaactacaaagttctaaacaccctcaattacattctcgtacttaataaattaaa

SEQ ID NO: 19731 - DNA, 719 bp, synthetic construct
  source 1..719: mol_type = other DNA
ccacccacagggcccatcgggcgcatgcacactggtatcacggtacctttgtgcgcctgttttatacaccccttcccgatgtaacgtagaatcacaacacaaagggtcaataggaggctcagtacgccaactgggtcacgaccaagcacttctgtcaccccggaccgagtatcaataagctgctcgcgcggctgaaggagaaagcgttcgttacccggccatttacttcgagaaacctagtagcaccatggaggttgcgcggcgtttcgctccacacgaccccggtgtagatcaggccgatgagtcaccgcactcctcacgggcgaccgtggcggtggctgcgctggcggcctgcccatggggtaacccatgggacgcttcaagactgacatggtgcgaagagtctattgagctgaatggtagtcctccggcccctgaatgcggctaatcctaactgcggagcagatacccaccagccagtgggcagtctgtcgtaatgggcaactctgcagcggaaccgactactttgggtgtccgtgtttctttttattttcatattggctgcttatggtgacaattgatagattgttgccatatagctattggattggccatccggtgtctaatagagcaattatattccaatttgttggatttgtaccccttaaccttaaagtcataagaacacttagttttgtgttactattgaacacattaaa

SEQ ID NO: 19732 - DNA, 813 bp, synthetic construct
  source 1..813: mol_type = other DNA
ttaaaacagcctgtggggttgttgcccacccacagggcccactgggcgccagtacacaggatatgcctaacctcggtattacggtaccgttgtttacagtacccttgtacgcctgttttatatccctcccccatatgtaaccttagaagtttaatcaaataaagaccaacaggagtccaacatccagttggattatggtcaagcacttctgtttccccggacttagtagtgataggctgtacccacggccgaagatgaacccgtccgttatccggccagctacttcgagaagcttagtaacatcaaagatctgtcttggcgtttcgctcagcgtgttccccccgcgtagatcgggctgatgggtctccgcataccccacgggcgaccgtggcggaggccgcgtggcggcccgcctatggcgaaagccataggacgccatttcagtgacagggtgtgaagagcctattgagctagttggtagtcctccggcccctgaatgcggctaatcctaaccacggagcgtccaccagcaaaccagctggaagggcgtcgtaacgggtaactctgtggcggaaccgactactttgggtgtccgtgtttccttttgatcctattttggctgcttatggtgacaacgataagttgttatcataaagcttttgggttggccacctggaaaaagttatcagtgtttgatattgttcggctctcacgcctaccaataaaacaagccttatattttcttattgcattttatccagcaagtgaaatttcagagttccacctaaacctcctgatatcattgaaatcaag

SEQ ID NO: 19733 - DNA, 744 bp, synthetic construct
  source 1..744: mol_type = other DNA
ttaaaacagcctgtgggttgtacccacccacagggcccactgggcgttagcacactggtatcccggtacctttgtgcgcctgttttatatccccttccccatgttgtaacttagaagcaatacaatttcggtcagtagctgacgcgacaaaccagttgcgttttgaccaagcacctctgtgaccccggaccgagtatcaataagctgcttgcgcggctgaaggagaaaccgttcgttacccggctaactacttcgaaaaccctagtaacaccatgaacgttgcggagtgtttcgctcagcacttcccccgtgtagttcaggtcgatgagtcaccgcgttctccacgggtgaccgtggcggtggctgcgttggcggcctgcctgtggggcaacccacaggacgctctaatacagacatggtgcgaagagtctattgagctagttagtagtcctccggcccctgaatgcggctaatcctaactgcggagcacatgcccacaaaccagtgggtggtgtgtcgtaacgggtaactctgcagcggaaccgactactttgggtgtccgtgtttctatttattcctatactggctgcttatggtgacaattgagagattgttgccatatagctattggattggccatccggtgtcgaatagagcaattatttacctatttgttggtttcatacccttaaaccttaaagtttttaagactcttagtcttatactacaatttaactcagtaaa

SEQ ID NO: 19734 - DNA, 742 bp, synthetic construct
  source 1..742: mol_type = other DNA
ttaaaacagcctgtgggttgtacccacccacagggcccactgggcgctagcactctggtattgcggtacctttgtgcgcctgttttacccaccctcccccaacgtaacttagaagcctgacatatacggtcacaagccagcccagtacgccaactgggtaccgaccaagcacttctgttaccccggactgagtatcaataagctgccaaagcggctgaaggagaaaacgttcgttacccggccaattacttcgagaaacccagtaacaccatgaaagttgcgtagcgtttcattcagcacaatcccagtgtagatcaggtcgatgagccaccgcattccccacaggcgactgtggcggtggctgcgttggcggcctgcccatggggcaacccatgggacgcttcaatactgacatggtgcgaagagtctattgagctaattggtagtcctccggcccctgaatgcggctaatcctaactgcggagcaggcactcgcagaccagcgagcagcttgtcgtaatgggcaactccgcagcggaaccgactactttgggtgtccgtgtttcctatttcctttacactggctgcttatggtgacaattgagaaattgttaccatatagctattggagtggccatccggtgactaacagagcaataatatatttgtttgttggctttgtgccacttaatttgaaggttgttaagacgctcaatctgatactacttctaaataaagcaaa

SEQ ID NO: 19735 - DNA, 744 bp, synthetic construct
  source 1..744: mol_type = other DNA
ttaaaacagcctgtgggttgtacccacccacagggcccactgggcgttagcacactggtatcccggtacctttgtgcgcctgttttatatccccttccccatgttgtaacttagaagcaatacaatttcggtcagtagctgacgcgacaaaccagttgcgttttgaccaagcacctctgtgaccccggaccgagtatcaataagctgcttgcgcggctgaaggagaaaccgttcgttacccggctaactacttcgaaaaacctagtaacaccatgaacgttgcggagtgtttcgctcagcacttcccccgtgtagatcaggtcgatgagtcaccgcgttcctcacgggtgaccgtggcggtggctgcgttggcggcctgcctgtggggcaacccacaggacgctctaatacagacatggtgcgaagagtctattgagctagttagtagtcctccggcccctgaatgcggctaatcctaactgcggagcacatgcccacaaaccagtgggtggtgtgtcgtaacgggtaactctgcagcggaaccgactactttgggtgtccgtgtttctatttattcctatactggctgcttatggtgacaattgagagattgttgccatatagctattggattggccatccggtgtcgaatagagcaattatttacctatttgttggtttcatacccttaaaccttaaagtttttaagactcttagtcttatactacaatttaactcagtaaa

SEQ ID NO: 19736 - DNA, 742 bp, synthetic construct
  source 1..742: mol_type = other DNA
ttaaaacagcctgtgggttgctcccacccgcagggcccactgggcgctagcacactggtattgcggtacctttgtacgcctgttttatccaccccccccaacagtaatttagaagcacgaacaatgtggtcaacaggaagctcagtacaccaactgggtctcgaccaagcacttctgttacccccggactgagtatcaataagctgctcgagaggctgaaggagaaaacgtccgttatccggccagttacttcgagaaacttagtaccaccatggaagttgcgcagcgtttcgctccgcacaacccctgtgtagatcaggtcgatgagtcaccgcaatcctcacgggtgaccgtggcggtggctgcgctggcggcctgcccatggggcgacccatgggacgcttcaatactgacatggtgtgaagagtctattgagctaattggtagtcctccggcccctgaatgcggctaatcctaactgcggagcagatatccacacaccagtggacagtctgtcgtaatgggcaactctgcagcggaaccgactactttgggtgtccgtgtttccttttatcttttattggctgctcatggtgacaattgagagattgttaccatatagctattggattggccatccggtgagcaacagggcaattgtatttctctttgttggatttgtaccattaaactacactaactacaataccttactctacattatccacttaaacacgcagaa

SEQ ID NO: 19737 - DNA, 738 bp, synthetic construct
  source 1..738: mol_type = other DNA
acagcctgtgggttgttcccacccacagggcccattgggcgctagcacactggtattacggtacctttgtgcgcctgttttatccaccccctccccgatgtaacgtagaagcacaaaccaagtggtcaatagacggctcagtacgccaactgggcttagaccaagcacttctgttaccccggactgagtatcaataggctgctcacgcggctgaaggggaaaacgttcgttacccggccaactacttcgagaagcccagtaccaccatgaaggatgcgcagtgtttcgttcagcacaaccccagtgtagatcaggccgatgagtcaccgcaatccccacgggtgaccgtggcggtggctgcgctggcggcctgcccatggggcaacctatgggacgcttcaatttcgacatggtgcgaagagtttattgagctagttggtagtcctccggcccctgaatgcggctaatcccaactgcggagcagacacccacaaaccagtgggcagtttgtcgtaacgggcaactctgcagcggaaccgactactttgggtgtccgtgtttccttttattcctacattggctgcttatggtgacaattgagagattgttgccatatagctattggattggccatccggtgacaaacagagctattatttacctttttgttggtttcgtgccgttgaattttaaagttataaaaactataaacttcatcttgacactcaatacagcaaa

SEQ ID NO: 19738 - DNA, 708 bp, synthetic construct
  source 1..708: mol_type = other DNA
cccacgtggcggctagtacactggtatcacggtacctttgtacgcctgttttatactccctccccccgcaacttagaagcacacaattcaagctcaataggagggggtgcaagccagcgcctccgtgggcaagtactactgtttccccggtgaggccgcatagactgttcccacggttgaaagtgtccgatccgttatccgctcacgtacttcgagaagcctagtatcactctggaatcttcgacgcgttgcgctcagcactcaaccccggagtgtagcttgggccgatgagtctggacagtccccactggcgacagtggtccaggctgcgctggcggcccacctgtggcccaaagccacgggacgctagttgtgaacagggtgtgaagagcctattgagctacatgagagtcctccggcccctgaatgcggctaatcctaaccatggagcaggcagctgcaacccagcagccagcctgtcgtaacgcgcaagtccgtggcggaaccgactactttgggtgtccgtgtttccttttattcttgaatggctgcttatggtgacaatcatagattgttatcataaagcgagttggattggccatccagtgtgaatcagactaattactcccttgattgttggacccactcccgaaacgttttactccttaacttattgaaattgtttgaagacaggatttcagtgtcaca

SEQ ID NO: 19739 - DNA, 708 bp, synthetic construct
  source 1..708: mol_type = other DNA
cccacgtggcggctagtacactggtatcacggtacctttgtacgcctgttttatactccctccccccgcaacttagaagcacacaattcaagctcaataggagggggtgcaagccagcgcctccgtgggcaagtactactgtttccccggtgaggccgcatagactgttcccacggttgaaagtgtccgatccgttatccgctcatgtacttcgagaagcctagtatcactctggaatcttcgacgcgttgcgctcagcactcaaccccggagtgtagcttgggccgatgagtctggacagtccccactggcgacagtggtccaggctgcgctggcggcccacctgtggcccaaagccacgggacgctagttgtgaacagggtgtgaagagcctattgagctacatgagagtcctccggcccctgaatgcggctaatcctaaccatggagcaggcagctgcaacccagcagccagcctgtcgtaacgcgcaagtccgtggcggaaccgactactttgggtgtccgtgtttccttttattcttgaatggctgcttatggtgacaatcatagattgttatcataaagcgagttggattggccatccagtgtgaatcagactaattactcccttgtttgttggatccactcccgaaacgttttattccttaacttattgaaattgtttgaagacaggatttcagtgtcaca

SEQ ID NO: 19740 - DNA, 708 bp, synthetic construct
  source 1..708: mol_type = other DNA
cccacgcggcggctagtacactggtatcacggtacctttgtacgcctgttttatactccctccccccgcaacttagaagcacacaattcatgctcaataggagggggtgcaagccagcgcctctgtgggcaagcactactgtttccccggtgaggccgcatagactgttcccacggttgaaagtgtccgatccgttatccgctcatgtacttcgagaagcctagtatcactctggaatcttcgatgcgttgcgctcagcactcaaccccggagtgtagcttgggccgatgagtctggacagtccccactggcgacagtggtccaggctgcgctggcggcccacctgtggcccaaagccacgggacgctagttgtgaacagggtgtgaagagcctattgagctacatgagagtcctccggcccctgaatgcggctaatcccaaccatggagcaggcagctgcaacccagcagccagcctgtcgtaacgcgcaagtccgtggcggaaccgactactttgggtgtccgtgtttccttttattcttgaatggctgcttatggtgacaatcatagattgttatcataaagcgagttggattggccatccagtgtgaatcagactaattactcccttgtttgttggatccactcccgaaacgttttactccctaacttattgaaattgtttgaagacaggatttcagtgtcaca

SEQ ID NO: 19741 - DNA, 708 bp, synthetic construct
  source 1..708: mol_type = other DNA
cccacgtggcggctagtacactggtatcacggtacctttgtacgcctgttttatactccctccccccgcaacttagaagcacacaattcaagctcaataggagggggtgcaagccagcgcctccgtgggcaagtactactgtttccccggtgaggccgcatagactgttcccacggttgaaagtgtccgatccgttatccgctcatgtacttcgagaagcctagtatcactctggaatcttcgacgcgttgcgctcagcactcaaccccggagtgtagcttgggccgatgagtctggacagtccccactggcgacagtggtccaggctgcgctggcggcccacctgtggcccaaagccacgggacgctagttgtgaacagggtgtgaagagcctattgagctacatgagagtcctccggcccctgaatgcggctaatcctaaccatggagcaggcagctgcaatccagcagccagcctgtcgtaacgcgcaagtccgtggcggaaccgactactttgggtgtccgtgtttccttttatttttgaatggctgcttatggtgacaatcatagattgttatcataaagcgagttggattggccatccagtgtgaatcagactaattactcccttgtttgttggatccactcccggaacgttttattccttaacttattgaaattgtttgaagacaggatttcagtgtcaca

SEQ ID NO: 19742 - DNA, 708 bp, synthetic construct
  source 1..708: mol_type = other DNA
cccacgtggcggctagtacactggtatcacggtacctttgtacgcctgttttacactccctccccccgcaacttagaagcacacaattcaagctcaataggagggggtgcaagccagcgcctccgtgggcaagtactactgtttccccggtgaggccgcatagactgttcccacggttgaaagtgtccgatccgttatccgctcacgtacttcgagaagcctagtatcactctggaatcttcgacgcgttgcgctcagcactcaaccccggagtgtagcttgggccgatgagtctggacagtccccactggcgacagtggtccaggctgcgctggcggcccacctgtggcccaaagccacgggacgctagttgtgaacagggtgtgaagagcctattgagctacatgagagtcctccggcccctgaatgcggctaatcctaaccatggagcaggcagctgcaacccagcagccagcctgtcgtaacgcgcaagtccgtggcggaaccgactactttgggtgtccgtgtttccttttattcttgaatggctgcttatggtgacaatcatagattgttatcataaagcgagttggattggccatccagtgtgaatcagactaattactcccttgtctgttggacccactcccgaaacgtttcactccttaacttattgaaattgtttgaagacaggatttcagtgtcaca

SEQ ID NO: 19743 - DNA, 708 bp, synthetic construct
  source 1..708: mol_type = other DNA
cccacgtggcggctagtacactggtatcacggtacctttgtacgcctgttttatactccctccccccgcaactaagaagcatacaatccaagctcaataggagggggtgcaagccagcgcctccgtgggcaagcactactgtttccccggtgaggccgcatagactgttcccacggttgaaagtgtccgatccgttatccgctcatgtacttcgagaagcctagtatcgctctggaatcttcgacgcgttgcgctcagcactcaaccccggagtgtagcttgggccgatgagtctggacagtccccactggcgacagtggtccaggctgcgttggcggcccacctgtggcccaaagccacgggacgctagttgtgaacagggtgtgaagagcctattgagctacatgagagtcctccggcccctgaatgcggctaatcctaaccatggagcaggcagctgcaacccagcagccagcctgtcgtaacgcgcaagtccgtggcggaaccgactactttgggtgtccgtgtttccttttattcttgaatggctgcttatggtgacaatcatagattgttatcataaagcgagttggattggccatccagtgtgaatcagattaattactcccttgttagttggatccactcccgaaacgttttactccttaacttgttgaaattgtttgaagacaggatttcagtgtcaca

SEQ ID NO: 19744 - DNA, 711 bp, synthetic construct
  source 1..711: mol_type = other DNA
ttaaaacagctctggggttgttcccaccccagaggcccacgtggcggctagtacactggtatcacggtacctttgtacgcctgttttatatcccctcccccatgcaactttagaagtaattcaaatagttcaatagagggggtacaaaccagtaccaccacgaacaagcacttctgtttccccggtgaggctatatagactgttcccacggtcgaaggtggctgatccgttatccgcttgagtacttcgagaagcctagtaccacctttggatcttcgatgcgttgcgctcagcactctaccccgagtgtagcttaggctgatgagtctgggcataccccaccggcgacggtggcccaggctgcgttggcggcctacccgtggctaacgccatgggacgctagttgtgaacaaggtgtgaagagcctattgagctacttaagagtcctccggcccctgaatgcggctaatcccaaccacggagcaagtgctcacaaaccagtgggtggcttgtcgtaacgcgcaagtctgtggcggaaccgactactttgggtgtccgtgtttccctttatttttatcatggctgcttatggtgacaatctaagattgttatcatatagcgtttggattggccatccggtgactttgaaagcgatatatttgactcattgtcttactgaatttacctatttattgcacttgtataacaata

SEQ ID NO: 19745 - DNA, 742 bp, synthetic construct
  source 1..742: mol_type = other DNA
ttaaaacagcctgtgggttgtacccacccacagggcccactgggcgctagcactctggtattgcggtacctttgtgcgcctgttttacccaccctcccccaacgtaacttagaagcctgacatatacggtcacaagccagcccagtacgccaactgggtaccgaccaagcacttctgttaccccggactgagtatcaataagctgccaaagcggctgaaggagaaaacgttcgttacccggccaattacttcgagaaacccagtaacaccatgaaagttgcgtagcgtttcattcagcacaatcccagtgtagatcaggtcgatgagtcaccgcattccccacaggcgactgtggcggtggctgcgttggcggcctgcccatggggcaacccatgggacgcttcaatactgacatggtgcgaagagtctattgagctaattggtagtcctccggcccctgaatgcggctaatcctaactgcggagcaggcactcgcagaccagcgagcagcttgtcgtaatgggcaactccgcagcggaaccgactactttgggtgtccgtgtttcctatttcctttacactggctgcttatggtgacaattgagaaattgttaccatatagctattggagtggccatccggtgactaacagagcaataatatatttgtttgttggctttgtgccacttaatttgaaggttgttaagacgctcaatctgatactacttctaaataaagcaaa

SEQ ID NO: 19746 - DNA, 812 bp, synthetic construct
  source 1..812: mol_type = other DNA
ttaaaacagcctgtgggttgttcccacccacagggcccactgggcgctagtacactggtatgccttacctcggtattgcggtaccgttgtatacagtacctttgtacgcctgttttaaaatcccttccccaaatgtaaccttagaagctttagttgacaaagaccaataggagtccaacatccagttggattgcggtcaagcacttctgtctccccggacctagtagtgataggctgtacccacggccgaagatgaacccgtccgttatccggccagctacttcgagaagcctagtaacatcaaagatctgtcttggcgtttcgctcagcgcgtttccccccgcgtagatcgggctgatgggtctccgcacaccccacgggcgaccgtggcggaggccgcgtggcggcccgcctatggcgaaagccataggacgccatttcagtgacagggtgtgaagagcctattgagctagttggtagtcctccggcccctgaatgcggctaatcccaaccacggagcactcgccaacaagccagttggtagggtgtcgtaatgggtaactctgtggcggaaccgactactttgggtgtccgtgtttccttttgatcccattttggctgcttatggtgacaacaataagttgttatcataaagcttttgggttggccacctggaaaaagttatcagtgtttgatattgtacggctttcacgcctgccaataagacaagctttgtatttgctgatttcattttattcagtgagagacattacagacgcacacctaaaccttttgctcgcactgtcagcagg

SEQ ID NO: 19747 - DNA, 720 bp, synthetic construct
  source 1..720: mol_type = other DNA
ccacccacagggcccactgggcgccagcactctggtatcacggtacctttgtgcgcctgttttatgtccccctcccccacttgaaacttagaagcgaaacacactgatcagcagttggcgtggcaaaccagtcatgtcttgatcaaacacttctgtttccccggaccgagtatcaatagactgcccacgcggttgaaggagaaagcgttcgttatccgaccagctacttcgagaaacctagtaacaccatgaaagttgcggagtgtttcgctcagcacatccccagtgtagatcaggtcgatgagtcaccgcgttccccacgggcgaccgtggcggtggctgcgttggcggcctgcctgtggggcaacccacaggacgctctaatacagacatggtgcgaagagtctattgagctagttggtattcctccggcccctgaatgcggctaatcctaactgcggagcacgtgcctccaatccagggggtggcgtgtcgtaacgggtaactctgcagcggaaccgactactttgggtgtccgtgtttccttttattcttatattgactgcttatggtgacaattgaaagattgttaccatatagctattggattggtcatccggtgtcgcacagagcaattatatatctctttgttggatacattccgttgaattataaggaattaagaaccctcaattatatcttggctttaaattccgcaaa

SEQ ID NO: 19748 - DNA, 737 bp, synthetic construct
  source 1..737: mol_type = other DNA
cagcctgtgggttgttcccacccacagggcccaccgggcgctagcacactggtatctcggtacccttgtgcgcctgttttatccacccttttcccatttaacttagaagcacgcgccaagacggtcaaaagggagcccagtaagccaattgggctatgaccaagcactcctgtaaccccgggccgagtatcaataagctgctcgcgcggctgaaggagaaaaagctcgttacccggccaattacttcgagaaacccagtagcatcatgaaagttgcgcagcgtttcgctccacacaaccccagtgtagatcaggtcgatgagtcaccgcgttccccacgggtgaccgtggcggtggctgcgctggcggcctgcccatggggccacccatgggacgcttcaatactgacatggtgtgaagagtctattgagctaattggtagtcctccggcccctgaatgcggctaatcctaactgcggagcagatgcccacacaccagtgggaagtctgtcgtaacgggtaactctgcagcggaaccgactactttgggtgtccgtgtttccttttatttctactctggctgcttatggtgacaattgaaaggttgttaccatatagctattggattggccatccggtgtcacatagagcgattatttacttgtttgttgggtttataccactgaactataaagttttaaatactcttaactacattttaatccttaactcattaaa

SEQ ID NO: 19749 - DNA, 740 bp, synthetic construct
  source 1..740: mol_type = other DNA
ttaaaacagcctgtgggttgatcccacccacaggcccattgggcgctagcactctggtatcacggtacctttgtgcgcctgttttataccccctcccccaactgtaacttagaagtaacacacaccgatcaacagtcagcgtggcacaccagccacgttttgatcaagcacttctgttaccccggactgagtatcaatagactgctcacgcggttgaaggagaaagcgttcgttatccggccaactacttcgaaaaacctagtaacaccgtgaagttgcagagtgtttcgctcagcactaccccagtgtagatcaggtcgatgagtcaccgcattccccacgggcgaccgtggcggtggctgcgttggcggcctgcccatggggaaacccatgggacgctctaatacagacatggtgcgaagagtctattgagctagttggtagtcctccggcccctgaatgcggctaatcctaactgcggagcacacaccctcaagccagagggcagtgtgtcgtaacgggcaactctgcagcggaaccgactactttgggtgtccgtgtttcattttattcctatactggctgcttatggtgacaattgagagattgttaccatatagctattggattggccatccggtgaccaatagagctattatatatctctttgttgggtttataccacttagcttgaaagaggttaaaacattacaattcattgttaagttgaatacagcaaa

SEQ ID NO: 19750 - DNA, 811 bp, synthetic construct
  source 1..811: mol_type = other DNA
ttaaaacagcctgtgggttgttcccacccacagggcctactgggcgccagtacactggtatgccttacctcggtattacggtaccgttgtatatagtacctttgtacgcctgttttaaatcccctcccccaaatgtaaccttagaagtttaagtaaactcagaccaataggagtccaacacccagttggattgcggtcaagcacttctgtctccccggacctagtagtgataggctgtgcccacggccgaagatgaacccgtccgttatccggccagctacttcgagaagcctagtagcatcaaagatctgtcttggcgtttcgctcagcgcgttccccccgcgtagatcgggctgatgggtctccgcattccccacgggcgaccgtggcggaggccgcgtggcggcccgcctatggcgaaagccataggacgccatttcagtgacagggtgtgaagagcctattgagctagttggtagtcctccggcccctgaatgcggctaatcctaaccacggagcgtccgccaacaatccagttggcagggcgtcgtaacgggtaactctgtggcggaaccgactactttgggtgtccgtgtttccttttgatcctattttggctgcttatggtgacaacgataagttgttatcataaagcttttgggttggccgcctggaaaaagatatcagtgtttgatattgttcggctttcacgcctaccaacaaaacaagctctatatttgttgatttcattttatccattggaggatattaccgaatttcatctacaacttttgctcaccttatcagcaaa

SEQ ID NO: 19751 - DNA, 728 bp, synthetic construct
  source 1..728: mol_type = other DNA
tgttcccacccacagggcccactgggcgctagcacactggtatcacggtacctttgtgcgcctgttttatgcttcctcccccactatagtaatttagaagcttgaactacacggccaacagacaacccggtacaccaaccgggccccggccaagcacttctgtatccccggactgagtatcagtaggctgctcgcgcggctgaaggagaaaacgttcgttacccggccacttacttcgagaaacctagtaacgccatgaaagttgcgcagcgtttcgctccgcacaaacccagtgtagatcaggtcgatgagtcaccgcattccccacgggcgaccgtggcggtggctgcgttggcggcctgcccatggggtaacccatgggacgcttcaatactgacatggtgcgaagagtctattgagctaagtggtagtcctccggcccctgaatgcggctaatcctaactgcggagcagatacccacactccagtgggcagtctgtcgtaacgggcaactctgcagcggaaccgactactttgggtgtccgtgtttccttttgtcttttacactggctgcttatggtgacaattgaaaaattgttaccatatagctattggattggccatccgatatcaaacagagcaattatttacttgtttgttggttatatacctctcgataccaaggttctaaaaacactcaactacatcttgttattgaatacgttgaa

SEQ ID NO: 19752 - DNA, 721 bp, synthetic construct
  source 1..721: mol_type = other DNA
ttcccacccacagggcccactgggcgcctgcacactggtatcccggtacctttgtgtgcctgttttattcaccctaccccattgtaacctagaagctaatcaaatatggtcattaggtagcccagtgcgccaactgggtcttgaccaagcacttctgttaccccggactgagtatcaataggctgcttacgcggccgaaggagaaaacgttcgttacccggccaattacttcgagaaacccagtaccaccatgaaggttgcgcagcgtttcgctccgcacaaccccagtgtagatcaggtcgatgggtcaccgcatccctcacgggcgaccgtggcggtggccgcgttggcggcctgcccatggggtgtcccatgggacgcttcaatactgacatggtgcgaagagtctattgagctaattggtagtcctccggcccctgaatgcggctaatcctaactgcggagcagatacccacataccagtgggcagtctgtcgtaatgggcaactctgcagcggaaccgactactttgggcgtccgtgtttctttttattcctatttggctgcttatggtgacaattgaagaattgttaccatatagctattggattggccatccggtgactaatagagccattgtgtacctctttgttggttttgtaccactgaatcacatagttctaaatactctaaatttgattttagtgttcaacacatcaaa

SEQ ID NO: 19753 - DNA, 744 bp, synthetic construct
  source 1..744: mol_type = other DNA
tttaaaacagctctggggttgttcccacctacagggcccattgggcgctagcactctggtatcacggtacccttgtgcgcctgttttacagcccctcccccgaacatgaacttagaagcaccacacaccgatcaacagcgggcgtagcataccagctacgtcttgatcaagcacttctgtttccccggactgagtatcaatagactactaacgtggtcgaaggagaaaacgttcgttacccggccagctacttcgaaaagcctagtatcaccatggaaattgcggagtgtttcgctcagcgcacccccagcgtagatcaggccgatgagtcaccgcgtccctcacgggcgaccgtggcggtggctgcgttggcggcctgcctacggggcaacccgtaggacgcttcaatatggacatggtgcgaagagcccattgagctagttggtagtcctccggcccctgaatgcggctaatcctaactgcggagcgctcgcctccaaaccagggggttgtgcgtcgtaatgggtaactctgcagcggaaccgactactttgggtgtccgtgtttccttttatttttatcatggctgcttatggtgacaattgaaaggttgttaccatatagctattggattggccatccagtgtctaacagagcaattatatacctctttgttggatttgtaccgctaaacaagacaaattatcaaactttgtgccttattgttaaattaaacacaacaag

SEQ ID NO: 19754 - DNA, 744 bp, synthetic construct
  source 1..744: mol_type = other DNA
tttaaaacagctctggggttgttcccacccacagggcccattgggcgctagcactctggtatcacggtacctttgtgcgcctgttttacagcccctcccccaaacaagaacttagaagcaccacacaccgatcaatagcgggcgtagcataccagctacgtcttgatcaagcacttctgtttccccggaccgagtatcaatagactactaacgtggtcgaaggagaaaacgttcgttacccggccagctacttcgaaaagcctagtaacaccatggaaattgcggagtgtttcgctcagcgcacccccagcgtagatcaggccgatgagtcaccgcgtccctcacgggcgaccgtggcggtggctgcgttggcggcctgcctacggggcaacccgtaggacgcttcaatatggacatggtgcgaagagcccattgagctagttggtagtcctccggcccctgaatgcggctaatcctaactgcggagcgctcgcctccaaaccagggggttgtgcgtcgtaatgggtaactctgcagcggaaccgactactttgggtgtccgtgtttccttttatttttatcatggctgcttatggtgacaattgaaagattgttaccatatagctattggattggccatccagtgtctaacagagcaattatatacctctttgttggatttgtgccgctaaacaagacaaattaccaaactttgtgccttattgttaaattaaacacaacgag

SEQ ID NO: 19755 - DNA, 737 bp, synthetic construct
  source 1..737: mol_type = other DNA
acagcctgtgggttgtacccacccacagggcccattgggcgccagcacactggtattacggtacccttgtgcgcctgttttatctacccctccccaacgtaacgtagaagcacaaatcaagtggtcaatagatggctcagtatgccaactgagtttggaccaagcacttctgttaccccggactgagtatcaataagctgctcacgcggctgaaggagaaaacgttcgttacccggccaactacttcgagaagcctagtaccaccatgaaggatgcgcagtgtttcgttcagcacaatcccagtgtagatcaggtcgatgagtcaccgcaatccccacgggcgaccgtggcggtggctgcgctggcggcctgcccatggggttacccatgggacgcttcaattccgacatggtgcgaagagtctattgagctagttggtagtcctccggcccctgaatgcggctaatcccaactgcggagcaagcacccacaaaccagtgggctgtttgtcgtaatgggtaactctgcagcggaaccgactactttgggtgtccgtgtttccttttattcctacactggctgcatatggtgacaattgaaagattgttgccatatagctattgtattggccatccggtgacaaacagagctattatctacttatttgtcggctttgtaccgttgaatttcaaagttgtaaaaaccctaatctttatcttaacactcaacacagcaaa

SEQ ID NO: 19756 - DNA, 743 bp, synthetic construct
  source 1..743: mol_type = other DNA
ttaaaacagcctgtgggttgtacccacccacagggcccaatgggcgctagcacactggtattccggtacctttgtgcgcctgttttataacccccccccagttcgcaacttagaagcaaagaaacaatggtcaattactgacgcagcaacccagctgtgttttggccaagtacttctgtgtccccggactgagtatcaataagctgcttgcgcggctgaaggagaaaccgttcgttacccggccaactacttcgagaagcctagtaacgccatgaacgttgaggagtgtttcgctcagcacttcccccgtgtagttcaggtcgatgagtcaccgcgttccccacgggtgaccgtggcggtggctgcgttggcggcctgcctgtggggcaacccgcaggacgctctgatacagacatggtgtgaagagcctattgagctagttggtagtcctccggcccctgaatgcggctaatcctaactgcggagcacacgttcgcaagccagcgagtggtgtgtcgtaacgggcaactctgcagcggaaccgagtactttgggtgtccgtgtttccttttattcttaccttggctgcttatggtgacaattgaaagattgttaccatatagctattggattggccatccagtgtcaaatagagcaatcatatatctgtttgttggtttcgttcccttggactacagaaatcttaaaactctttatttcatattgagactcaatacgataaa

SEQ ID NO: 19757 - DNA, 743 bp, synthetic construct
  source 1..743: mol_type = other DNA
ttaaaacagcctgtgggttgtacccacccacagggcccaatgggcgctagcacactggtattccggtacctttgtgcgcctgttttataacccccccccagttcgcaacttagaagcaaagaaacaatggtcaatagctgacgcagcaacccagctgtgttttggccaagcacttctgtgtccccggactgagtatcaataagctgcttgcgcggctgaaggagaaaccgttcgttacccggccaactacttcgagaagcctagtaacgccatgaacgttgaggagtgtttcgctcagcacttcccccgtgtagttcaggtcgatgagtcaccgcgttccccacgggtgaccgtggcggtggctgcgttggcggcctgcctgtggggcaacccgcaggacgctctgatacagacatggtgtgaagagcctattgagctagttggtagtcctccggcccctgaatgcggctaatcctaactgcggagcacacgttcgcaagccagcgagtggtgtgtcgtaacgggcaactctgcagcggaaccgactactttgggtgtccgtgtttccttttattcttaccttggctgcttatggtgacaattgaaagattgttaccatatagctattggattggccatccagtgtcaaatagagcaatcatatatctgtttgttggtttcgttcccttggactacagaaatcttaaaactctttatttcatattgagactcaatacgataaa

SEQ ID NO: 19758 - DNA, 731 bp, synthetic construct
  source 1..731: mol_type = other DNA
gtgggttgttcccacccacagggcccactgggcgccagtacactggtatcacggtacctttgtgcgcctgtttgactcaccttccccaaacgcaacttagaagcataacttaaatggtcattaggcggctcagtatgccaactgagtctcgatcaagcacttctgttaccccggactgagtaccaataggctgctcacgcggctgaaagggaaaccgttcgttacccgaccaactacttcgagaaacctagtaccaccatgaaagttgcgcggcgtttcgctccgcacaaccccagtgtagatcaggccgatgagtcaccgcaaaccccacgggcgaccgtggcggtggctgcgctggcggcctgcccatgggacaacccatgggacgccacaatactgacatgatgcgaagagtctattgagctagttggtagtcctccggcccctgaatgcggctaatcccaactgtggagcagatacccacgcaccagtgggcagtctgtcgtaatgggcaactctacagcggaaccgactactttgggtgtccgtgtttctttttattcctacgctggctacttatggtgacaattgagagactgtaactatattgctatcgggttggccacctggtgaagaataaaacagttgctcacttgtttgtcagtcttgcaccgtcgtgccacaaagtcttaactgcccctcaacatcgtcataacactaaacacgctgaa

SEQ ID NO: 19759 - DNA, 744 bp, synthetic construct
  source 1..744: mol_type = other DNA
ttaaaacaaggcctgtgggttgttcccacccacagggcctactgggcgttagcacactggtatcacggtacccttgtgcgcctgttttattcaccctaccccattgcaacttagaagttaaccaagtacggtcattaggcagctcagcatgccagctgagttttgaccaagcacttctgttaccccggactgagtatcaataggctgcttgcgcggccgaaggagaaaacgttcgttacccgaccaattacttcgagaaacctagtatcaccatgaaagttgcgcagtgtttcgctccgcacaaccccagtgtagatcaggccgatgagtcaccgcattccccacgggcgaccgtggcggtggctgcgctggcggcctgcccatgggctaacccatgggacgcttcaaaactgacatggtgtgaagagtctattgagctaattggtagtcctccggcccctgaatgcggctaatcctaactgcggagcagatactcacacgccagtgggcggtctgtcgtaacgggcaactctgcagcggaaccgactactttgggtgtccgtgtttcctattattcctatactggctgcttatggtgacaattgagggattgttaccatatagctattggattggccatccggtgacaaacagagcgattgtttacctatttgttggtttcgtaccattgaattttaaagttttaaaaaccctcaaccttgttttagcacttaacgcagcaaa

SEQ ID NO: 19760 - DNA, 744 bp, synthetic construct
  source 1..744: mol_type = other DNA
ttaaaacagcctgtgggttgttcccacccgcagggcccacggggcgctagcacactggtattaaggtacccttgtgcgcctgttttatacacccctccccctaatgtaacttagaagcatgacttaagtggtcaatagatagctcagtaatccaactgagttccgaccaagtacttctgttaccccggaccgagtatcaataagctgttcacgcggctgaaggagaaagcgttcgttatccggccaattacttcgagaaacccagtatcaccatgaaagttgcgcagtgtttcgctccgcacaaccccagtgtagatcaggtcgatgagtcaccacagtcctcacgggcgaccgtggtggtggctgcgttggcggcctgcccatggggcaacccatgggacgcttcaatactgacatggtgtgaagagtctattgagctggatggtatccctccggcccctgaatgcggctaatcctagctgcggagcagacgctcgcatgccaacgggtagtctgtcgtaccgggtaactctgcagcggaaccgactactttgggtgtccgtgtttccttttatccttatatcggctgcttatggtgtcaattgaaagattgttaccatatagctaatggattggccatccgataacaaatagagtgattatctagttttttgttggatttgttccattgaactacaaggtattgaacacccttaatttcattttaacactcaacacaacaaa

SEQ ID NO: 19761 - DNA, 738 bp, synthetic construct
  source 1..738: mol_type = other DNA
ctctggggttgttcccaccccagaggcccacgtggcggccagtactccggtattacggtacccttgtacgcctgttttatactcccttcccctgtaacttagaagcatacaaaccaagttcaatagaagggggtacaaaccagtaccaccacgaacaagcactcctgtttccccggtgacattgcatagactgtacccacggttgaaagcgatcgatccgttacccgctcctgtacttcgagaagcctagtatcatcttggaatcttcgatgcgttgcgctcagcactcaaccccagagtgtagcttaggctgatgagtctggacgtcccccaccggcgacggtggtccaggctgcgttggcggcctacctgtggcccaaaaccacaggacgctagttgtgaacaaggtgtgaagagcctattgagctacaagagagtcctccggcccctgaatgcggctaatcctaaccacggagcaggcagttgcaaaccagcaaccggcctgtcgtaacgcgcaagtctgtggcggaaccgactactttgggtgtccgtgtttccttttatttttacaatggctgcttatggtgacaatcatagattgttatcataaagcgacttggattggccatccggtgaaagtgaaacacattgtttacttgtttgttggattcactccaatcaactcttttacttacaaactcatcacaacaactctattaattagagataagcatcaca

SEQ ID NO: 19762 - DNA, 690 bp, synthetic construct
  source 1..690: mol_type = other DNA
ggtattacggtacccttgtgcgcctgttttatactcccctcccgcaacttagaagcacgaaaccaagttcaatagaagggggtacaaaccagtaccactacgaacaagcacttctgtttccccggtgacattgcatagactgctcacgcggttgaaagtgatcgatccgttacccgcttgtgtacttcgaaaagcctagtatcgccttggaatcttcgacgcgttgcgctcagcacccgaccccggggtgtagcttaggctgatgagtctggacattcctcaccggtgacggtggtccaggctgcgttggcggcctacctatggctaacgccataggacgttagatgtgaacaaggtgtgaagagcctattgagctacataagagtcctccggcccctgaatgcggctaatcctaaccacggaacaggcggtcgcgaaccagtgactggcttgtcgtaacgcgcaagtctgtggcggaaccgactactttgggtgtccgtgtttcctgttatttttatcatggctgcttatggtgacaatcagagattgttatcataaagcgaattggattggccatccggtgagtgttgtgtcaggtatacaactgtttgttggaaccactgtgttagctttacttctcatttaaccaattaatcaaaaacaatacgaggataaaacaacaatactaca

SEQ ID NO: 19763 - DNA, 744 bp, synthetic construct
  source 1..744: mol_type = other DNA
ttaaaacagcctgtgggttgttcccacccacggggcccattgggcgctagcacactggtatcacggtacccttgtgcgcctgttttatccaccccctccccaatgcaacgtagaagcacaaactaagtggtcaatagacggctcagtgcaccaactgggtttagaccaagcacttctgttaccccggactgagtatcaataggctgctcacgcggctgaaggagaaaacgttcgttacccggccaactacttcgagaagcccagtaccaccatgaaggttgcgcagtgtttcgttcagcacaaccccagtgtagatcaggtcgatgagtcaccgcaatccccacgggcgaccgtggcggtggctgcgctggcggcctgcccatggggtgacccatgggacgcttcaattccgacatggtgcgaagagcctattgagctagttggtagtcctccggcccctgaatgcggctaatcccaactgcggagcaagcacccacaaaccagtgggctgtttgtcgtaacgggcaactctgcagcggaaccgactactttgggtgtccgtgtttccttttattcctacactggctgcttatggtgacaattgaaagattgttgccatatagctattggattggccatccggtaacaaacagagctattaatttacttatttgttggctttgtgccgttgaatttcaaagttataaaaaccataaccttcatcttgacactcaacacagcaaa

SEQ ID NO: 19764 - DNA, 715 bp, synthetic construct
  source 1..715: mol_type = other DNA
ccacagggcccactgggcgctagcactctggtatcacggtacctttgtgcgcctgtttttccacccctccccatacgcaacttagaagagagactcaaccggtcaatagacagcctagtacaccaactaggttctgaccaagaacttctgtttccccggaccgagtatcaataggctgcttacgcggctgaaggagaaaacgttcgttacccggccaattacttcgagaaacctagtatcaccatggaagttgcgcagtgtttcgctccgcacaaccccagtgtagatcaggtcgatgagtcaccgcattccccacaggcgactgtggcggtggctgcgttggcggcctgcccgtggggcaacccacgggacgcttcaataccgacatggtgcgaagagtctattgagctaattggtagtcctccggcccctgaatgcggctaatcctaactgtggagcagatacccacgcgccagtgggcagtctgtcgtaatgggcaactccgcagcggaaccgactactttgggtgtccgtgtttccttttatcctcataatggctgcttatggtgacaattgaaagattgttaccatatagctattggattggccatccggtgactaacagagcaattatttatttgtttgttgggtttgtaccattgaactacaaggtccttaatactctaaactacattataagtctcaatacagtgca

SEQ ID NO: 19765 - DNA, 742 bp, synthetic construct
  source 1..742: mol_type = other DNA
ttaaaacagcctgtgggttgatcccacccacagggcccattgggcgctagcactctggtatcacggtacccttgtgcgcctgttttatgtcccttccctcaactgtaacttagaagtaacgcacaccgatcaacagtcagcgtggcacaccagccatgttttgatcaagcacttctgttaccccggaccgagtatcaacagactgctcacgcggttgaaggagaaagtgttcgttatccggccaactacttcgaaaaacctagtaacaccatggaagttgcagagtgtttcgctcagcactaccccagtgtagatcaggtcgatgagtcaccgcatcccccacgggcgaccgtggcggtggctgcgttggcggcctgcctatgggggaacccataggacgctctaatacagacatggtgcgaagagtccattgagctagttggtagtcctccggcccctgaatgcggctaatcctaactgcggagcacacaccttcaagccagagggcagtgtgtcgtaacgggcaactctgcagcggaaccgactactttgggtgtccgtgtttcattttattcttatactggctgcttatggtgacaattgagagattgttaccatatagctattggattggccatccagtgactagcagagctattatatacctctttgttgggtttataccacctaatttgaaagaagttaaaacattagaattcattattaaattgaatacatttaa

SEQ ID NO: 19766 - DNA, 742 bp, synthetic construct
  source 1..742: mol_type = other DNA
ttaaaacagcctgtgggttgcacccacccacagggcccattgggcgctagcaccctggtattacggtacctttgtgcgcctgttttatacccccatccccaatcgaaacttagaagcattacacactgatcaataggaggcgcggcacgccagccatgccaagatcaagcacttctgtctccccggaccgagtatcaatagactgcttgcgcggttgaaggagaaaacgttcgttacccggccaactacttcgagaaacctagtaccaccatgaaagttgcggagtgtttcgctcagcactaccccagtgtagatcaggccgatgagtcaccgcgttccccacgggtgaccgtggcggtggctgcgctggcggcctgcctatggggcaacccataggacgctctaatacagacatggtgtgaagagtctattgagctagttggtgatcctccggcccctgaatgcggctaatcctaactgcggagcacacgctcacaagccagtgagtggtgtgtcgtaatgggtaactccgcagcggaaccgactactttgggtgtccgtgtttccttttaacttcattttggctgcttatggtgacaattaagaaattgttaccatatagctattggattggccatccggtgactagtagagctattatatacttgtttgttggctttgtaccactaaactataaagtccttagaactcttgattttatactaattttgaataaggcaaa

SEQ ID NO: 19767 - DNA, 741 bp, synthetic construct
  source 1..741: mol_type = other DNA
ttaaaacaccctgtgggttgttcccacccacagggcccactgggcgctagcacactggtatcacggtacctttgtgcgcctgttttatttcccttccccagacgtaacttagaagcagcactccgcgaccaatagcaggcgtggcacaccagccatgtcttggtcaagtacttctgtaatcccggactgagtatcaataaactgctcacgcggtcgaaggagaaaacgtccgttacccggctaactacttcgagaaacctagtagcgccatgaaagttgcgaggtgtttcgctcagcacatccccagtgtagatcaggtcgatgagtcaccgtattccccacaggtaactgtggcggtggctgcgttggcggcctgcccatggggcgacccatgggacgcttcaatacggacatggtgcgaagagtctattgagctagttagtattcctccggcccctgaatgcggctaatcctaactgtggagcatgcgcccccactccagagggtagcgtgtcgtaacgggaaactccgcagcggaaccgactactttgggtgtccgtgtttccttttattcttatattggctgcttatggtgacaattgaaaggttgttaccatatagctattggattggccacccagtgacaaatagagcaataatttaccaatttgtgggatttgttccaataagtttgaaagtcttaaagacacttaatttaatactactactcaatattgcaaa

SEQ ID NO: 19768 - DNA, 742 bp, synthetic construct
  source 1..742: mol_type = other DNA
tttaaaacagcctgtgggttgttcccacccacagggcccactgggcgtaagcacactggtatcacggtacctttgtgcgctgttttatccacccctccccaatgtaacttagaagcactaaatgaatggtcaacagggggcccagcacaccagttgagtcctgaccaagcacttctgtcaccccggactgagtatcaataagctactcacgtggctgaaggagaaaacgttcgttacccggccaattacttcgagaaacttagtaccaccatgaaggttgcgcagcgtttcgctccacacaaccccagtgtagatcaggccgatgagtcaccgcattccccacgggcgaccgtggcggtggctgcgctggcggcctgcccgaggggcaaccctcgggacgcttcaataccgacatggtgcgaagagtctattgagctaattggtagtcctccggcccctgaatgcggctaatcctaactgcggagcagatacccacacgccagtgggcagtctgtcgtaatgggtaactctgcagcggaaccgactactttgggtgtccgtgtttccttttattcttacactggctgcttatggtgacaattgagagattgttaccatatagctattggattggccatccggttagtaacagagcgattgtttacttgtttgttggttttatacccttgaacctcagagtacttgaaacacttgattttataataaaattgaacacaacaaa

SEQ ID NO: 19769 - DNA, 822 bp, synthetic construct; identical to SEQ ID NO: 1281
  source 1..822: mol_type = other DNA

SEQ ID NO: 19770 - DNA, 694 bp, synthetic construct
  source 1..694: mol_type = other DNA
tagtactccggtattgcggtacccttgtacgcctgttttatactcccttcccgtaacttagacgcacaaaaccaagttcaatagaagggggtacaaaccagtaccaccacgaacaagcacttctgtttccccggtgatgttgtatagactgcttgcgtggttgaaagcgacggatccgttatccgcttatgtacttcgagaagcccagtaccacctcggaatcttcgatgcgttgcgctcagcactcaaccccagagtgtagcttaggctgatgagtctggacatccctcaccggtgacggtggtccaggctgcgttggcggcctacctatggctaacgccatgggacgctagttgtgaacaaggtgtgaagagcctattgagctacataagaatcctccggcccctgaatgcggctaatcccaaccacggggcaggtggtcacaaaccagtgattggcctgtcgtaacgcgcaagtccgtggcggaaccgactactttgggtgtccgtgtttccttttattttattgtggctgcttatggtgacaatcacagattgttatcataaagcgaattggattggccatccggtgaaagtgagattcattatctatctgtttgctggattcgctccattgagtgtgtttactctaagtacaatttcaacagttatttcaattagacaattgtatcata

SEQ ID NO: 19771 - DNA, 694 bp, synthetic construct
  source 1..694: mol_type = other DNA
tagtactccggtattgcggtacccttgtacgcctgttttatactcccttcccgtaacttagacgcacaaaaccaagttcaatagaagggggtacaaaccagtaccaccacgaacaagcacttctgtttccccggtgatgttgtatagactgcttgcgtggttgaaagcgacggatccgttatccgcttatgtacttcgagaagcccagtaccacctcggaatcttcgatgcgttgcgctcagcactcaaccccagagtgtagcttaggctgatgagtctggacatccctcaccggtgacggtggtccaggctgcgttggcggcctacctatggctaacgccatgggacgctagttgtgaacaaggtgtgaagagcctattgagctacataagaatcctccggcccctgaatgcggctaatcccaacctcggagcaggtggtcacaaaccagtgattggcctgtcgtaacgcgcaagtccgtggcggaaccgactactttgggtgtccgtgtttccttttattttattgtggctgcttatggtgacaatcacagattgttatcataaagcgaattggattggccatccggtgaaagtgagattcattatctatctgtttgctggattcgctccattgagtgtgtttactctaagtacaatttcaacagttatttcaatcagacaattgtatcata

SEQ ID NO: 19772 - DNA, 694 bp, synthetic construct
  source 1..694: mol_type = other DNA
tagtactccggtattgcggtacccttgtacgcctgttttatactcccttcccgtaacttagacgcacaaaaccaagttcaatagaagggggtacaaaccagtaccaccacgaacaagcacttctgtttccccggtgatgttgtatagactgcttgcgtggttgaaagcgacggatccgttatccgcttatgtacttcgagaagcccagtaccacctcggaatcttcgatgcgttgcgctcagcactcaaccccagagtgtagcttaggctgatgagtctggacatccctcaccggtgacggtggtccaggctgcgttggcggcctacccatggctaacgccatgggacgctagttgtgaacaaggtgtgaagagcctattgagctacataagaatcctccggcccctgaatgcggctaatcccaaccacggagcaggtggtcacaaaccagtgattggcctgtcgtaacgcgcaagtccgtggcggaaccgactactttgggtgtccgtgtttccttttattttattgtggctgcttatggtgacaatcacagattgttatcataaagcgaattggattggccatccggtgaaagtgagattcattatctatctgtttgctggattcgctccattgagtgtgtttactctaagtacaatttcaacagttatttcaattagacaattgtatcata

SEQ ID NO: 19773 - DNA, 694 bp, synthetic construct
  source 1..694: mol_type = other DNA
tagtactccggtattgcggtacccttgtacgcctgttttatactcccttcccgtaacttagacgcacaaaaccaagttcaatagaagggggtacaaaccagtaccaccacgaacaagcacttctgtttccccggtgatgttgtatagactgcttgcgtggttgaaagcgacggatccgttatccgcttatgtacttcgagaagcccagtaccacctcggaatcttcgatgcgttgcgctcagcactcaaccccagagtgtagcttaggccgatgagtctggatatccctcaccggtgacggtggtccaggctgcgttggcggcctacctatggctaacgccatgggacgctagttgtgaacaaggtgtgaagagcctattgagctacataagaatcctccggcccctgaatgcggctaatcccaacctcggagcaggtggtcacaaaccagtgattggcctgtcgtaacgcgcaagtccgtggcggaaccgactactttgggtgtccgtgtttccttttattttattgtggctgcttatggtgacaatcacagattgttatcataaagcgaattggattggccatccggtgaaagtgagattcattatctatctgtttgctggattcgctccattgagtgtgtttactctaagtacaatttcaacagttatttcaatcagacaattgtatcata

SEQ ID NO: 19774 - DNA, 694 bp, synthetic construct
  source 1..694: mol_type = other DNA
tagtactccggtattgcggtacccttgtacgcctgttttatactcccttcccgtaacttagacgcacaaaaccaagttcaatagaagggggtacaaaccagtaccaccacgaacaagcacttctgtttccccggtgatgttgtatagactgcttgcgtggttgaaagcgacggatccgttatccgcttatgtacttcgagaagcccagtaccacctcggaatcttcgatgcgttgcgctcagcactcaaccccagagtgtagcttaggctgatgagtctggacatccctcaccggtgacggtggtccaggctgcgttggcggcctacctatggctaacgccatgggacgctagttgtgaacaaggtgtgaagagcctattgagctacataagagtcctccggcccctgaatgcggctaatcccaacctcggagcaggtggtcacaaaccagtgattggcctgtcgtaacgcgcaagtccgtggcggaaccgactactttgggtgtccgtgtttccttttattttattgtggctgcttatggtgacaatcacagattgttatcataaagcgaattggattggccatccggtgaaagtgagattcattatctatctgtttgctggattcgctccattgagtgtgtttactctaagtacaatttcaacagttatttcaatcagataattgtatcata

SEQ ID NO: 19775 - DNA, 694 bp, synthetic construct
  source 1..694: mol_type = other DNA
tagtactccggtattgcggtacccttgtacgcctgttttatactcccttcccgtaacttagacgcacaaaaccaagttcaatagaagggggtacaaaccagtaccaccacgaacaagcacttctgtttccccggtgatgttgtatagactgcttgcgtggttgaaagcgacggatccgttatccgcttatgtacttcgagaagcccagtaccacctcggaatcttcgatgcgttgcgctcagcactcaaccccagagtgtagcttaggctgatgagtctggacatccctcaccggtgacggtggtccaggctgcgttggcggcctacccatggctaacgccatgggacgctagttgtgaacaaggtgtgaagagcctattgagctacataagaatcctccggcccctgaatgcggctaatcccaaccacggagcaggtggtcacaagccagtgattggcctgtcgtaacgcgcaagtccgtggcggaaccgactactttgggtgtccgtgtttccttttattttattgtggctgcttatggtgacaatcacagattgttatcataaagcgaattggattggccatccggtgaaagtgagattcattatctatctgtttgctggattcgctccattgagtgtgtttactctaagtacaatttcaacagttatttcaattagataattgtatcata

SEQ ID NO: 19776 - DNA, 694 bp, synthetic construct
  source 1..694: mol_type = other DNA
tagtactccggtattgcggtacccttgtacgcctgttttatactcccttcccgtaacttagacgcacaaaaccaagttcaatagaagggggtacaaaccagtaccaccacgaacaagcacttctgtttccccggtgatgttgtatagactgcttgcgtggttgaaagcgacggatccgttatccgcttatgtacttcgagaagcccagtaccacctcggaatcttcgatgcgttgcgctcagcactcaaccccagagtgtagcttaggctgatgagtctggacatccctcaccggtaacggtggtccaggctgcgttggcggcctacccatggctaacgccatgggacgctagttgtgaacaaggtgtgaagagcctattgagctacataagaatcctccggcccctgaatgcggctaatcccaaccacggagcaggtggtcacaaaccagtgattggcctgtcgtaacgcgcaagtccgtggcggaaccgactactttgggtgtccgtgtttccttttattttattgtggctgcttatggtgacaatcacagattgttatcataaagcgaattggattggccatccggtgaaagtgagattcattatctatctgtttgctggattcgctccattgagtgtgtttactctaagtacaatttcaacagttatttcaattagacaattgtatcata

SEQ ID NO: 19777 - DNA, 694 bp, synthetic construct
  source 1..694: mol_type = other DNA
tagtactccggtattgcggtacccttgtacgcctgttttatactcccttcccgtaacttagacgcacaaaaccaagttcaatagaagggggtacaaaccagtaccaccacgaacaagcacttctgtttccccggtgatgttgtatagactgcttgcgtggttgaaagcgacggatccgttatccgcttatgtacttcgagaagcccagtaccacctcggaatcttcgatgcgttgcgctcagcactcaaccccagagtgtagcttaggctgatgagtctggacatccctcaccggtgacggtggtccaggctgcgttggcggcctacccatggctaacgccatgggacgctagttgtgaacaaggtgtgaagagcctattgagctacataagaatcctccggcccctgaatgcggctaatcccaaccacggagcaggtggtcacaaaccagtgaatggcctgtcgtaacgcgcaagtctgtggcggaaccgactactttgggtgtccgtgtttccttttattttattgtggctgcttatggtgacaatcacagattgttatcataaagcgaattggattggccatccggtgaaagtgagattcattatctatctgtttgctggattcgctccattgagtgtgtttactctaagtacaatttcaatagttacttcaattagacaattgtatcata

SEQ ID NO: 19778 - DNA, 694 bp, synthetic construct
  source 1..694: mol_type = other DNA
tagtactccggtattgcggtacccttgtacgcctgttttatactcccttcccgtaacttagacgcacaaaaccaagttcaatagaagggggtacaaaccagtaccaccacgaacaagcacttctgtttccccggtgatgttgtatagactgcttacgtggttgaaagcgacggatccgttatccgcttatgtacttcgagaagcccagtaccacctcggaatcttcgatgcgttgcgctcagcactcaaccccagagtgtagcttaggctgatgagtctggacatccctcaccggtgacggtggtccaggctgcgttggcggcctacccatggctaacgccatgggacgctagttgtgaacaaggtgtgaagagcctattgagctacataagaatcctccggcccctgaatgcggctaatcccaaccacggagcaggtggtcacaaaccagtgattggcctgtcgtaacgtgcaagtctgtggcggaaccgactactttgggtgtccgtgtttccttttattttattgtggctgcttatggtgacaatcacagattgttatcataaagcgaattggattggccatccggtgaaagtgagattcattatctatctgtttgctggattcgctccattgagtgtgtttactctaagtacaatttcaatagttatttcaattagacaattgtatcata

SEQ ID NO: 19779 - DNA, 694 bp, synthetic construct
  source 1..694: mol_type = other DNA
tagtactccggtattgcggtacccttgtacgcctgttttatactcccttcccgtaacttagacgcacaaaaccaagttcaatagaagggggtacaaaccagtaccaccacgaacaagcacttctgtttccccggtgatgttgtatagactgcttacgtggttgaaagcgacggatccgttatccgcttatgtacttcgagaagcccagtaccacctcggaatcttcgatgcgttgcgctcagcactcaaccccagagtgtagcttaggctgatgagtctggacatccctcaccggtgacggtggtccaggctgcgttggcggcctacccatggctaacgccatgggacgctagttgtgaacaaggtgtgaagagcctattgagctacataagaatcctccggcccctgaatgcggctaatcccaaccacggagcaggtggtcacaaaccagtgattggcctgtcgtaacgcgcaagtctgtggcggaaccgactactttgggtgtccgtgtttccttttattttattgtggctgcttatggtgacaatcacagattgttatcataaagcgaattggattggccatccggtgaaagtgagattcattatctatctgtttgctggactcgctccattgagtgtgtttactctaagtacaatttcaatagttatttcaattagacaattgtatcata

SEQ ID NO: 19780 - DNA, 811 bp, synthetic construct
  source 1..811: mol_type = other DNA
ttaaaacagcctgtgggttgttcccacccacagggcccactgggcgctagtacactggtatgccttacctcggtatcacggtaccgttgtatacagtacctttgtacgcctgttttaaatcccctccccccaatgtaactttagaagtttaagcaaacaaagaccaataggagtccaacaaccagttggattgcggtcaagcacttctgtctccccggacctagtagtgataggctgtacccacggccgaagatgaaaccgtccgttacccggccagctacttcgagaagcctagtaacatcaaagatctgtcttggcgtttcgctcagcgcgttccccccgcgtagatcgggctgatgggtctccgcataccccacgggcgaccgtggcggaggccgcgtggcggcccgcctatggcgaaagccataggacgccatttcagtgacagggtgtgaagagcctattgagctagttggtagtcctccggcccctgaatgcggctaatcctaaccacggagcgtccaccagcaaaccagctggcagggcgtcgtaacgggtaactctgtggcggaaccgactactttgggtgtccgtgtttccttttgatcctatattggctgcttatggtgacaacgataagttgttatcataaagcttttgggttggccacctggaaaaagttatcagtgtttgatattgttcggctttcacgcctaccaataaaacaatccttatattatttgatttccttttatccacaagaggaaatttctgagtttcatctccagttgctcttaaccttatcagcaag

SEQ ID NO: 19781 - DNA, 741 bp, synthetic construct
  source 1..741: mol_type = other DNA
ttaaaacagcctgcgggttgttcccacccgcagggcccactgggcgctagcacactggtatcacggtacctttgtgcgcctgttttatttcccttcccccagatgcaacttagaagcagcacctcacgaccaatagcaggcgtggcacaccagccatgtcttggtcaagcacttctgtaaccccggactgagtatcaataaactgctcacgcggtcgaaggagaaaacgtccgttatccggctaactacttcgagaaacctagtaacgccatgaaaattgcgaggtgtttcgctcagcacatccccagtgtagatcaggtcgatgagtcaccgcattccccacaggtgactgtggcggtggctgcgttggcggcctgcccatggggtgacccatgggacgcttcaatacggacatggtgtgaagagtctattgagctagttagtagtcctccggcccctgaatgcggctaatcctaactgtggagcatgcgcccccactccagagggtagcgtgtcgtaatgggtaactccgcagcggaaccgactactttgggtgtccgtgtttctttttactttatattggctgcttatggtgacaattgaaagattgttaccatatagctattggattggccacccggtaacaaacagagctataatttaccaatttgtgggatttgttccattgagtttaaaagtcttgaatacacttaatttaatattactactcaatagtgcaaa

SEQ ID NO: 19782 - DNA, 741 bp, synthetic construct
  source 1..741: mol_type = other DNA
ttaaaacagcctgtgggttgttcccacccacagggcccactgggcgctagcacactggtatcatggtacctttgtgcgcctgttttgtttcccttccccagatgcaacttagaagcagcactccacgaccaatagcaggcgtggcacaccagccatgtcttggtcaggcacttctgtaaccccggactgagtatcaataaactgctcacgcggtcgaaggagaaaacgtccgttacccggctaactacttcgagaaacctagtaacgccatgaaaattgcgaggtgtttcgctcagcacatccccagtgtagatcaggccgatgagtcaccgcattccccacaggtaactgtggcggtggctgcgttggcggcctgcccatggggtgacccatgggacgcttcaatacggacatggtgtgaagagtctattgagctagttggtagtcctccggcccctgaatgcggctaatcctaactgtggagcatgcgcccccactccagagggtagcgtgtcgtaacgggtaactccgcagcggaaccgactactttgggtgtccgtgtttccttttatccttatattggctgcttatggtgacaattgaaaggttgttaccatatagctattggattggccacccagtgacaaacagagcaataatttaccaatttgtgggatttgtcccaataagtttgaaagtcttgaagacacttaatttaatactactactcaatagcgcaaa

SEQ ID NO: 19783 - DNA, 730 bp, synthetic construct
  source 1..730: mol_type = other DNA
gtgggttgttcccacccacagggcccactgggcgcttgcacactggtatcacggtacctttgtgcgcctgttttatccacccccccctaatcgagtttagaagtcaagcacaactggtcgacaggtagcccagcacaccagctgggttctgaccaagcacttctgtttacccggactgagtatcaataggctgctcgcgcggctgaaggagaaaacgttcgttacccggccaattacttcgagaaacctagtaccgccatgaacgctgcgcggcgtttcgttccgcacaaccctagtgtagatcaggtcgatgagtcaccgcgttccccacgggtgaccgtggcggtggctgcgctggcggcctgcccatggggtaacccatgggacgcttcaatgctgacatggtgcgaagagtctattgagctaattggtagtcctccggcccctgaatgcggctaatcctaactgcggagcagacactcacatgccagtgggcagtctgtcgtaacgggcaactccgcagcggaaccgactactttgggtgtccgtgtttccttttattcttgcactggctgcttatggtgacaattgaaaggttgttaccatatagctattggattggccatccggtgagcaacagagcaattatatttctatttgttggatatataccatttgattttattaactacaatactctgctttatattctccaattgaatacgaaaag

SEQ ID NO: 19784 - DNA, 742 bp, synthetic construct
  source 1..742: mol_type = other DNA
ttaaaacagcctgtgggttgttcccacccgcagggcccactgggcgtttgtacactggtatcacggtacccttgtacgcctgttttatacaccctaccccattgcaacctagaagttaatcaaatacggtcatcaggcagctcagcatgccagctgggttttgaccaagcacttctgttaccccggactgagtatcaataggctgcttgcgcggctgaaggagaaaacgttcgttacccgaccaattacttcgagaaacctagtatcaccatgaaagttgcgcagtgtttcgctccgcacaaccccagtgtagatcaggtcgatgagtcaccgcatcccccacgggcgaccgtggcggtggctgcgctggcggcctgcccatgggctaacccatgggacgcttcaaaactgacatggtgtgaagagtctattgagctaattggtggtcctccggcccctgaatgcggctaatcctaactgcggagcagatacccacatgccagtgggcggtctgtcgtaacgggcaactctgcagcggaaccgactactttgggtgtccgtgtttcctattattcctatactggctgcttatggtgacaattgagagattgttaccatatagctattggattggccatccggtgacaaacagagcgattatttacctatttgttggattcataccgttgaactttaaagttttaaaaacccttgaccttgttttagcactcaacacggcaaa

SEQ ID NO: 19785 - DNA, 742 bp, synthetic construct
  source 1..742: mol_type = other DNA
ttaaaacagcctgtgggttgttcccacccgcagggcccattgggcgtttgtacactggtatcacggtacccttgtacgcctgttttatacaccctaccccattgcaacttagaagttaatcaaatacggtcatcaggcagctcagcatgccagctgggttttgaccaagcacttctgtcaccccggactgagtatcaataggctgcttgcgcggctgaaggagaaaacgttcgttacccgaccaatcacttcgagaaacctagtatcaccatgaaagttgcgcagtgtttcgctccgcacaaccccagtgtagatcaggtcgatgagtcaccgcatcccccacgggcgaccgtggcggtggctgcgctggcggcctgcccatgggctaacccatgggacgcttcaaaactgacatggtgtgaagagtctattgagctgattggtagtcctccggcccctgaatgcggctaatcctaactgcggagcagatacccacatgccagtgggcggtctgtcgtaacgggcaactctgcagcggaaccgactactttgggtgtccgtgtttcccattattcctatactggctgcttatggtgacaattgagagattgttaccatatagctattggattggccatccggtgacaaacagagcgattgtttacctatttgttggattcataccgttgaactttaaagttttaaaaacccttgaccttgttttagcacttaatacggcaaa

SEQ ID NO: 19786 - DNA, 743 bp, synthetic construct
  source 1..743: mol_type = other DNA
ttaaaacagcctgtgggttgttcccacccacagggcccacgtggcgttagcacactggtatcccggtacctttgtgcgcctgttttatacaccccaaaccccaatgtaacttagaagaaaataacaccgatcaatagtgggtgtggcacaccagccacatcatgatcaagcactactgttcccccggactgagtatcaataagctgctcgcgcggctgaaggagaaaacgttcgttatccggccaattacttcgagaaacctagtaccaccatgaaggttgcgcagtgttttgctccacacaaccccagtgtagatcaggtcgatgagtcaccgcattccccacaggcgactgtggcggtggctgcgctggcggcctgcccatggggtgacccatgggacgcttcaatactgacatggtgtgaagagtctattgagctaattggtagtcctccggcccctgaatgcggctaatcctaactgcggagcagatacccacgcaccagtgggcagtctgtcgtaacgggtaactctgcagcggaaccgactactttgggtgtccgtgtttccttttattctcacattggctgcttatggtgacaattgaaagattgttaccatatagctactggattggccatccggtgacaaacagagcaattgtgttcctcttcgttgggttcatacctctcaacaagatcagctttcgaactttgtgctacatcatcaagctaaacacaacaaa

SEQ ID NO: 19787 - DNA, 722 bp, synthetic construct
  source 1..722: mol_type = other DNA
tccccacccacagggcccactgggcgctagcacaccggtattgcggtacctttgtgcgcctgttttatctacccttcccctacgtaacttagaagtacagcccatatggtcaatagacagctcagtaaaccaactgggctatgaccaagcacttctgttaccccggactgagtatcaataggctgctcacgcggctgaaggagaaaacgttcgttacccggccaattacttcgaaaagcttagtaccaccatggaggttgcgcagtgtttcgctccgcacaaccccagtgtagatcaggccgatgagtcaccgcgaccctcacgggcgaccgtggcggtggctgcgctggcggcctgcccatggggcaacccgtgggacgcttcaatactgacatggtgcgaagagcctattgagctaattggtattcctccggcccctgaatgcggctaatcccaactgcggagcagatacccacacaccagtgggcagtctgtcgtaacgggcgactctgcagcggaaccgactactttgggtgtccgtgtttccttttattcatttactggctgcttatggtgacaattgagaaattgttaccatatagctattggattggccatccggtgagcaacagagcgattatatacctctttgttggattcatatcacttaactttaacaattataacaccctactttacattatttgtttgaacacgaaaag

SEQ ID NO: 19788 - DNA, 809 bp, synthetic construct
  source 1..809: mol_type = other DNA
ttaaaacagcctgcgggttgttcccacccgcagggcccactgggcgctagtgcactggtatgctagtaccttggtattacggtaccattgtacgttagtacctttgcacgcctgttttaaatcccctcccccatgcaacattagaagtctatctattaaggaccaataggagtccaacagccagttggattgtggtcaagtacttctgtctccccggacttagtagtgataggctgtacccacggccgaagatgaacctgtccgttatccggccagctacttcgagaagcctagtagcaccaaagatctgtcttggcgtttcgctcagcgcgtccccccgcgtagatcgggctgatgggtctccgcatcccccacgggtgaccgtggcggaggccgcgtggcggcccgcctatggcgaaagccataggacgccatttcagtgacagggtgtgaagagcctattgagctagttggtagtcctccggcccctgaatgcggctaatcctaaccacggagcgtccaccggcaaaccagctgggagggcgtcgtaacgggtaactctgtggcggaaccgactactttgggtgtccgtgtttccttttgatcctattgtggctgcttatggtgacaacttacagttgttatcataaagcttttggattggccatccggaaagagttaacagtttgttcgctcattgctctctcaaagtttccattaaggaaagcaatttaccttcttatttcattttacaggcttgacaagatttcaagcgctcatatagatctgcttattcagctacatcaaac

SEQ ID NO: 19789 - DNA, 742 bp, synthetic construct
  source 1..742: mol_type = other DNA
ttaaaacagcctgtgggttgttcccacccacagggcccactgggcgctagcacactggtattgcggtacctttgtgcgcctgttttatccgccctccccagcagtaacctagaagcatgaataatgtggtcaataggaagctcagtaaaccaactgggtcttgaccaaacacttctgttaccccggactgagtatcaagaagctgctcgcgtggctgaaggagaaaacgttcgttacccggccaattacttcgagaaacccagtaccaccatggaagttgcgcagcgtttcgctccgcacaaccccagtgtagatcaggtcgatgagtcaccgcaatcctcacgggtgaccgtggcggtggctgcgctggcggcctgcccatggggcaacccatgggacgcttcaatactgacatggtgcgaagagtctattgagctaattggtagtcctccggcccctgaatgcggctaatcctaactgcggagcagatatccacacaccagtggacagtctgtcgtaatgggcaactctgcagcggaaccgactactttgggtgtccgtgtttccttttatctttatattggctgcttatggtgacaattgagagattgttaccatatagctattggattggccatccggtgagcaacagagcaattgtattcctctttgtaggatttgtgccgttgaattacaacaactacaacaccttactctacatcatccacttaaacacgcggaa

SEQ ID NO: 19790 - DNA, 731 bp, synthetic construct
  source 1..731: mol_type = other DNA
ggtgggttgttcccacccacagggcccactgggcgtttgcacactggtatcgcggtacctttgtgcgcctgttttatccaccctcccctaattgaatttagaagtcaagcacaaccggtcaacagatagcccagcataccagctgggtttcgaccaagcacttctgtttacccgggctgagtatcaataggctgctcacgcggctgaaggagaaaacgttcgttacccggccaattacttcgagaaacctagtaccgccatggacgttgcgcagcgtttcgttccacgcaaccccagtgtagatcaggtcgatgagtcaccgcatcccccacgggcgaccgtggcggtggctgcgctggcggcctgcccatggggtaacccatgggacgcttcaatgctgacatggtgcgaagagtctattgagctaattggtagtcctccggcccctgaatgcggctaatcctaactgcggagcagacacccacacgccagtgggcagtctgtcgtaacgggcaactccgcagcggaaccgactactttgggtgtccgtgtttctttttattctttcattggctgcttatggtgacaattgagaggttgttaccatatagctattggattggccatccggtgagcaacagagcaattatatttctttttgttggatatataccacttgactctaataactacaataccctgctttatattctccaattgaatacgaaaag

SEQ ID NO: 19791 - DNA, 742 bp, synthetic construct
  source 1..742: mol_type = other DNA
ttaaaacagcctgggggttgttcccacccacagggcccactgggcgctggcacactggtattacggtacctttgtgcgcctgttttatttacccttccccaatgcaacttagaagtataactcaaacggtcaacagataactcagtatgccagctgagcctagaccaagcacttctgttaccccggaccgagtatcaataagctgctcgcgcggctgaaggagaaaaagttcgttacccggccaattacttcgagaaacttagtaccaccatggaggttgcgcagtgtttcgctccacacacccccagtgtagatcaggccgatgagtcaccgcgttccccacgggcgaccgtggcggtggctgcgttggcggcctgcccatggggcaacccatgggacgcttcaatactgacatggtgcgaagagtctattgagctaattggtagtcctccggcccctgaatgcggctaatcctaactgcggagcagatacccacgcgccagtgggcagtctgtcgtaatgggcaactctgcagcggaaccgactactttgggtgtccgtgtttccttttattcttgtattggctgcttatggtgacaattgagagattgttaccatatagctattggattggccatccggtgacaaacagggcgatcatctatttgtttgttggttttataccattgaactacaaagtcctagatactcttaaccttatattaaaatttaacacattaaa

SEQ ID NO: 19792 - DNA, 727 bp, synthetic construct
  source 1..727: mol_type = other DNA
ttaaaacagctctggggttgttcccaccccagaggcccacgtggcggctagtactccggtaccccggtacccttgtacgcctgttttatactccctttcccaagtaactttagaagaaataaactaatgttcaacaggagggggtacaaaccagtaccaccacgaacacacacttctgtttccccggtgaagttgcatagactgtacccacggttgaaagcgatgaatccgttacccgcttaggtacttcgagaagcctagtatcatcttggaatcttcgatgcgttgcgatcagcactctaccccgagtgtagcttgggtcgatgagtctggacaccccacaccggcgacggtggtccaggctgcgttggcggcctacccatggctagcaccatgggacgctagttgtgaacaaggtgcgaagagcctattgagctacctgagagtcctccggcccctgaatgcggctaatcccaaccacggagcaaatgctcacaatccagtgagtggtttgtcgtaatgcgcaagtctgtggcggaaccgactactttgggtgtccgtgtttccttttatttttattatggctgcttatggtgacaatctgagattgttatcatatagctattggattagccatccggtgatatcttgaaattttgccataactttttcacaaatcctacaacattacactacactttctcttgaataattgagacaactcata

SEQ ID NO: 19793 - DNA, 731 bp, synthetic construct
  source 1..731: mol_type = other DNA
gtgggttgttcccacccacagggcccaccgggcgctagcacactggtatctcggtacccttgtgcgcctgttttatccacccttttcccatttaacttagaagcacgcgccaagacggtcaaaagggagcccagtaagccaattgggctatgaccaagcactcctgtaaccccgggccgagtatcaataagctgctcgcgcggctgaaggagaaaaagctcgttacccggccaattacttcgagaaacccagtagcattatgaaagttgcgcagcgtttcgctccacacaaccccagtgtagatcaggtcgatgagtcaccgcgttccccacgggtgaccgtggcggtggctgcgctggcggcctgcccatggggccacccatgggacgcttcaatactgacatggtgtgaagagtctattgagctaattggtagtcctccggcccctgaatgcggctaatcctaactgcggagcagatgcccacacaccagtgggaagtctgtcgtaacgggtaactctgcagcggaaccgactactttgggtgtccgtgtttccttttatttctactctggctgcttatggtgacaattgaaaggttgttaccatatagctattggattggccatccggtgtcacatagagcgattatttacttgtttgttgggtttataccactgaactataaagttttaaatactcttaactacattttaatccttaactcattaaa

SEQ ID NO: 19794 - DNA, 726 bp, synthetic construct
  source 1..726: mol_type = other DNA
ttaaaacagctctggggttgttcccaccccagaggcccacgtggcggctagtactccggtaccccggtacccttgtacgcctgttttatactccctttcccaagtaactttagaagaaataaactaatgttcaacaggagggggtacaaaccagtaccaccacgaacacacacttctgtttccccggtgaagttgcatagactgtacccacggttgaaagcgatgaatccgttacccgcttaggtacttcgagaagcctagtatcatcttggaatcttcgatgcgttgcgatcagcactctaccccgagtgtagcttgggtcgatgagtctggacaccccacaccggcgacgtggtccaggctgcgttggcggcctacccatggctagcaccatgggacgctagttgtgaacaaggtgcgaagagcctattgagctacctgagagtcctccggcccctgaatgcggctaatcccaaccacggagcaaatgctcacaatccagtgagtggtttgtcgtaatgcgcaagtctgtggcggaaccgactactttgggtgtccgtgtttccttttatttttattatggctgcttatggtgacaatctgagattgttatcatatagctattggattagccatccggtgatatcttgaaattttgccataactttttcacaaatcctacaacattacactacactttctcttgaataattgagacaactcata

SEQ ID NO: 19795 - DNA, 818 bp, synthetic construct
  source 1..818: mol_type = other DNA
ttaaaacagcctgggggttgtacccacccctagggcccacgtggcgttagtaccctggtacgctagtacctttgtacgcctgtttttccctcccttaaataaattaagattaccactactgaggggagtagaccgactccgctccagcactgctgcaccagtgaactggtacgctagtacctttgcacggagtagatggtacacccaccccgtaacttagaagtactgaacacaaccgaccaatagcggcgtgacagccagttacgcaacggtcaagcacttctgtttccccggtccgtatggatcgttacccgcccaagctactacaagaagcctattaactactgaaactgttgaaaggttgcgctcaaccacatccccagtggtagctccgagtgatggggctcgcgattcccccgtggtaacacggtcgcttgcccgcgcgcgcactcgggtccggtctttgaccgttcaccttgagacaacgtaagtagccaagagcctattgtgctggtttggttatcctccggagccgtgaatgctgctaatcctaacccccaagcgtgtgcgcacaaaccagtgttgctacgtcgtaacgcgtaagttggaggcggaacagactactttcggtactccgtgtttcctttatctcatttttaaaaactttatggtgacaattgttgtgatttgtgaactttacatctagctcttgcataacgccttgtttcatctagtcgccttccatataatatctaaagctttcaacccttgagttaactcactagcaattttgagctcaaataacctagatatagata

SEQ ID NO: 19796 - DNA, 811 bp, synthetic construct
  source 1..811: mol_type = other DNA
ttaaaacagcctgtgggttgttcccactcatagggcctactgggcgctagtacactggtatacctagcctcggtatcgcggtaccgttgcttacagtacctttgtacgcctgttttaaatccccttccccgcacgtgtctttagaagtttaagcaaataaagaccaataggggtccaacaaccagttggattgcggtcaagcacttctgtctccccggacctagtagtgataggctgtacccacggccgaagatgaacccgtccgttatccggccagctacttcgagaagcctagtagcatcaaagatctgtcttggcgtttcgctcagcgcgtttcccccgcgtagatcgggctgatgggtctccgcacaccccacgggcgaccgtggcggaggccgcgtggcggcccgcctatggcgaaagccataggacgccatttcagtgacagggtgtgaagagcctattgagctagttggtagtcctccggcccctgaatgcggctaatcctaaccacggagcgttcaccagcaaaccagctgggagggcgtcgtaacgggcaactctgtggcggaaccgactactttgggtgtccgtgtttctttttgatcctatattggctgcttatggtgacaacgataagttgttatcataaagcttttgggttggccacctggaaaaggttatcagtgtttaatattgttcgactttcacgcctaccaataaaacaagctttgtattatttagtctctttttatcctaaagaggaaattactgaatttcatttgcaattgttattatcattgtcgacaag

SEQ ID NO: 19797 - DNA, 811 bp, synthetic construct; identical to SEQ ID NO: 1251
  source 1..811: mol_type = other DNA

SEQ ID NO: 19798 - DNA, 744 bp, synthetic construct; identical to SEQ ID NO: 1083
  source 1..744: mol_type = other DNA

SEQ ID NO: 19799 - DNA, 718 bp, synthetic construct
  source 1..718: mol_type = other DNA
cacccacagggcccattgggcgtcagcaccctggtatcacggtacctttgtgcgcctgttttatatcccttcccccaattgtaacttagaagaaacacacaccgatcaacagcaagcgtggcacaccagccatgttttggtcaagcacttctgttaccccggactgagtatcaatagactgctcacgcggttgaaggagaaagcgtccgttatccggccagctacttcgagaaacctagtaacaccatggaagttgcggagtgtttcgctcagcactaccccagtgtagatcaggtcgatgagtcaccgctttccccacgggcgaccgtggcggtggctgcgttggcggcctgcctatgggggaacccataggacgctctaatacagacatggtgcgaagagtctattgagctagctggtattcctccggcccctgaatgcggctaatcctaactgtggagcacatgcccctaatccaaggggtagtgtgtcgtaatgagcaattccgcagcggaaccgactactttgggtgtccgtgtttcctcttattcttgtactggctgcttatggtgacaattgagagattgttaccatatagctattggattggccatccggtgactaatagagctattgtgtatctctttgttggatttgtaccacttaatttgaaagaaatcaggacactacgctacattttactattgaacaccgcaaa

SEQ ID NO: 19800 - DNA, 726 bp, synthetic construct
  source 1..726: mol_type = other DNA
ttaaaacagctctggggttgttcccaccccagaggcccacgtggcggctagtactccggtactccggtacccttgtacgcctgttttatactcccctccccaagcaactttagaagatataaactaatgttcaacaggagggggtacaaaccagtaccaccacgaacagacacttctgtttccccggtgaagttgcatagactgtacccacggttgaaagcgatgaatccgttatccgcttaggtacttcgagaagcctagtatcgtcttggaatcttcgatgcgttgcgctcagcactctaccccgagtgtagcttaggtcgatgagcctggacaccccacaccggcgacggtggtccaggctgcgttggcggcctacccatggctaacaccatgggacgctagttgtgaacaaggtgtgaagagcctattgagctacctaagagtcctccggcccctgaatgcggctaatcccaaccacggagcaaatgctcacaatccagtgagtggtttgtcgtaacgcgcaagtctgtggcggaaccgactactttgggtgtccgtgtttccttttatttttattatggctgcttatggtgacaatctgagattgttattatatagctattggattggccatccggtgatatcttgaaattttgctataattttccacaaattttacaacatcacactacaccttcttttaaacaattgagacaactcata

SEQ ID NO: 19801 - DNA, 742 bp, synthetic construct
  source 1..742: mol_type = other DNA
taatacagcctgtgggttgttcccacccacagggcccaccgggcgctagcacactggtatctcggtacccttgtgcgcctgttttatccacccttttcccatttaacttagaagcacgcgccaagacggtcaaaagggagcccagtaagccaattgggctatgaccaagcactcctgtaaccccgggccgagtatcaataagctgctcgcgcggctgaaggagaaaaagctcgttacccggccaattacttcgagaaacccagtagcatcatgaaagttgcgcagcgtttcgctccacacaaccccagtgtagatcaggtcgatgagtcaccgcgttccccacgggtgaccgtggcggtggctgcgctggcggcctgcccatggggccacccatgggacgcttcaatactgacatggtgtgaagagtctattgagctaattggtagtcctccggcccctgaatgcggctaatcctaactgcggagcagatgcccacacaccagtgggaagtctgtcgtaacgggtaactctgcagcggaaccgactactttgggtgtccgtgtttccttttatttctactctggctgcttatggtgacaattgaaaggttgttaccatatagctattggattggccatccggtgtcacatagagcgattatttacttgtttgttgggtttataccactgaactataaagttttaaatactcttaactacattttaatccttaactcattaaa

SEQ ID NO: 19802 - DNA, 742 bp, synthetic construct
  source 1..742: mol_type = other DNA
taaaacagcctgtgggttgttcccacccacagggcccaccgggcgctagcacactggtatctcggtacccttgtgcgcctgttttatccacccttttcccatttaacttagaagcacgcgccaagacggtcaaaagggagcccagtaagccaattgggctatgaccaagcactcctgtaaccccgggccgagtatcaataagctgctcgcgcggctgaaggagaaaaagctcgttacccggccaattacttcgagaaacccagtagcatcatgaaagttgcgcagcgtttcgctccacacaaccccagtgtagatcaggtcgatgagtcaccgcgttccccacgggtgaccgtggcggtggctgcgctggcggcctgcccatggggccacccatgggacgcttcaatactgacatggtgtgaagagtctattgagctaattggtagtcctccggcccctgaatgcggctaatcctaactgcggagcagatgcccacacaccagtgggaagtctgtcgtaacgggtaactctgcagcggaaccgactactttgggtgtccgtgtttccttttatttctactctggctgcttatggtgacaattgaaaggttgttaccatatagctattggattggccatccggtgtcacatagagcgattatttacttgtttgttgggtttataccactgaactataaagttttaaatactcttaactacattttaatccttaactcattaaa

SEQ ID NO: 19803 - DNA, 741 bp, synthetic construct
  source 1..741: mol_type = other DNA
ttaaaacagcctgtgggttgttcccacccacaggcccattgggcgctagcactctggtatcacggtacctttgtgcgcctgttttacatcccctccccaaattgtaatttagaagtttcacacaccgatcattagcaagcgtggcacaccagccatgttttgatcaagcacttctgttaccccggactgagtatcaatagaccgctaacgcggttgaaggagaaaacgttcgttacccggccaactacttcgaaaaacctagtaacaccatggaagttgcggagtgtttcgctcagcactaccccagtgtagatcaggtcgatgagtcaccgcgttccccacgggcgaccgtggcggtggctgcgttggcggcctgcctacggggaaacccgtaggacgctctaatacagacatggtgcgaagagtctattgagctagttggtaatcctccggcccctgaatgcggctaatcctaactgcggagcacataccctcaaaccagggggcagtgtgtcgtaacgggcaactctgcagcggaaccgactactttgggtgtccgtgtttcattttattcctatactggctgcttatggtgacaattgacaggttgttaccatatagttattggattggccatccggtgactaacagagcaattatatatctctttgttgggtttataccacttagcttgaaagaggttaaaacactacatctcatcattaaactaaatacaacaaa

SEQ ID NO: 19804 - DNA, 818 bp, synthetic construct
  source 1..818: mol_type = other DNA
ttcaaacagcctgggggttgtacccacccctggggcccacgcggcgctagtactctggtacgttagtacctttgtacgcctgttttcccctcccttaaataaattaagattaccactactgaggggagtagtccgactccgctccgacaatgtcgcaccagtgcactggtacgctagtaccttttcacggagtagctggtattccctcccgaaacttagaagcacttaaatcaaccgaccaataggcgcgcggtagccagccgcgttacggtcaagcactcctgtttccccggtccacaaggatcgttacccgcccgacccactgcgagaaacctagtagttggccaagtggtaacgaggttgcgctcagccacaaccccagtggtagctccggaagatggggctcgcaccacccccgcggtaacgcggttgcttgcccgcgcgtgcttccgggtccggtctcgtaccgttcacctcaataccacgtaaccagcaaagagtctattgcgctgggacggttttcctccggggccgtgaatgctgctaatcccaacctccgagcgtgtgcgcacaatccagtgttgctacgtcgtaacgcgtaagttggaggcggaacagactactttcggtaccccgtgtttccctatcattccatttcattttatggtgacaattgctgagatctgtgatttggcgaccttaccactgaatattgccttatattacttggttgcattccacaaaacctctgacatacctgcttcctatatcgacctacttgttttcctcaatttaaagtatagactacaaatagcaga

SEQ ID NO: 19805 - DNA, 723 bp, synthetic construct
  source 1..723: mol_type = other DNA
ttcccacccacagggcccactgggcgccagtacactggtatcacggtacctttgtgcgcctgtttgactcaccttccccaaacgcaacttagaagcataacttaaatggtcattaggcggctcagtatgccaactgggtctcgatcaagcacttctgttaccccggactgagtaccaataggctgctcacgcggctgaaagggaaaccgttcgttacccgaccaactacttcgagaaacctagtaccaccatgaaagttgcgcggcgtttcgctccgcacaaccccagtgtagatcaggccgatgagtcaccgcaaaccccacgggcgaccgtggcggtggctgcgctggcggcctgcccatgggacaacccatgggacgccacaattctgacatgatgcgaagagtctattgagctagttggtagtcctccggcccctgaatgcggctaatcccaactgtggagcagatacccacgcaccagtgggcagtctgtcgtaatgggcaactctacagcggaaccgactactttgggtgtccgtgtttctttttattcctacgctggctacttatggtgacaattgagagactgtaactatattgctatcgggttggccacctggtgaagaataaaacagttgctcacttgtttgtcagtcttgcaccgtcgtgccacaaagtcttaactgcccctcaacatcgtcgtaatactaaacacgctgaa

SEQ ID NO: 19806 - DNA, 737 bp, synthetic construct
  source 1..737: mol_type = other DNA
acagcctgtgggttgttcccacccacagggcccactgggcgtttgcacactggtatcgcggtacctttgtgcgcctgttttatccaccctcccctaattgaatttagaagtcaagcacaaccggtcaacagatagcccagcataccagctgggtttcgaccaagcacttctgtttacccgggctgagtatcaataggctgctcacgcggctgaaggagaaaacgttcgttacccggccaattacttcgagaaacctagtaccgccatggacgttgcgcagcgtttcgttccacgcaaccccagtgtagatcaggtcgatgagtcaccgcatcccccacgggtgaccgtggcggtggctgcgctggcggcctgcccatggggtaacccatgggacgcttcaatgctgacatggtgcgaagagtctattgagctaattggtagtcctccggcccctgaatgcggctaatcctaactgcggagcagacacccacacgccagtgggcagtctgtcgtaacgggcaactccgcagcggaaccgactactttgggtgtccgtgtttccttttattctttcattggctgcttatggtgacaattgagaggttgttaccatatagctattggattggccatccggtgagcaacagagcaattatatttctttttgttggatatataccacttgactctaataactacaataccctgctttatattctccaattgaatacgaaaag

SEQ ID NO: 19807 - DNA, 715 bp, synthetic construct
  source 1..715: mol_type = other DNA
ccacagggcccatagggcgctagcactctggtattgcggtacctttgtgcgcctgttttatgttcccacccccaatcgcaacttagaagcggtacttcacgaccaacagtgggcgtgacacaccagccacgtctcggtcaagcacttctgtctccccggactgagtatcaataggctgctcacgcggctgaaggagaaaacgtccgttatccggccaattacttcgagaaacctagtaccgccatgaaagttgcgcagcgtttcgatccgcacaaccccagtgtagatcaggtcgatgagtcaccgcgttccccacgggtgaccgtggcggtggctgcgttggcggcctgcccatggggtaacccatgggacgcttcaatactgacatggtgtgaagagtctattgagctaattggtagtcctccggcccctgaatgcggctaatcctaactgcggagcagattcccgcatgccagcgggtggtctgtcgtaacgggcaactctgcagcggaaccgactactttgggtgtccgtgtttccttttattcctatattggctgcttatggtgacaattgagagattgttaccatatagctattggattggccatccggtgacaaacagagcgattatttaccaatttattggttttgtaccgttgaattttaacacattcagaactcttaaccttattttggctcttaatacagcaaa

SEQ ID NO: 19808 - DNA, 682 bp, synthetic construct
  source 1..682: mol_type = other DNA
gggaacaaccccagagctgttttaaacccctttcccccgtaacttagaagctttaaatccaagttcaacagtcagtggtacaacccagtactaccacgaacaagcacttctgttaccccggtgagattgcataggccgtccccacggctaaaagcgattgatccgttatccgctcttgtacttcgagaagcctagtaagaccttgggatcctcgatgcgttgcgctcaacactcaaccccagagtgtagcttgggctgatgagtctggacattcctcaccggtgacggtggtccaggctgcgttggcggcctacctgtggcccaaagccacaggacgctagttgtgaacaaggtgtgaagagcctattgagctacaagagagtcctccggcccctgaatgcggctaatcccaaccacggagcaggcgattgcaacccagcaactagcctgtcgtaacgcgcaagtctgtggcggaaccgactactttgggtgtccgtgtttccttttattacataatggctgcttatggtgacaatcacagattgttgtcataaagcgaattggattggccatccggtgagaattaaaacaattatttacttatttgttggatttgttcctatacacacccaaacaccttgcttgattgaagtaattctgttgataagacaacactattaca

SEQ ID NO: 19809 - DNA, 729 bp, synthetic construct
  source 1..729: mol_type = other DNA
gggttgttcccacccacagggcccaccgggcgctagcacactggtatctcggtacccttgtgcgcctgttttatccacccttttcccatttaacttagaagcacgcgccaagacggtcaaaagggagcccagtaagccaattgggctatgaccaagcactcctgtaaccccgggccgagtatcaataagctgctcgcgcggctgaaggagaaaaagctcgttacccggccaattacttcgagaaacccagtagcatcatgaaagttgcgcagcgtttcgctccacacaaccccagtgtagatcaggtcgatgagtcaccgcgttccccacgggtgaccgtggcggtggctgcgctggcggcctgcccatggggccacccatgggacgcttcaatactgacatggtgtgaagagtctattgagctaattggtagtcctccggcccctgaatgcggctaatcctaactgcggagcagatgcccacacaccagtgggaagtctgtcgtaacgggtaactctgcagcggaaccgactactttgggtgtccgtgtttccttttatttctactctggctgcttatggtgacaattgaaaggttgttaccatatagctattggattggccatccggtgtcacatagagcgattatttacttgtttgttgggtttataccactgaactataaagttttaaatactcttaactacattttaatccttaactcattaaa

SEQ ID NO: 19810 - DNA, 713 bp, synthetic construct
  source 1..713: mol_type = other DNA
cagaggcccacgtggcggctagtactccggtattgcggtacccttgtacgcctgttttatactcccttcccgtaacttagacgcacaaaaccaagttcaatagaagggggtacaaaccagtaccaccacgaacaagcacttctgtttccccggtgatgttgtatagactgcttgcgtggttgaaagcgacggatccgttatccgcttatgtacttcgagaagcccagtaccacctcggaatcttcgatgcgttgcgctcagcactcaaccccagagtgtagcttaggctgatgagtctggacatccctcaccggtgacggtggtccaggctgcgttggcggcctacctatggctaacgccatgggacgctagttgtgaacaaggtgtgaagagcctattgagctacataagaatcctccggcccctgaatgcggctaatcccaacctcggggcaggtggtcacaaaccagtgattggcctgtcgtaacgcgcaagtccgtggcggaaccgactactttgggtgtccgtgtttccttttattttaatgtggctgcttatggtgacaatcacagattgttatcataaagcgaattggattggccatccggtgaaagtgagattcattatctatctgtttgctggattcgctccattgagtgtgtttactctaagtacaatttcaacagttatttcaatcagacaattgtatcata

SEQ ID NO: 19811 - DNA, 713 bp, synthetic construct
  source 1..713: mol_type = other DNA
cagaggcccacgtggcggctagtactccggtattgcggtacccttgtacgcctgttttatactcccttcccgtaacttagacgcacaaaaccaagttcaatagaagggggtacaaaccagtaccaccacgaacaagcacttctgtttccccggtgatgttgtatagactgcttgcgtggttgaaagcgacggatccgttatccgcttatgtacttcgagaagcccagtaccacctcggaatcttcgatgcgttgcgctcagcactcaaccccagagtgtagcttaggctgatgagtctggacatccctcaccggtgacggtggtccaggctgcgttggcggcctacctatggctaacgccatgggacgctagttgtgaacaaggtgtgaagagcctattgagctacataagaatcctccggcccctgaatgcggctaatcccaacctcggagcaggtggtcacaaaccagtgattggcctgtcgtaacgcgcaagtccgtggcggaaccgactactttgggtgtccgtgtttccttttattttattgtggctgcttatggtgacaatcacagattgttatcataaagcgaattggattggccatccggtgaaagtgagattcattatctatctgtttgctggattcgctccattgagtgtgtttactctaagtacaatttcaacagttatttcaatcagacaattgtatcata

SEQ ID NO: 19812 - DNA, 713 bp, synthetic construct
  source 1..713: mol_type = other DNA
cagagacccacgtggcggctagtactccggtattgcggtacccttgtacgcctgttttatactcccttcccgtaacttagacacacaaaaccaagttcaatagaagggggtacaaaccagtaccaccacgaacaagcacttctgtttccccggtgatgttgtatagactgcttgcgtggttgaaagcgacggatccgttatccgcttatgtacttcgagaagcccagtaccacctcggaatcttcgatgcgttgcgctcagcactcaaccccagagtgtagcttaggctgatgagtctggacatccctcaccggtgacggtggtccaggctgcgttggcggcctacctatggctaacgccatgggacgctagttgtgaacaaggtgtgaagagcctattgagctacataagaatcctccggcccctgaatgcggctaatcccaacctcggggcaggtggtcacaaaccagtgattggcctgtcgtaacgcgcaagtccgtggcggaaccgactactttgggtgtccgtgtttccttttattttattgtggctgcttatggtgacaatcacagattgttatcataaagcgaattggattggccatccggtgaaagtgagattcattatctatctgtttgctggattcgctccattgagtgtgtttactctaagtacaatttcaacagttatttcaatcagacaattgtatcata

SEQ ID NO: 19813 - DNA, 713 bp, synthetic construct
  source 1..713: mol_type = other DNA
cagagacccacgtggcggctagtactccggtattgcggtacccttgtacgcctgttttatactcccttcccgtaacttagacgcacaaaaccaagttcaatagaagggggtacaaaccagtaccaccacgaacaagcacttctgtttccccggtgatgttgtatagactgcttgcgtggttgaaagcgacggatccgttatccgcttatgtacttcgagaagcccagtaccacctcggaatcttcgatgcgttgcgctcagcactcaaccccagagtgtagcttaggctgatgagtctggacatccctcaccggtgacggtggtccaggctgcgttggcggcctacctatggctaacgccatgggacgctagttgtgaacaaggtgtgaagagcctattgagctacataagaatcctccggcccctgaatgcggctaatcccaacctcggggcaggtggtcacaaaccagtgattggcctgtcgtaacgcgcaagtccgtggcggaaccgactactttgggtgtccgtgtttccttttattttattgtggctgcttatggtgacaatcacagattgttatcataaagcgaattggattggccatccggtgaaagtgagattcattatctatctgtttgctggattcgctccattgagtgtgtttactctaagtacaatttcaacagttatttcaatcagacaattgtatcata

SEQ ID NO: 19814 - DNA, 713 bp, synthetic construct
  source 1..713: mol_type = other DNA
cagaggcccacgtggcggctagtactccggtattgcggtacccttgtacgcctgttttatactcccttcccgtaacttagacgcacaaaaccaagttcaatagaagggggtacaaaccagtaccaccacgaacaagcacttctgtttccccggtgatgttgtatagactgcttgcgtggttgaaagcgacggatccgttatccgcttatgtacttcgagaagcccagtaccacctcggaatcttcgatgcgttgcgctcagcactcaaccccagagtgtagcttaggctgatgagtctggacatccctcaccggtgacggtggtccaggctgcgttggcggcctacctatggctaacgccatgggacgctagttgtgaacaaggtgtgaagagcctattgagctacataagaatcctccggcccctgaatgcggctaatcccaacctcggggcaggtggtcacaaaccagtgattggcctgtcgtaacgcgcaagtccgtggcggaaccgactactttgggtgtccgtgtttccttttattttattgtggctgcttatggtgacaatcacagattgttatcataaagcgaattggattggccatccggtgaaagtgagattcattatctatctgtttgctggattcgctccattgagtgtgtttactctaagtacaatttcaacagttatttcaatcagacaattgtatcata

SEQ ID NO: 19815 - DNA, 713 bp, synthetic construct
  source 1..713: mol_type = other DNA
cagaggcccacgtggcggctagtactccggtattgcggtacccttgtacgcctgttttatactcccttcccgtaacttagacgcacaaaaccaagttcaatagaagggggtacaaaccagtaccaccacgaacaagcacttctgtttccccggtgatgttgcatagactgcttgcgtggttgaaagcgacggatccgttatccgcttatgtacttcgagaagcccagtaccacctcggaatcttcgatgcgttgcgctcagcactcaaccccagagtgtagcttaggctgatgagtctggacatccctcaccggtgacggtggtccaggctgcgttggcggcctacctatggctaacgccatgggacgctagttgtgaacaaggtgtgaagagcctattgagctacataagaatcctccggcccctgaatgcggctaatcccaacctcggggcaggtggtcacaaaccagtgattggcctgtcgtaacgcgcaagtccgtggcggaaccgactactttgggtgtccgtgtttccttttattttattgtggctgcttatggtgacaatcacagattgttatcataaagcgaattggattggccatccggtgaaagtgagattcattatctatctgtttgctggattcgctccattgagtgtgtttactctaagtacaatttcaacagttatttcaatcagacaattgtatcata

SEQ ID NO: 19816 - DNA, 713 bp, synthetic construct
  source 1..713: mol_type = other DNA
cagagacccacgtggcggctagtactccggtattgcggtacccttgtacgcctgttttatactcccttcccgtaacttagacgcacaaaaccaagttcaatagaagggggtacaaaccagtaccaccacgaacaagcacttctgtttccccggtgatgttgtatagactgcttgcgtggttgaaagcgacggatccgttatccgcttatgtacttcgagaagcccagtaccacctcggaatcttcgatgcgttgcgctcagcactcaaccccagagtgtagcttaggctgatgagtctggacatccctcaccggtgacggtggtccaggctgcgttggcggcctacctatggctaacgccatgggacgctagttgtgaacaaggtgtgaagagcctattgagctacataagaatcctccggcccctgaatgcggctaatcccaacctcggggcaggtggtcacaaaccagtgattggcctgtcgtaacgcgcaagtccgtggcggaaccgactactttgggtgtccgtgtttccttttattttattgtggctgcttatggtgacaatcacagattgttatcataaagcgaattggattggccatccggtgaaagtgagatccattatctatctgtttgctggattcgctccattgagtgtgtttactctaagtacaatttcaacagttatttcaatcagacaattgtatcata

SEQ ID NO: 19817 - DNA, 713 bp, synthetic construct
  source 1..713: mol_type = other DNA
cagagacccacgtggcggctagtactccggtattgcggtacccttgtacgcctgttttatactcccttcccgtaacttagacgcacaaaaccaagttcaatagaagggggtacaaaccagtaccaccacgaacaagcacttctgtttccccggtgatgttgtatagactgcttgcgtggttgaaagcgacggatccgttatccgcttatgtacttcgagaagcccagtaccacctcggaatcttcgatgcgttgcgctcagcactcaaccccagagtgtagcttaggctgatgagtctggacatccctcaccggtgacggtggtccaggctgcgttggcggcctacctatggctaacgccatgggacgctagttgtgaacaaggtgtgaagagcctattgagctacataagaatcctccggcccctgaatgcggctaatcccaacctcggggcaggtgatcacaaaccagtgattggcctgtcgtaacgcgcaagtccgtggcggaaccgactactttgggtgtccgtgtttccttttattttattgtggctgcttatggtgacaatcacagattgttatcataaagcgaattggattggccatccggtgaaagtgagattcattatctatctgtttgctggattcgctccattgagtgtgtttactctaagtacaatttcaacagttatttcaatcagacaattgtatcata

SEQ ID NO: 19818 - DNA, 713 bp, synthetic construct
  source 1..713: mol_type = other DNA
cagagacccacgtggcggctagtactccggtattgcggtacccttgtacgcctgttttatactcccttcccgtaacttagacgcacaaaaccaagttcaatagaagggggtacaaaccagtaccaccacgaacaagcacttctgtttccccggtgatgttgtatagaccgcttgcgtggttgaaagcgacggatccgttatccgcttatgtacttcgagaagcccagtaccacctcggaatcttcgatgcgttgcgctcagcactcaaccccagagtgtagcttaggctgatgagtctggacatccctcaccggtgacggtggtccaggctgcgttggcggcctacctatggctaacgccatgggacgctagttgtgaacaaggtgtgaagagcctattgagctacataagaatcctccggcccctgaatgcggctaatcccaacctcggggcaggtggtcacaaaccagtgattggcctgtcgtaacgcgcaagtccgtggcggaaccgactactttgggtgtccgtgtttccttttattttattgtggctgcttatggtgacaatcacagattgttatcataaagcgaattggattggccatccggtgaaagtgagattcattatctatctgtttgctggattcgctccattgagtgtgtttactctaagtacaatttcaacagttatttcaatcagacaattgtatcata

SEQ ID NO: 19819 - DNA, 713 bp, synthetic construct
  source 1..713: mol_type = other DNA
cagaggcccacgtggcggctagtactccggtattgcggtacccttgtacgcctgttttatactcccttcccgtaacttagacgcacaaaaccaagttcaatagaagggggtacaaaccagtaccaccacgaacaagcacttctgtttccccggtgatgttgtatagactgcttgcgtggttgaaagcgacggatccgttatccgcttatgtacttcgagaagcccagtaccacctcggaatcttcgatgcgttgcgctcagcactcaaccccagagtgtagcttaggctgatgagtctggacatccctcaccggtgacggtggtccaggctgcgttggcggcctacctatggctaacgccatgggacgctagttgtgaacaaggtgtgaagagcctattgagctacataagaatcctccggcccctgaatgcggctaatcccaacctcggggcaggtggtcacaaaccagtgattggcctgtcgtaacgcgcaagcccgtggcggaaccgactactttgggtgtccgtgtttccttttattttattgtggctgcttatggtgacaatcacagattgttatcataaagcgaattggattggccatccggtgaaagtgagattcattatctatctgtttgctggattcgctccattgagtgtgtttactctaagtacaatttcaacagttatttcaatcagacaattgtatcata

SEQ ID NO: 19820 - DNA, 713 bp, synthetic construct
  source 1..713: mol_type = other DNA
cagaggcccacgtggcggctagtactccggtattgcggtacccttgtacgcctgttttatactcccttcccgtaacttagacgcacaaaaccaagttcaatagaagggggtacaaaccagtaccaccacgaacaagcacttctgtttccccggtgatgttgtatagactgcttgcgtggttgaaagcgacggatccgttatccgcttatgtacttcgagaagcccagtaccacctcggaatcttcgatgcgttgcgctcagcactcaaccccagagtgtagcttaggctgatgagtctggacatccctcaccggtgacggtggtccaggctgcgttggcggcctacctatggctaacgccatgggacgctagttgtgaacaaggtgtgaagagcctattgagctacataagaatcctccggcccctgaatgcggctaatcccaacctcggggcaggtggtcacaaaccagtgattggcctgtcgtaacgcgcaagtccgtggcggaaccgactactttgggtgtccgtgtttccttttattttattgtggctgcttatggtgacaatcacagattgttatcataaagtgaattggattggccatccggtgaaagtgagattcattatctatctgtttgctggattcgctccattgagtgtgtttactctaagtacaatttcaacagttatttcaatcagacaattgtatcata

SEQ ID NO: 19821 - DNA, 713 bp, synthetic construct
  source 1..713: mol_type = other DNA
cagagacccacgtggcggctagtactccggtattgcggtacccttgtacgcctgttttatactcccttcccgtaacttagacgcacaaaaccaagttcaatagaagggggtacaaaccagtaccaccacgaacaagctcttctgtttccccggtgatgttgtatagactgcttgcgtggttgaaagcgacggatccgttatccgcttatgtacttcgagaagcccagtaccacctcggaatcttcgatgcgttgcgctcagcactcaaccccagagtgtagcttaggctgatgagtctggacatccctcaccggtgacggtggtccaggctgcgttggcggcctacctatggctaacgccatgggacgctagttgtgaacaaggtgtgaagagcctattgagctacataagaatcctccggcccctgaatgcggctaatcccaacctcggggcaggtggtcacaaaccagtgattggcctgtcgtaacgcgcaagtccgtggcggaaccgactactttgggtgtccgtgtttccttttattttattgtggctgcttatggtgacaatcacagattgttatcataaagcgaattggattggccatccggtgaaagtgagattcattatctatctgtttgctggattcgctccattgagtgtgtttactctaagtacaatttcaacagttatttcaatcagacaattgtatcata

SEQ ID NO: 19822 - DNA, 713 bp, synthetic construct
  source 1..713: mol_type = other DNA
cagaggcccacgtggcggctagtactccggtattgcggtacccttgtacgcctgttttatactcccttcccgtaacttagacgcacaaaaccaagttcaatagaagggggtacaaaccagtaccaccacgaacaagcacttctgtttccccggtgatgttgtatagactgcttgcgtggttgaaagcgacggatccgttatccgcttatgtacttcgagaagcccagtaccacctcggaatcttcgatgcgttgcgctcagcactcaaccccagagtgtagcttgggctgatgagtctggacatccctcaccggtgacggtggtccaggctgcgttggcggcctacctatggctaacgccatgggacgctagttgtgaacaaggtgtgaagagcctattgagctacataagaatcctccggcccctgaatgcggctaatcccaacctcggggcaggtggtcacaaaccagtgattggcctgtcgtaacgcgcaagtccgtggcggaaccgactactttgggtgtccgtgtttccttttattttattgtggctgcttatggtgacaatcacagattgttatcataaagcgaattggattggccatccggtgaaagtgagattcattatctatctgtttgctggattcgctccattgagtgtgtttactctaagtacaatttcaacagttatttcaatcagacaattgtatcata

SEQ ID NO: 19823 - DNA, 713 bp, synthetic construct
  source 1..713: mol_type = other DNA
cagaggcccacgtggcggctagtactccggtattgcggtacccttgtacgcctgttttatactcccttcccgtaacttagacgcacaaaaccaagttcaatagaagggggtacaaaccagtaccaccacgaacaagcacttctgtttccccggtgatgttgtatagactgcttgcgtggttgaaagcgacggatccgttatccgcttatgtacttcgagaagcccagtaccacctcggaatcttcgatgcgttgcgctcagcactcaaccccagagtgtagcttaggctgatgagtctggacatccctcaccggtgacggtggttcaggctgcgttggcggcctacctatggctaacgccatgggacgctagttgtgaacaaggtgtgaagagcctattgagctacataagaatcctccggcccctgaatgcggctaatcccaacctcggggcaggtggtcacaaaccagtgattggcctgtcgtaacgcgcaagtccgtggcggaaccgactactttgggtgtccgtgtttccttttattttattgtggctgcttatggtgacaatcacagattgttatcataaagcgaattggattggccatccggtgaaagtgagattcatcatctatctgtttgctggattcgctccattgagtgtgtttactctaagtacaatttcaacagttatttcaatcagacaattgtatcata

SEQ ID NO: 19824 - DNA, 713 bp, synthetic construct
  source 1..713: mol_type = other DNA
cagaggcccacgtggcggctagtactccggtattgcggtacccttgtacgcctgttttatactcccttcccgtaacttagacgcacaaaaccaagttcaatagaagggggtacaaaccagtaccaccacgaacaagcacttctgtttccccggtgatgttgtatagactgcttgcgtggttgaaagcgacggatccgttatccgcttatgtacttcgagaagcccagtaccacctcggaatcttcgatgcgttgcgctcagcactcaaccccagagtgtagcttaggctgatgagtctggacatccctcaccggtgacggtggtccaggctgcgttggcggcctacctatggctaacgccatgggacgctagttgtgaacaaggtgtgaagagcctattgagctacataagaatcctccggcccctgaatgcggctaatcccaaccacggggcaggtggtcacaaaccagtgattggcctgtcgtaacgcgcaagtccgtggcggaaccgactactttgggtgtccgtgtttccttttattttattgtggctgcttatggtgacaatcacagattgttatcataaagcgaattggattggccatccggtgaaagtgagattcattatctatctgtttgctggattcgctccattgagtgtgtttactctaagtacaatttcaacagttatttcaatcagacaattgtatcata

SEQ ID NO: 19825 - DNA, 713 bp, synthetic construct
  source 1..713: mol_type = other DNA
cagaggcccacgtggcggctagtactccggtattgcggtacccttgtacgcctgttttatactcccttcccgtaacttagacgcacaaaaccaagttcaatagaagggggtacaaaccagtaccaccacgaacaagcacttctgtttccccggtgatgttgtatagactgcttgcgtggttgaaagcgacggatccgttatccgcttatgtacttcgagaagcccagtaccacctcggaatcttcgatgcgttgcgctcagcactcaaccccagagtgtagcttaggctgatgagtctggacatccctcaccggtgacggtggtccaggctgcgttggcggcctacctatggctaacgccatgggacgctagttgtgaacaaggtgtgaagagcctattgagctacataagaatcctccggcccctgaatgcggctaatcccaacctcggggcaggtggtcacaaaccagtgattggcctgtcgtaacgcgcaagtccgtggcggaaccgactactttgggtgtccgtgtttccttttattttattgtggctgcttatggtgacaatcacagattgttatcataaagcgaattggattggccatccggtgaaagtgagattcattatctatctgtttgctggattcgctccattgagtgtgtttactctaagtacaatttcaacagttatttcaatcagacaattgtaccata

SEQ ID NO: 19826 - DNA, 713 bp, synthetic construct
  source 1..713: mol_type = other DNA
cagagacccacgtggcggctagtactccggtattgcggtacccttgtacgcctgttttatactcccttcccgtaacttagacgcacaaaaccaagttcaatagaagggggtacaaaccagtaccaccacgaacaagcacttctgtttccccggtgatgttgtatagactgcttgcgtggttgaaagcgacggatccgttatccgcttatgtacttcgagaagcccagtaccacctcggaatcttcgatgcgttgcgctcagcactcaaccccagagtgtagcttaggctgatgagcctggacatccctcaccggtgacggtggtccaggctgcgttggcggcctacctatggctaacgccatgggacgctagttgtgaacaaggtgtgaagagcctattgagctacataagaatcctccggcccctgaatgcggctaatcccaacctcggggcaggtggtcacaaaccagtgattggcctgtcgtaacgcgcaagtccgtggcggaaccgactactttgggtgtccgtgtttccttttattttattgtggctgcttatggtgacaatcacagattgttatcataaagcgaattggattggccatccggtgaaagtgagattcattatctatctgtttgctggattcgctccattgagtgtgtttactctaagtacaatttcaacagttatttcaatcagacaattgtatcata

SEQ ID NO: 19827 - DNA, 713 bp, synthetic construct
  source 1..713: mol_type = other DNA
cagaggcccacgtggcggctagtactccggtattgcggtacccttgtacgcctgttttatactcccttcccgtaacttagacgcacaaaaccaagttcaatagaagggggtacaaaccagtaccaccacgaacaagcacttctgtttccccggtgatgttgtatagactgcttgcgtggttgaaagcgacggatccgttatccgcttatgtacttcgagaagcccagtaccacctcggaatcttcgatgcgttgcgctcagcactcaaccccagagtgtagcttaggctgatgagtctggacatccctcaccggtgacggtggtccaggctgcgttggcggcctacctatggctaacgccatgggacgctagttgtgaacaaggtgtgaagagcctattgagctacataagaatcctccggcccctgaatgcggctaatcccaacctcggggcaggtggtcacaaaccagtgattggcctgtcgtaacgcgcaagtccgtggcggaaccgactactttgggtgtccgtgtttccttttattttattgtggatgcttatggtgacaatcacagattgttatcataaagcgaattggattggccatccggtgaaagtgagattcattatctatctgtttgctggattcgctccattgagtgtgtttactctaagtacaatttcaacagttatttcaatcagacaattgtatcata

SEQ ID NO: 19828 - DNA, 713 bp, synthetic construct
  source 1..713: mol_type = other DNA
cagagacccacgtggcggctagtactccggtattgcggtacccttgtacgcctgttttatactcccttcccgtaacttagacgcacaaaaccaagttcaatagaagggggtacaaaccagtaccaccacgaacaagcacttctgtttccccggtgatgttgtatagactgcttgcgtggttgaaagcgacggatccgttatccgcttatgtacttcgagaagcccagtaccacctcggaatcttcgatgcgttgcgctcagcactcaaccccagagtgtagcttaggccgatgagtctggacatccctcaccggtgacggtggtccaggctgcgttggcggcctacctatggctaacgccatgggacgctagttgtgaacaaggtgtgaagagcctattgagctacataagaatcctccggcccctgaatgcggctaatcccaacctcggggcaggtggtcacaaaccagtgattggcctgtcgtaacgcgcaagtccgtggcggaaccgactactttgggtgtccgtgtttccttttattttattgtggctgcttatggtgacaatcacagattgttatcataaagcgaattggattggccatccggtgaaagtgagattcattatctatctgtttgctggattcgctccattgagtgtgtttactctaagtacaatttcaacagttatttcaatcagacaattgtatcata

SEQ ID NO: 19829 - DNA, 713 bp, synthetic construct
  source 1..713: mol_type = other DNA
cagagacccacgtggcggctagtactccggtattgcggtacccttgtacgcctgttttatactcccttcccgtaacttagacgcacaaaaccaagttcaatagaagggggtacaaaccagtaccaccacgaacaagcacttctgtttccccggtgatgttgtatagactgcttgcgtggttgaaagcgacggatccgttatccgcttatgtacttcgagaagcccagtaccacctcggaatcttcgatgcgttgcgctcagcactcaaccccagagtgtagcttaggctgatgagtctggacatccctcaccggtgacggtggtccaggctgcgttggcggcctacctatggctaacgccatgggacgctagttgtgaacaaggtgtgaagagcctattgagctacataagaatcctccggcccctgaatgcggctaatcccaacctcggggcaggtggtcacaaaccagtgattggcctgtcgtaacgcgcaagtccgtggcggaaccgactactttgggtgtccgtgtttccttttattttattgtggctgcttatggtgacaatcacagattgttatcataaagcgaattggattggccatccggtgaaagtgagattcattatctatctgtttgctggattcgctccattgagtgtgcttactctaagtacaatttcaacagttatttcaatcagacaattgtatcata

SEQ ID NO: 19830 - DNA, 713 bp, synthetic construct
  source 1..713: mol_type = other DNA
cagagacccacgtggcggctagtactccggtattgcggtacccttgtacgcctgttttatactcccttcccgtaacttagacgcacaaaaccaagttcaatagaagggggtacaaaccagtaccaccacgaacaagcacttctgtttccccggtgatgttgtatagactgcttgcgtggttgaaagcgacggatccgttatccgcttatgtacttcgagaagcccagtaccacctcggaatcttcgatgcgttgcgctcagcactcaaccccagagtgtagcttaggctgatgagtctggacatccctcaccggtgacggtggtccaggctgcgttggcggcctacctatggctaacgccatgggacgctagttgtgaacaaggtgtgaagagcctattgagctacataagaatcctccggcccctgaatgcggctaatcccaacctcggggcaggtggtcacaaaccagtgattggcctgtcgtaacgcgcaagtccgtggcggaaccgactactttgggtgtccgtgtttccttttattttattgtggctgcttatggtgacaatcacagattgttatcataaagcgaattggattggccatccggtgaaagtgagattcattatctatctgtttgctggattcgctccattgagtgtgtttactctaagtacaacttcaacagttatttcaatcagacaattgtatcata

SEQ ID NO: 19831 - DNA, 713 bp, synthetic construct
  source 1..713: mol_type = other DNA
cagagacccacgtggcggctagtactccggtattgcggtacccttgtacgcctgttttatactcccttcccgtaacttagacgcacaaaaccaagttcaatagaagggggtacaaaccagtaccaccacgaacaagcacttctgtttccccggtgatgttgtatagactgcttgcgtggttgaaagcgacggatccgttatccgcttatgtacttcgagaagcccagtaccacctcggaatcttcgatgcgttgcgctcagcactcaaccccagagtgtagcttaggctgatgagtctggacatccctcaccggtgacggtggtccaggctgcgttggcggcctacctatggctaacgccatgggacgctagttgtgaacaaggtgtgaagagcctattgagctacataagaatcctccggcccctgaatgcggctaatcccaacctcggggcaggtggtcacaaaccagtgattggcctgtcgtaacgcgcaagcccgtggcggaaccgactactttgggtgtccgtgtttccttttattttattgtggctgcttatggtgacaatcacagattgttatcataaagcgaattggattggccatccggtgaaagtgagattcattatctatctgtttgctggattcgctccattgagtgtgtttactctaagtacaatttcaacagttatttcaatcagacaattgtatcata

SEQ ID NO: 19832 - DNA, 713 bp, synthetic construct
  source 1..713: mol_type = other DNA
cagaggcccacgtggcggctagtactccggtattgcggtacccttgtacgcctgttttatactcccttcccgtaacttagacgcacaaaaccaagttcaatagaagggggtacaaaccagtaccaccgcgaacaagcacttctgtttccccggtgatgttgtatagactgcttgcgtggttgaaagcgacggatccgttatccgcttatgtacttcgagaagcccagtaccacctcggaatcttcgatgcgttgcgctcagcactcaaccccagagtgtagcttaggctgatgagtctggacatccctcaccggtgacggtggtccaggctgcgttggcggcctacctatggctaacgccatgggacgctagttgtgaacaaggtgtgaagagcctattgagctacataagaatcctccggcccctgaatgcggctaatcccaacctcggggcaggtggtcacaaaccagtgattggcctgtcgtaacgcgcaagtccgtggcggaaccgactactttgggtgtccgtgtttccttttattttattgtggctgcttatggtgacaatcacagattgttatcataaagcgaattggattggccatccggtgaaagtgagattcattatctatctgtttgctggattcgctccattgagtgtgtttactctaagtacaatttcaacagttatttcaattagacaattgtatcata

SEQ ID NO: 19833 - DNA, 695 bp, synthetic construct
  source 1..695: mol_type = other DNA
ttgttcccaccccagaggcccacgtggcggctagtactctggtattacggtacctttgtacgcctgttttatatcccctcccccgcaactttagaagcttaacaaaagttcaacagcaggggtgcaatccagcacctctacgaacaagcacttctgtttccccggtgatattacatagactgtacccacggtcaaaagtgattgatccgttatccgcttgagtacttcgagaagcctagtatcaccttggaatcttcgacgcgttgcgctcaacactctaccccgggtgtagcttaggctgatgagtctgggcactcctcaccggtgacggtggcccaggctgcgttggcggcctacccatggctaacgccatgggacgctagttgtgaacaaggtgtgaagagcctattgagctacttaagagtcctccggcccctgaatgcggctaatcctaaccacggagcaatcgctcacgatccagtgagtaggttgtcgtaatgcgtaagtctgtggcggaaccgactactttgggtgtccgtgtttcccttttattcatactggctgcttatggtgacaatttacagattgttaccatatagctattggattggccatccggtgttgtgttacacgtgttaaaatacttttctgcaagcaacaacaacattgtgtttgaaccataatagccattacaa

SEQ ID NO: 19834 - DNA, 742 bp, synthetic construct
  source 1..742: mol_type = other DNA
ttaaaacagcctgtgggttgttcccacccgcagggcccactgggcgctagcacactggtattgcggtacctttgtgcgcctgttttatccaccctccccaacagtaacttagaagcacgaataacgtggtcaacaggaagctcagtaaaccaactgggtcttgaccaagcacttctgttaccccggactgagtatcaaaaagctgctcgcgtggctgaaggagaaaacgtccgttacccggccaattacttcgagaaacccagtaccaccatggaggttgcgcagcgtttcgctccgcacaaccccagtgtagatcaggtcgatgagtcaccgcaatcctcacgggtgaccgtggcggtggctgcgctggcggcctgcccatggggcaacccatgggacgcttcaatactgacatggtgcgaagagtctattgagctaattggtagtcctccggcccctgaatgcggctaatcctaactgcggagcagatacccacacaccagtggacagtctgtcgtaatgggcaactctgcagcggaaccgactactttgggtgtccgtgtttcctttcatccttctattggctgcttatggtgacaattgagaggttgttaccatatagctattggattggccatccggtgagcaacagagcaattgtatttctctttgtaggatttgtgccgttgaattacaacaactacaacaccttactctacattatccacttaaacacgcggaa

SEQ ID NO: 19835 - DNA, 731 bp, synthetic construct
  source 1..731: mol_type = other DNA
tgtgggttgatcccacccacagggcccattgggcgctagcactctggtatcacggtacctttgtgcgcctgttttataccccctcccccaactgtaacttagaagtaacacacaccgatcaacagtcagcgtggcacaccagccacgttttgatcaagcacttctgttaccccggactgagtatcaatagactgctcacgcggttgaaggagaaagcgttcgttatccggccaactacttcgaaaaacctagtaacaccgtggaagttgcagagtgtttcgctcagcactaccccagtgtagatcaggtcgatgagtcaccgcattccccacgggcgaccgtggcggtggctgcgttggcggcctgcccatggggaaacccatgggacgctctaatgcagacatggtgcgaagagtctattgagctagttggtagtcctccggcccctgaatgcggctaatcctaactgcggagcacacaccctcaagccagagtgcagtgtgtcgtaacgggcaactctgcagcggaaccgactactttgggtgtccgtgtttcattttattcctatactggctgcttatggtgacaatggagagattgttaccatatagctattggattggccatccggtgaccaatagagctattatatatctctttgttaggtttataccacttagcttgaaagaggttaaaacattacaattcattgttaagttgaatacagcaaa

SEQ ID NO: 19836 - DNA, 746 bp, synthetic construct
  source 1..746: mol_type = other DNA
ttttaaaacagccctgtgggttgttcccacccacggggcccattgggcgctagcacactggtatcacggtacccttgtgcgcctgttttatccaccccctccccaatgcaacatagaagcacaaactaagtggtcaatagacggctcagtgcaccaactgggtttagaccaagcacttctgttaccccggactgagtatcaataggctgctcacgcggctgaaggagaaaacgttcgttacccggccaactacttcgagaagcccagtaccaccatgaaggttgcgcagtgtttcgttcagcacaaccccagtgtagatcaggtcgatgagtcaccgcaatccccacgggcgaccgtggcggtggctgcgctggcggcctgcccatggggtgacccatgggacgcttcaattccgacatggtgcgaagagcctattgagctagttggtagtcctccggcccctgaatgcggctaatcccaactgcggagcaagcacccacaaaccagtgggctgtttgtcgtaacgggcaactctgcagcggaaccgactactttgggtgtccgtgtttccttttattcctacactggctgcttatggtgacaattgaaagattgttgccatatagctattggattggccatccggtaacaaacagagctattatttacttatttgttggctttgtgccgttgaatttcaaagttataaaaaccataacctccatcttgacactcaacacagcaaa

SEQ ID NO: 19837 - DNA, 811 bp, synthetic construct
  source 1..811: mol_type = other DNA
ttaaaacagcctgtgggttgttaccacccacaggcgccacggggcgcttcgcacctgggatgcttaacgtcggatttgcggatccgatgtttattgcccctgtgcgcgcctgttatattcccttcccccttaagtaactttagaagtttataataacaaagaccaataggagtccaacatccagttggatcgcggtcaggcacttctgtctccccggacctagtagtgataggctgtacccacggccgaagatgaacccgtccgttatccggccagctacttcgagaagcctagtaacatcaaagatctgtcctggcgtttcgctcagcgcgtttccccccgcgtagatcgggctgatgggtctccgcataccccacgggcgaccgtggcggaggccgcgtggcggcccgcctatggcgaaagccataggacgccatttcagtgacagggtgtgaagagcctattgagctagttggtagtcctccggcccctgaatgcggctaatcctaaccacggagcgtccaccagcaaaccagctggaagggcgtcgtaacgggtaactctgtggcggaaccgactactttgggtgtccgtgtttccttttgatcctattgtggctgcttatggtgacaacttacagttgttatcataaagcttttggattggccatccggaaagagttaacagtttgttcgcttattgctctctcaaaacttccattgaggaaagcaatttatcttctcatttcattttacaagcttgataaaatttcaagtgctcatttagagttactcatccaactccatcaaat

SEQ ID NO: 19838 - DNA, 712 bp, synthetic construct
  source 1..712: mol_type = other DNA
cccacgtggcggctagcactccggtattacggtacccttgtgcgcctgttttatactcccctcccgcaacttagaagcacgaaaccaagttcaatagaagggggtacaaaccagtaccactacgaacaagcacttctgtttccccggtgacattgcatagactgctcacgcggttgaaagtgatcgatccgttacccgcttgtgtacttcgaaaagcctagtatcgccttggaatcttcgacgcgttgcgctcagcacccgaccccggggtgtagcttaggctgatgagtctggacattcctcaccggtgacggtggtccaggctgcgttggcggcctacctatggctaacgccataggacgttagatgtgaacaaggtgtgaagagcctattgagctacataagagtcctccggcccctgaatgcggctaatcctaaccacggagcaggcggtcgcgaaccagcgactggcttgtcgtaacgcgcaagtctgtggcggaaccgactactttgggtgtccgtgtttcctgttatttttatcatggctgcttatggtgacaatcagagattgttatcataaagcgaattggattggccatccggtgagtgttgtgtcaggtatacaactgcttgttggaaccactgtgttagctttacttctcatttaaccaattaatcaaaaacaacacgaggataaaacaataataccaca

SEQ ID NO: 19839 - DNA, 718 bp, synthetic construct
  source 1..718: mol_type = other DNA
cagagacccacgtggcggctagcactccggtattacggtacccttgtgcgcctgttttatactcccctcccgcaacttagaagcacgaaaccaagttcaatagaagggggtacaaaccagtaccactacgaacaagcacttctgtttccccggtgacattgcatagactgctcacgcggttgaaagtgatcgatccgttacccgcttgtgtacttcgaaaagcctagtatcgccttggaatcttcgacgcgttgcgctcagcacccgaccccggggtgtagcttaggctgatgagtctggacattcctcaccggtgacggtggtccaggctgcgttggcggcctacctatggctaacgccataggacgttagatgtgaacaaggtgtgaagagcctattgagctacataagagtcctccggcccctgaatgcggctaatcctaaccacggaacaggcggtcgcgaaccagtgactggcttgtcgtaacgcgcaagtctgtggcggaaccgactactttgggtgtccgtgtttcctgttatttttatcatggctgcttatggtgacaatcagagattgttatcataaagcgaattggattggccatccggtgagtgttgtgtcaggtatacaactgtttgttggaaccactgtgttagctttacttctcatttaaccaattaatcaaaaacaatacgaggataaaacaacaatactaca

SEQ ID NO: 19840 - DNA, 718 bp, synthetic construct
  source 1..718: mol_type = other DNA
cagagacccacgtggcggctagcactccggtattacggtacccttgtgcgcctgttttatactcccctcccgcaacttagaagcacgaaaccaagttcaatagaagggggtacaaaccagtaccactacgaacaagcacttctgtttccccggtgacattgcatagactgctcacgcggttgaaagtgatcgatccgttacccgcttgtgtacttcgaaaagcctagtatcgccttggaatcttcgacgcgttgcgctcagcacccgaccccggggtgtagcttaggctgatgagtctggacattcctcaccggtgacggtggtccaggctgcgttggcggcctacctatggctaacgccataggacgttagatgtgaacaaggtgtgaagagcctattgagctacataagagtcctccggcccctgaatgcggctaatcctaaccacggagcaggcggtcgcgaaccagtgactggcttgtcgtaacgcgcaagtctgtggcggaaccgactactttgggtgtccgtgtttcctgttatttttatcatggctgcttatggtgacaatcagagattgttatcataaagcgaattggattggccatccggtgagtgttgtgtcaggtatacaactgtttgttggaaccactgtgttagctttacttctcatttaaccaattaatcaaaaacaatacgaggataaaacaacaatactaca

SEQ ID NO: 19841 - DNA, 718 bp, synthetic construct
  source 1..718: mol_type = other DNA
cagaggcccacgtggcggctagcactccggtattacggtacccttgtgcgcctgttttatactcccctcccgcaacttagaagcacgaaaccaagttcaatagaagggggtacaaaccagtaccactacgaacaagcacttctgtttccccggtgacattgcatagactgctcacgcggttgaaagtgatcgatccgttacccgcttgtgtacttcgaaaagcctagtatcgccttggaatcttcgacgcgttgcgctcagcacccgaccccggggtgtagcttaggctgatgagtctggacattcctcaccggtgacggtggtccaggctgcgttggcggcctacctatggctaacgccataggacgttagatgtgaacaaggtgtgaagagcctattgagctacataagagtcctccggcccctgaatgcggctaatcctaaccacggaacaggcggtcgcgaaccagtgactggcttgtcgtaacgcgcaagtctgtggcggaaccgactactttgggtgtccgtgtttcctgttatttttatcatggctgcttatggtgacaatcagagattgttatcataaagcgaattggattggccatccggtgagtgttgtgtcaggtatacaactgtttgttggaaccactgtgttagctttacttctcatttaaccaattaatcaaaaacaatacgaggataaaacaacaatactaca

SEQ ID NO: 19842 - DNA, 718 bp, synthetic construct
  source 1..718: mol_type = other DNA
cagaggcccacgtggcggctagcactccggtattacggtacccttgtgcgcctgttttatactcccctcccgcaacttagaagcacgaaaccaagttcaatagaagggggtacaaaccagtaccactacgaacaagcacttctgtttccccggtgacattgcatagactgctcacgcggttgaaagtgatcgatccgttacccgcttgtgtacttcgaaaagcctagtatcgccttggaatcttcgacgcgttgcgctcagcacccgaccccggggtgtagcttaggctgatgagtctggacattcctcaccggtgacggtggtccaggctgcgttggcggcctacctatggctaacgccataggacgttagatgtgaacaaggtgtgaagagcctattgagctacataagagtcctccggcccctgaatgcggctaatcctaaccacggagcaggcggtcgcgaaccagtgactggcttgtcgtaacgcgcaagtctgtggcggaaccgactactttgggtgtccgtgtttcctgttatttttatcatggctgcttatggtgacaatcagagattgttatcataaagcgaattggattggccatccggtgagtgttgtgtcaggtatacaactgtttgttggaaccactgtgttagctttacttctcatttaaccaattaatcaaaaacaatacgaggataaaacaacaatactaca

SEQ ID NO: 19843 - DNA, 718 bp, synthetic construct
  source 1..718: mol_type = other DNA
cagaggcccacgtggcggctagcactccggtattacggtacccttgtgcgcctgttttatactcccctcccgcaacttagaagcacgaaaccaagttcaatagaagggggtacaaaccagtaccaccacgaacaagcacttctgtttccccggtgacattgcatagactgctcacgcggttgaaagtgatcgatccgttacccgcttgtgtacttcgaaaagcctagtatcgccttggaatcttcgacgcgttgcgctcagcacccgaccccggggtgtagcttaggctgatgagtctggacattcctcaccggtgacggtggtccaggctgcgttggcggcctacctatggctaacgccataggacgctagatgtgaacaaggtgtgaagagcctattgagctacataagagtcctccggcccctgaatgcggctaatcctaaccacggagcaggcggtcgcgaaccagtgactggcttgtcgtaacgcgcaagtctgtggcggaaccgactactttgggtgtccgtgtttcctgttatttttatcatggctgcttatggtgacaatcagagattgttatcataaagcgaattggattggccatccggtgagtgttgtgtcaggtatacaactgtttgttggaaccactgtgttagctttacttctcatttaaccaattaatcaaaaacaatacgaggataaaacaacaatactaca

SEQ ID NO: 19844 - DNA, 718 bp, synthetic construct
  source 1..718: mol_type = other DNA
cagaggcccacgtggcggctagcactccggtattacggtacccttgtgcgcctgttttatactcccctcccgcaacttagaagcacgaaaccaagttcaatagaagggggtacaaaccagtaccactacgaacaagcacttctgtttccccggtgacattgcatagactgctcacgcggttgaaagtgatcgatccgttacccgcttgtgtacttcgaaaagcctagtatcgccttggaatcttcgacgcgttgcgctcagcacccgaccccggggtgtagcttaggctgatgagtctggacattcctcaccggtgacggtggtccaggctgcgttggcggcctacctatggctaacgccataggacgttagatgtgaacaaggtgtgaagagcctattgagctacataagagtcctccggcccctgaatgcggctaatcctaaccacggaacaggcggtcgcgaaccagtgactggcttgtcgtaacgcgcaagtctgtggcggaaccgactactttgggtgtccgtgtttcctgttatttttatcatggctgcttatggtgacaatcagagattgttatcataaagcgaattggattggccatccggtgagtgttgtgtcaggtatacaactgtttgttggaaccactgtgttagctttacttctcatttaaccaattaatcaaaaacaatacgaggataaaacaacaatactacg

SEQ ID NO: 19845 - DNA, 718 bp, synthetic construct
  source 1..718: mol_type = other DNA
cagaggcccacgtggcggctagcactccggtattacggtacccttgtgcgcctgttttatactcccctcccgcaacttagaagcacgaaaccaagttcaatagaagggggtacaaaccagtaccactacgaacaagcacttctgtttccccggtgacattgcatagactgctcacgcggttgaaagtgatcgatccgttacccgcttgtgtacttcgaaaagcctagtaacgccttggaatcttcgacgcgttgcgctcagcacccgaccccggggtgtagcttaggctgatgagtctggacattcctcaccggtgacggtggtccaggctgcgttggcggcctacctatggctaacgccataggacgttagatgtgaacaaggtgtgaagagcctattgagctacataagagtcctccggcccctgaatgcggctaatcctaaccacggagcaggcggtcgcgaaccagtgactggcttgtcgtaacgcgcaagtctgtggcggaaccgactactttgggtgtccgtgtttcctgttatttttatcatggctgcttatggtgacaatcagagattgttatcataaagcgaattggattggccatccggtgagtgttgtgtcaggtatacaactgtttgttggaaccactgtgttagctttacttctcatttaaccaattaatcaaaaacaatacgaggataaaacaacaatactaca

SEQ ID NO: 19846 - DNA, 718 bp, synthetic construct
  source 1..718: mol_type = other DNA
cagaggcccacgtggcggctagcactccggtattacggtacccttgtgcgcctgttttatactcccctcccgcaacttagaagcacgaaaccaagttcaatagaaaggggtacaaaccagtaccactacgaacaagcacttctgtttccccggtgacattgcatagactgctcacgcggttgaaagtgatcgatccgttacccgcttgtgtacttcgaaaagcctagtatcgccttggaatcttcgacgcgttgcgctcagcacccgaccccggggtgtagcttaggctgatgagtctggacattcctcaccggtgacggtggtccaggctgcgttggcggcctacctatggctaacgccataggacgctagatgtgaacaaggtgtgaagagcctattgagctacataagagtcctccggcccctgaatgcggctaatcctaaccacggagcaggcggtcgcgaaccagtgactggcttgtcgtaacgcgcaagtctgtggcggaaccgactactttgggtgtccgtgtttcctgttatttttatcatggctgcttatggtgacaatcagagattgttatcataaagcgaattggattggccatccggtgagtgttgtgtcaggtatacaactgtttgttggaaccactgtgttagctttacttctcatttaaccaattaatcaaaaacaatacgaggataaaacaacaatactaca

SEQ ID NO: 19847 - DNA, 718 bp, synthetic construct
  source 1..718: mol_type = other DNA
cagaggcccacgtggcggctagcactccggtattacggtacccttgtgcgcctgttttatactcccctcccgcaacttagaagcacgaaaccaagttcaatagaagggggtacaaaccagtaccactacgaacaagcacttctgtttccccggtgacattgcatagactgctcacgcggttgaaagtgatcgatccgttacccgcttgtgtacttcgaaaagcctagtatcgccttggaatcttcgacgcgttgcgctcagcacccgaccccggggtgtagcttaggctgatgagtctggacattcctcaccggtgacggtggtccaggctgcgttggcggcctacctatggctaacgccataggacgctagatgtgaacaaggtgtgaagagcctattgagctacataagagtcctccggcccctgaatgcggctaatcctaaccacggaacaggcggtcgcgaaccagtgactggcttgtcgtaacgcgcaagtctgtggcggaaccgactactttgggtgtccgtgtttcctgttatttttatcatggctgcttatggtgacaatcagagattgttatcataaagcgaattggattggccatccggtgagtgttgtgtcaggtatacaactgtttgttggaaccactgtgttagctttacttctcatttaaccaattaatcaaaaacaatacgaggataaaacaacaatactaca

SEQ ID NO: 19848 - DNA, 718 bp, synthetic construct
  source 1..718: mol_type = other DNA
cagaggcccacgtggcggctagcactccggtattacggtacccttgtgcgcctgttttatactcccctcccgcaacttagaagcacgaaaccaagttcaatagaagggggtacaaaccagtaccactacgaacaagcacttctgtttccccggtgacattgcatagactgctcacgcggttgaaagtgatcgatccgttacccgcttgtgtacttcgaaaagcctagtatcgccttggaatcttcgacgcgttgcgctcagcacccgaccccggggtgtagcttaggctgatgagtctggacattcctcaccggtgacggtggtccaggctgcgttggcggcctacctatggctaacgccataggacgttagatgtgaacaaggtgtgaagagcctattgagctacataagagtcctccggcccctgaatgcggctaatcctaaccacggaacaggcggtcacgaaccagtgactggcttgtcgtaacgcgcaagtctgtggcggaaccgactactttgggtgtccgtgtttcctgttatttttatcatggctgcttatggtgacaatcagagattgttatcataaagcgaattggattggccatccggtgagtgttgtgtcaggtatacaactgtttgttggaaccactgtgttagctttacttctcatttaaccaattaatcaaaaacaatacgaggataaaacaacaatactaca

SEQ ID NO: 19849 - DNA, 718 bp, synthetic construct
  source 1..718: mol_type = other DNA
cagaggcccacgtggcggctagcactccggtattacggtacccttgtgcgcctgttttatactcccctcccgcaacttagaagcacgaaaccaagttcaatagaagggggtacaaaccagtaccactacgaacaagcacttctgtttccccggtgacattgcatagactgctcacgcggttgaaagtgatcgatccgttacccgcttgtgtacttcgaaaagcctagtatcgccttggaatcttcgacgcgttgcgctcagcacccgaccccggggtgtagcttaggctgatgagtctggacattcctcaccggtgacggtggtccaggctgcgttggcggcctacctatggctaacgccataggacgttagatgtgaacaaggtgtgaagagcctattgagctacataagagtcctccggcccctgaatgcggctaatcctaaccacggagcaggcggtcgcgaaccagtgactggcttgtcgtaacgcgcaagtctgtggcggaaccgactactttgggtgtccgtgtttcctgttatttttatcatggctgcttatggtgacaatcagagattgttatcataaagcgaattggattggccatccggtgagtgttgtgtcaggtatacaactgtttgttggaaccactgtgttagctttacttctcattttaccaattaatcaaaaacaatacgaggataaaacaacaatactaca

SEQ ID NO: 19850 - DNA, 721 bp, synthetic construct
  source 1..721: mol_type = other DNA
ttcccacccacagggcccattgggcgtcagcacactggtatcacggtacctttgtgcgcctgttttatacaccctccccgaatgcaacttagaagctttacctagatggtcaatagaaggtccagcacaccagttgggctccgaccaagcacttctgttaccccggactgagtatcaataggccgtttgcacggctgaaggagaaaacgttcgttacccggccaattacttcgagaaacccagtaacaccatgaaggttgcgcagtgtatcgctccgcacgaccccggtgtagatcaggccgatgagccaccgcgttccccacgggcgaccgtggcggtggctgcgctggcggcctgcccatggggcaacccatgggacgctacaataccgacatggtgcgaagagtctattgagctaattggtagtcctccggcccctgaatgcggctaatcctaactgcggagcaggcaccctcaagccagagggcagcttgtcgtaacgggcaactctgcagcggaaccgactactttgggtgtccgtgtttcttttattcttgaactggctgcttatggtgacaattaaaagattgttaccatatagctattggattagccatccagtgacaaacagagcgattatatattcgtttgttggttttgttccattaaactataaagttttaaacacacttaaatttgtcttactactcaactcagcaaa

SEQ ID NO: 19851 - DNA, 687 bp, synthetic construct; identical to SEQ ID NO: 824
  source 1..687: mol_type = other DNA

SEQ ID NO: 19852 - DNA, 747 bp, synthetic construct
  source 1..747: mol_type = other DNA
gattttaaaacagcccgtgggttgttcccacccacggggcccattgggcgctagcacactggtatcacggtacccttgtgcgcctgttttatccaccccctccccaatgcaacatagaagcacaaactaagtggtcaatagacggctcagtgcaccaactgggtttagaccaagcacttctgttaccccggactgagtatcaataggctgctcacgcggctgaaggagaaaacgttcgttacccggccaactacttcgagaagcccagtaccaccatgaaggttgcgcagtgtttcgttcagcacaaccccagtgtagatcaggtcgatgagtcaccgcaatccccacgggcgaccgtggcggtggctgcgctggcggcctgcccatggggtgacccatgggacgcttcaattccgacatggtgcgaagagcctattgagctagttggtagtcctccggcccctgaatgcggctaatcccaactgcggagcaagcacccacaaaccagtgggctgtttgtcgtaacgggcaactctgcagcggaaccgactactttgggtgtccgtgtttccttttattcctacactggctgcttatggtgacaattgaaagattgttgccatatagctattggattggccatccggtaacaaacagagctattatttacttatttgttggctttgtgccgttgaatttcaaagttataaaaaccataacctccatcttgacactcaacacagcaaa

SEQ ID NO: 19853 - DNA, 726 bp, synthetic construct
  source 1..726: mol_type = other DNA
tgttcccacccacagggcctactgggcgctagcacactggtatcacggtacctttgtgcgcctgttttatagtccctccccccggacgcaacttagaagctgaacctaagcggtcaacaggcggctcagaacaccatctgggtctcgaccaagcacttctgtttccccggactgagtatcaataagctgcttacgcggctgaaggaaaaaacgtccgttatccggccaattacttcaagaaacccagtaccaccatgaaggttgcgcagcgtttcgctccgcacaaccccagtgtagatcaggtcgatgagtcaccgcattcctcacgggcgaccgtggcggtggctgcgctggcggcctgcccatgggacaacccatgggacgcttcaatactgacatggtgcgaagagtcaattgagctaattggtagtcctccggcccctgaatgcggctaatcctaactgtggagcagatgcccacgtaccagtgggtagtctgtcgtaacgggcaactccgcagcggaaccgactactttgggtgtccgtgtttctctttattcttatattggctgcttatggtgacaattgagagattgttaccatatagctattggattggccatccggtgacgaatagagcgattgtatatctttttgttggattcctaccattaaacaaaacaaattacaaaaccttgtgttacattattagattaaacacagcaaa

SEQ ID NO: 19854 - DNA, 719 bp, synthetic construct
  source 1..719: mol_type = other DNA
cacccacagggcccactgggcgctagtacactggtatcacggtacctttgtgcgcctgtttgacccaccttccccaaacgcaacttagaagcacaacttaaatggtcattagacggctcagtatgccaactgagtctcgatcaagcacttctgttaccccggactgagtaccaataggctgctcacgcggctgaaggggaaaccgttcgttacccgaccaactacttcgagaaacctagtaccaccatgaaagttgcgcagcgtttcgctccgcacaaccccagtgtagatcaggccgatgagtcaccgcaaaccccacgggcgactgtggcggtggctgcgctggcggcctgcccatgggacaactcatgggacgctacaatactgacatggtgcgaagagtctattgagctagttggtagtcctccggcccctgaatgcggctaatcctaactgtggagcagatacccacgcaccagtgggcagtctgtcgtaatgggcaactccgcagcggaaccgactactttgggtgtccgtgtttctttttattcctacgctggctacttatggtgacaattgagagactgtaaccatattgctatcgggttggccacctggtgaagaatagaacagttgctcacttgtttgtcagtcttgcaccgttgtaccataaagccttaactgcccctcaacaccgtcataacacttaacacgctgaa

SEQ ID NO: 19855 - DNA, 712 bp, synthetic construct
  source 1..712: mol_type = other DNA
cccacgtggcggccagtactccggtatcacggtacccttgtacgcctgttttattttcccttcccccgcaacttagaagcaatgaaaccaagttcaatagaagggggtacaaaccagtaccaccacgaacaagcacttctgtttccccggtgacgttgcatagactgtccccacggttgaaggcggctgatccgttatccgcttgtgtacttcgagaagcctagtaccatcttggaatctccgatgcgttgcgctcagcactcaaccccagagtgtagcttaggtcgatgagtctggacattccccaccggcgacggtggtccaggctgcgctggcggcctacctgtggtccaaaaccacaggacgctagttgtgaacaaggtgtgaagagcctattgagctacatgagagtcctccggcccctgaatgcggctaatcccaaccacggagcaggtgtttgcaatccagcaaatagcctgtcgtaacgcgcaagtctgtggcggaaccgactactttgggtgtccgtgtttccttttatttttatactggctgcttatggtgacaatctcggattgttatcatagagcaaattggattggccatccggtgaaaatcagaacgattatttaactttttgttggattaatatctttgacatcacatactccgaatctcattaagatagtgctcttgatacgacatcattgtcatt

SEQ ID NO: 19856 - DNA, 709 bp, synthetic construct; identical to SEQ ID NO: 854
  source 1..709: mol_type = other DNA

SEQ ID NO: 19857 - DNA, 724 bp, synthetic construct
  source 1..724: mol_type = other DNA
ttcccatccacagggcccactgggcgccagcactctggtattgcggtaccttagtgcgcctgttttatatacccaccccccaaatgtaatttagatgcatgtcaacaaagaccaatagtaagcgcagcacaccagctgtgttctggtcaagcacttctgttaccccggactgagtatcaataagctactcgcgtggctgaaggagaaaacgttcgttacccggccaattacttcgagaaacctagtaacaccatgaaggttgcgcagtgtttcgctccgcacaaccccagtgtagatcaggtcgatgagtcaccgcattccccacgggtgaccgtggcggtggctgcgctggcggcctgcccatggggtaacccatgggacgcttcaatactgacatggtgcgaagagtctattgagctaattggtagtcctccggcccctgaatgcggctaatcctaactgcggagcagatacccacacaccagtgggcagtctgtcgtaacgggcaactctgcagcggaaccgactactttgggtgtccgtgtttctctttatccttatactggctgcttatggtgacaattgagagattgttaccatatagctattggattggccatccggtgacgaatagagcaattgtgtatttgtttgttggttttataccattaaattacaaggttctaaacacccttaatcttattatagtattcaatacaataaa

SEQ ID NO: 19858 - DNA, 724 bp, synthetic construct
  source 1..724: mol_type = other DNA
ttcccatccacagggcccactgggcgccagcactctggtattgcggtaccttagtgcgcctgttttatatacccatcccccaaacgtaatttagatgcatgtcaacaaagaccaatagtaagcgcagcacaccagctgtgttccggtcaagcacttctgttaccccggactgagtatcaataagctactcacgtggctgaaggagaaaacgttcgttacccggccaattacttcgagaaacctagtaacaccatgaaggttgcgcagtgtttcgctccgcacaaccccagtgtagatcaggtcgatgagtcaccgcattccccacgggtgaccgtggcggtggctgcgctggcggcctgcccatggggtaacccatgggacgcttcaatactgacatggtgcgaagagtctattgagctaattggtagtcctccggcccctgaatgcggctaatcctaactgcggagcagatacccacacaccagtgggcagtctgtcgtaacgggcaactctgcagcggaaccgactactttgggtgtccgtgtttctctttatcctcatactggctgcttatggtgacaattgagagattgttaccatatagctattggattggccatccggtgacaaatagagcaattgtgtatttgtttgttggtctcataccattaaattacaaggttctaaacacccttaatcttattatagtattcaatacaacaaa

SEQ ID NO: 19859 - DNA, 724 bp, synthetic construct
  source 1..724: mol_type = other DNA
ttcccatccacagggcccactgggcgctagcactctggtattgcggtaccttagtgcgcctgttttatatacccctcccccaaatgtaatttagacgcatgccaacaaagaccaatagcaagcgcagcacaccagctgtgtttcggtcaagcacttctgttaccccggactgagtatcaataagctactcacgtggctgaaggagaaaacgttcgttaccccgccaattacttcgagaaacctagtaacaccatggaggttgcgcagtgtttcgctcagcacaaccccagtgtagatcaggtcgatgagtcaccgcattccccacgggtgaccgtggcggtggctgcgttggcggcctgcccatggggtaacccatgggacgcttcaatactgacatggtgcgaagagtctattgagctaattggtagtcctccggcccctgaatgcggctaatcctaactgcggagcagatacccacacaccagtgggcagtctgtcgtaatgggcaactctgcagcggaaccgactactttgggtgtccgtgtttctttttatttttatactggctgcttatggtgacaattgagagattgttaccatatagctattggattggccatccggtgacaaatagagcaattgtgtttttgtttgttggtttcataccattaaattataaggttctaaacaccctcaatcttattatagcattcaatacaataaa

SEQ ID NO: 19860 - DNA, 719 bp, synthetic construct
  source 1..719: mol_type = other DNA
cacccacagggcccactgggcgccagtacactggtatcacggtacctttgtgcgcctgtttgactcaccttccccaaacgcaacttagaagcataacttaaatggtcattaggcggctcagtatgccaactgagtctcgatcaagcacttctgttaccccggactgagtaccaataggctgctcacgcggctgaaagggaaaccgttcgttacccgaccaactacttcgagaaacctagtaccaccatgaaagttgcgcggcgtttcgctccgcacaaccccagtgtagatcaggccgatgagtcaccgcaaaccccacgggcgaccgtggcggtggctgcgctggcggcctgcccatgggacaacccatgggacgccacaatactgacatgatgcgaagagtctattgagctagttggtagtcctccggcccctgaatgcggctaatcccaactgtggagcaaatacccacgcaccagtgggcagtctgtcgtaatgggcaactctacagcggaaccgactactttgggtgtccgtgtttctttttattcctacgctggctacttatggtgacaattgagagactgtaaccatattgctatcgggttggccacctggtgaagaataaaacagttgctcacttgtttgtcagtcttgcaccgtcgtgccacaaagtcttaactgcccctcaacatcgtcataatactaaacacgctgaa

SEQ ID NO: 19861 - DNA, 720 bp, synthetic construct
  source 1..720: mol_type = other DNA
cccacccacagggcccactgggcgttagcacactggtatcacggtacccttgtgcgcctgttttatctaccctaccccattgtaacttagaagctaaccaagtacggtcattaggcagctcagtatgccaactgagttttgaccaagcacttctgttaccccggactgagtatcaataggctgtttgcgcggctgaaggagaaaacgttcgttacccgaccaattacttcgagaaacccagtatcaccatggaagttgcgcagtgtttcgctccacacaaccccagtgtagatcaggccgatgagtcaccgcattccccacgggcgaccgtggcggtggctgcgctggcggcctgcccatgggtcaacccatgggacgcttcaaaactgacatggtgtgaagagtctattgagctaattggtagtcctccggcccctgaatgcggctaatcctaactgcggagcagatacccacacgccagtgggcggtctgtcgtaacgggcaactctgcagcggaaccgactactttgggtgtccgtgtttccttttatctctatactggctgcttatggtgacaattgagagattgttaccatatagctattggattggccatccggtgacaaacagagcgattatttacctatttgttggttttgtaccattaaattttaaagttttgaaaactctcaaccttgttttggcatttaacgcagcaag

SEQ ID NO: 19862 - DNA, 740 bp, synthetic construct
  source 1..740: mol_type = other DNA
ttaaaccaacctgtgggttgctcccacccgcagggcccactgggcgctagcacactggtattgcggtacctttgtgcgcctgttttatccacccccccaacagtaatttagaagcacgaacaatgtgaccaacaggaggcccagtaaaccaactgggttatggtcaagtacttctgttaccccggaccgagtatcaataagctgctcgcgtggctgaaggagaaaacgtccgttacccggccaattacttcgagaaacttagtaccaccatgaaagttgcgatgcgtttcgctccgcacaaccccagtgtagatcaggtcgatgagtcaccgcaatcctcacgggcgaccgtggcggtggctgcgctggcggcctgcccatggggcgacccatgggacgcttcaatactgacatggtgtgaagagtctattgagctaattggtagtcctccggcccctgaatgcggctaatcctaactgcggagcagacatccacacaccagtggacagtctgtcgtaatgggtaactctgcagcggaaccgactactttgggtgtccgtgtttccttttatcttttattggctgcttatggtgacaattgagagattgttaccatatagctattggattggccatccggtgagcgacagagcaatcatattcctctttattggatttataccactaaattacaacaactataacaccttgctttacattatccacttaaactcgcagaa

SEQ ID NO: 19863 - DNA, 740 bp, synthetic construct
  source 1..740: mol_type = other DNA
aaacagcctgtgggttgttcccacccacagggcccactgggcgctagcactctggtatcatggtacctttgtgcgcctgttttatccaccctccccaaaatgcaacttagaagcataatccaaacggtcattaggtagctcagtacaccaactgagcccagaccaagcacttctgtcaccccggaccgagtatcaataggctgctcgcgcggctgaaggagaaaacgttcgttatccggccaattacttcgagaaacccagtaccactatgaaagttgcgcagcgtttcgttccgcacaaccccagtgtagatcaggtcgatgagtcaccgcgttccccacgggcgaccgtggcggtggctgcgttggcggcctgcccatggggcaacctatgggacgcttcaatactgacatggtgtgaagagtctattgagctaattggtagtcctccggcccctgaatgcggctaatcctaactgcggagcagatgctcacaaaccagtgggcagtctgtcgtaatgggtaactctgcagcggaaccgactactttgggtgtccgtgtttcctttcatttttacactggctgcttatggtgacaattgagagattgttaccatatagctattggattggccatccggtgactaacagagcaattgtttacctatttattggttttgtaccgttagattacaaagttctaaagactctgaatcttattatagcactcaatacagtaaa

SEQ ID NO: 19864 - DNA, 722 bp, synthetic construct
  source 1..722: mol_type = other DNA
cccacccacagggcctactgggcgctagcacactggtatcacggtacctttgtgcgcctgttttatagtccctccccccggacgcatcttagaagctgaacctaagtggtcaacaggcggctcagaacaccatctgggtctcgaccaagcacttctgtttccccggactgagtatcaataagctgcttacgcggctgaaggaaaaaacgtccgttatccggccaattacttcaagaaacccagtaccaccatgaaggttgcgcagcgtttcgctccgcacaaccccagtgtagatcaggtcgatgagtcaccgcattcctcacgggcgaccgtggcggtggctgcgctggcggcctgcccatggggcaacccatgggacgcttcaatactgacatggtgcgaagagtcaattgagctaattggtagtcctccggcccctgaatgcggctaatcctaactgtggagcagatgcccacgtaccagtgggtagtctgtcgtaacgggcaactccgcagcggaaccgactactttgggtgtccgtgtttctctttattcttatgttggctgcttatggtgacaattgagagattgttaccatatagctattggattggccatccggtgacgaatagagcgattgtatatctttttgttggattcgtaccattaaacaaaacaaattacaaaaccttgtgttacattattaaattaaacacagcaaa

SEQ ID NO: 19865 - DNA, 741 bp, synthetic construct
  source 1..741: mol_type = other DNA
ttaaaacagcctgtgggttgttcccacccacagggcccactgggcgctagcacactggtatcatggtacctttgtgtgcctgttttatttcccttccccagatgcaacttagaagcaacactccacgaccaatagcaggcgtggcacaccagccatgtcttggtcaagcacttctgtaaccccggactgagtatcaataaactgctcacgcggtcgaaggagaaaacgtccgttacccggctaactacttcgagaaacctagtaacgccatgaaaattgcgaggtgtttcgctcagcacatccccagtgtagatcaggtcgatgagtcaccgcattccccacaggtaactgtggcggtggctgcgttggcggcctgcccatggggtgacccatgggacgcttcaatacggacatggtgtgaagagtctattgagctagttggtagtcctccggcccctgaatgcggctaatcctaactgtggagcatgcgcccccaatccagagggtagcgtgtcgtaacgggtaactccgcagcggaaccgactactttgggtgtccgtgtttctttttattcttatattggctgcttatggtgacaattgaaaggttgttgccatatagctattggattggccacccagtgacaaacagagcaataatttaccaatttgtgggatttgttccaataagtttgaaagtcttgaagacacttaatctaatattacaactcaatagtgcaaa

SEQ ID NO: 19866 - DNA, 803 bp, synthetic construct
  source 1..803: mol_type = other DNA
cctgtgggttgttcccacccacagggcccactgggcgccagtacactggtacgccagtactgcggtatcacggtatcacagtatgccagtacctttgtacgcctgttttataccctttccccacatgtaatcttagaagtttaagcaagtaaagaccaacaggagtccaacatccagttggattgcggtcaaacacttctgtttccccggacctagtagtgataggctgtacccacggccgaagacgaacccgtccgttatccggccagctacttcgagaagcccagtagcatcaaagatctgtcttggcgtttcgctcagcgcgtttcccccgcgtagatcgggctgatgggtctccgcattccccacgggcgaccgtggcggaggccgcgtggcggcccgcctatggcgaaagccataggacgccatttcagtgacagggtgtgaagagcctattgagctagttggtagtcctccggcccctgaatgcggctaatcctaaccacggagcgtccgccagcaaaccagccggcagggcgtcgtaacgggcaactctgtggcggaaccgactactttgggtgtccgtgtttccttttgatcctatattggctgcttatggtgacaacgataagttgttatcataaagcttttgggttggccacccggagaaagttgtcagtatttgatattgctcggctctcgcgcctaccaataagacaagctttatatttattggtttcattttatccttctaaggaaatcactgaaactcatttgttattactgcttacattgtcagcgat

SEQ ID NO: 19867 - DNA, 721 bp, synthetic construct
  source 1..721: mol_type = other DNA
acccaccccagaggcccacgtggcggctagtactccggtattgcggtacccttgtacgcctgttttatactcccttcccgtaacttagacgcacaaaaccaagttcaatagaagggggtacaaaccagtaccaccacgaacaagcacttctgtttccccggtgatgttgtatagactgcttgcgtggttgaaagcgacggatccgttatccgcttatgtacttcgagaagcccagtaccacctcggaatcttcgatgcgttgcgctcagcactcaaccccagagtgtagcttaggctgatgagtctggacatccctcaccggtgacggtggtccaggctgcgttggcggcctacctatggctaacgccatgggacgctagttgtgaacaaggtgtgaagagcctattgagctacataagaatcctccggcccctgaatgcggctaatcccaacctcggggcaggtggtcacaaaccagtgattggcctgtcgtaacgcgcaagtccgtggcggaaccgactactttgggtgtccgtgtttccttttattttattgtggctgcttatggtgacaatcacagattgttatcataaagcgaattggattggccatccggtgaaagtgagattcattatctatctgtttgctggattcgctccattgagtgtgtttactctaagtacaatttcaacagttatttcaatcagacaattgtatcata

SEQ ID NO: 19868 - DNA, 722 bp, synthetic construct
  source 1..722: mol_type = other DNA
cccacccacagggcctactgggcgctagcacactggtatcacggtacctttgtgcgcctgttttatagtccctccccccggacgcaacttagaagctgaacctaagcggtcaacaggcggctcagaacaccatctgggtctcgaccaagcacttctgtttccccggactgagtatcaataagctgcttacgcggctgaaggaaaaaacgtccgttatccggccaattacttcaagaaacccagtaccaccatgaaggttgcgcagcgtttcgctccgcacaaccccagtgtagatcaggtcgatgagtcaccgcattcctcacgggcgaccgtggcggtggctgcgctggcggcctgcccatggggcaacccatgggacgcttcaatactgacatggtgcgaagagtcaattgagctaattggtagtcctccggcccctgaatgcggctaatcctaactgtggagcagatgcccacgtaccagtgggtagtctgtcgtaacgggcaactccgcagcggaaccgactactttgggtgtccgtgtttctctttattcttatgttggctgcttatggtgacaattgagagattgttaccatatagctattggattggccatccggtgacgaatagagcgattgtatatctttttgttggattcgtaccattaaacaaaacaaattacaaaaccttgtgttacattattagattaaacacagcaaa

SEQ ID NO: 19869 - DNA, 729 bp, synthetic construct
  source 1..729: mol_type = other DNA
ttgttcccacctacagggcccactgggcgctagcacactggtatcacggtacctttgtgcgcctgttttatgcttcctcccccactatagtaatttagaagcttgaactatacggccaacagacaacccggtacaccaaccggaccccggccaagcacttctgtatccccggactgagtatcagtaggctgctcgcgcggctgaaggagaaaacgttcgttacccggccacttacttcgagaaacctagtaacgccatgaaagttgcgcagcgtttcgctccgcacaaacccagtgtagatcaggtcgatgagtcaccgcatcccccacgggcgaccgtggcggtggctgcgttggcggcctgcccatggggtaacccatgggacgcttcaatactgacatggtgcgaagagtctattgagctaagtggtggtcctccggcccctgaatgcggctaatcctaactgcggagcagatacccacactccagtgggcagtctgtcgtaacgggcaactctgcagcggaaccgactactttgggtgtccgtgtttccttttgtcttttacactggctgcttatggtgacaattgaaagattgttaccatatagctattggattggccatccggtgtcaaacagagcaattatttacttgtttgttggttatatacctctcaataccaaggttctaaaaacacttaactacatcttgttattgaatacgttgaa

SEQ ID NO: 19870 - DNA, 720 bp, synthetic construct
  source 1..720: mol_type = other DNA
cccacccatagggcccactgggcgttagcacactggtattccggtacctttgtgcgcctgttttatttaccctctcccagagtaacttagaagcataatctatgtggtcaatagacagcccagtgcaccaactgggtcccgaccaagcacttctgttgccccggaccgagtatcaataggctgctcacgcggctgaaggagaaagcgttcgttacccggccaattacttcgagaaacttagtagcaccatgaaggttgcgcagcgtttcgctccgcacaaccccagtgtagatcaggtcgatgagtcaccgcgttcctcacgggcgaccgtggcggtggctgcgttggcggcctgcccatgaggcaactcatgggacgcttcaatactgacatggtgtgaagagtctattgagctaattggtagtcctccggcccctgaatgcggctaatccttactgcggagcagatacccacaaaccagtgggcggtctgtcgtaacgggcaactccgcagcggaaccgactactttgggtgtccgtgtttccttttattccaaatttggctgcttatggtgacaattgaaaggttgttaccatatagctattggattggccatccggtaacaagcagagcgattgtttatctgtttgttggtttcgttccattaaattataaagttttaaacacactcaattatattttattactcaactcagggaa

SEQ ID NO: 19871 - DNA, 730 bp, synthetic construct
  source 1..730: mol_type = other DNA
gtgggttgttcccacccacagggcccactgggcgtttgcacactggtatcgcggtacctttgtgcgcctgttttatccaccctcctctaattgaatttagaagtcaagcacaaccggtcaacagatagcccagcataccagctgggtttcgaccaagcacttctgtttacccgggctgagtatcaataggctgctcacgcggctgaaggagaaaacgttcgttacccggccaaatacttcgagaaacctagtaccgccatggacgttgcgcagcgtttcgttccacgcaaccccagtgtagatcaggtcgatgagtcaccgcatcccccacgggcgaccgtggcggtggctgcgctggcggcctgcccatggggtaacccatgggacgcttcaatgctgacatggtgcgaagagtctattgagctatttggtagtcctccggcccctgaatgcggctaatcctaactgcggagcagacacccacacgccagtgggcagtctgtcgtaacgggcaactccgcagcggaaccgactactttgggtgtccgtgtttctttttattctttcattggctgcttatggtgacaattgagaggttgttaccatatagctattggattggccatccggtgagcaacagagcaattatatttctttttgttggatatataccacttgactctaataactacaataccctgctttatattctccaattgaatacgaaaag

SEQ ID NO: 19872 - DNA, 730 bp, synthetic construct
  source 1..730: mol_type = other DNA
gtgggttgttcccacccacagggcccactgggcgtttgcacactggtatcgcggtacctttgtgcgcctgttttatccaccctcccctaattgaatttagaagtcaagcacaaccggtcaacagatggcccagcataccagctgggtttcgaccaagcacttctgtttacccgggctgagtatcaataggctgctcacgcggctgaaggagaaaacgttcgttacccggccaattacttcgagaaacctagtaccgccatggacgttgcgcagcgtttcgttccacgcaaccccagtgtagatcaggtcgatgagtcaccgcatcccccacgggtgaccgtggcggtggctgcgctggcggcctgcccatggggtaacccatgggacgcttcaatgctgacatggtgcgaagagtctattgagctaattggtagtcctccggcccctgaatgcggctaatcctaactgcggagcagacacccacacgccagtgggcagtctgtcgtaacgggcaactccgcagcggaaccgactactttgggtgtccgtgtttctttttattctttcattggctgcttatggtgacaattgagaggttgttaccatatagctattggattggccatccggtgagcaacagagcaattatatttctttttgttggatatataccacttgactctaataactacaataccctgctttatattctccaattgaatacgaaaag

SEQ ID NO: 19873 - DNA, 799 bp, synthetic construct
  source 1..799: mol_type = other DNA
tgtgggttgttcccacccacagggcccactgggcgccagtacactggtatgctttacctcggtattgcggtaccgttgtatacagtacctttgtacgcctgttttaaatcccctccccaaatgtaaccttagaagtttaagtaaactcagaccaataggagtccaacacccagttggattacggtcaagcacttctgtctccccggacctagtagtgataggctgtacccacggccgaagatgaacccgtccgttatccggccagctacttcgagaagcctagtagcatcaaaaatctgtcttggcgtttcgctcagcgcgttccccccgcgtagatcgggctgatgggtctccgcattccccacgggcgaccgtggcggaggccgcgtggcggcccgcctatggcgaaagccataggacgccatttcagtgacagggtgtgaagagcctattgagctagttggtagtcctccggcccctgaatgcggctaatcctaaccacggagcgtccgccaacaatccagttggtagggcgtcgtaacgggtaactctgtggcggaaccgactactttgggtgtccgtgtttccttttgatcctattttggctgcttatggtgacaacgataagttgttatcataaagcttttgggttggccacctggaaaaagatatcagtgtttgatattgttcggctctcacgcctaccaacaaaacaagctctatatttattaatttcattttatccattggaggatattaccgaattccatctacaacttttgctcactttatcagcaaa

SEQ ID NO: 19874 - DNA, 721 bp, synthetic construct
  source 1..721: mol_type = other DNA
cccacccgcagggcccaccgggcgctagcacactggtatctcggtacctttgtgcgcctgttttatagcccctcccccgaatgtaacgtagaagctgaacccaagtggtcaataggcggctcagaacaccatctgggtcttgaccaagcacttctgttaccccggactgagtatcaacaagctgctcacgcggctgaaggagaaaacgttcgttacccggccaattacttcgagaagcccagtaccaccatgaaggttgcgcagcgtttcgctccgcacaaccccagtgtagatcaggccgatgagtcaccgcgttcctcacgggtgaccgtggcggtggctgcgctggcggcctgcccatggggtaacccatgggacgcttcaatactgacatggtgcgaagagtcgattgagctaattggtagtcctccggcccctgaatgcggctaatcctaactgcggagcagatgcccaagctccagtgggtagtctgtcgtaatgggtaactctgcagcggaaccgactactttgggtgtccgtgtttccttttattcttacattggctgcttatggtgacaattgagagattgttaccatatagctattggattggccatccggtgacaaatagagcaattatatatctttttgtcggattcgtaccactcgacaaaacaaatttccaaaccttgtgttacattgttagactaaatacagcaaa

SEQ ID NO: 19875 - DNA, 721 bp, synthetic construct
  source 1..721: mol_type = other DNA
cacccacccatagggcccaccgggcgccagcactctggtatcatggtacctttgtgcgcctgttttatataacccttcccccagttgaaacctagaagtaatgcctcccgaccaacagcaggcgtggcacaccagccatgtcttggtcaagcacttctgtttcccggactgagtatcaatagactgctcacgcggttgaaggagaaaacgttcgttaaccggccaaccacttcgagaaacctagtagcaccatgaatattgcgaagtgtttcgctcagcactaccccagtgtagatcaggccgatgagtcaccgcattccccacgggtgaccgtggcggtggctgcgttggcggcctgcccatggggcaacccatgggacgcttcaatgtggacatggtgcgaagagtctattgagctggttggtagtcctccggcccctgaatgcggctaatcctaactgcggagcacgcgccctcactccagagggtagcgtgtcgtaacgggcaactctgcagcggaaccgactactttgggtgtccgtgtttccttttatattttattggctgcttatggtgacaatcaaagaattgttaccatatagctattggattggccatccggtgtctaatagagccttcatttatctatttgttggttacacaccacttaacaccaagccttaaatacccttaattacatcttattattgaatactataaa

SEQ ID NO: 19876 - DNA, 716 bp, synthetic construct
  source 1..716: mol_type = other DNA
cacagggcccactgggcgctagtacactggtatcacggtacctttgtgcgcctgtttgacccaccttccccaaacgcaacttagaagcacaacttaaatggtcattagacggctcagtatgccaactgagtctcgatcaagcacttctgttaccccggactgagtaccaataggctgctcacgcggctgaaggggaaaccgttcgttacccgaccaactacttcgagaaacctagtaccaccatgaaagttgcgtagcgtttcgctccgcacaaccccagtgtagatcaggccgatgagtcaccgcaaaccccacgggcgactgtggcggtggctgcgctggcggcctgcccatgggacaactcatgggacgctacaatactgacatggtgcgaagagtctattgagctagttggtagtcctccggcccctgaatgcggctaatcctaactgtggagcagatacccacgcaccagtgggcagtctgtcgtaatgggcaactccgcagcggaaccgactactttgggtgtccgtgtttcctttttattcctacgctggctacttatggtgacaattgagagactgtaaccatattgctatcgggttggccacctggtgaagaatagaacagttgctcgcttgtttgtcagtcttgaaccgttgtaccataaagccttaactgcccctcaacaccgtcataacacttaacacgctgaa

SEQ ID NO: 19877 - DNA, 737 bp, synthetic construct
  source 1..737: mol_type = other DNA
cctgtgggttgatcccacccacagggcccattgggcgctagcacactggtatcacggtacctttgtgcgcctgttttatccatcccttcccaaattgcaacttagaagcatgctacaatcggatcaataggtggttcagtaaaccaactgagccttgaccaagtacttctgttaccccggactgagtatcaataggctgctcgcgtggctgatggagaaaacgtccgttacccgaccaattacttcgagaaacctagtaccaccatgaaagttgcgcagcgtttcgctccgcacaaccccagtgtagatcaggtcgatgagtcaccgcgttccccacgggcgaccgtggcggtggctgcgttggcggcctgcccatggggtaacctatgggacgcttcaatactgacatggtgcgaagagtctattgagctaattggtagtcctccggcccctgaatgcggctaatcctaactgcggagcagatacccacgcaccagtgggcagtctgtcgtaacgggcaactctgcagcggaaccgactactttgggtgaccgtgtttccttttatttcaatgctggctgctttatggtgacaattgaaagattgttaccatatagctattggattggccatccggtgacaaaaaaaacaattatctacctgtttattggctttatacctctcaattacaaggttataaatactcttaacttcattttaatgcttaacacagcaaa

SEQ ID NO: 19878 - DNA, 803 bp, synthetic construct
  source 1..803: mol_type = other DNA
cctgtgggttgttcccacccacagggcccactgggcgccagtacactggtatgtcagtactttggtattacggtaccattgtacgccagtacctttgtacgcctgttttatatcccttcccccacacgtaactttagaagtttgatcaaacagaccaataggagtccaacaaccagttggattgcggtcaagcacttctgtctccccggacctagtagtgataggctgtacccacggccgaagatgaacccgtccgttacccggccagctacttcgagaagcctagtagcatcaaagatctgtcttggcgtttcgctcagcgcgttcccccccgcgtagatcgggctgatgggtctccgcatcccccacgggcgaccgtggcggaggccgcgtggcggcccgcctatggcgaaagccataggacgccatttcagtgacagggtgtgaagagcctattgagctagttggtagtcctccggcccctgaatgcggctaatcctaaccatggagcgtccgccagcaaaccagctggtagggcgtcgtaacgggcaactccgtggcggaaccgactactttgggtgtccgtgtttccttttgatcctattgtggctgcttatggtgacaacttacagttgttatcataaagcttttggattggccatccggaaggagttaacagtttgttcgctcatcgctttatcaaagctacctttgagaaaggcaatttatttgttaatttcattttataaacttgaagatatatcaagtgctcacttggatttactcatacaactatatcaaac

SEQ ID NO: 19879 - DNA, 735 bp, synthetic construct
  source 1..735: mol_type = other DNA
ccccctgggttgttcccacccacagggcccaccgggcgctagcacactggtatctcggtacccttgtgcgcctgttttatccacccttttcccatttaacttagaagcacgcgccaagacggtcaaaagggagcccagtaagccaattgggctatgaccaagcactcctgtaaccccgggccgagtatcaataagctgctcgcgcggctgaaggagaaaaagctcgttacccggccaattacttcgagaaacccagtagcatcatgaaagttgcgcagcgtttcgctccacacaaccccagtgtagatcaggtcgatgagtcaccgcgttccccacgggtgaccgtggcggtggctgcgctggcggcctgcccatggggccacccatgggacgcttcaatactgacatggtgtgaagagtctattgagctaattggtagtcctccggcccctgaatgcggctaatcctaactgcggagcagatgcccacacaccagtgggaagtctgtcgtaacgggtaactctgcagcggaaccgactactttgggtgtccgtgtttccttttatttctactctggctgcttatggtgacaattgaaaggttgttaccatatagctattggattggccatccggtgtcacatagagcgattatttacttgtttgttgggtttataccactgaactataaagttttaaatactcttaactacattttaatccttaactcattaaa

SEQ ID NO: 19880 - DNA, 727 bp, synthetic construct
  source 1..727: mol_type = other DNA
ttcccaccccagaggcccacgtggcggccagtactccggtattacggtacccttgtacgcctgttttatactcccttcccctgtaacttagaagcatacaaaccaagttcaatagaagggggtacaaaccagtaccaccacgaacaagcactcctgtttccccggtgacattgcatagactgtacccacggttgaaagcgatcgatccgttacccgctcctgtacttcgagaagcctagtatcatcttggaatcttcgatgcgttgcgctcagcactcaaccccagagtgtagcttaggctgatgagtctggacgtcccccaccggcgacggtggtccaggctgcgttggcggcctacctgtggcccaaagccacaggacgctagttgtgaacaaggtgtgaagagcctattgagctacaagagagtcctccggcccctgaatgcggctaatcctaaccacggagcaggcagttgcaaaccagcaaccggcctgtcgtaacgcgcaagtctgtggcggaaccgactactttgggtgtccgtgtttccttttatttttacaatggctgcttatggtgacaatcatagattgttatcataaagcgacttggattggccatccggtgaaagtgaaacacattgtttacttgtttgttggattcactccgattaactcttttacttacaaactcattacaacaactctattaattagagataagcgtcaca

SEQ ID NO: 19881 - DNA, 708 bp, synthetic construct
  source 1..708: mol_type = other DNA
gcccacgtggcggctagtacactggtatcacggtacctttgtacgcctgttttatactccctcccccgcaacttagaagcatacaattcaagctcaataggagggggtgcaagccagcgcctccgtgggcaagcactactgtttccccggtgaggccgcatagactgttcccacggttgaaagtgtccgatccgttatccgctcatgtacttcgagaagcctagtatcgctctggaatcttcgacgcgttgcgctcagcactcaaccccggagtgtagcttgggccgatgagtctggacagtccccactggcgacagtggtccaggctgcgctggcggcccacctgtggcccaaagccacgggacgctagttgtgaacagggtgtgaagagcctattgagctacatgagagtcctccggcccctgaatgcggctaatcctaaccatggagcaggcagctgcaacccagcagccagcctgtcgtaacgcgcaagtccgtggcggaaccgactactttgggtgtccgtgtttccttttattcttgaatggctgcttatggtgacaatcatagattgttatcataaagcgagttggattggccatccagtgtgaatcagattaattactcccttgtttgttggatccactcccgaaacgttttactccttaacttattgaaattgtttgaagacaggatttcagtgtcaca

SEQ ID NO: 19882 - DNA, 799 bp, synthetic construct
  source 1..799: mol_type = other DNA
tgtgggttgtacccacccacagggcccaccgggcgccagtacactggtacgccagtaccatggtattacggtaccatgttacgtcagtacctttgtacgcctgttttatatcccctccccgaagtaaccttagaagtttaagtaacaaagaccaataggagtccagcaaccagctggattgcggtcaagcacttctgtctccccggacctagtagtgataggctgtacccacggccgaagatgaacccgtccgttatccggccagctacttcgagaagcctagtagcatcaaagatctgtcttggcgtttcgctcagcgcgtttcccccgcgtagatcgggctgatgggtctccgcatcccccacgggcgaccgtggcggaggccgcgtggcggcccgcctatggcgaaagccataggacgctatttcagtgacagggtgtgaagagcctattgagctagttggtagtcctccggcccctgaatgcggctaatcctaaccacggagcgtccaccagcaaaccagctggcggggcgtcgtaacgggtaactctgtggcggaaccgactactttgggtgtccgtgtttccttttgatcctattttggctgcttatggtgacaacaataagttgttatcataaagcttttgggttggccacctggaaaaagttatcagtgtttgatattgttcggctttcacgcctaccaacaaaacaagccttatatttattggttgccttttgtcccttggcggaaattactgattttcacctaaagcttctgattacattgacggcaaa

SEQ ID NO: 19883 - DNA, 726 bp, synthetic construct
  source 1..726: mol_type = other DNA
gtgttcccacccacggggcctactgggcgccagcacactggtatcacggtacctttgtgcgcctgttttataacccctcccccgaatgtaacgtagaagctgaacctaagcggtcaataggcggctcagaacaccatctgggtcttgaccaagcacttctgttaccccggactgagtatcaataagctgcttacgcggctgaaggagaaaacgttcgttacccggccaattacttcaagaaacccagtaccaccatgaaggttgcgcagcgtttcgctccacacaaccccagtgtagatcaggtcgatgagtcaccgcgttcctcacgggcgaccgtggcggtggctgcgctggcggcctgcccatggggcaacccatgggacgcttcaatactgacatggtgcgaagagtcaattgagctaattggtagtcctccggcccctgaatgcggctaatcctaactgcggagcagacgcccaagctccagtgggtagtctgtcgtaacgggtaactctgcagcggaaccgactactttgggtgtccgtgtttccttttattcttacattggctgcttatggtgacaattgagagattgttaccatatagctattggattggccatccggtgacaaatagagcaattgtatatctttttgttggattcatatcactcgacaaaacaaatttcagaaccttgtgttatattattagattaaatacagcaaa

SEQ ID NO: 19884 - DNA, 719 bp, synthetic construct
  source 1..719: mol_type = other DNA
cacccacagggcccactgggcgctagtacactggtatcacggtacctttgtgcgcctgtttgacccaccttccccaaacgcaacttagaagcacagcttaaatggtcattagacggctcagtatgccaactgagtctcgatcaagcacttctgttaccccggactgagtaccaataggctgctcacgcggctgaaggggaaaccgttcgttacccgaccaactacttcgagaaacctagtaccaccatgaaagttgcgcagcgtttcgctccgcacaaccccagtgtagatcaggccgatgagtcaccgcaaaccccacgggcgactgtggcggtggctgcgctggcggcctgcccatgggacaactcatgggacgctacaatactgacatggtgcgaagagtctattgagctagttggtagtcctccggcccctgaatgcggctaatcctaactgtggagcagatacctacgcaccagtgggcagtctgtcgtaatgggcaactccgcagcggaaccgactactttgggtgtccgtgtttctttttattcctacgctggctacttatggtgacaattgagagactgtaaccatattgctatcgggttggccacctggtgaagaatagaacagttgctcacttgtttgtcagtcttgcaccgttgtaccataaagccttaactgcccctcaacaccgtcataacacttaacacgctgaa

SEQ ID NO: 19885 - DNA, 713 bp, synthetic construct
  source 1..713: mol_type = other DNA
cagaggcccacgtggcggctagtacactggtatcacggtacctttgtacgcctgttttatactccctcccccgcaacttagaagcatacaattcaagctcaataggagggggtgcaagccagcgcctccgtgggcaagcactactgtttccccggtgaggccgcatagactgttcccacggttgaaagtgtccgatccgttatccgctcatgtacttcgagaagcctagtatcgctctggaatcttcgacgcgttgcgctcagcactcaaccccggagtgtagcttgggccgatgagtctggacagtccccactggcgacagtggtccaggctgcgctggcggcccacctgtggcccaaagccacgggacgctagttgtgaacagggtgtgaagagcctattgagctacatgagagtcctccggcccctgaatgcggctaattctaaccatggagcaggcagctgcaacccagcagccagcctgtcgtaacgcgcaagtccgtggcgaaaccgactactttgggtgtccgtgtttccttttattcttgaatggctgcttatggtgacaatcatagattgttatcataaagcgagttggattggccatccagtgtgaatcagattaattactcccttgtttgttggatccactcccgaaacgttttactccttaacttattgaaattgtttgaagacaggatttcagtgtcaca

SEQ ID NO: 19886 - DNA, 713 bp, synthetic construct
  source 1..713: mol_type = other DNA
cagaggcccacgtggcggctagtacactggtatcacggtacctttgtacgcctgttttatactccctcccccgcaacttagaagcatacaattcaagctcaataggagggggtgcaagccagcgcctccgtgggcaagcactactgtttccccggtgaggccgcatagactgttcccacggttgaaagtgtccgatccgttatccgctcatgtacttcgagaagcctagtatcgctctggaatcttcgacgcgttgcgctcagcactcaaccccggagtgtagcttgggccgatgagtctggacagtccccactggcgacagtggtccaggctgcgctggcggcccacctgtggcccaaagccacgggacgctagttgtgaacagggtgtgaagagcctattgagctacatgagagtcctccggcccctgaatgcggctaattctaaccatggagcaggcagctgcaacccagcagccagcctgtcgtaacgcgcaagtccgtggcggaaccgactactttgggtgtccgtgtttccttttattcttgaatggctgcttatggtgacaatcatagattgttatcataaagcgagttggattggccatccagtgtgaatcagattaattactcccttgtttgttggatccactcccgaaacgttttactccttaacttattgaaattgtttgaagacaggatttcagtgtcaca

SEQ ID NO: 19887 - DNA, 713 bp, synthetic construct
  source 1..713: mol_type = other DNA
cagagacccacgtggcggctagtacactggtatcacggtacctttgtacgcctgttttatactccctcccccgcaacttagaagcatacaattcaagctcaataggagggggtgcaagccagcgcctccgtgggcaagcactactgtttccccggtgaggccgcatagactgttcccacggttgaaagtgtccgatccgttatccgctcatgtacttcgagaagcctagtatcgctctggaatcttcgacgcgttgcgctcagcactcaaccccggagtgtagcttgggccgatgagtctggacagtccccactggcgacagtggtccaggctgcgctggcggcccacctgtggcccaaagccacgggacgctagttgtgaacagggtgtgaagagcctattgagctacatgagagtcctccggcccctgaatgcggctaattctaaccatggagcaggcagctgcaacccagcagccagcctgtcgtaacgcgcaagtccgtggcggaaccgactactttgggtgtccgtgtttccttttattcttgaatggctgcttatggtgacaatcatagattgttatcataaagcgagttggattggccatccagtgtgaatcagattaattactcccttgtttgttggatccactcccgaaacgttttactccttaacttattgaaattgtttgaagacaggatttcagtgtcaca

SEQ ID NO: 19888 - DNA, 713 bp, synthetic construct
  source 1..713: mol_type = other DNA
cagaggcccacgtggcggctagtacactggtatcacggtacctttgtacgcctgttttatactccctcccccgcaacttagaagcatacaattcaagctcaataggagggggtgcaagccagcgcctccgtgggcaagcactactgtttccccggtgaggccgcatagactgttcccacggttgaaagtgtccgatccgttatccgctcatgtacttcgagaagcctagtatcgctctggaatcttcgacgcgttgcgctcagcactcaaccccggagtgtagcttgggccgatgagtctggacagtccccactggcgacagtggtccaggctgcgctggcggcccacctgtggcccaaagccacgggacgctagttgtgaacagggtgtgaagagcctattgagctacatgagagtcctccggcccctgaatgcggctaatcctaaccatggagcaggcagctgcaacccagcagccagcctgtcgtaacgcgcaagtccgtggcggaaccgactactttgggtgtccgtgtttccttttattcttgaatggctgcttatggtgacaatcatagattgttatcataaagcgagttggattggccatccagtgtgaatcagattaattactcccttgtttgttggatccactcccgaaacgttttactccttaacttattgaaattgtttgaagacaggatttcagtgtcaca

SEQ ID NO: 19889 - DNA, 713 bp, synthetic construct
  source 1..713: mol_type = other DNA
cagaggcccacgtggcggctagtacactggtatcacggtacctttgtacgcctgttttatactccctcccccgcaacttagaagcatacaattcaagctcaataggagggggtgcaagccagcgcctccgtgggcaagcactactgtttccccggtgaggccgcatagactgttcccacggttgaaagtgtccgatccgttatccgctcatgtacttcgagaagcctagtatcgctctgggatcttcgacgcgttgcgctcagcactcaaccccggagtgtagcttgggccgatgagtctggacagtccccactggcgacagtggtccaggctgcgctggcggcccacctgtggcccaaagccacgggacgctagttgtgaacagggtgtgaagagcctattgagctacatgagagtcctccggcccctgaatgcggctaattctaaccatggagcaggcagctgcaacccagcagccagcctgtcgtaacgcgcaagtccgtggcggaaccgactactttgggtgtccgtgtttccttttattcttgaatggctgcttatggtgacaatcatagattgttatcataaagcgagttggattggccatccagtgtgaatcagattaattactcccttgtttgttggatccactcccgaaacgttttactccttaacttattgaaattgtttgaagacaggatttcagtgtcaca

SEQ ID NO: 19890 - DNA, 713 bp, synthetic construct
  source 1..713: mol_type = other DNA
cagaggcccacgtggcggctagtacactggtatcacggtacctttgtacgcctgttttatactccctcccccgcaacttagaagcatacaattcaagctcaataggagggggtgcaagccagcgcctccgtgggcaagcactactgtttccccggtgaggccgcatagactgttcccacggttgaaagtgtccgatccgttatccgctcatgtacttcgagaagcctagtatcgctctggaatcttcgacgcgttgcgctcagcactcaaccccggagtgtagcttgggccgatgagtctggacagtccccactggcgacagtggtccaggctgcgctggcggcccacctgtggcccaaagccacgggacgctagttgtgaacagggtgtgaagagcctattgagctacatgagagtcctccggcccctgaatgcggctaattctaaccatggagcaggcagctgcaacccagcagccagcctgtcgtaacgcgcaagtccgtggcggaaccgactactttgggtgtccgtgtttccttttattcttgaatggctgcttatggtgacaatcatagattgttatcataaagcgagttggattggccatccagtgtgaatcagattaattactcccttgtttgttggatccactcccgaaacgttttactccttaacttattgaaattgtttgaagacaggacttcagtgtcaca

SEQ ID NO: 19891 - DNA, 713 bp, synthetic construct
  source 1..713: mol_type = other DNA
cagaggcccacgtggcggctagtacactggtatcacggtacctttgtacgcctgttttatactccctcccccgcaacttagaagcatacaattcaagctcaataggagggggtgcaagccagcgcctccgtgggcaagcactactgtttccccggtgaggccgcatagactgttcccacggttgaaagtgtccgatccgttatccgctcatgtacttcgagaagcctagtatcgctctggaatcttcgacgcgttgcgctcagcactcaaccccggagtgtagcttgggccgatgagtctggacagtccccactggcgacagtggtccaggctgcgctggcggcctacctgtggcccaaagccacgggacgctagttgtgaacagggtgtgaagagcctattgagctacatgagagtcctccggcccctgaatgcggctaattctaaccatggagcaggcagctgcaacccagcagccagcctgtcgtaacgcgcaagtccgtggcggaaccgactactttgggtgtccgtgtttccttttattcttgaatggctgcttatggtgacaatcatagattgttatcataaagcgagttggattggccatccagtgtgaatcagattaattactcccttgtttgttggatccactcccgaaacgttttactccttaacttattgaaattgtttgaagacaggatttcagtgtcaca

SEQ ID NO: 19892 - DNA, 713 bp, synthetic construct
  source 1..713: mol_type = other DNA
cagagacccacgtggcggctagtacactggtatcacggtacctttgtacgcctgttttatactccctcccccgcaacttagaagcatacaattcaagctcaataggagggggtgcaagccagcgcctccgtgggcaagcactactgtttccccggtgaggccgcatagactgttcccacggttgaaagtgtccgatccgttatccgctcatgtacttcgagaagcctagtatcgctctggaatcttcgacgcgttgcgctcagcactcaaccccggagtgtagcttgggccgatgagtctggacagtccccactggcgacagtggtccaggctgcgctggcggcccacctgtggcccaaagccacgggacgctagttgtgaacagggtgtgaagagcctattgagctacatgagagtcctccggcccctgaatgcggctaatcctaaccatggagcaggcagctgcaacccagcagccagcctgtcgtaacgcgcaagtccgtggcggaaccgactactttgggtgtccgtgtttccttttattcttgaatggctgcttatggtgacaatcatagattgttatcataaagcgagttggattggccatccagtgtgaatcagattaattactcccttgtttgttggatccactcccgaaacgttttactccttaacttattgaaattgtttgaagacaggatttcagtgtcaca

SEQ ID NO: 19893 - DNA, 713 bp, synthetic construct
  source 1..713: mol_type = other DNA
cagaggcccacgtggcggctagtacactggtatcacgatacctttgtacgcctgttttatactccctcccccgcaacttagaagcatacaattcaagctcaataggagggggtgcaagccagcgcctccgtgggcaagcactactgtttccccggtgaggccgcatagactgttcccacggttgaaagtgtccgatccgttatccgctcatgtacttcgagaagcctagtatcgctctggaatcttcgacgcgttgcgctcagcactcaaccccggagtgtagcttgggccgatgagtctggacagtccccactggcgacagtggtccaggctgcgctggcggcccacctgtggcccaaagccacgggacgctagttgtgaacagggtgtgaagagcctattgagctacatgagagtcctccggcccctgaatgcggctaattctaaccatggagcaggcagctgcaacccagcagccagcctgtcgtaacgcgcaagtccgtggcggaaccgactactttgggtgtccgtgtttccttttattcttgaatggctgcttatggtgacaatcatagattgttatcataaagcgagttggattggccatccagtgtgaatcagattaattactcccttgtttgttggatccactcccgaaacgttttactccttaacttattgaaattgtttgaagacaggatttcagtgtcaca

SEQ ID NO: 19894 - DNA, 713 bp, synthetic construct
  source 1..713: mol_type = other DNA
cagagacccacgtggcggctagtacactggtatcacggtacctttgtacgcctgttttatactccctcccccgcaacttagaagcatacaattcaagctcaataggagggggtgcaagccagcgcctccgtgggcaagcactactgtttccccggtgaggccgcatagactgttcccacggttgaaagtgtccgatccgttatccgctcatgtacttcgagaagcctagtatcgctctggaatcttcgacgcgttgcgctcagcactcaaccccggagtgtagcttgggccgatgagtctggacagtccccactggcgacagtggtccaggctgcgctggcggcccacctgtggcccaaagccacgggacgctagttgtgaacagggtgtgaagagcctattgagctacatgagagtcctccggcccctgaatgcggctaatcctaaccatggagcaggcagctgcaacccagcagccagcctgtcgtaacgcgcaagtccgtggcggaaccgactactttgggtgtccgtgtttccttttattcttgaatggctgcttatggtgacaatcatagattgttatcataaagcgagttggattggccatccagtgtgaatcagattaattactcccttgtttgttggatccactcccgaaacgttttattccttaacttattgaaattgtttgaagacaggatttcagtgtcaca

SEQ ID NO: 19895 - DNA, 713 bp, synthetic construct
  source 1..713: mol_type = other DNA
cagagacccacgtggcggctagtacactggtatcacggtacctttgtacgcctgttttatactccctcccccgcaacttagaagcatacaattcaagctcaataggagggggtgcaagccagcgcctccgtgggcaagcactactgtttccccggtgaggccgcatagactgttcccacggttgaaagtgtccgatccgttatccgctcatgtacttcgagaagcctagtatcgctctggaatcttcgacgcgttgcgctcagcactcaaccccggagtgtagcttgggccgatgagtctggacagtccccactggcgacagtggtccaggctgcgctggcggcccacctgtggcccaaagccacgggacgctagttgtgaacagggtgtgaagagcctattgagctacatgagagtcctccggcccctgaatgcggctaatcctaaccatggagcaggcagctgcaacccagcagccagcctgtcgtaacgcgcaagtccgtggcggaaccgactactttgggtgtccgtgtttccttttattcttgaatggctgcttatggtgacaatcatagattgttaccataaagcgagttggattggccatccagtgtgaatcagattaattactcccttgtttgttggatccactcccgaaacgttttactccttaacttattgaaattgtttgaagacaggatttcagtgtcaca

SEQ ID NO: 19896 - DNA, 713 bp, synthetic construct
  source 1..713: mol_type = other DNA
cagaggcccacgtggcggctagtacactggtatcacggtacctttgtacgcctgttttatactccctcccccgcaacttagaagcatacaattcaagctcaataggagggggtgcaagccagcgcctccgtgggcaagcactactgtttccccggtgaggccgcatagactgttcccacggttgaaagtgtccgatccgttatccgctcatgtacttcgagaagcctagtatcgctctggaatcttcgacgcgttgcgctcagcactcaaccccggagtgtagcttgggccgatgagtctggacagtccccactggcgacagtggtccaggctgcgctggcggcccacctgtggcccaaagccacgggacgctagttgtgaacagggtgtgaagagcctattgagctacatgagagtcctccggcccctgaatgcggctaattctaaccatggagcaggcagctgcaacccagcagccagcctgtcgtaacgcgcaagtccgtggcggaaccgactactttgggtgtccgtgtttccttttattcttgaatggctgcttatggtgacaatcatagattgttatcataaagcgtgttggattggccatccagtgtgaatcagattaattactcccttgtttgttggatccactcccgaaacgttttactccttaacttattgaaattgtttgaagacaggatttcagtgtcaca

SEQ ID NO: 19897 - DNA, 713 bp, synthetic construct
  source 1..713: mol_type = other DNA
cagagacccacgtggcggctagtacactggtatcacggtacctttgtacgcctgttttatactccctcccccgcaacttagaagcatacaattcaagctcaataggagggggtgcaagccagcgcctccgtgggcaagcactactgtttccccggtgaggccgcatagactgttcccacggttgaaagtgtccgatccgttatccgctcatgtacttcgagaagcctagtatcgctctggaatcttcgacgcgttgcgctcagcactcaaccccggagtgtagcttgggccgatgagtctggacagtccccactggcgacagtggtccaggctgcgctggcggcccacctgtggcccaaagccacgggacgctagttgtgaacagggtgtgaagagcctattgagctacatgagagtcctccggcccctgaatgcggctaattctaaccatggagcaggcagctgcaacccagcagccagcctgtcgtaacgcgcaagtccgtggcgaaaccgactactttgggtgtccgtgtttccttttattcttgaatggctgcttatggtgacaatcatagattgttatcataaagcgagttggattggccatccagtgtgaatcagattaattactcccttgtttgttggatccactcccgaaacgttttactccttaacttattgaaattgtttgaagacaggatttcagtgtcaca

SEQ ID NO: 19898 - DNA, 713 bp, synthetic construct
  source 1..713: mol_type = other DNA
cagaggcccacgtggcggctagtacactggtatcacggtacctttgtacgcctgttttatactccctcccccgcaacttagaagcatacaattcaagctcaataggagggggtgcaagccagcgcctccgtgggcaagcactactgtttccccggtgaggccgcatagactgttcccacggttgaaagtgtccgatccgttatccgctcatgtacttcgagaagcctagtatcgctctggaatcttcgacgcgttgcgctcagcactcaaccccggagtgtagcttgggccgatgagtctggacagtccccactggcgacagtggtccaggctgcgctggcggcccacctgtggcccaaagccacgggacgctagttgtgaacagggtgtgaagagcctattgagctacatgagagtcctccggcccctgaatgcggctaatcctaaccatggagcaggcagctgcaacccagcagccagcctgtcgtaacgcgcaagtccgtggcggaaccgactactttgggtgtccgtgtttccttttattcttgaatggctgcttatggtgacaatcatagattgttatcataaagcgagttggattggccatccagtgtgaatcagattaattactcccttgtttgttggatccactcctgaaacgttttactccttaacttattgaaattgtttgaagacaggatttcagtgtcaca

SEQ ID NO: 19899 - DNA, 713 bp, synthetic construct
  source 1..713: mol_type = other DNA
cagaggcccacgtggcggctagtacactggtatcacggtacctttgtacgcctgttttatactccctcccccgcaacttagaagcatacaattcaagctcaataggagggggtgcaagccagcgcctccgtgggcaagcactactgtttccccggtgaggccgcatagactgttcccacggttgaaagtgtccgatccgttatccgctcatgtacttcgagaagcctagtatcgctctggaatcttcgacgcgttgcgctcagcactcaaccccggagtgtagcttgggccgatgagtctggacagtccccactggcgacagtggtccaggctgcgctggcggcccacctgtggcccaaagccacgggacgctagttgtgaacagggtgtgaagagcctattgagctacatgagagtcctccggcccctgaatgcggctaattctaaccatggagcaggcagctgcaacccagcagccagcctgtcgtaacgcgcaagtccgtggcgaaaccgactactttgggtgtccgtgtttccttttattcttgaatggctgcttatggtgacaatcatagattgttatcataaagcgagttggattggccatccagtgtgaatcagattaattactcccttgtttgctggatccactcccgaaacgttttactcctcaacttattgaaattgtttgaagacaggatttcagtgtcaca

SEQ ID NO: 19900 - DNA, 713 bp, synthetic construct
  source 1..713: mol_type = other DNA
cagaggcccacgtggcggctagtacactggtatcacggtacctttgtacgcctgttttatactccctcccccgcaacttagaagcatacaattcaagctcaataggagggggtgcaagccagcgcctccgtgggcaagcactactgtttccccggtgaggccgcatagactgttcccacggttgaaagtgtccgatccgttatccgctcatgtacttcgagaagcctagtatcgctctggaatcttcgacgcgttgcgctcagcactcaaccccggagtgtagcttgggccgatgagtctggacagtccccactggcgacagtggtccaggctgcgctggcggcccacctgtggcccaaagccacgggacgctagttgtgaacagggtgtgaagagcctattgagctacatgagagtcctccggcccctgaatgcggctaatcctaaccatggagcaggcagctgcaacccagcagccagcctgtcgtaacgcgcaagtccgtggcggaaccgactactttgggtgtccgtgtttccttttattcttgaatggctgcttatggtgacaatcatagattgttatcataaagcgagttggattggccatccagtgtgaatcagattaattactcccttgtttgttggttccactcccgaaacgttttactccttaacttattgaaattgtttgaagacaggatttcagtgtcaca

SEQ ID NO: 19901 - DNA, 713 bp, synthetic construct
  source 1..713: mol_type = other DNA
cagagacccacgtggcggctagtacactggtatcacggtacctttgtacgcctgttttatactccctcccccgcaacttagaagcatacaattcaagctcaataggagggggtgcaagccagcgcctccgtgggcaagcactactgtttccccggtgaggccgcatagactgttcccacggttgaaagtgtccgatccgttatccgctcatgtacttcgagaagcctagtatcgctctggaatcttcgacgcgttgcgctcagcactcaaccccggagtgtagcttgggccgatgagtctggacagtccccactggcgacagtggtccaggctgcgctggcggcccacctgtggcccaaagccacgggacgctagttgtgaacagggtgtgaagagcctattgagctacatgagagtcctccggcccctgaatgcggctaatcctaaccatggagcaggcagctgcaacccagcagccagcctgtcgtaacgcgcaagtccgtggcggaaccgactactttgggtgtccgtgtttccttttattcttgaatggctgcttatggtgacaatcatagattgttatcataaagcgagttggattggccatccagtgtgaatcagattaattactcccttgtttgttggttccactcccgaaacgttttactccttaacttattgaaattgtttgaagacaggatttcagtgtcaca

SEQ ID NO: 19902 - DNA, 713 bp, synthetic construct
  source 1..713: mol_type = other DNA
cagaggcccacgtggcggctagtacactggtatcacggtacctttgtacgcctgttttatactccctcccccgcaacttagaagcatacaattcaagctcaataggagggggtgcaagccagcgcctccgtgggcaagcactactgtttccccggtgaggccgcatagactgttcccacggttgaaagtgtccgatccgttatccgctcatgtacttcgagaagcctagtatcgctctggaatcttcgacgcgttgcgctcagcactcaaccccggagtgtagcttgggccgatgagtctggacagtccccactggcgacagtggtccaggctgcgctggcggtccacctgtggcccaaagccacgggacgctagttgtgaacagggtgtgaagagcctattgagctacatgagagtcctccggcccctgaatgcggctaatcctaaccatggagcaggcagctgcaacccagcagccagcctgtcgtaacgcgcaagtccgtggcggaaccgactactttgggtgtccgtgtttccttttattcttgaatggctgcttatggtgacaatcatagattgttatcataaagcgagttggattggccatccagtgtgaatcagattaattactcccttgtttgttggatccactcccgaaacgttttactccttaacttattgaaattgtttgaagacaggattccagtgtcaca

SEQ ID NO: 19903 - DNA, 713 bp, synthetic construct
  source 1..713: mol_type = other DNA
cagaggcccacgtggcggctagtacactggtatcacggtacctttgtacgcctgttttatactccctcccccgcaacttagaagcatacaattcaagctcaataggagggggtgcaagccagcgcctccgtgggcaagcactactgtttccccggtgaggccgcatagactgttcccacggttgaaagtgtccgatccgttatccgctcatgtacttcgagaagcctagtatcgctctggaatcttcgacgcgttgcgctcagcactcaaccccggagtgtagcttgggccgatgagtctggacagtccccactggcgacagtggtccaggctgcgctggcggcccacctgtggcccaaagccacgggacgctagttgtgaacagggtgtgaagagcctattgagctacatgagagtcctccggcccctgaatgcggctaattctaaccatggagcaggcagctgcaacccagcagccagcctgtcgtaacgcgcaagtccgtggcgaaaccgactactttgggtgtccgtgtttccttttattcttgaatggctgcttatggtgacaatcatagattgttatcataaagcgagttggattggccatccagtgtgaatcagattaattactcccttgtttgttggatccactcccgaaacgttttactccttaacttactgaaattgtttgaagacaggatttcagtgtcaca

SEQ ID NO: 19904 - DNA, 713 bp, synthetic construct
  source 1..713: mol_type = other DNA
cagaggcccacgtggcggctagtacactggtatcacggtacctttgtacgcctgttttatactccctcccccgcaacttagaagcatacaattcaagctcaataggagggggtgcaagccagcgcctccgtgggcaagcactactgtttccccggtgaggccgcatagactgttcccacggttgaaagtgtccgatccgttatccgctcatgtacttcgagaagcctagtatcgctctggaatcttcgacgcgttgcgctcagcactcaaccccggagtgtagcttgggccgatgagtctggacagtccccactggcgacagtggtccaggctgcgctggcggcccacctgtggcccaaagccacgggacgctagttgtgaacagggtgtgaagagcctattgagctacatgagagtcctccggcccctgaatgcggctaatcctaaccatggagcaggcagctgcaacccagcagccagcctgtcgtaacgcgcaagtccgtggcggaaccgactactttgggtgtccgtgtttccttttattcttgaatggctgcttatggtgacaatcatagattgttatcataaagcgagttggattggccatccagtgtgaatcagattaactactcccttgtttgttggatccactcccgaaacgttttactccttaacttattgaaattgtttgaagacaggatttcagtgtcaca

SEQ ID NO: 19905 - DNA, 721 bp, synthetic construct
  source 1..721: mol_type = other DNA
cccacccacagggcccattgggcgctagcacactggtatcgtggtacctttgtgtgcctgttttatccaccccaccccgcaacgcattagaagcatgggtacacatggtcgataggtggctctgtaatccaactgagtctcgaccaagcacttctgttaccccggaccgagtatcaataggctgcttgcgcggctgaaggagaaagcgttcgttatccggccaattacttcgagaaacccagtaccatcatgaaggttgcgcggcgtttcgttccacacaaccccagtgtagatcaggctgatgagtcaccgcattccccacgggcgaccgtggcggtggctgcgctggcggcctgcccatggggcaacccatgggacgcttcaaaactgacatggtgcgaagagtctattgagctaattggtagtcctccggcccctgaatgcggctaatcctaactgcggagcagatacccacacaccagtgggcagtctgtcgtaacgggcaactctgcagcggaaccgactactttgggtgtccgtgtttccttttattcttatactggctgcctatggtgacaattgaaagattgttaccatatagctattggattggccatccggtgactaacagagcagttatttatctatttgttggatttgtaccaataaaccccaaagcttttaaaaccctaaatcttatattactattaaataaagcgaa

SEQ ID NO: 19906 - DNA, 720 bp, synthetic construct
  source 1..720: mol_type = other DNA
ccacccacagggcccactgggcgctagcactctggtatcacggtacctttgtgcgcctgttttgtatcccctttccccaattgcaacttagaagatgtacacactgatcaatagtgggcatagcacaccagttatgtcttgatcaagcactcctgtatccccggaccaagtatcaatagaccgctcacgcggttgaaggagaaaacgttcgtcacccggctaactacttcgagaaacccagtagtatcatggaagttgcgaggcgtttcgttcagcacatccccagtgtagatcaggtcgatgagtcaccgcgtcccccacgggcgaccgtggcggtggctgcgctggcggcctgcctacggggtaacccgtaggacgcctcaatacagacatggtgcgaagagtcgattgagctagttagtagtcctccggcccctgaatgcggctaatcctaactgcggagcacatgccctcaacccagggggtattgtgtcgtaacgggcaactctgcagcggaaccgactactttgggtgtccgtgtttccttttattcttatactggctgcttatggtgacaattgaaagattgttgccatatagctattggattggccatccagtgtctaatagagctattgtttacctctttgttggattcataccactcaacttaaaagaagttaaaacactacaactcattatacaactgaatacagcaag

SEQ ID NO: 19907 - DNA, 720 bp, synthetic construct
  source 1..720: mol_type = other DNA
ccacccacagggcccactgggcgctagcactctggtatcacggtacctttgtgcgcctgttttatatcccctttccccaattgcaacttagaagatgtacacactgatcaatagtgggcatagcacaccagttatgtcttgatcaagcactcctgtatccccggaccaagtatcaatagaccgctcacgcggttgaaggagaaaacgttcgttacccggctaactacttcgagaaacccagtagtatcatgaaagttgcgaggcgtttcgttcagcacatccccagtgtagatcaggtcgatgagtcaccgcgtcccccacgggcgaccgtggcggtggctgcgctggcggcctgcctacggggcaacccgtaggacgcctcaatacagacatggtgcgaagagtcgattgagctagttagtagtcctccggcccctgaatgcggctaatcctaactgcggagcacacgccctcaacccagggggtattgtgtcgtaacgggcaactctgcagcggaaccgactactttgggtgtccgtgtttccttttattcttatactggctgcttatggtgacaattgaaagattgttgccatatagctattggattggccatccagtgtctaatagagctattgtttacctctttgttggattcataccactcaacttaaaagaagttaaaacactacaactcattatacaactgaatacagcaag

SEQ ID NO: 19908 - DNA, 801 bp, synthetic construct
  source 1..801: mol_type = other DNA
tgtgggttgttcccacccacagggcccactgggcgctagtacactggtatgccttacctcggtattgcggtaccgttgtatacagtacctttgtacgcctgttttaaaatcccttccccaaatgtaaccttagaagctttagttgacaaagaccaataggagtccaacatccagttggattgcggtcaagcacttctgtctccccggacctagtagtgataggctgtacccacggccgaagatgaacccgtccgttatccggccagctacttcgagaagcctagtaacatcgaagatctgtcttggcgtttcgctcagcgcgtttccccccgcgtagatcgggctgatgggtctccgcacaccccacgggcgaccgtggcggaggccgcgtggcggcccgcctatggcgaaagccataggacgccatttcagtgacagggtgtgaagagcctattgagctagttggtagtcctccggcccctgaatgcggctaatcccaaccacggagcactcgccaacaagccagttggtagggtgtcgtaatgggtaactctgtggcggaaccgactactttgggtgtccgtgtttccttttgatcccattttggctgcttatggtgacaacaataagttgttatcataaagcttttgggttggccacctggaaaaagttatcagtgtttgatatcgtacggctttcacgcctgccaataagacaagctttgtatttgctgatttcattttattcagtgagagacattacagacgcacacctaaaccttttgctcgcactgtcagcagg

SEQ ID NO: 19909 - DNA, 811 bp, synthetic construct
  source 1..811: mol_type = other DNA
gccccgggggttgtacccacccccggggcccacgtggcgccagtactctggtacgctagtacctttgtacgcctgttttcccccccttaaacaaattaagattgctgggcctgtggggagtagtccgactccgcaccgatacgtcgcaccagtactccggtatgcttagtaccctagtacggagtgtccagtaacccttccccgaaacttagaagctatgcaccaaactgacccaagagggcgcgttgcatccagcagcgtgatggtcaagcacttctgtttccccggccgcgaggtcgttacccgcccgcaccactacgggaagcctattaggcagccaagtttgtgaagcgttgcgctcagccacaaccccagtggtagctctgagagatgggactcgtccgccccccatggtaacatggtgacttgtccgcgtgcgctctcgggttcacctcacggtgatcacgccgatcaaatgcaactgttgaagagcctactgtgctggagcggttttcctccggagccgtgaatgctgctaatcctaacctccgagcgtgtgcgcacaaaccagtgttgctacgtcgtaacgcgtaagttggaggcggaacagactactttcggtactccgtgtttcctttattttactatttcaatttatggtgacaattgttgagatttgtgatattgcgaaattacccttgaacattgctctgtattatttggttgcattctacaaaacctcggaaattcccagctcgtacatcgacttacttgtttacttgaacttgaagtataagttagagaacacaag

SEQ ID NO: 19910 - DNA, 731 bp, synthetic construct
  source 1..731: mol_type = other DNA
gtgggttgttcccacccacagggcccaccgggcgctagcacactggtatctcggtacccttgtgcgcctgttttatccacccttttcccatttaacttagaagcacgcgccaagacggtcaaaagggagcccagtaagccaattgggctatgaccaagcactcctgtaaccccgggccgagtatcaataagctgctcgcgcggctgaaggagaaaaagctcgttacccggccaattacttcgagaaacccagtagcatcatgaaagttgcgcagcgtttcgctccacacaaccccagtgtagatcaggtcgatgagtcaccgcgttccccacgggtgaccgtggcggtggctgcgctggcggcctgcccatggggccacccatgggacgcttcaatactgacatggtgtgaagagtctattgagctaattggtagtcctccggcccctgaatgcggctaatcctaactgcggagcagatgcccacacaccagtgggaagtctgtcgtaacgggtaactctgcagcggaaccgactactttgggtgtccgtgtttccttttatttctactctggctgcttatggtgacaattgaaaggttgttaccatatagctattggattggccatccggtgtcacatagagcgattatttacttgtttgttgggtttataccactgaactataaagttttaaatactcttaactacattttaatccttaactcattaaa

SEQ ID NO: 19911 - DNA, 747 bp, synthetic construct
  source 1..747: mol_type = other DNA
ttaaaacagctctggggttgttcccaccccagaggcccacgtggcggccagtactccggtattacggtacccttgtacgcctgttttatactcccttcccctgtaacttagaagcatacaaaccaagttcaatagaagggggtacaaaccagtaccaccacgaacaagcactcctgtttccccggtgacattgcatagactgtacccacggttgaaagcgatcgatccgttacccgctcctgtacttcgagaagcctagtatcatcttggaatcttcgatgcgttgcgctcagcactcaaccccagagtgtagcttaggctgatgagtctggacgtcccccaccggcgacggtggtccaggctgcgttggcggcctacctgtggcccaaagccacaggacgctagttgtgaacaaggtgtgaagagcctattgagctacaagagagtcctccggcccctgaatgcggctaatcctaaccacggagcaggcagttgcaaaccagcaaccggtctgtcgtaacgcgcaagtctgtggcggaaccgactactttgggtgtccgtgtttccttttatttttacaatggctgcttatggtgacaatcatagattgttatcataaagcgacttggattggccatccggtgaaagtaaaacacattgtttacttgtttgttggattcactccaattaacccttttacttacaaactcattacaacaactctattaattagagataagcatcaca

SEQ ID NO: 19912 - DNA, 801 bp, synthetic construct
  source 1..801: mol_type = other DNA
gtgggttgttcccacccacagggcccactgggcgctagtacactgatatgccagcaccttggtatcacggtaccattgtgcgtcagtacctttgtacgcctgttttatgctcccttcccccacatgcaaccttagaagtttaaatgaacaaagaccaataggagtccaacatccagttgggttgcggtcacgcacttctgtttccccggacctagtagtgataggctgtacccacggccgaagatgaacccgtccgttatccggccagctacttcgagaagcctagtagcatcaaagatctgtcttggcgtttcgctcagcgcgttccccccgcgtagatcgggctgatgggtctccgcataccccacgggtgaccgtggcggaggccgcgtggcggcccgcctatggcgaaagccataggacgccatttcagtgacagggtgtgaagagcctattgagctagttggtagtcctccggcccctgaatgcggctaatcctaaccacggagcgtccaccagcaaaccagctgggagggcgtcgtaacgggtaactctgtggcggaaccgactactttgggtgtccgtgtttccttttgatcctatattggctgcttatggtgacaacaataagttgttatcataaagcttttggattggccatccggaaagagttaacagtttgttcgctcattgctttatcaaaacttccattgagaaaagcaatttatttgttagtttcattttataaactagagaatatatcaactgctcacttgaacttactcatacaattacaccaat

SEQ ID NO: 19913 - DNA, 730 bp, synthetic construct
  source 1..730: mol_type = other DNA
tgggttgttcccacccacggggcccattgggcgctagcacactggtatcacggtacccttgtgcgcctgttttatccaccccctccccaatgcaacatagaagcacaaactaagtggtcaatagacggctcagtgcaccaactgggtttagaccaagcacttctgttaccccggactgagtatcaataggctgctcacgcggctgaaggagaaaacgttcgttacccggccaactacttcgagaagcccagtaccaccatgaaggttgcgcagtgtttcgttcagcacaaccccagtgtagatcaggtcgatgagtcaccgcaatccccacgggcgaccgtggcggtggctgcgctggcggcctgcccatggggtgacccatgggacgcttcaattccgacatggtgcgaagagcctattgagctagttggtagtcctccggcccctgaatgcggctaatcccaactgcggagcaagcacccacaaaccagtgggctgtttgtcgtaacgggcaactctgcagcggaaccgactactttgggtgtccgtgtttccttttattcctacactggctgcttatggtgacaattgaaagattgttgccatatagctattggattggccatccggtaacaaacagagctattatttacttatttgttggctttgtgccgttgaatttcaaagttataaaaaccataacctccatcttgacactcaacacagcaaa

SEQ ID NO: 19914 - DNA, 701 bp, synthetic construct
  source 1..701: mol_type = other DNA
gggcgctagcactctggtattgcggtacctttgtgcgcctgttttatgttcccacccccaatcgcaacttagaagcggtacttcacgaccaacagtgggcgtgacacaccagccacgtctcggtcaagcacttctgtctccccggactgagtatcaataggctgctcacgcggctgaaggagaaaacgtccgttatccggccaattacttcgagaaacctagtaccgccatgaaagttgcgcagcgtttcgatccgcacaaccccagtgtagatcaggtcgatgagtcaccgcgttccccacgggtgaccgtggcggtggctgcgttggcggcctgcccatgggagaacccatgggacgcttcaatactgacatggtgtgaagagtctattgagctaattggtagtcctccggcccctgaatgcggctaatcctaactgcggagcagattcccgcatgccagcgggtggtctgtcgtaacgggcaactctgcagcggaaccgactactttgggtgtccgtgtttccttttattcctatattggctgcttatggtgacaattgagagattgttaccatatagctattggattggccatccggtgacaaacagagcgattatttaccaatttattggttttgtaccgttgaattttaacacattcagaactcttaaccttattttggctcttaatacagcaaa

SEQ ID NO: 19915 - DNA, 571 bp, synthetic construct
  source 1..571: mol_type = other DNA
cttctgttatcccggactgagtatcaataagctgcttgcgcggctgaaggagaaaacgttcgttatccggccaattacttcgagaaacctagtaccaccatgaaggttgcgcggcgtttcgctccacacaaccccagtgtagatcaggccgatgagtcaccgcactccccacgggcgaccgtggcggtggctgcgttggcggcctgcccatggggcaacccatgggacgcttcaatactgacatggtgtgaagagtctattgagctaattggtagtcctccggcccctgaatgcggctaatcctaactgcggagcagatacccacatgccagtgggcagtctgtcgtaatgggtaactctgcagcggaaccgactactttgggtgtccgtgtttccttttattctaatattggctgcttatggtgacaattgagagattgttgccatatagctattggattggccatccagtgacaaacagagcaattgtttatctatttgttggtttcataccattaaatcttaaagctttaagaaccctcaactttattatacaacttaattcagtaca

SEQ ID NO: 19916 - DNA, 722 bp, synthetic construct
  source 1..722: mol_type = other DNA
ttcccacccacagggcccattgggcgccagcacactggtatcacggtacctttgtgcgcctgttttatataccctccccgaatgtaacttagaagctttacatagatggtcaatagaaggtccagcacaccagttggattccgaccaagtacttctgttatcccggactgagtatcaataggctgtttgcacggctgaaggagaaaacgttcgttacccggccaattacttcgagaaacctagtaacaccatggaagttgcgtagtgtttcgctccgcacgaccccggtgtagatcaggtcgatgagccaccgcgttccccacgggcgaccgtggcggtggctgcgctggcggcctgcccatggggcaacccatgggacgcttcaatactgacatggtgcgaagagtctattgagctaattggtagtcctccggcccctgaatgcggctaatcctaactgcggagcaggcaccctcaagccagagggcagtctgtcgtaacgggcaactctgcagcggaaccgactactttgggtgtccgtgtttccttttattcttgaactggctgcttatggtgacaattgaaagattgttaccatatagctattggattggccatccagtgacaaatagagcaattatatatctgtttgttggttttattccattaaactataaagttttaaacacacttaaatttgtcttaatactcaactcaataaa

SEQ ID NO: 19917 - DNA, 319 bp, synthetic construct; identical to SEQ ID NO: 305
  source 1..319: mol_type = other DNA

SEQ ID NO: 19918 - DNA, 728 bp, synthetic construct
  source 1..728: mol_type = other DNA
ggttgttcccacccacagggcccaccgggcgctagcacactggtatctcggtacccttgtgcgcctgttttatccacccttttcccatttaacttagaagcacgcgccaagacggtcaaaagggagcccagtaagccaattgggctatgaccaagcactcctgtaaccccgggccgagtatcaataagctgctcgcgcggctgaaggagaaaaagctcgttacccggccaattacttcgagaaacccagtagcatcatgaaagttgcgcagcgtttcgctccacacaaccccagtgtagatcaggtcgatgagtcaccgcgttccccacgggtgaccgtggcggtggctgcgctggcggcctgcccatggggccacccatgggacgcttcaatactgacatggtgtgaagagtctattgagctaattggtagtcctccggcccctgaatgcggctaatcctaactgcggagcagatgcccacacaccagtgggaagtctgtcgtaacgggtaactctgcagcggaaccgactactttgggtgtccgtgtttccttttatttctactctggctgcttatggtgacaattgaaaggttgttaccatatagctattggattggccatccggtgtcacatagagcgattatttacttgtttgttgggtttataccactgaactataaagttttaaatactcttaactacattttaatccttaactcattaaa

SEQ ID NO: 19919 - DNA, 725 bp, synthetic construct
  source 1..725: mol_type = other DNA
ttaaaatagcctgagggttgctcccacccacagggcccacgtggcgtagtactctggtatcacggtacctttgtacgcctattttatatcccttccccactgtaacttagaagcaactaacaaatcgcccaatagcagcacaatacccaattgtgttaagggcaagcacttctgtttccccggaagggtctaacggtatgctgtacccacggcagaagtatgacctaccgttaaccggccatgtacttcgagaagcctagtaccattatgaaggttgattgatgttacgctccccagcaaccccagctggtagttctggtcgatgagtctcggcataccccacgggcgaccgtggccgaggctgcgttggcggccagcctacacctcacggtgtaggacgtcaagatactgacatggtgtgaagagcctattgagctacgtggtagtcctccggcccctgaatgcggctaatcccaactccggagcatccgccagtaagcccactggaagggtgtcgtaatgcgaaagtctggagcggaaccgactactttgggtgtccgtgtttcctgttttacctattgtttggctgcttatggtgacaacttacagttatcatcataagctacttggtcttgccaaccggaaaattatttggttatttgttggtttcacaaacctacaactatatttacctgtcttattaattgttctcaaggttaacaaca

SEQ ID NO: 19920 - DNA, 711 bp, synthetic construct
  source 1..711: mol_type = other DNA
ggcccactgggcgccagcactctggtattgcggtaccttagtgcgcctgttttatacaccccttccctaaatgtaatttagatgcatgtaaataaaggccaatagcaggcgcagcacaccagctgtgtctcggtcaagcactcctgttaccccggactgagtatcaataggctactcacgtggctgaaggagaaaacgttcgttacccggccaattacttcgagaaacctagtaacaccatgaaggttgcgaagtgtttcgctcagcacaaccccagtgtagatcaggtcgatgagtcaccgcattccccacgggtgaccgtggcggtggctgcgttggcggcctgcccatgggattacccatgggacgcttcaatattgacatggtgtgaagagtctattgagctaattggtattcctccggcccctgaatgcggctaatcccaactgcggagcaggtacccacataccagtgggcagtctgtcgtaatgggcaactctgcagcggaaccgactactttgggtgtccgtgtttctctttattcttatactggctgcttatggtgacaattgagaaattgttgccatatagctattggattggccatccggtgacaaatagagcaattgtgcatccatttgttggttttataccattgaattacaaagttttaagtacccttaatcctattatatcattcaatacagcaaa

SEQ ID NO: 19921 - DNA, 800 bp, synthetic construct
  source 1..800: mol_type = other DNA
gtgggttgttcccacccacagggcccactgggcgctagtacactggtatgccttacctcggtattgcggtaccgttgtatacagtacctttgtacgcctgttttaaaatcccttccccaaatgtaaccttagaagctttagttgacaaagaccaataggagtccaacatccagttggattgcggtcaagcacttctgtctccccggacctagtagtgataggctgtacccacggccgaagatgaacccgtccgttatccggccagctacttcgagaagcctagtaacatcgaagatctgtcttggcgtttcgctcagcgcgtttccccccgcgtagatcgggctgatgggtctccgcacaccccacgggcgaccgtggcggaggccgcgtggcggcccgcctatggcgaaagccataggacgccatttcagtgacagggtgtgaagagcctattgagctagttggtagtcctccggcccctgaatgcggctaatcccaaccacggagcactcgccaacaagccagttggtagggtgtcgtaatgggtaactctgtggcggaaccgactactttgggtgtccgtgtttccttttgatcccattttggctgcttatggtgacaacaataagttgttatcataaagcttttgggttggccacctggaaaaagttatcagtgtttgatatcgtacggctttcacgcctgccaataagacaagctttgtatttgctgatttcattttattcagtgagagacattacagacgcacacctaaaccttttgctcgcactgtcagcagg

SEQ ID NO: 19922 - DNA, 690 bp, synthetic construct
  source 1..690: mol_type = other DNA
cactggtatcacggtacctttgtgcgcctgttttatttaccctcccccgacgtaaattagaagcatgcgctacacgatcaataggtggcttgacgcgccagtcaagtctcgatcatgcacttctgtttccccggaccgagtatcaataggctgctcgcgcggctgaaggagaaagcgttcgttatccggccaattacttcgagaaacctagtaacatcatgaaggttgcatggcgtttcgctccgcactaccccagtgtagatcaggccgatgagtcaccgcgatcctcacgggcgaccgtggcggtggctgcgctggcggcctgcccatggggcgacccatgggacgctataatactgacatggtgtgaagagtctattgagctaattggtagtcctccggcccctgaatgcggctaatcctaactgcggagcaggcacccacgaaccagtgggcagtctgtcgtaacgggcaactctgcagcggaaccgactactttgggtgtccgtgtttccttttattactattttggctgcttatggtgacaattgagagattgttaccatatagcttttggattggccatccagtgacaaacagagctatcatttatttatttgttggatttgtgccactagattacaacgtgtttaacaccctcaattacattctaatactcaacacaaagag

SEQ ID NO: 19923 - DNA, 713 bp, synthetic construct
  source 1..713: mol_type = other DNA
cacaaggcccactgggcgctagcacactggtattacggtacctttgtgcgcctgttttatacacccttaccccacgtaatatagaagcaaaacaacaaggtcaatagagagcccagtgagccaactgggtcgagaccaagcacttctgtttccccggaccgagtatcaataggctgcttacgcggctgaaggagaaaacgttcgttacccggctaactacttcgaaaaacctagtaacgccatggaagttgcgaaccgtttcgctcggcacttccccagtgtagatcaggtcgatgagtcaccgcattccccacgggcgaccgtggcggtggctgcgttggcggcctgcctatggggcaacccataggacgcttcaatatggacatggtgtgaagagtctattgagctagttagtagtcctccggcccctgaatgcggctaatcctaactgcggagcacatgcccccaacccaggaggtggtgtgtcgtaatgggtaactctgcagcggaaccgactactttgggtgtccgtgtttccttttatcccaatgttggctgcttatggtgacaattgaaagattgttaccatatagctattggattgaccatccggtgactaacagagcaattgtatacctattcattggttacgttccattaaatctcaaggaattaacgactctcaattacattttgctcttgaattctgcaaa

SEQ ID NO: 19924 - DNA, 730 bp, synthetic construct
  source 1..730: mol_type = other DNA
gtgggttgttcccacccacagggcccactgggcgcttgcacactggtatcacggtacctttgtgcgcctgttttatccacccccccctaatcgagtttagaagtcaagcacaactggtcgacaggtagcccagcacaccagctgggttctgaccaagcacttctgtttacccggactgagtatcaataggctgctcgcgcggctgaaggagaaaacgttcgttacccggccaattacttcgagaaacctagtaccgccatgaacgctgcgcggcgtttcgttccgcacaaccctagtgtagatcaggtcgatgagtcaccgcgttccccacgggtgaccgtggcggtggctgcgctggcggcctgcccatggggtaacccatgggacgcttcaatgctgacatggtgcgaagagtctattgagctaattggtagtcctccggcccctgaatgcggctaatcctaactgcggagcagacactcacacgccagtgggcagtctgtcgtaacgggcaactccgcagcggaaccgactactttgggtgtccgtgtttccttttattcttgcactggctgcttatggtgacaattgaaaggttgttaccatttagctattggattggccatccggtgagcaacagagcaattatatttctatttgttggatatataccatttgattttattaactacaatactctgctttatattctccaattgaatacgaaaag

SEQ ID NO: 19925 - DNA, 802 bp, synthetic construct
  source 1..802: mol_type = other DNA
cctgtgggttgttcccacccacagggcccactgggcgccagtacactggtatgtcagtaccttggtattacggtaccattgtatgctagtacctttgtacgcctgttttatatcccctccctatatgtaactttagaagtttaataaacaaagaccaataggagtccaacatccagttggattgtggtcaagcacttctgtctccccggacctagtagtgataggctgtacccacggccgaagatgaacccgtccgttatccggccagctacttcgagaagcctagtaacatcaaagatctgtcttggcgtttcgctcagcgcgttccccccgcgtagatcgggctgatgggtctccgcataccccacgggcgaccgtggcggaggccgcgtggcggcccgcctatggcgaaagccataggacgccatttcagtgacagggtgtgaagagcctattgagctagttggtagtcctccggcccctgaatgcggctaatcctaaccacggagcactcgccaacgaaccagttggtagggtgtcgtaacgggcaactctgtggcggaaccgactactttgggtgtccgtgtttccttttgatcctattttggctgcttatggtgacaacgataagttgttatcataaagcttttgggttggccacctggaaaaagttatcagtgtttgatattgttcggctttcacgcctgccaataaaacaagctttatatttattaatctcattctatccatttgaggatattactgaatttcatttgcaacttttactcacactatcagcaaa

SEQ ID NO: 19926 - DNA, 716 bp, synthetic construct
  source 1..716: mol_type = other DNA
cccacagggcccatagggcgctagcactctggtattgcggtacctttgtgcgcctgttttatattcccacccccaatcgcaacttagaagcagtacttcacgaccaacagtgggcgtgacacaccagccacgtctcggtcaagcacctctgtctccccggactgagtatcaataagctgctcacgcggctgagggagaaaacgtccgttacccggccaattacttcgagaaacctagtaccaccacgaaagttgcgcagcgtttcgatccgcacaaccccagtgtagatcaggtcgatgagtcaccgcgttccccacgggcgaccgtggcggtggctgcgttggcggcctgcccatgggagaacccatgggacgcttcaatactgacatggtgtgaagagtctattgagctaattggtagtcctccggcccctgaatgcggctaatcctaactgtggagcagattcccgcatgccagcgggtggtctgtcgtaacgggcaactctgcagcggaaccgactactttgggtgaccgtgtttccttttattcctatattggctgcttatggtgacagttgagagattgttaccatatagctattggattggccatccggtgacaaacagagcaattatctaccaatttatcggttttgtaccattgaatttcaacgcattcaaaaccctcaactttattttgactcttaatacagcaaa

SEQ ID NO: 19927 - DNA, 722 bp, synthetic construct
  source 1..722: mol_type = other DNA
cccacccacagggcctactgggcgctagcacactggtatcacggtacctttgtgcgcctgttttatagtccctccccccggacgcaacttagaagctgaacctaagcggtcaacaggcggctcagaacaccatctgggtctcgaccaagcacttctgtttccccggactgagtatcaataggctgcttacgcggctgaaggaaaaaacgtccgttatccggccaattacttcaagaaacccagtaccaccatgaaggttgcgcagcgtttcgctccgcacaaccccagtgtagatcaggtcgatgagtcaccgcattcctcacgggcgaccgtggcggtggctgcgctggcggcctgcccatggggcaacccatgggacgcttcaatactgacatggtgcgaagagtcaattgagctaattggtagtcctccggcccctgaatgcggctaatcctaactgtggagcagatgcccacgtaccagtgggtagtctgtcgtaacgggcaactccgcagcggaaccgactactttgggtgtccgtgtttctctttattcttatgttggctgcttatggtgacaattgagagattgttaccatatagctattggattggccatccggtgacgaatagagcgattgtatatctttttgttggattcgtaccattaaacaaaacacattacaaaaccttgtgttacattattagattaaacacagcaaa

SEQ ID NO: 19928 - DNA, 725 bp, synthetic construct
  source 1..725: mol_type = other DNA
gttcccacccacagggcctactgggcgctagcacactggtatcacggtacctttgtgcgcctgttttatagtccctccccccgaacgcaacttagaagctgaacctaagcggtcaacaggcggctcagaacaccatctgggtctcgaccaagcacttctgtttccccggactgagtatcaataagctgcttacgcggctgaaggaaaaaacgtccgttatccggccaattacttcaagaaacccagtaccaccatgaaggttgcgcagcgtttcgctccgcacaaccccagtgtagatcaggtcgatgagtcaccgcattcctcacgggcgaccgtggcggtggctgcgctggcggcctgcccatggggcaacccatgggacgcttcaatactgacatggtgcgaagagtcaattgagctaattggtagtcctccggcccctgaatgcggctaatcctaactgtggagcagatgcccacgtaccagtgggtagtctgtcgtaacgggcaactccgcagcggaaccgactactttgggtgtccgtgtttctctttattcttatgttggctgcttatggtgacaattgagatattgttaccatatagctattggattggccatccggtgacgaatagagcgattgtatatctttttgttggattcgtaccattaaacaaaacaaattacaaaaccttgtgttacattattagattaaacacagcaaa

SEQ ID NO: 19929 - DNA, 722 bp, synthetic construct
  source 1..722: mol_type = other DNA
tccccacccgcagggcccactgggcgttagcactctggtatcacggtacccttgtgcgcctgttttatacatcccaccccaaagtaacttagaagtatattacaaatgatcaatagtcagctcaacacgccagttgagtaccgatcaagcacttctgttaccccggactgagtatcaataagctgctaacgcggctgaaggagaaaacgttcgttatccgaccaactacttcgggaagcctagtaccaccatgaaagttgcgcagcgtttcgttccgcacagccccagtgtagatcaggccgatgagtcaccgcgtcccccgcaggcgactgtggcggtggctgcgttggcggcctgcccatggggtgacccatgggacgcttcaatactgacatggtgcgaagagtctactgagctagctggtagtcctccggcccctgaatgcggctaatcctaactgcggaacaggcaatcacaatccagtgggtggcctgtcgtaacgggcaactccgcagcggaaccgactactttgggtgtccgtgtttctttttattcttacattggctgcttatggtgacaattacagaattgttaccatatagctattggattggccatccagtgactaacagagcaatcgtgtacctttttgttggatttgtaccactaaacatcacgaattttataacactaaactacattctattattaaactcagcaaa

SEQ ID NO: 19930 - DNA, 743 bp, synthetic construct
  source 1..743: mol_type = other DNA
ttaaaacagcctgtgggttgttcccacccacggggcccattgggcgctagcacactggtatcacggtacccttgtgcgcctgttttatccaccccctcctcaatgcaacgtagaagcacaaactaagtggtcaatagacggctcagtgcaccaactgggtttagaccaagcacttctgttaccccggactgagtatcaataggctgctcacgcggctgaaggagaaaacgttcgttacccggccaactacttcgagaagcccagtaccaccatgaaggttgcgcagtgtttcgttcagcacaaccccagtgtagatcaggtcgatgagtcaccgcaatccccacgggcgaccgtggcggtggctgcgctggcggcctgcccatggggtgacccatgggacgcttcaattccgacatggtgcgaagagcctattgagctagttggtagtcctccggcccctgaatgcggctaatcccaactgcggagcaagcacccacaaaccagtgggctgtttgtcgtaacgggcaactctgcagcggaaccgactactttgggtgtccgtgtttccttttattcctacactggctgcttatggtgacaattgaaagattgttgccatatagctattggattggccatccggtaacaaacagagctattatttacttatttgttggctttgtgccgttgaatttcaaagttataaaaaccataaccttcatcttgacactcaacacagcaaa

SEQ ID NO: 19931 - DNA, 723 bp, synthetic construct
  source 1..723: mol_type = other DNA
gttgatcccacccgcagggcccactgggcgctagcacactggtatcacggtacctttgtgcgcctgttttacttcccttccctatatgtaacttagaagcagcactctacgaccaatagtaggcgtggcacaccagccatgtcttggtcaagcacttctgtaaccccgggccgagtatcaatagactgctcacgcggtcgaaggagaaaacgtccgttacccgaccaactacttcgaaaaacctagtaacgccatgaaaattgcgaggtgtttcgctcagcacacccccagtgtagatcaggccgatgagtcaccgcattccccacaggtgactgtggcggtggctgcgttggcggcctgcccatggggtgacccatgggacgcttcaatacggacatggtgtgaagagtctattgagctagttggtagtcctccggcccctgaatgcggctaatcctaactgtggagcacgcgcccccactccagagggtagcgtgtcgtaacgggtaactccgcagcggaaccgactactttgggtgtccgtgtttcctttattcttatactgctgcttatggtgacaattgatagattgttaccatatagctactggattggccacccggtgacaaacagagcaataatttatcaatttgtaggatttgttccaataagtttgaaagtcttgaagacactcaatctaatattactattcaatagtgcaaa

SEQ ID NO: 19932 - DNA, 709 bp, synthetic construct
  source 1..709: mol_type = other DNA
cccactgggtgctagcactctggtaccgcggtacctttgtgtgcctgttttatacccccttccccctatttgcaacttagaagctgcacaaactgatcaatagcaggcgtagcataccagctatgtcttgatcaagcactcctgtatccccggaccaagtatcaatagactgctcacgcggttgaaggagaaaacgttcgttacccggctaactacttcgagaaacctagtagtatcatgaaagttgcgaggcgtttcgttcagcacattcccagtgtagatcaggtcgatgagtcaccgcgttccccacgggcgaccgtggcggtggctgcgttggcggcctgcctacggggcgacccgtaggacgcttcaatacagacatggtgcgaagagtcgattgagctagttagtagtcctccggcccctgaatgcggctaatcctaactgcggagcacatgccctcaacccagggggtattgtgtcgtaacgggtaactctgcagcggaaccgactactttgggtgtccgtgtttccttttattcttacatcggctgcttatggtgacaattgagaggttgttaccatatagctattggattggccatccagtgtctaatagagctattatatacctctttgttggatttataccacttaacctaaaagaagttaagacactacagctcataatacagttgaatacagcaat

SEQ ID NO: 19933 - DNA, 808 bp, synthetic construct
  source 1..808: mol_type = other DNA
tcagtctgtgggttgttcccacccacagggcccactgggcgccagtacactggtacgtcagtaccttggtatcacggtaccattgtacgccagtacctttgtacgcctgttttatatcccttccccaaaccgtaactttagaagcataagtaaacatagaccactaggagtccaacatccagttggattgcggtcaagcacttctgtctccccggacctagtagtgataggctgtacccacggccgaagatgaacccgtccgttatccggccagctacttcgagaagcctagtagcatcaaagatctgtcttggcgtttcgctcagcgcgttccccccgcgtagatcgggctgatgggtctccgcataccccacgggcgaccgtggcggaggccgcgtggcggcccgcctatggcgaaagccataggacgccatttcagtgacagggtgtgaagagcctattgagctagttggtagtcctccggcccctgaatgcggctaatcctaaccacggagcatccgccaacaaaccagttggtagggtgtcgtaacgggtaactctgtggcggaaccgactactttgggtgtccgtgtttccttttgatcctatattggctgcttatggtgacaacgataagttgttatcataaagctcttgggttggccacctggaaaaagttatcagtgtttgatattgttcggctttcacgcctaccaataaaacaagctttatatttgttaatttcatttcatccatctgaggatattactgaatttcacttacagctcttgcttacactgtcaacaag

SEQ ID NO: 19934 - DNA, 722 bp, synthetic construct
  source 1..722: mol_type = other DNA
tccccacccgcagggcccactgggcgttagcactctggtatcacggtacccttgtgcgcctgttttatacatcccaccccaaagtaacttagaagtatattacaaatgatcaatagtcagctcaacacgccagttgagtaccgatcaagcacttctgttaccccggactgagtatcaataagctgctaacgcggctgaaggagaaaacgttcgttatccgaccaactacttcgggaagcctagtaccaccatgaaagttgcgcagcgtttcgttccgcacagccccagtgtagatcaggccgatgagtcaccgcgtcccccgcaggcgactgtggcggtggctgcgttggcggcctgcccatggggtgacccatgggacgcttcaatactgacatggtgcgaagagtctactgagctagctggtagtcctccggcccctgaatgcggctaatcctaactgcggagcaggcaatcacaatccagtgggtggcctgtcgtaacgggcaactccgcagcggaaccgactactttgggtgtccgtgtttctttttattcttacattggctgcttatggtgacaattacagaattgttaccatatagctattggattggccatccagtgactaacagagcaatcgtgtacctttttgttggatttgtaccactaaacatcacgaattttacaacactaaactacattctattattaaactcagcaaa

SEQ ID NO: 19935 - DNA, 722 bp, synthetic construct
  source 1..722: mol_type = other DNA
tccccacccgcagggcccactgggcgttagcactctggtatcacggtacccttgtgcgcctgttttatacatcccaccccaaagtaacttagaagtatattacaaatgatcaatagtcagctcaacacgccagttgagtaccgatcaagcacttctgttaccccggactgagtatcaataagctgctaacgcggctgaaggagaaaacgttcgttatccgaccaactacttcgggaagcctagtaccaccatgaaagttgcgcagcgtttcgttccgcacagccccagtgtagatcaggccgatgagtcaccgcgtcccccgcaggcgactgtggcggtggctgcgttggcggcctgcccatggggtgacccatgggacgcttcaatactgacatggtgcgaagagtctactgagctagctggtagtcctccggcccctgaatgcggctaatcctaactgcggagcaggcaatcacaatccagtgggtggcctgtcgtaacgggcaactccgcagcggaaccgactactttgggtgtccgtgtttctttttattcttacattggctgcttatggtgacaattacagaattgttaccatatagctattggattggccatccagtgactaacagagcaatcgtgtacctttttgttggatttgtaccactaaacatcacgaattttataacactaaactacattctattattaaactcagcaaa

SEQ ID NO: 19936 - DNA, 718 bp, synthetic construct
  source 1..718: mol_type = other DNA
cccacccacagggcccactgggcgctagcacactggtatcacggtacccttgtgcgcctgttttatctaccctaccccattgcaacttagaagttaaacaagcacggtcgttaggcggctcagtataccaactgggtcatgaccaagcacttctgttaccccgggctgagtatcaataagctgctcacgtggctgagggagaaaacgctcgttacccggccaattacttcgagaaacctagtaccaccatgaaggttgcgcagcgtttcgctccgcacaaccccagtgtagatcaggtcgatgagtcaccgcattcctcacgggcgaccgtggcggtggctgcgctggcggcctgcccatggggcaacccatgggacgcttcaatactgacatggtgtgaagagtctattgagctaattggtagtcctccggcccctgaatgcggctaatcctaactgcggagcagatacctacaagccagtaggcagtctgtcgtaacgggtaactctgcagcggaaccgactactttggtgtccgtgtttcctttattcttataatggctgcttatggtgacaattgaaaggttgttaccatatagctattggattggccatccagtgtctaacagagcaattgtttacttgtttgttggttttgtaccattgaattacagggtattaaatactctcaattttataatactactcaattcagcaaa

SEQ ID NO: 19937 - DNA, 734 bp, synthetic construct
  source 1..734: mol_type = other DNA
ctgtgggttgctcccacccacagggcccactgggcgctagcacactggtatcccggtacctttgtgcgcctgttttatttaccccacccccagctgtaatttagaagttcgacacacatggtcaatagatggctcagtgcaccaactgggtttagaccaagcacttctgttaccccggaccgagtatcaataagctgctcgcgcggctgaaggagaaaacgttcgttacccggccaattacttcgagaaacctagtaccaccatggaggttgcgcagcgtttcgctccgcacagccccagtgcagatcaggccgatgagtcaccgcattcctcacgggcgaccgtggcggtggctgcgttggcggcctgcccatggggcaacccatgggacgcttcaatactaacatggtgtgaagagtctattgagctaattggtagtcctccggcccctgaatgcggctaatcctaactgcggagcagatactcacatgccagtgggcagtctgtcgtaacgggcaactctgcagcggaaccgactactttgggtgtccgtgtttccttttattcttatactggctgcttatggtgacaattgagaaattgttaccatatagctattggattggccatccagtgacaaacagagcaattgtttacctatttgtcggcttcataccgttaaattttagagttttgaagacccttaacttgattatactattcaactctgtgaa

SEQ ID NO: 19938 - DNA, 734 bp, synthetic construct
  source 1..734: mol_type = other DNA
tcctgtgggttgatcccacccacagggcccactgggcgctagcacactggtattccggtacctttgtgcgcctgttttatacacccttcccaagtgtaacttagaagcttatcacacacggtcaacaggtgactcagtatgccaactgggtcttgatcaagcacttctgtttccccggactgagtatcaataagctgctcacgcggctgaaggagaaaacgttcgttaaccggccaattacttcgagaaacctagtaacaccatggaggttgcgcagtgtttcgctccacacaaccccagtgtagatcaggccgatgagtcaccgcactcctcacgggcgaccgtggcggtggctgcgctggcggcctgcccatgggataacccatgggacgcttcaatactgacatggtgcgaagagtctattgagctaattggtagtcctccggcccctgaatgcggctaatcctaactgcggagcagatacccacacgccagtgggcagtctgtcgtaatgggcaactctgcagcggaaccgactactttgggtgtccgtgtttccttttatttttatactggctgcttatggtgacaattgagagattgttaccatatagctattggattggccatccagtgacaaacagagcgattatttatttatttgttggttatatcccattaagccaaaaggccctagttactctcaactttatactattgcttaatacaacgaa

SEQ ID NO: 19939 - DNA, 720 bp, synthetic construct
  source 1..720: mol_type = other DNA
cccacccacagggcctactgggcgctagcacactggtattacggtacctttgtgcgcctgttttatacaccctcacccaacgtaatgtagaagcaagacaacaaggtcaatagagagcccagtgagccaactgggtcgtgaccaagcacttctgtttccccggaccgagtatcaataggctgcccacgcggctgaaggagaaaacgttcgttacccggctaactacttcgagaaacctagtaacgccatggaagttgcgaatcgtttcgctcggcacttccccagtgtagatcaggtcgatgagtcaccgcattccccacgggcgaccgtggcggtggctgcgttggcggcctgcctatgaggcaactcataggacgcttcaatatggacatggtgtgaagagtctattgagctagttagtagtcctccggcccctgaatgcggctaatcctaactgcggagcacatgcccccaatccaggaggtagtgtgtcgtaacgggtaactctgcagcggaaccgactactttgggtgtccgtgtttcctttttatcccaatattggctgcttatggtgacaattgaaagattgttaccatatagctattggattggccatccggtgactaacagagcaattgtatatctcttcattggatacgttccattaaatctcaaggaattaacgactctcaattacattttgctcttgaattctgcaaa

SEQ ID NO: 19940 - DNA, 720 bp, synthetic construct
  source 1..720: mol_type = other DNA
cccacccacagggcctactgggcgctagcacactggtattacggtacctttgtgcgcctgttttatacacccttacccaacgtaatatagaagcaagacaacaaggtcaatagaaagcccagtgagccaactgggtcgtgaccaagcacttctgtttccccggaccgagtatcaataggctgcccacgcggctgaaagagaaaacgttcgttacccggctaactacttcgaaaaacctagtaacgccatggaagttgcgaatcgtttcgctcggcacttccccagtgtagatcaggtcgatgagtcaccgcattccccacgggcgaccgtggcggtggctgcgttggcggcctgcctatgaggcaactcataggacgcttcaatatggacatggtgtgaagagtctattgagctagttagtagtcctccggcccctgaatgcggctaatcctaactgcggagcacatgcccccaatccaggaggtagtgtgtcgtaatgggtaactctgcagcggaaccgactactttgggtgtccgtgtttcctttttatcccaatattggctgcttatggtgacaattgaaagattgttaccatatagctattggattggccatccggtgactaacagagcaattgtatatctattcattggatacgttccattaaatctcaaggaattaacgactctcaattacattttgctcttgaattctgcaaa

SEQ ID NO: 19941 - DNA, 720 bp, synthetic construct
  source 1..720: mol_type = other DNA
cccacccacagggcctactgggcgctagcacactggtattacggtacctttgtgcgcctgttttatacaccctcacccaacgtaatatagaagcaagacaacaaggtcaatagagagcccagtgagccaactgggtcgtgaccaagcacttctgtttccccggactgagtatcaataggctgcccacgcggctgaaggagaaaacgttcgttacccggctaactacttcgaaaaacctagtaacgccatggaagttgcgaatcgtttcgctcggcacttccccagtgtagatcaggtcgatgagtcaccgcattccccacgggcgaccgtggcggtggctgcgttggcggcctgcctatgaggcaactcataggacgcttcaatatggacatggtgtgaagagtctattgagctagttagtagtcctccggcccctgaatgcggctaatcctaactgcggagcacatgcccccaatccaggaggtagtgtgtcgtaatgggtaactctgcagcggaaccgactactttgggtgtccgtgtttcctttttatcccagtattggctgcttatggtgacaattgaaagattgttaccatatagctattggattggccatccggtgactaacagagcaattgtatatcttttcattggatacgttccattaaatctcaaggaattaacgactctcaattacattttgcacttgaattctgtaaa

SEQ ID NO: 19942 - DNA, 720 bp, synthetic construct
  source 1..720: mol_type = other DNA
cccacccacagggcctactgggcgctagcacactggtattacggtacctttgtgcgcctgttttatacaccctcacccaacgtaatatagaagcaagacaacaaggtcaatagagagcccagtgagccaactgggtcgtgaccaagcacttctgtttccccggaccgagtatcaataggctgcccacgcggctgaaggagaaaacgttcgttacccggctaactacttcgaaaaacctagtaacgccatggaagttgcgaatcgtttcgctcggcacttccccagtgtagatcaggtcgatgagtcaccgcattccccacgggcgaccgtggcggtggctgcgttggcggcctgcctatgaggcaactcataggacgcttcaatatggacatggtgtgaagagtctattgagctagttagtagtcctccggcccctgaatgcggctaatcctaactgcggagcacatgcccccaatccaggaggtggtgtgtcgtaatgggtaactctgcagcggaaccgactactttgggtgtccgtgtttcctttttatcccaataatggctgcttatggtgacaattgaaagattgttaccatatagctattggattggccatccggtgactaacagagcaattgtatatcttttcattggatacgttccattaaatctcaaagaattaacgactctcaattacattttgctcttgaattctgcaaa

SEQ ID NO: 19943 - DNA, 723 bp, synthetic construct
  source 1..723: mol_type = other DNA
tccccactcacagggcccactgggcgccagcacactggtatcaaggtacctttgtgcgcctgttttatagccccttccccgaatgtaacgtagaagctgaacccaagcggtcaacaggcggctcagaataccatctgggtcttgaccaagcacttctgttaccccggactgagtatcaataagctgctcacgcggctgaaggagaaaatgttcgttatccggccaattacttcgagaaacctagtatcaccatgaaggttgcgcagcgtttcgctccgcacaatcccagtgtagatcaggtcgatgagtcaccgcattcctcacgggcgaccgtggcggtggctgcgctggcggcctgcccatggggcaacccatgggacgcttcaatactgacatggtgcgaagagtcaattgagctaattggtagtcctccggcccctgaatgcggctaatcctaactgcggagcagatgcccaagctccagtgggtagtctgtcgtaacgggtaactctgcagcggaaccgactactttgggtgtccgtgtttccttttattcttacattggctgcttatggtgacaattgagagattgttaccatatagctattggattggccaaccggtgacgaatagagcaattgtgtatctttttgttggattcataccactagacaatataaacttcaaaactttgtgttacatcattagattaaacacagcaag

SEQ ID NO: 19944 - DNA, 673 bp, synthetic construct
  source 1..673: mol_type = other DNA
cttgtgcgcctgttttatctaccccctccccaatgtaacgtaaaagcacaaatcaagtggtcaatagatggcccagtatgccaactgggtttagaccaagcacttctgttaccccggactgagtatcaataagctgctcacgcggctgaaggagaaaacgttcgttacccggccaactacttcgagaagcctagtaccaccatgaaggatgcgcagtgtttcgttcagcacaaccccagtgtagatcaggtcgatgagtcaccgcaatccccacgggcgaccgtggcggtggctgcgctggcggcctgcccatggggttacccatgggacgcttcaattccgacatggtgcgaagagtctattgagctagttggtagtcctccggcccctgaatgcggctaatcccaactgcggagcaagcacccacaaaccagtgggctgtttgtcgtaatgggtaactctgcagcggaaccgactactttgggtgtccgtgtttccttttattcctacactggctgcatatggtgacaattgaaagattgttgccatatagctattggattggccatccggtgacaaacagagctattatctacttgtttgtcggctttgtaccgttgaatttcaaagttgtaaaaaccctaatcttcatcttaacactcaacacagcaaa

SEQ ID NO: 19945 - DNA, 733 bp, synthetic construct
  source 1..733: mol_type = other DNA
tgtgggttgctcccacccacagggcccactgggcgctagcacactggtatcccggtacctttgtgcgcctgttttatttaccccacccccagctgtaatttagaagtacgacacacatggtcaatagatggctcagtgcaccaactgggtttagaccaagcacttctgttaccccggaccgagtatcaataagctgctcgcgcggctgaaggagaaaacgttcgttacccggccaattacttcgagaaacctagtaccaccatggaggttgcgcagcgtttcgctccgcacagccccagtgtagatcaggccgatgagtcaccgcgttcctcacgggcgaccgtggcggtggctgcgttggcggcctgcccatggggtaacccatgggacgcttcaatactaacatggtgtgaagagtctattgagctaattggtagtcctccggcccctgaatgcggctaatcctaactgcggagcagatactcacatgccagtgggcagtctgtcgtaacgggcaactctgcagcggaaccgactactttgggtgtccgtgtttccttttattcttatactggctgcttatggtgacaattgagaaattgttaccatatagctattggattggccatccagtgacaaacagagcaattgtttacctatttgtcggcttcataccgttaaacttaagagctttgaagacccttaacttgattatactattcaactctgtaaa

SEQ ID NO: 19946 - DNA, 725 bp, synthetic construct
  source 1..725: mol_type = other DNA
tcccaccccagaggcccacgtggcggctagtacaccggtatcacggtacccttgtacgcctgttttatgctccctttcccatgtaactttagaagcaatgaccaaagttcaatagaagggggtacaaaccagtaccaccacgaacaagcactactgtttccccggtgaggttgtatagactgtacccacggtcaaaaacgactgatccgttatccgcttgagtacttcgagaagcctagtaccgccttggaatcttcgacgcgttgcgttcagcactctaccccgagtgtagcttaggctgatgagtctgggcactccccaccggcgacggtggcccaggctgcgttggcggcctacccgtggcgaatgccacgggacgctagatgtgaacaaggtgtgaagagcctattgagctacttaagagtcctccggcccctgaatgcggctaatcctaaccatggagcaagtgctcacaaaccagtgagtggcttgtcgtaatgcgtaagtccgtggcggaaccgactactttgggtgtccgtgtttccttttatttttatcatggctgcttatggtgacaatcagtgattgccatcatatagcgacttggattggccatccggttaaagtgagatatattatatacttgtttattggattcactcctttatcaactaggactaatcatctaatacgtgtgatcttactcattagaggtttataccaca

SEQ ID NO: 19947 - DNA, 721 bp, synthetic construct
  source 1..721: mol_type = other DNA
cccacccacagggcctactgggcgctagcacactggtatcacggtacctttgtgcgcctgttttatccacccttccccaaatgaaacttagaagtttgacttaaacggtcaatagaaaatccagtacgccaactgggtcgtgaccaagcacttctgtgaccccggactgagtatcaataagctactcacgtggctgaaggagaaaacgttcgttacccggccaattacttcgagaaacttagtaccaccatgaaggttgcgtagcgtttcgctccgcacaaccccagtgtagatcaggtcgatgagtcaccgcgttccccacgggtgaccgtggcggtggctgcgttggcggcctgcccttggggtaacccaagggacgcttcaatactgacatggtgcgaagagtctattgagctaattggtagtcctccggcccctgaatgcggctaatcctaactgcggagcagatacccacatgccagtgggcagtctgtcgtaacgggcaactctgcagcggaaccgactactttgggtgtccgtgtttccttttattcttatactggctgcttatggtgacaattgagagattgttaccatatagctattggattggccatccagtgtctaatagagcaatcatctaccttttcgttggatttattccacttgactataaagcactcaaaacactcgaatacattgtaaaccttaacacaacaaa

SEQ ID NO: 19948 - DNA, 712 bp, synthetic construct
  source 1..712: mol_type = other DNA
agggcccactgggcgctagcacactggtatcacggtacccttgtgcgcctgttttattcaccctccccctatcgtaacttagaagtaacaccccaacggccaacagacagctcagtaagccaactgagttctggccaagcacttctgttaccccggactgagtatcaataggctgcttacgcggctgaaggagaaaacgttcgttatccggccaattacttcgagaaacctagtaacaccatgaaggttgcgcagtgtttcgttcagcacaaccccagtgtagatcaggctgatgagtcaccgcattccccacgggtgaccgtggcggtggctgcgccggcggcctgcccatggggtaacccatgggacgcttcaatactgacatggtgtgaagagtcaattgagctaattggtagtcctccggcccctgaatgcggctaatcctaactgtggagcagatacccgcacaccagcgggcagtctgtcgtaacgggcaactccgcagcggaaccgactactttgggagtccgtgtttccttttattcttatattggctgcttatggtgacaattgaaaggttgttaccatatagctattggattggccatccggtatcaaacagagcgattatctacttgtttgttggttttataccattaaattacaaggttctaattacccttaattttattttaacactcaacaagtcaaa

SEQ ID NO: 19949 - DNA, 723 bp, synthetic construct
  source 1..723: mol_type = other DNA
cccacccacagggcctactgggcgctagcacactggtatcacggtacctttgtgcgcctgttttatagtccctcccccccggacgcaacttagaagctgaacctaaacggtcaacaggcggctcagaacaccatctgggtctcgaccaagcacttctgtttccccggactgagtatcaataagctgcccacgcggctgaaggaaaaaacgtccgttatccggccaattacttcaagaaacccagtaccaccatgaaggttgcgcagcgtttcgctccgcacaaccccagtgtagatcaggtcgatgagtcaccgcattccacacgggcgaccgtggcggtggctgcgctggcggcctgcccatggggcaacccatgggacgcttcaatactgacatggtgcgaagagtcaattgagctaattggtagtcctccggcccctgaatgcggctaatcctaactgtggagcagatgcccacgtaccagtgggtagtctgtcgtaacgggcaactccgcagcggaaccgactactttgggtgtccgtgtttctctttattcttatgttggctgcttatggtgacaattgagagattgttaccatatagctgttggattggccatccggtgacgaatagagcgattgtatatctttttgttggattcgtaccattaaacaaaacaaattacaaaaccttgcgttacattattagattgaacacagcaaa

SEQ ID NO: 19950 - DNA, 722 bp, synthetic construct
  source 1..722: mol_type = other DNA
tcccacccacggggcccaccgggcgccagcacactggtatctcggtacctttgtgcgcctgttttatagcccctcccccgaatgtaacgtagaagctgaacctaagtggtcaataggcggctcagaacaccatctgggtcttgaccaagcacttctgttaccccggactgagtatcaataagctgctcacgcggctgaaggagaaaacgttcgttacccgaccaattacttcgagaaacccagtatcaccatgaaggttgcgcagcgtttcgctccgcacaaccccagtgtagatcaggtcgatgagtcaccgcgttcctcacgggcgaccgtggcggtggctgcgctggcggcctgcccatggggcaacccatgggacgcttcaatgctgacatggtgcgaagagtcaattgagctaattggtagtcctccggcccctgaatgcggctaatcccaactgcggagcagacgcccaaactccagtgggtagtctgtcgtaacgggtaactctgcagcggaaccgactactttgggtgtccgtgtttccttttattcttacactggctgcttatggtgacaattgagagattgttaccatatagctattggattggccatccggtgacaaatagagcaattatatatctttttgttggattcgtaccactcgacaaaacaaatttcaaaaccttgtgttacattattagactaaatacagcaaa

SEQ ID NO: 19951 - DNA, 734 bp, synthetic construct
  source 1..734: mol_type = other DNA
tcctgtgggttgatcccacccacagggcccactgggcgctagcacactggtattccggtacctttgtgcgcctgttttatacacccttcccaagtgtaacttagaagcttatcacacacggtcaacaggtgactcagtatgccaactgggtcttgatcaagcacttctgttttcccggactgagtatcaataagctgctcacgcggctgaaggagaaaacgttcgttaaccggccaattacttcgagaaacctagtaacaccatggaggttgcgcagtgtttcgctccgcacaaccccagtgtagatcaggccgatgagtcaccgcactcctcacgggcgaccgtggcggtggctgcgctggcggcctgcccatggggtaacccatgggacgcttcaatactgacatggtgcgaagagtctattgagctaattggtagtcctccggcccctgaatgcggctaatcctaactgcggagcagatacccacacgccagtgggcagtctgtcgtaatgggcaactctgcagcggaaccgactactttgggtgtccgtgtttccttttattcttatactggctgcttatggtgacaattgagagattgttaccatatagctattggattggccatccagtgacaaacagagctattatttatttgtttgttggttatatcccattaagccaaaaggtcttagccactctcaattatatactattgcttaatacaacgaa

SEQ ID NO: 19952 - DNA, 738 bp, synthetic construct
  source 1..738: mol_type = other DNA
ctctggggttgttcccaccccagaggcccacgtggcggccagtactccggtattacggtacccttgtacgcctgttttatactcccctcccctgtaacttagaagcatacaaaccaagttcaatagaagggggtacaaaccagtaccaccacgaacaagcactcctgtttccccggtgacattgcatagactgtacccacggttgaaagcgatcgatccgttacccgctcctgtacttcgagaagcctagtatcatcttggaatcttcgatgcgttgcgctcagcactcaaccccagagtgtagcttaggctgatgagtctggacgtcccccaccggcgacggtggtccaggctgcgttggcggcctacctgtggcccaaagccacaggacgctagttgtgaacaaggtgtgaagagcctattgagctacaagagagtcctccggcccctgaatgcggctaatcctaaccacggagcaggcagttgcaaaccagcaaccggcctgtcgtaacgcgcaagtctgtggcggaaccgactactttgggtgtccgtgtttccttttatttttacaatggctgcttatggtgacaatcatagattgttatcataaagcgacttggattggccatccggtgaaagtaaaacacattgtttacttgtttgttggattcactccaattaactcttttacttacaaactcattacaacaactctattaattagagataagcatcaca

SEQ ID NO: 19953 - DNA, 733 bp, synthetic construct
  source 1..733: mol_type = other DNA
ttaaaacagccttggggttgttcccacctcaagggcccacgtggcggctagtactctggtatctcggtacctttgtacgcctgttttaattccctccccaacgtaacttagaagcttttaaaccaaagctcaataggcggagcgcaaaccagcgctcttatgagcaagcacttctgtctccccggtgtggttgtatagactgtccccacggttgaaaacaacttatccgttaaccgctatagtacttcgagaaacctagtattgccttcggagtgtcgatgcgttgcgctcagcacactaacccgtgtgtagcttgggtcgatgagtctggacgtaccccactggcgacagtggtccaggctgcgttggcggcctactcatggtgaaaaccatgagacgctagacatgaacaaggtgtgaagagtctattgagctactatagagtcctccggcccctgaatgcggctaatcctaaccatggagcaagtgctcacaaaccagtgggttacttgtcgtaacgcgcaagtccgtggcggaaccgactactttgggtgtccgtgtttcactttttacttttatgactgctaatggtgacaatttaatattgttaccatttggcttgtcgaattgatcacataagatctatagttttgttcactgatttgctttgaaacaatctcacctcaaaacctccagtacataacatttaaagagtttaaacttatttataaca

SEQ ID NO: 19954 - DNA, 688 bp, synthetic construct
  source 1..688: mol_type = other DNA
tggtattgcggtacctttgtgcgcctgttttatacaccctctccccatattaacttagaagtacattttatatgatcaataggcggctcagtatgccaactgagtctcgatcaagcacttctgttgtcccggaccgagtatcaataagctactcacgtggctgaaggagaaaacgttcgttacccggccagctacttcgagaaacctagtaccaccatgaatgttgcgcggcgtttcgctccgcactaccccagtgtagatcaggtcgatgagtcaccgcactcctcacgggcgaccgtggcggtggctgcgctggcggcctgcccgtggggcaacccatgggacgcttcaatacagacatggtgtgaagagtctattgagctagttggtagtcctccggcccctgaatgcggctaatcctaactgcggagcagatccccacaagccagtgggcagtctgtcgtaatgggcaactctgcagcggaaccgactactttgggtgtccgtgtttccttttattcttatactggctgcttatggtgacaattgaaggattgttgccatatagctattggattggccatccggtgtctaacagagcaataatttatctttttgttggattcgtcccacttaaccacagagcacttgcaacgctcaattacatcatagatctcaacacaacaaa

SEQ ID NO: 19955 - DNA, 732 bp, synthetic construct
  source 1..732: mol_type = other DNA
ttaaaacagctctggggttgttcccactcaagggcccacgtggcggctagtactctggtatctcggtacctttgtacgcctgttttaattccctccccaacgtaacttagaagcttttaaaccaaagctcaataggtggagcgcaaaccagcgctcttatgagcaagcacttctgtctccccggtgtggttgtatagactgtccccacggttgaaaacaacttatccgttaaccgctatagtacttcgagaaacctagtattgccttcggagtgttgatgcgttgcgctcagcacactaacccgtgtgtagcttgggtcgatgagtctggacgtaccccactggcgacagtggtccaggctgcgttggcggcctactcatggtgaaaaccatgagacgctagacatgaacaaggtgtgaagagtctattgagctgctatagagtcctccggcccctgaatgcggctaatcctaaccatggagcaagtgctcacaaaccagtgagttacttgtcgtaacgcgcaagtccgtggcggaaccgactactttgggtgtccgtgtttcactttttacttttatgactgctaatggtgacaatttaatattgttaccatttggcttgtcgaattgatcacataagatctatagttttgttcactgatttgctttgaaataatctcacctcaaaacctccagtacataacatttaaagagtttaaacttatttataaca

SEQ ID NO: 19956 - DNA, 720 bp, synthetic construct
  source 1..720: mol_type = other DNA
cccacccacagggcccactgggcgccagcacactggtattacggtacccttgtgcgcctgttttatccaccctccccccatcgtaacttagaagcataacctagacggtcaatagacaacccagcacgccagctgggtcccgaccaagtacttctgttaccccggaccgagtatcaataggctgcttacgcggctgaaggagaaaaagttcgttatccggccaattacttcgagaagcctagtaacaccatgaaagttgcgtagcgtttcgctccgcacaaccccagtgtagatcaggtcgatgagtcaccgcattcctcacgggcgaccgtggcggtggctgcgctggcggcctgcccatggtgcaacccatgggacgctacaataccgacatggtgcgaagagtctattgagctaattggtagtcctccggcccctgaatgcggctaatcctaactgcggagcagacgcccacatgccagtgggtagtctgtcgtaacgggcaactctgcagcggaaccgactactttggtgtccgtgtttccttttatttctaatttggctgcttatggtgacaattgagaaatggttaccatatagctactggattggccatccggtgactaacagagcagttgtttacctgtttgttggttttgttccattagactacaaagtgctgaacactcttaattatattttactactaaactcaataaa

SEQ ID NO: 19957 - DNA, 721 bp, synthetic construct
  source 1..721: mol_type = other DNA
cccacccacagggcccactgggcgccagcactctggtatcacggtacctttgtgcgcctgttttatccaccctctccccagtgtaacttagaagcacgtaccatgcggtcaataggcggctcagtatgccaactgagttgtgaccaagtacttctgttgccccggaccgagtatcaataagctactcacgtggctgaaggagaaaacgttcgttatccggccaattacttcgagaaacctagtaccaccatgaatgttgcgcggcgtttcgctccgcacaatcccagtgtagatcaggtcgatgagtcaccgcacccctcacgggcgaccgtggcggtggctgcgctggcggcctgcccatggggcaacccatgggacgcttcaatacagacatggtgtgaagagtctattgagctaattggtagtcctccggcccctgaatgcggctaatcctaactgcggagcagattcccacatgccagtgggcagtctgtcgtaatgggtaactctgcagcggaaccgactactttgggtgtccgtgtttccttttattcttgtactggctgctaatggtgacaattgaaagattgttaccatatagctattggattggccacccagtgtctaacagagcaattatttacctttttattggattcatcccacttgattataaagcacttgtaacactcaaatacatcatagacctcaacacaacaaa

SEQ ID NO: 19958 - DNA, 660 bp, synthetic construct; identical to SEQ ID NO: 797
  source 1..660: mol_type = other DNA

SEQ ID NO: 19959 - DNA, 795 bp, synthetic construct
  source 1..795: mol_type = other DNA
gttgttcccacccacagggcccactgggcgccagtacactggtatgctttacctcggtattacggtaccgttgtatacagtacctttgtacgcctgttttaaatcccctcccccaaatgtaaccttagaagtttaagtaaactgagaccaataggagtccaacacccagttggattacggtcaagtacttctgtttccccggacctagtagtgataggctgtacccacggctgaagatgaacccgtccgttatccggccagctacttcgagaagcctagtagcatcaaagatctgtcttggcgtttcgctcagcgcgttccccccgcgtagatcgggctgatgggtctccgcactccccacgggcgaccgtggcggaggccgcgtggcggcccgcctatggcgaaagccataggacgccatttcagtgacagggtgtgaagagcctattgagctagttggtagtcctccggcccctgaatgcggctaatcctaaccacggagcgtccgccaacaatccagttggtagggcgtcgtaacgggtaactctgtggcggaaccgactactttgggtgtccgtgtttccttttgatcctattttggctgcttatggtgacaacgataagttgttatcataaagcttttgggttggccacctggaaaaagatatcagtgtttgatattgttcggctctcacgcctaccaacaaaacaagctctatatttattaatttcattttatccattggaggatattaccgaattccatctacaacttttgctcactttatcagcaaa

SEQ ID NO: 19960 - DNA, 718 bp, synthetic construct
  source 1..718: mol_type = other DNA
cactcacagggcccactgggcgccagcacactggtatcaaggtacctttgtgcgcctgttttacccaccctcccccaaagcaacttagaagttaatcacagatgatcgacaggaagctcagtgagccaactgagccttgatcaagcacttctgttaccccggaccgagtatcaataggctgctcacgcggctgaaggagaaaacgttcgttacccggccaattacttcgagaaacctagtaccaccatggaggttgcgcagcgtttcgctccgcacaaccccagtgtagatcaggtcgatgagtcaccgcataccccacgggcgaccgtggcggtggctgcgttggcggcctgcccatggggcaacccatgggacgctacaataccaacatggtgtgaagagtcaattgagctaattggtagtcctccggcccctgaatgcggctaatcctaactgcggagcagatgcccacaagccagtgggtggtctgtcgtaacgggcaactctgcagcggaaccgactactttgggtgtccgtgtttccttttattcttacattggctgcttatggtgacaattgaaagattgttaccatatagctattggattggccatccggttagcgacagagcgattatattcctatttgttgggtttgtatcacttgacaaaagtagttataacaccctgctgtacatcatccatttgaacacgagaaa

SEQ ID NO: 19961 - DNA, 733 bp, synthetic construct
  source 1..733: mol_type = other DNA
ctgtgggttgttcccacccacggggcctactgggcgccagcacactggtatcacggtacctttgtgcgcctgttttacaacccctcccccgaacgtaacgtagaagctgaacctaagcggtcaataggcggctcagaacaccatctgggtcttgaccaagcacttctgttgccccggactgagtatcaataagctgctcacgcggctgaaggagaaaacgtccgttacccggccaattacttcaagaaacccagtaccaccatgaaggttgcgcagcgtttcgctccgcacaaccccagtgtagatcaggtcgatgagtcaccgcattcctcacgggcgaccgtggcggtggctgcgctggcggcctgcccatggggtaacccatgggacgcttcaatactgacatggtgcgaagagtcaattgagctaattggtagtcctccggcccctgaatgcggctaatcctaactgcggagcagacgcccaagctccagtgggtagtctgtcgtaacgggtaactctgcagcggaaccgactactttgggtgtccgtgtttccttttattcttacattggctgcttatggtgacaattgagaggttgttaccatatagctattggattggccatccggtgacaaatagagcaattgtatatctttttgttggattcataccactcgacaaaacaaatttcagaaccttgtgttatatcattagattaaacacagcaaa

SEQ ID NO: 19962 - DNA, 721 bp, synthetic construct
  source 1..721: mol_type = other DNA
cccacccacagggcccactgggcgctagcacactggtatcaaggtacctttgtgcgcctgttttatccaccctttccccctcgtaactaagaagcataacttagacggtcaatagacagcccagtgtgccagctgggtcccgaccaagcacttctgttaccccggactaagtatcaataggctgctaacgcggctgaaggagaaaagttcgttacccggccagttacttcgagaaacctagtaacaccatgaaagttgcgtagtgtttcgctccgcacaaccccagtgtagatcaggtcgatgagtcaccgcattcctcacgggtgaccgtggcggtggctgcgctggcggcctgcccatggggtaaacccatgggacgctacaatactgacatggtgcgaagagtctattgagctaattggtagtcctccggcccctgaatgcggctaatcctaactgcggagcagatacccacataccagtgggcagtctgtcgtaacgggtaactctgcagcggaaccgactactttgggtgtccgtgtttccttttattcctaatctggctgcttatggtgacaattgagagattgttaccatatagctattggactggccatccggtgactaacagagcgatcgtttacctgtttgttggtttcgttccattaaactacaaagcactaaacactcttaattacatcttgcaacttaactcatcaaa

SEQ ID NO: 19963 - DNA, 705 bp, synthetic construct; identical to SEQ ID NO: 848
  source 1..705: mol_type = other DNA

SEQ ID NO: 19964 - DNA, 801 bp, synthetic construct
  source 1..801: mol_type = other DNA
ctgtgggttgctcccacccacagggcccactgggcgctagtacactggtatgccttacctcggtattacggtaccgttgtatatagtacctttgtacgcctgttttatattcccttcccccacatgtaactttagaagtttaagcaacaaagaccactaggagtccaacaaccagttggattgcggtcaagtacttctgtttccccggacctagtagtgataggctgtgcccacggctgaagatgaacccgtccgttatccggccagctacttcgagaagcctagtagcatcaaagatctgtcttggcgtttcgctcagcgcgttccccccgcgtagatcgggctgatgggtctccgcattccccacgggcgaccgtggcggaggccgcgtggcggcccgcctatggcgaaagccataggacgccatttcagtgacagggtgtgaagagcctattgagctagttggtagtcctccggcccctgaatgcggctaatcctaaccacggagcgtccaccagcaaaccagctgggagggcgtcgtaacgggtaactctgtggcggaaccgactactttgggtgtccgtgtttccttttgatcctattgtggctgcttatggtgacaacgataagttgttatcataaagcttttgggttggccgcctggaaaaagatatcagtgtttgatattgttcggctttcacgcctaccaacaaaacaagctctatatttgttgatttcattttatccattggaggatattaccgaatttcatctacaacttttgctcaccttatcagcaaa

SEQ ID NO: 19965 - DNA, 679 bp, synthetic construct; identical to SEQ ID NO: 818
  source 1..679: mol_type = other DNA

SEQ ID NO: 19966 - DNA, 723 bp, synthetic construct
  source 1..723: mol_type = other DNA
ttcccacccacagggcccactgggcgctagcactctggtatcatggtacctttgtgcgcctgttttatccaccctccccaaaatgcaacttagaagcataatccaagcggtcattaggtagctcagtacaccaactgagcccagaccaagcacttctgtcaccccggaccgagtatcaataggctgctcgcgcggctgaaggagaaaacgttcgttatccggccaattacttcgagaaacccagtaccactatgaaagttgcgcagcgtttcgttccgcacaaccccagtgtagatcaggtcgatgagtcaccgcgttccccacgggcgaccgtggcggtggctgcgttggcggcctgcccatggggcaacctatgggacgcttcaatactgacatggtgtgaagagtctattgagctaattggtagtcctccggcccctgaatgcggctaatcctaactgcggagcagatgctcacaaaccagtgggcagtctgtcgtaatgggtaactctgcagcggaaccgactactttgggtgtccgtgtttccttttatttttacactggctgcttatggtgacaattgagagattgttaccatatagctattggattggccatccggtgactaacagagcaattgtttacctatttattggttttgtaccgttagattacaaagttctaaagactctgaatcttattatagcactcaatacagtaaa

SEQ ID NO: 19967 - DNA, 795 bp, synthetic construct
  source 1..795: mol_type = other DNA
ggttgttcccaccctagagcccactgggcgctagtacactggtacgccagtaccttggtatcacggtatcattgtacgtcagtacctttgtatgcctgttttatgccccttcccccaatgtaactttagaagcttacaaaacaaagaccactaggagtccaacacccagttggattgcggtcaagcacttctgtttccccggacctagtagtgataggctgtacccacggccgaagatgaacccgtccgttatccggccagctacttcgagaagcctagtagcatcaaagatctgtcttggcgtttcgctcagcgcgttccccccgcgtagatcgggctgatgggtctccgcatcccccacgggcgaccgtggcggaggccgcgtggcggcccgcctatggcgaaagccataggacgccatttcagtgacagggtgtgaagagcctattgagctagttggtagtcctccggcccctgaatgcggctaatcctaaccacggagcgtccaccagcaaaccagctggcagggcgtcgtaacgggtaactcggtggcggaaccgactactttgggtgtccgtgtttccttttgatcctattttggctgcttatggtgacaacgataagttgttatcataaagcttttgggttggccacctggaaaaagttatcagtgtttgatattgttcggctttcacgcctaccaataagacaagctctttatttgttaattgcattttatccatctgaggatattactgaatttcatttacaactcctgcttacattgtcaacaag

SEQ ID NO: 19968 - DNA, 789 bp, synthetic construct
  source 1..789: mol_type = other DNA
cccacccacagggcccactgggcgctagtacactggtatgccttacctcggtatcacggtaccgttgtatacagtacctttgtacgcctgttttatatcccttccccaaatcgtaactttagaagtttaaataaacaaagaccaataggagtccaacatccagttggattgcggtcaagcacttctgtctccccggacctagtagtgataggctgtacccacggccgaagatgaacacgtccgttatccggccagctacttcgagaagcctagtaacatcaaagatctgtcttggcgtttcgctcagcgcgttccccccgcgtagatcgggctgatgggtctccgcataccccacgggcgaccgtggcggaggccgcgtggcggcccgcctatggcgaaagccataggacgccatttcagtgacagggtgtgaagagcctattgagctagttggtagtcctccggcccctgaatgcggctaatcctaaccacggagcactcgccaacaaaccagttggtagggtgtcgtaacgggtaactctgtggcggaaccgactactttgggtgtccgtgtttccttttgatcctatattggctgcttatggtgacaacgataagttgttatcataaagcttttgggttggccacctggaaaaagttatcagtgtttgatattgttcggctttcacgcctaccaataaaacaagccttatatttgttaatttcattttatccatccaaggatattactgaatttcatcttaaactcttactctcattatcagcaag

SEQ ID NO: 19969 - DNA, 747 bp, synthetic construct
  source 1..747: mol_type = other DNA
ggttttaaaacaggccgtgggttgttcccacccacggggcccattgggcgctagcacactggtatcacggtacccttgtgcgcctgttttatccaccccctccccaatgtaacatagaagcacaaactaagtggtcaatagacggctcagtgcaccaactgggtttagaccaagcacttctgttaccccggactgagtatcaataggctgctcacgcggctgaaggagaaaacgttcgttacccggccaactacttcgagaagcccagtaccaccatgaaggttgcgcagtgtttcgttcagcacaaccccagtgtagatcaggtcgatgagtcaccgcaatccccacgggcgaccgtggcggtggctgcgctggcggcctgcccatggggtgacccatgggacgcttcaattccgacatggtgcgaagagcctattgagctagttggtagtcctccggcccctgaatgcggctaatcccaactgcggagcaagcacccacaaaccagtgggctgtttgtcgtaacgggcaactctgcagcggaaccgactactttgggtgtccgtgtttccttttattcctacactggctgcttatggtgacaattgaaagattgttgccatatagctattggattggccatccggtaacaaacagagctattatttacttatttgttggctttgtgccgttgaatttcaaagttataaaaaccataacctccatcttgacactcaacacagcaaa

SEQ ID NO: 19970 - DNA, 725 bp, synthetic construct
  source 1..725: mol_type = other DNA
tgttcccacccacagggcccaccgggcgctagcacactggtatcccggtacctttgtgcgcctgttttacacaccctcccccgatggcaacttagaagatttccacacacggtcaataggcggctcagtataccaactgggtcatgaccaagcacttctgttcccccggactgagtatcaataagctgctcacgtggctgaaggagaaaacgttcgttatccggccaattacttcgagaagcttagtaccaccatagaggttgcgcagtgtttcgctccgcacaaccccagtgtagatcaggtcgatgagtcaccgcactcctcacgggcgaccgtggcggtggctgcgctggcggcctgcccatggggcaacccatgggacgcttcaatactgacatggtgcgaagagcctattgagctaattggtattcctccggcccctgaatgcggctaatcctaactgcggagcagatacccacgagccagtgggcagtctgtcgtaatgggtaactctgcagcggaaccgactactttgggtgtccgtgtttccttttattcctatattggctgctaatggtgacaattgagagattgttgccatatagctattggattggccatccggtgacaaacagagcgattatctatctatttgttggcttcataccattaaaccttagagtcctaaagaccctcaacttaattatacaatttaactctgcgaa

SEQ ID NO: 19971 - DNA, 687 bp, synthetic construct
  source 1..687: mol_type = other DNA
ggtatcacggtacctttgtgcgcctgttttataacccctcccccgaatgtaacgtagaagctgaacctaagtggtcaataggcggctcagaacaccatctgggtcttgaccaagcacttctgttaccccggactgagtatcaataagctgctcacgcggctgaaggagaaaacgtccgttacccggccaattacttcaagaaacccagtaccaccatgaaggttgcgcagcgtttcgctccgcacaaccccagtgtagatcaggtcgatgagtcaccgcattcctcacgggcgaccgtggcggtggctgcgctggcggcctgcccatggggcaacccatgggacgcttcaatactgacatggtgcgaagagtcaattgagctaattggtagtcctccggcccctgaatgcggctaatcctaactgcggagcagacgcccaagctccagtgggtagtctgtcgtaacgggtaactctgcagcggaaccgactactttgggtgtccgtgtttccttttattcttacattggctgcttatggtgacaattgagagattgttaccatatagctattggattggccatccggtgacaaatagagcaattgtatatctttttgttggattcataccactcggcaaaacaaatttcagaaccttgtgttatattattagattaaatacagcaaa

SEQ ID NO: 19972 - DNA, 725 bp, synthetic construct
  source 1..725: mol_type = other DNA
tgttcccacccacagggcccaccgggcgctagcacactggtatctcggtacctttgtgcgcctgttttatacacccttccccgagtgcaacttagaagatatccacacacggtcaataggcggctcagtatgccaactgagtcatgaccaagcacttctgttcccccggactgagtatcaataagctgcttacgtggctgaaggagaaaacgttcgttatccggccaattacttcgagaagcttagtaccaccatggaggttgcgcagtgtttcgttccgcacaaccccagtgtagatcaggtcgatgagtcaccgcactcctcacgggcgaccgtggcggtggctgcgctggcggcctgcccatggggcaacccatgggacgcttcaatactgacatggtgcgaagagcctattgagctaattggtagtcctccggcccctgaatgcggctaatcctaactgcggagcagacacccacgagccagtgggcggtctgtcgtaatgggtaactctgcagcggaaccgactactttgggtgtccgtgtttccttttatccatacattggctgcttatggtgacaattgagagattgttaccatatagctattggattggccgtccagtgacgaacagagcgattatctatctatttgttggcttcgtaccattaaaccttagagtcctaaagaccctcaatttgattatacaatttaactctgcgaa

SEQ ID NO: 19973 - DNA, 733 bp, synthetic construct
  source 1..733: mol_type = other DNA
tggggttgttcccaccccagaggcccacgtggcggctagtactccggtattacggtacccttgtacgcctgttttatactcccctccccgcaacttagatgaaacaaaacaagttcaataggagggggtacaaaccagtaccaccacgaacaagcacttctgtctccccggtgacattgcatagactgtccccacggttgaaagcaattgatccgttacccgctcttgtacttcgagaagcctagtaccatcttggaatcattgatgcgttgcgctccacactcagtcccagagtgtagcttaggctgatgagtctggacattcctcaccggcgacggtggtccaggctgcgttggcggcctacctgtggcccaaagccacaggacgctagatgtgaacaaggtgtgaagagcctattgagctataagagagtcctccggcccctgaatgcggctaatcccaaccacggatcaagggtgcacgaaccagtgtataccttgtcgtaacgcgcaagtctgtggcggaaccgactactttgggtgaccgtgtttccttttattatttcaatggctgcttatggtgacaatcattgattgttatcataaagcgaattggattggccatccggtgaaagtgaaacatattgtttgcctcctcgttgggtctactccaaccaatctctttgcttacaatcttaccactacagttttgctggttagaagtgtgtttcacg

SEQ ID NO: 19974 - DNA, 798 bp, synthetic construct
  source 1..798: mol_type = other DNA
gttgttcccacccacagggcccactgggcgccagtacactggtacgccagtaccttggtatcacggtatcactgtacgccagtacctttgtacgcctgttttatattccccttccccacatgtaaccttagaagtttaaacaaaatctgaccaataggagtccaacatccagttggattgcggtcgagcacttctgtttccccggacctagtagtgataggctgtacccacggccgaagatgaacccgtccgttatccggccagctacttcgagaagcctagtaacatcaaagatctgtcttggcgtttcgctcagcgcgttccccccgcgtagatcgggccgatgggtctccgcatcccccacgggcgaccgtggcggaggccgcgtggcggcccgcctatggcgaaagccataggacgccatttcagtgacagggtgtgaagagcctattgagctagttggtagtcctccggcccctgaatgcggctaatcctaaccatggagcgtccaccgacaatccagtcggcgggacgtcgtaatgggtaactccgtggcggaaccgactactttgggtgtccgtgtttccttttgatcctattttggctgcttatggtgacaacgacaagttgttatcataaagcttttgggttggccacctggaaaaagttatcagtgtttgatattgttcggctttcacgcctaccaataaaacaagctttatacttgttagtttcattttatccatctgaggatattactgagtttcacctacaacttttgctcacattatcagcaag

SEQ ID NO: 19975 - DNA, 672 bp, synthetic construct
  source 1..672: mol_type = other DNA
tttaaaacagcttgagggttgttcccaccctcagggcctactgggcgctagtacaccggtatctcggtacccttgtacgcctgttttatcttccctccccaaaagtaactttagaagcaagtaaactcacagctcaacagccatcgcaccgccagtgcgattttgagcaagcactcctgtttccccggttgcgtcccatatgctgtgaaaacggcagaaggggacaatatcgttacccgcttatctactacgggaagcctagtaacaccattgagcactttgagggttgcgttcagcgctaaacccagcgtagctcaggctgatggggcttcggaatccccacgggtgaccgtgtcgaagcccgcgttggcggcctgcccacaccaatgggtgtgggacgctcaatttgtgacatggtgcgaagagcctactgtgctaggtgagagtcctccggcccctgaatgtggctaatcctaaccaccgaacccgtggttgcaatccagcaactagcgggccgtaatgcgcaagtcggtgatggaaccaactactttgggtgaccgtgtttcctttatctcttatattgcaattttatggtgacatttatagtatttaagtgttaccatatattgcgcaaatacattgtaataatacagagttattactacggaaatc

SEQ ID NO: 19976 - DNA, 726 bp, synthetic construct
  source 1..726: mol_type = other DNA
gttcccaccccagaggcccacgtggcggctagtactccggtattacggtacccttgtacgcctgttttatactcccctccccgtaacttagaagaaacaaatcaagttcaataggagggggtacaaaccagtaccaccacgaacaagtacttctgtctccccggtgacattgcatagactgtccccacggttgaaagcgattgatccgttacccgctcttatacttcgagaagcctagtaccaccttggaatcatcgatgcgttgcgctccgcactcaaccccagagtgtagcttaggctgatgagtctggacattcctcaccggcgacggtggtccaggctgcgttggcggcctacctgtggcccaaagccacaggacgctagttgtgaacaaggtgtgaagagcctattgagctataagagagtcctccggcccctgaatgcggctaatcccaaccacggatcaagggtgcacgaaccagtgtataccttgtcgtaacgcgcaagtctgtggcggaaccgactactttgggtgtccgtgtttccttttattgtttcaatggctgcttatggtgacaatcattgattgttatcataaagcgaattggattggccatccggtgaaagtgaaacatattgtttgcctcctcgttgggtctactccaatcaatctttttacctacaatcttattaccacagttttactggttagaagtgtgttccaca

SEQ ID NO: 19977 - DNA, 727 bp, synthetic construct
  source 1..727: mol_type = other DNA
ggttgatcccacccacagggcccatagggcgctagcactctggtattgcggtacctttgtgcgcctgttttatattcccacccccaattgcaacttagaagcagtacttaacgaccaacagtgggcgtgacacaccagccacgtctcggtcaagcacttctgtctccccggactgagtatcaaaaagctgctcacgcggctgaaggagaaaacgtccgttatccggccaattacttcgagaaacctagtaccgccatgaaagttgcgcagcgtttcgatccgcacaaccccagtgtagatcaggtcgatgagtcaccgcgttccccacgggtgaccgtggcggtgactgcgttggcggcctgcccatgggagaacccatgggacgcttcaatactgacatggtgtgaagagtctattgagctaattggtagtcctccggcccctgaatgcggctaatcctaactgcggagcagattcccgcatgccagcgggtggtctgtcgtaacgggcaactctgcagcggaaccgactactttgggtgtccgtgtttccttttattcttatattggctgcttatggtgacaattgagagattgttaccatatagctattggattggccatccggtaacaaacagagcaattatttaccaatttattggttttgtaccattgaattttaacacattcaaaactcttaaccttatcttggctcttaatacagcaaa

SEQ ID NO: 19978 - DNA, 680 bp, synthetic construct
  source 1..680: mol_type = other DNA
gcggtacctttgtgcgcctgttttatattcccacccccaaacgcaacttagaagcagtacttcacgaccaacagtgggcgtggcacaccagccacgtctcggtcaagcacttctgtctccccggactgagtatcaataagctgatcgcgcggctgaaggagaaaacgtccgttatccggccaattacttcgagaaacctagtaccaccatgaaagttgcgtggcgtttcgatccgcacaaccccagtgtagatcaggtcgatgagtcaccgcgttccccacgggtgaccgtggcggtggctgcgttggcggcctgcccatgggggaacccatgggacgcttcaatactgacatggtgtgaagagtctattgagctaattggtagtcctccggcccctgaatgcggctaatcctaactgcggagcagattcccgcatgccagcgggtggtctgtcgtaacgggcaactctgcagcggaaccgactactttgggtgtccgtgtttccttttattcctatattggctgcttatggtgacaattgagagattgttaccatatagctattggattggccatccggtgacaaacagagcaattatttaccaatttattggttttgtaccattgaattttaacgcattcaaaactcttaaccttattttggctcttaatacatcaaa

SEQ ID NO: 19979 - DNA, 729 bp, synthetic construct
  source 1..729: mol_type = other DNA
ggttgctcccacccacagggcccactgggcgctagcacactggtatcccggtacctttgtgcgcctgttttatttaccccacccccagctgtaatttagaagtacgacacacatggtcaatagatggctcagtgcaccaactgggtttagaccaagcacttctgttaccccggaccgagtatcaataagctgctcgcgcggctgaaggagaaaacgttcgttacccggccaattacttcgagaaacctagtaccaccatggaggttgcgcagcgtttcgctccgcacagccccagtgtagatcaggccgatgagtcaccgcattcctcacgggcgaccgtggcggtggctgcgttggcggcctgcccatggggtaacccatgggacgcttcaatactaacatggtgtgaagagtctattgagctaattggtagtcctccggcccctgaatgcggctaatcctaactgcggagcagatactcacatgccagtgggcagtctgtcgtaacgggcaactctgcagcggaaccgactactttgggtgtccgtgtttccttttattcttatactggctgcttatggtgacaattgagaaattgttaccatatagctattggattggccatccagtgacaaacagagcaattgtttacctatttgtcggcttcataccgttaaacttaagagttttgaagacccttaacttgattatactattcaactctgtaaa

SEQ ID NO: 19980 - DNA, 725 bp, synthetic construct
  source 1..725: mol_type = other DNA
ttcccaccctagaggcccacgtggcggctagtactctggtattacggtacctttgtacgcctgttttatatccctacccccattgtaacttagaagtttcaaagcacagttcaatagacagtagtacaaaccagtactgctacgaacaagcacttctgtttccccggtgaagctgcatagactgtacctacggttgaaagcaactgatccgttatccgctttagtacttcgagaagcctagtaacaccttggaatcttcgatgcgttgcgctcagcactcaaccccagagtgtagcttaggtcgatgagtctggacattcctcaccggcgacggtagtccaggctgcgttggcggcctacctgtggctcaaagccacaggacgctagttgtgaacaaggtgtgaagagcctattgagctactaaagagtcctccggcccctgaatgcggctaatcctaaccacggagcaagtgctcacaatccagtgagtggcttgtcgtaatgagcaattctgtggcggaaccgactactttgggtgtccgtgtttccttttatttttatcattggctgcttatggtgacaatctaagattgccatcatatagcttttggattggccatccggtgatatttcgaattattcaatttgctgcttacagctcttttaaacagtattcactcaccagcattcgtattttactcttgaattgtcaacaaatagtcaaa

SEQ ID NO: 19981 - DNA, 722 bp, synthetic construct
  source 1..722: mol_type = other DNA
caaccccagaggcccacgtggcggctagtactccggtattacggtacccttgtacgcctgttttatactcccctccccgtaacttagaagaaacaaattaagttcaataggagggggtacaaaccagtaccaccacgaacaagcacttctgtctccccggtgacattgcatagactgtccccacggttgaaagcgattgatccgttacccgctcttatacttcgagaagcctagtaccatcttggaatcatcgatgcgttgcgctccacactcaatcccagagtgtagcttaggctgatgagtctggacattcctcactggcgacggtggtccaggctgcgttggcggcctacctgtggcccaaagccacaggacgctagttgtgaacaaggtgtgaagagcctattgagctataagagagtcctccggcccctgaatgcggctaatcccaaccacggatcaagggtgcacgaaccagtgtataccttgtcgtaatgcgcaagtctgtggcggaaccgactactttgggtgtccgtgtttccttttattgtttcaatggctgcttatggtgacaatcattgattgttatcataaagcgaattggattggccatccggtgaaagtgaaacatattatttgcctcctcgttgggtctactccaatcaatctctttacttataatcttatcaccacagttttactggttagaggtgtgtttcaca

SEQ ID NO: 19982 - DNA, 800 bp, synthetic construct
  source 1..800: mol_type = other DNA
gtgggttgttcccacccacagggcccactgggcgctagtacactggtatgccttacctcggtattgcggtaccgttgtatacagtacctttgtacgcctgttttaaaatcccttccccaaatgtaaccttagaagctttagttgacaaagaccaataggagtccaacatccagttggattgcggtcaagcacttctgtctccccggacctagtagtgataggctgtacccacggccgaagatgaacccgtccgttatccggccagctacttcgagaagcctagtaacatcaaagatctgtcttggcgtttcgctcagcgcgtttccccccgcgtagatcgggctgatgggtctccgcacaccccacgggcgaccgtggcggaggccgcgtggcggcccgcctatggcgaaagccataggacgccatttcagtgacagggtgtgaagagcctattgagctagttggtagtcctccggcccctgaatgcggctaatcccaaccacggagcactcgccaacaagccagttggtagggtgtcgtaatgggtaactctgtggcggaaccgactactttgggtgtccgtgtttccttttgatcccattttggctgcttatggtgacaacaataagttgttatcataaagcttttgggttggccacctggaaaaagttatcagtgtttgatattgtacggctttcacgcctgccaataagacaagctttgtatttgctgatttcattttattcagtgagagacattacagacgcacacctaaaccttttgctcgcactgtcagcagg

SEQ ID NO: 19983 - DNA, 795 bp, synthetic construct
  source 1..795: mol_type = other DNA
gttgttcccacccacagggcccactgggcgccagtacactggtatgctttacctcggtattacggtaccgttgtatacagtacctttgtacgcctgttttaaatcccctcccccaaatgtaaccttagaagtttaagtaaactgagaccaataggagtccaacacccagttggattacggtcaagtacttctgtttccccggacctagtagtgataggctgtacccacggctgaagatgaacccgtccgttatccggccagctacttcgagaagcctagtagcatcaaagatctgtcttggcgtttcgctcagcgcgttccccccgcgtagatcgggctgatgggtctccgcactccccacgggcgaccgtggcggaggccgcgtggcggcccgcctatggcgaaagccataggacgccatttcagtgacagggtgtgaagagcctattgagctagttggtagtcctccggcccctgaatgcggctaatcctaaccacggagcgtccgccaacaatccagttggtagggcgtcgtaacgggtaactctgtggcggaaccgactactttgggtgtccgtgtttccttttgatcctattttggctgcttatggtgacaacgataagttgttatcataaagcttttgggttggccacctggaaaaagatatcagtgtttgatattgttcggctctcacgcctaccaacaaaacaagctctatatttattaatttcattttatccattggaaaacgtcactgagtttcatttacaacttttgctcacacttgcgataag

SEQ ID NO: 19984 - DNA, 720 bp, synthetic construct
  source 1..720: mol_type = other DNA
acccacccacagggcccactgggcgctagcacactggtattacggtacctttgtgcgcctgttttatccaccctccccgatgtaacttagaagctcaacttagatggtcaataggcaacctagcaaaccagctggggctcgaccaagcactcctgttaccccggactgagtatcaataggccgctcgcgcggctgaaggagaaaacgttcgttacccggccaattacttcgagaaacttagtaacaccgtgaaagttgcgcagcgtttcgctccgcacaatcccagtgtagatcaggtcgatgagtcaccgcattccccacgggcgaccgtggcggtggctgcgttggcggcctgcccatgggagatcccatgggacgctacaatactgacatggtgcgaagagtctattgagctaattggtactcctccggcccctgaatgcggctaatcctaactgcggagcagatacccacataccagtgggcagtctgtcgtaacgggcaactctgcagcggaaccgactactttgggtgtccgtgtttccttttattcttactttggctgcttatggtgacaattgaaagattgttaccatatagctattggattggccatccggtgacaaacagagccattgtatatttgtttgttggtttcattccactaaattataaagagttaaacactcttgaatttatcataacactcaattcatcaaa

SEQ ID NO: 19985 - DNA, 688 bp, synthetic construct
  source 1..688: mol_type = other DNA
tggtatctcggtacccttgtgcgcctgttttatccacccttttcccatttaacttagaagcacgcgccaagacggtcaaaagggagcccagtaagccaattgggctatgaccaagcactcctgtaaccccgggccgagtatcaataagctgctcgcgcggctgaaggagaaaaagctcgttacccggccaattacttcgagaaacccagtagcatcatgaaagttgcgcagcgtttcgctccacacaaccccagtgtagatcaggtcgatgagtcaccgcgttccccacgggtgaccgtggcggtggctgcgctggcggcctgcccatggggccacccatgggacgcttcaatactgacatggtgtgaagagtctattgagctaattggtagtcctccggcccctgaatgcggctaatcctaactgcggagcagatgcccacacaccagtgggaagtctgtcgtaacgggtaactctgcagcggaaccgactactttgggtgtccgtgtttccttttatttctactctggctgcttatggtgacaattgaaaggttgttaccatatagctattggattggccatccggtgtcacatagagcgattatttacttgtttgttgggtttataccactgaactataaagttttaaatactcttaactacattttaatccttaactcattaaa

SEQ ID NO: 19986 - DNA, 709 bp, synthetic construct
  source 1..709: mol_type = other DNA
ggcccatgggcgctagcactctggtattacggtacccttgtgcgcctgttttatccacccctcccgatgtaacttagaagttgatcaaagaaaaggtcagtaggatgcccagtacaccaactgggttttgaccaagcacttctgttaccccggaccgagtatcaataggccactcacgtggctgaaggagaaaacgttcgttatccggccaattacttcgagaaacccagtaacaccatgaaggttgcgcggcgtttcgctccacacaaccccagtgtagatcaggccgatgagtcaccgcattccccacgggcgaccgtggcggtggctgcgctggcggcctgcccatggggcaacccatgggacgcctcaataccgacatggtgcgaagagtctattgagctaattggtagtcctccggcccctgaatgcggctaatcccaactgcggagcagatgcccacaaaccagtgggtggtctgtcgtaacgggcaactctgcagcggaaccgactactttgggtgtccgtgtttccttttattcttatactggctgcttatggtgacaattgggaaattgttaccatatagctattggattggccacccggtttgcaacagagcacttgtatttctgtttgttgggttcgtaccacttgactttaatagttacagaactttactctacattgtccaattgaatacaaaaag

SEQ ID NO: 19987 - DNA, 730 bp, synthetic construct
  source 1..730: mol_type = other DNA
tgggttgttcccacccacagggcccactgggcgctagcactctggtatcatggtacctttgtgcgcctgttttatccaccctccccaaaatgcaacttagaagcataatccaaacggtcattaggtagctcagtacaccaactgagcccagaccaagcacttctgtcaccccggaccgagtatcaataggctgctcgcgcggctgaaggagaaaacgttcgttatccggccaattacttcgagaaacccagtaccactatgaaagttgcgcagcgtttcgttccgcacaaccccagtgtagatcaggtcgatgagtcaccgcgttccccacgggcgaccgtggcggtggctgcgttggcggcctgcccatggggcaacccatgggacgcttcaatactgacatggtgtgaagagtctattgagctaattggtagtcctccggcccctgaatgcggctaatcctaactgcggagcagatgctcacaaaccagtgggcagtctgtcgtaatgggtaactctgcagcggaaccgactactttgggtgtccgtgtttcctttcatttttacactggctgcttatggtgacaattgagagattgttaccatatagctattggattggccatccggtgactaacagagcaattgtttacctatttattggttttgtaccgttagattacaaagttctaaagactctgaatcttattatagcactcaatacagtaaa

SEQ ID NO: 19988 - DNA, 722 bp, synthetic construct
  source 1..722: mol_type = other DNA
atcccacccacagggcccattgggcgctagcacactggtatcacggtacctttgtgcgcctgttttatccacccctccccgatgcaacttagaagcatgttacaaacggtcaataggcggttcagtgaaccaactgagcctcgaccaagcacttctgttaccccggactgagtatcaataggctgctcgcgtggctgatggagaaaacgtccgttacccggccaattacttcgagaaacctagtaccaccatgaaagttgcgcagcgtttcgctccgcacaaccccagtgtagatcaggtcgatgagtcactgcgttccccacgggcgaccgtggcagtggctgcgttggcggcctgcccatggggtatcccatgggacgcttcaatactgacatggtgcgaagagtctattgagctaattggtagtcctccggcccctgaatgcggctaatcctaactgcggagcagatacccacgcaccagtgggcagtctgtcgtaacgggcaactctgcagcggaaccgactactttgggtgaccgtgtttccttttattctaatactggctgcttatggtgacaattgaaagattgttaccatatagctattggattggccatccggtaacaaacagagcaattatttacctgtttattggttttatacctctcaatcacaaggctataaatactctcaacctcattttagcacttaacacagcaaa

SEQ ID NO: 19989 - DNA, 689 bp, synthetic construct
  source 1..689: mol_type = other DNA
ggtatcacggtacccttgtacgcctgttttatactcccttcccccgtaacttagaagaaataaaccaagttcaatagaagggggtacaaaccagtaccaccacgaacaagcacttctgtttccccggtgaagttgtatagactgtacccacggttgaaggcgactgatccgttatccgcttttgtacttcgaaaagcttagtatcatcttggaatcttcgacgcgttgcgctcagcactcaaccccagagtgtagcttaggctgatgagtctggacactcctcaccggtgacggtggttcaggctgcgttggcggcctacctgtggcccaaagccacaggacgctagttgtgaacaaggtgtgaagagcctattgagctacaaaagagtcctccggcccctgaatgcggctaatcctaaccacggagcaagggtgcgcaaaccagtgcatgccttgtcgtaacgcgcaagtctgtggcggaaccgactactttgggtgtccgtgtttccttttattcttataatggctgcttatggtgacaatcatagattgttatcataaagcgaattggattggccatccggtgaaagtgaaacacattatttatctttttgttggattcactccattcacttccctttcttttaaactcatcactacagtcttattgattagagactcatatcaca

SEQ ID NO: 19990 - DNA, 800 bp, synthetic construct
  source 1..800: mol_type = other DNA
gtgggttgttcccacccacagggcccactgggcgctagtacactggtatgccagtactctggtattacggtaccactgtacgccagtacctttgtacgcctgttttatatccctttcccaaacgtaaccttagaagtttaagtaaacaaagaccaataggagtccaacatccagttggattgcggtcaagcacttctgtttccccggacctagtagtgataggctgtacccacggccgaagatgaacccgtccgttatccggccagctacttcgagaagcctagtagcatcaaagatctgtcttggcgtttcgctcagcgcgttccccccgcgtagatcgggtcgatgggtctccgcatcccccacgggcgaccgtggcggaggccgcgtggcggcccgcctatggcgaaagccataggacgccatttcagtgacagggtgtgaagagcctattgagctagttggtagtcctccggcccctgaatgcggctaatcctaaccacggagcgtccaccagcaaaccagctgggagggcgtcgtaacgggtaactctgtggcggaaccgactactttgggtgtccgtgtttccttttgatcctattgtggctgcttatggtgacaacttacagttgttatcataaagcttttggattggccatccggaaagagttaacagtttgctcgctcattgctttgtcaaagcttccgttaaggaaagcagtttatttgttagtctcgttttataaattaagggagatctcaagtgctcacctggaattgctcatacaattacatcaatc

SEQ ID NO: 19991 - DNA, 687 bp, synthetic construct
  source 1..687: mol_type = other DNA
actatcaaggtacctttgtgcgcctgttttatagctccctccccgaatgtaacgtagaagctgaacccaagcggtcaacaggcggctcagagcaccatctgggtcttgaccaagcacttctgttaccccggactgagtatcaataagctgctcacgcggctgaaggagaaaatgttcgttatccggccaattacttcgagaaacctagtaccaccatgaaggttgcgcagcatttcgctccgcacaatcccagtgtagatcaggtcgatgagtcaccgcattcctcacgggcgaccgtggcggtggctgcgctggcggcctgcccatggggcaacccatgggatgcttcaatactgacatggtgtgaagagtcaattgagctaattggtagtcctccggcccctgaatgcggctaatcctaactgcggagcagacgcccaagctccagtgggtagtctgtcgtaacgggtaactctgcagcggaaccgactactttgggtgtccgtgtttccttttattcttacattggctgcttatggtgacaattgagagattgttaccatatagctattggattggccatccggtgacgaatagagcaattgtgtatctttttgttggattcataccactagataatacaaacttcaaaaccttgtgttacatcattagattaaacacagcaag

SEQ ID NO: 19992 - DNA, 792 bp, synthetic construct
  source 1..792: mol_type = other DNA
gtacccacccacagggcccactgggcgccagtacactggtatgcttaaccacggtattacggtaccgttgtttacagtacctttgtacgcctgttttatattccctccccaaattgtaactttagaagtacaaataaataaagaccaataggagtccaacatccagttggattgcggtcaagcacttctgtctccccggacctagtagtgataggctgtacccacggccgaagatgaacccgtccgttatccggccagctacttcgagaagcctagtagcatcaaagatctgtcttggcgtttcgctcagcgcgttccccccgcgtagatcgggctgatgggtctccgcataccccacgggcgaccgtggcggaggccgcgtggcggcccgcctatggcgaaagccataggacgccatttcagtgacagggtgtgaagagcctattgagctagttggtagtcctccggcccctgaatgcggctaatcctaaccacggagcatccgccaacaaaccagttggtagggtgtcgtaacgggtaactctgtggcggaaccgactactttgggtgtccgtgtttccttttgatcctatattggctgcttatggtgacaacgataagttgttatcataaagctcttgggttggccacctggaaaaagttatcagtgtttgatattgttcggctttcacgcctaccaataaaacaagctttatatttgttaatttcatttcatccatctgaggatattactgaatttcacttacagctcttgcttacactgtcaacaag

SEQ ID NO: 19993 - DNA, 717 bp, synthetic construct
  source 1..717: mol_type = other DNA
gttgccccatgggcaggccgccagcacactggtatcaaggtacctttgtgcgcctgttttatagccccttccccgaatgtaacgtagaagctgaacccaagcggtcaacaggcggctcagaacaccatctgggtcttgaccaagcacttctgttaccccggactgagtatcaataagctgctcacgcggctgaaggagaaaatgttcgttatccggccaattacttcgagaaacctagtaccaccatgaaggttgcgcagcgtttcgctccgcacaatcccagtgtagatcaggtcgatgagtcaccgcattcctcacgggcgaccgtggcggtggctgcgctggcggcctgcccatggggcaacccatgggacgcttcaatactgacatggtgcgaagagttaattgagctaattggtagtcctccggcccctgaatgcggctaatcctaactgcggagcagatgcccaagctccagtgggtagtctgtcgtaacgggtaactctgcagcggaaccgactactttgggtgtccgtgtttccttttattcttacattggctgctaatggtgacaattgagagattgttaccatatagctattggattggccatccggtgacgaatagagcaattgtgtatctttttgttggattcataccattagacaatacaaacttcaaaaccttgtgttacatcattagattaaacacagcaag

SEQ ID NO: 19994 - DNA, 698 bp, synthetic construct
  source 1..698: mol_type = other DNA
gccagcacactggtatctcggtacctttgtgcgcctgttttatagcccctcccccgaatgtaacgtagaagctgaacctaagtggtcaataggcggctcagaacaccatctgggtcttgaccaagcacttctgttaccccggactgagtatcaataagctgctcacgcggctgaaggagaaaacgttcgttacccggccaattacttcgagaaacccagtatcaccatgaaggttgcgcagcgtttcgctccgcacaaccccagtgtagatcaggtcgatgagtcaccgcgttcctcacgggcgaccgtggcggtggctgcgctggcggcctgcccatggggcaacccatgggacgcttcaatgctgacatggtgcgaagagtcaattgagctaattggtagtcctccggcccctgaatgcggctaatcccaactgcggagcagacgcccaaactccagtgggtagtctgtcgtaacgggtaactctgcagcggaaccgactactttgggtgtccgtgtttccttttattcttacactggctgcttatggtgacaattgagagattgttaccatatagctattggattggccatccggtgacaaatagagcaattatatatctttttgttggattcgtaccactcgacaaaacaaatttcaaaaccttgtgttacattattagactaaatacagcaaa

SEQ ID NO: 19995 - DNA, 702 bp, synthetic construct
  source 1..702: mol_type = other DNA
gtggcggctagtacactggtatcacggtacctttgtacgcctgttttatactccctcccccgcaacttagaagtatacaattcaagctcaataggagggggtgcaagccagcgcctccgtgggcaagcactactgtttccccggtgaggtcgcatagactgttcccacggttgaaagtgtccgatccgttatccgctcatgtacttcgagaagcctagtatcgctctggaatcttcgacgcgttgcgctcagcactcaaccccggagtgtagcttgggccgatgagtctggacagtccccactggcgacagtggtccaggctgcgctggcggcccacctgtggcccaaagccacgggacgctagttgtgaacagggtgtgaagagcctattgagctacatgagagtcctccggcccctgaatgcggctaatcctaaccatggagcaggcagctgcaacccagcagccagcctgtcgtaacgcgcaagtccgtggcggaaccgactactttgggtgtccgtgtttccttttattcttgaatggctgcttatggtgacaatcatagattgttatcataaagcgagttggattggccatccagtgtgaatcagattaattgctcccttgtttgttggatccactcccgaaacgttttactccttaacttattgaaattgtttgaagacaggatttcagtgtcaca

SEQ ID NO: 19996 - DNA, 716 bp, synthetic construct
  source 1..716: mol_type = other DNA
ccatagggcccattgggcgctagcactctggtattacggtacccttgtgcgcctgttttatccacccctcccgatgtaacttagaagttgatcaaagaaaaggtcagtaggatgcccagtacaccaactgggttttgaccaagcacttctgttaccccggaccgagtatcaataggccactcacgtggctgaaggagaaaacgttcgtcatccggccaattacttcgagaaacccagtaacaccatgaaggttgcgcggcgtttcgctccacacaaccccagtgtagatcaggccgatgagtcaccgcattccccacgggcgaccgtggcggtggctgcgctggcggcctgcccatggggcaacccatgggacgcctcaataccgacatggtgcgaagagtctattgagctaattggtagtcctccggcccctgaatgcggctaatcccaactgcggagcagatgcccacaaaccagtgggtggtctgtcgtaacgggcaactctgcagcggaaccgactactttgggtgtccgtgtttccttttattcttatactggctgcttatggtgacaattgggaaattgttaccatatagctattggattggccacccggtttgcaacagagcacttgtatttctgtttgttgggttcgtgccacttgactttaatagttacagaactttactctacattgtccaattgaatacaaaaag

SEQ ID NO: 19997 - DNA, 664 bp, synthetic construct
  source 1..664: mol_type = other DNA
gcctgttttatacaccctccccgaatgcaacttagaagctttacctagatggtcaatagaaggtccagcacaccagttgggctccgaccaagcacttctgttaccccggactgagtatcaataggccgtttgcacggctgaaggagaaaacgttcgttacccggccaattacttcgagaaacccagtaacaccatgaaggttgcgcagtgtatcgctccgcacgaccccggtgtagatcaggccgatgagccaccgcgttccccacgggcgaccgtggcggtggctgcgctggcggcctgcccatggggcaacccatgggacgctacaataccgacatggtgcgaagagtctattgagctaattggtagtcctccggcccctgaatgcggctaatcctaactgcggagcaggcaccctcaagccagagggcagcttgtcgtaacgggcaactctgcagcggaaccgactactttgggtgtccgtgtttcttttattcttgaactggctgcttatggtgacaattaaaagattgttaccatatagctattggattagccatccagtgacaaacagagcgattatatattcgtttgttggttttgttccattaaactataaagttttaaacacacttaaatttgtcttactactcaactcagcaaa

SEQ ID NO: 19998 - DNA, 798 bp, synthetic construct
  source 1..798: mol_type = other DNA
gtgggttgtacccacccacagggcccaccgggcgccagtacactggtacgccagtaccatggtattacggtaccatgttacgtcagtacctttgtacgcctgttttatatcccctccccgaagtaaccttagaagtttaagtaacaaagaccaataggagtccagcaaccagctggattgcggtcaagcacttctgtttccccggacctagtagtgataggctgtacccacggccgaagatgaacccgtccgttatccggccagctacttcgagaagcctagtagcatcaaagatctgtcttggcgtttcgctcagcgcgtttcccccgcgtagatcgggctgatgggtctccgcatcccccacgggcgaccgtggcggaggccgcgtggcggcccgcctatggcgaaagccataggacgccatttcagtgacagggtgtgaagagcctattgagctagttggtagtcctccggcccctgaatgcggctaatcctaaccacggagcgtccaccagcaaaccagctggcggggcgtcgtaacgggtaactctgtggcggaaccgactactttgggtgtccgtgtttccttttgatcctattttggctgcttatggtgacaacaataagttgttatcataaagcttttgggttggccacctggaaaaagttatcagtgtttgatattgttcggctttcacgcctaccaacaaaacaagccttatatttattggttgccttttgtcccttggcggaaattactgattttcacctaaagcttctgattacattgacggcaaa

SEQ ID NO: 19999 - DNA, 798 bp, synthetic construct
  source 1..798: mol_type = other DNA
gtgggttgtacccacccacagggcccaccgggcgccagtacactggtacgccagtaccatggtattacggtaccatgttacgtcagtacctttgtacgcctgttttatatcccctccccgaagtaaccttagaagtttaagtaacaaagaccaataggagtccagcaaccagctggattgcggtcaagcacttctgtttccccggacctagtagtgataggctgtacccacggccgaagatgaacccgtccgttatccggccagctacttcgagaagcctagtagcatcaaagatctgtcttggcgtttcgctcagcgcgtttcccccgcgtagatcgggctgatgggtctccgcataccccacgggcgaccgtggcggaggccgcgtggcggcccgcctatggcgaaagccataggacgccatttcagtgacagggtgtgaagagcctattgagctagttggtagtcctccggcccctgaatgcggctaatcctaaccacggagcgtccaccagcaaaccagctggcggggcgtcgtaacgggtaactctgtggcggaaccgactactttgggtgtccgtgtttccttttgatcctattttggctgcttatggtgacaacaataagttgttatcataaagcttttgggttggccacctggaaaaagttatcagtgtttgatattgttcggctttcacgcctaccaacaaaacaagccttatatttattggttgccttttgtcccttggcggaaattactgattttcacctaaagcttctgattacattgacggcaaa

SEQ ID NO: 20000 - DNA, 801 bp, synthetic construct
  source 1..801: mol_type = other DNA
tgtgggttgttcccactcacagggcccactgggcgctagtacactggtatgccagtactctggtattacggtaccactgtacgccagtacctttgtacgcctgttttatatccctttcccaaacgtaaccttagaagtttaagtaaacaaagaccaataggagtccaacatccagttggattgcggtcaagcacttctgtttccccggacctagtagtgataggctgtacccacggccgaagatgaacccgtccgttatccggccagctacttcgagaagcctagtagcatcaaagatctgtcttggtgtttcgctcagcgcgttccccccgcgtagatcgggctgatgggtctccgcatcccccacgggcgaccgtggcggaggccgcgtggcggcccgcctatggcgaaagccataggacgccatttcagtgacagggtgtgaagagcctattgagctagttggtagtcctccggcccctgaatgcggctaatcctaaccactgagcgtccaccagcaaaccagctgggagggcgtcgtaacgggtaactctgtggcggaaccgactactttgggtgtccgtgtttccttttgatcctattgtggctgcttatggtgacaacctacagttgttatcataaagcttttggattggccatccggagagagttaacagtttgttcgctcattgctttgtcaaagtttcctttgagaaaagcaatctatttgttagtttcattttataaactagaggatatttcaagtgcccatttgaacttgttaattcaactacatcaaac

SEQ ID NO: 20001 - DNA, 726 bp, synthetic construct
  source 1..726: mol_type = other DNA
tgttcccacccacagggcctactgggcgctagcacactggtatcacggtacctttgtgcgcctgttttatagtccctccccccggacgcaacttagaagctgaacctaagcggtcaacaggcggctcagaacaccatctgggtctcgaccaagcacttctgtttccccggactgagtatcaataagctgcttacgcggctgaaggaaaaaacgtccgttatccggccaattacttcaagaaacccagtaccaccatgaaggttgcgcagcgtttcgctccgcacaaccccagtgtagatcaggtcgatgagtcaccgcattcctcacgggcgaccgtggcggtggctgcgctggcggcctgcccatggggcaacccatgggacgcttcaatactgacatggtgcgaagagtcaattgagctaattggtagtcctccggcccctgaatgcggctaatcctaactgtggagcagatgcccacgtaccagtgggtagtctgtcgtaacgggcaactccgcagcggaaccgactactttgggtgtccgtgtttctctttattcttatgttggctgcttatggtgacaattgagagattgttaccatatagctattggattggccatccggtgacgaatagagcgattgtatatctttttgttggattcgtaccattaaacaaaacaaattacaaaaccttgtgttacattattagattaaacacagcaaa

SEQ ID NO: 20002 - DNA, 663 bp, synthetic construct; identical to SEQ ID NO: 800
  source 1..663: mol_type = other DNA

SEQ ID NO: 20003 - DNA, 708 bp, synthetic construct; identical to SEQ ID NO: 852
  source 1..708: mol_type = other DNA

SEQ ID NO: 20004 - DNA, 709 bp, synthetic construct
  source 1..709: mol_type = other DNA
ggcccattggcgctagcactctggtattacggtacccttgtgcgcctgttttatccacccctcccgatgtaacttagaagttgatcaaagaaaaggtcagtaggatgcccagtacaccaactgggttttgaccaagcacttctgttaccccggaccgagtatcaataggccactcacgtggctgaaggagaaaacgttcgttatccggccaattacttcgagaaacccagtaacaccatgaaggttgcgcggtgtttcgctccacacaaccccagtgtagatcaggccgatgagtcaccgcattccccacgggcgaccgtggcggtggctgcgctggcggcctgcccatggggcaacccgtgggacgcctcaataccgacatggtgcgaagagtctattgagctaattggtagtcctccggcccctgaatgcggctaatcccaactgcggagcagatgcccacaaaccagtgggtggtctgtcgtaacgggcaactctgcagcggaaccgactactttgggtgtccgtgtttccttttattcttaaactggctgcttatggtgacaattgggagattgttaccatacagctattggattggccacccggtttgcaacagagcacttgtatttctgtttgttgggttcgtaccacttgactttaatagttacagaactttactctacattatccaattaaatacaaaaag

SEQ ID NO: 20005 - DNA, 723 bp, synthetic construct
  source 1..723: mol_type = other DNA
ttcccacccacagggcccactgggcgcttgcactctggtatcacggtacctttgtgcgcctgttttatgatcccttccccaattgaaacttagaagcattactctacgaccaatagtaggcgtggcacaccagtcgcgtcttggtcaagcacttctgtcaccccgggctgagtatcaataggctgcttacgtggctgaaggagaaaacgctcgttacccggccaattacttcgagaaacctagtagcatcatgaaagttgcgcagtgtttcgctccgcacaatcccagtgtagatcaggtcgatgagtcaccgcgttccccacgggcgaccgtggcggtggctgcgttggcggcctgcccatggggcaacccatgggacgcttcaataccgacatggtgcgaagagtctattgagctgattggtagtcctccggcccctgaatgcggctaatcctaactgcggagcagatactcacacgccagtgggcagtctgtcgtaatgggcaactctgcagcggaaccgactactttgggtgtccgtgtttccttttattctttacattggctgcttatggtgacaattgagagattgttaccatatagctattggattggccatccggtgactaatagagcgattgtttatttattcataggtttcataccactaaatcacaaagttctaaatactctcaatcttatcctagcgctcaatacgtcaag

SEQ ID NO: 20006 - DNA, 719 bp, synthetic construct
  source 1..719: mol_type = other DNA
cccacccacagggcccactgggcgcttgcacactggtatcccggtacctttgtgtgcctgttttactcaccctaccccattgtaacctagaagccaatcaaatatggtcattaggtggcccagtgcgccaactgggtcttgaccaagcacttctgttaccccggactgagtatcaataggctgctcacgcggccgaaggagaaaacgttcgttacccggccaattacttcgagaaacccagtaccaccatgaaggtagcgcagcgtttcgctccgcacaatcccagtgtagatcaggtcgatgggtcaccgcatcccccacgggcgaccgtggcggtggccgcgttggcggcctgcccatggggtatcccatgggacgcttcaatactgacatggtgcgaagagtctattgagctaattggtagtcctccggcccctgaatgcggctaatcctaactgcggagcagatacccacataccagtgggcagtctgtcgtaatgggcaactctgcagcggaaccgactactttgggtgtccgtgtttctttttattcctatttggctgcttatggtgacaattgaagaattgttaccatatagctattggattggccatccggtgaccaatagagctattgtttacctctttgttggttttgtaccactgaaccacacagtcctaaataccctaaatttgattttagtgctcaacacatcaca

SEQ ID NO: 20007 - DNA, 723 bp, synthetic construct
  source 1..723: mol_type = other DNA
tccccactcacagggcccactgggcgccagcacactggtatcaaggtacctttgtgcgcctgttttatagccccttccccgaatgtaacgtagaagctgaacccaagcggtcaacaggcggctcagaataccatctgggtcttgaccaagcacttctgttaccccggactgagtatcaataagctgctcacgcggctgaaggagaaaatgttcgttatccggccaattacttcgagaaacttagtaccaccatgaaggttgcgcagcgtttcgctccgcacaatcccagtgtagatcaggtcgatgagtcaccgcattcctcacgggcgaccgtggcggtggctgcgctggcggcctgctcatggggcaacccatgagacgcttcaatactgacatggtgcgaagagtcaattgagctaattggtagtcctccggcccctgaatgcggctaatcctaactgcggagcagatgcccaagatccagtgggtagtctgtcgtaacgggtgactctgcagcggaaccgactactttgggtgtccgtgtttccttttattcttacattggctgcttatggtgacaattgagagattgttaccatatagctattggattagccatccggtgacgaatagagcaattgtgtatctttttgttggattcataccactagacaatacaaacttcaaaaccttgtgttacatcattagactaaacacagtaag

SEQ ID NO: 20008 - DNA, 722 bp, synthetic construct
  source 1..722: mol_type = other DNA
gtaccgatgtatatagtacctttgtacgcctgttttatatccctcccccacatgtaaccttagaagtttacacaaacaaagaccaataggagtccaacacccagttggattgcggtcaagcacttctgtttccccggacctagtagtgataggctgtacccacggccgaagatgaacccgtccgttatccggctacctacttcgggaagcctagtaacattctgaagtctctgaggcgtttcgctcagcacgaccccggtgtagatcgggctgatgggtctccgcataccccacgggcgaccggcggaggcgcgttgcggcacgctatgcgaaagccataggacgcctcttagatgacagggtgtgaagagcctactgagctgggtagtagtctccggcccctgaatgcggctaatcctaaccacggagcgtccaccagcaatccagctggcagggcgtcgtaacgggcaactctgtggcggaaccgactactttgggtgtccgtgtttccttttgatcctattttggctgcttatggtgacaacgataagttgttatcataaagctcttgggttggccacctggaaaaagttatcagtgtttgatattgttcggctctcacgcctaccaataagacaagccctatatttacttgttgcattttactcgtcagaagaaatcacagagtatcatttggatttgttactcacattaaggacaag

SEQ ID NO: 20009 - DNA, 722 bp, synthetic construct
  source 1..722: mol_type = other DNA
cccacccacagggcccactgggcgctagcactctggtatcacggtacctttgtgcgcctgttttattttcccaccccctaaatgtaacttagaagctcaaattgaggggtcaataggaaacccaacacaccagttgggccttgaccaagtacttctgttaccccggaccgagtatcaataagctgcttgcgcggctgaaggagaaaacgttcgttacccggccaattacttcgagaaacctagtaacaccatgaaagttgcgcagtgtttcgctccgcacagccccagtgtagatcaggccgatgagtcaccgcgttccccacgggcgaccgtggcggtggctgcgttggcggcctgcccatggggaaacccatgggacgcttcaataccgacatggtgcgaagagtctattgagctaattggtagtcctccggcacctgaatgcggctaatcctaactgcggagcagatactcacaaaccagtgggcggtctgtcgtaacgggcaactctgcagcggaaccgactactttggagtccgtgtttcctttttattcttgacttggctgcttatggtgacaattgagagattgttaccatatagctattggattggccatccggtgacaaacagggcaattatttatttgtttgttggcttcattccactaaactataaagctataaatactcttgaattcattataatactcaattcatcaaa

SEQ ID NO: 20010 - DNA, 709 bp, synthetic construct
  source 1..709: mol_type = other DNA
cccattgggtcgctagcacactggtattacggtacctttgtgcgcctgttttatccacccttccctcaaatgaaacttagaagcttaactcgaatggtcaacaggaaacccagtacaccaactgggtcgcgaccaagcacttctgtaaccccggaccgagtatcaataagctgcttgcgtggctgaaagagaaaacgttcgttacccggccaattacttcgagaaacctagtaccaccatggaggttgcgcagtgtttcgctccgcacaaccccagtgcagatcgggccgatgagtcaccgcgttccccacgggcgaccgtggcggtggctgcgctggcggcccgcccatggggcaacccatgggacgcttcaatactgacatggtgcaaagagtctattgagctaattggtagtcctccggcccctgaatgcggctaatcccaactgcggagcagatacccacacgccagtgggcagtctgtcgtaacgggcaactctgcagcggaaccgactactttgggtgtccgtgtttccttttatcttttactggctgcttatggtgacaattgagagattgttaccatatagctactggattggccatccggtgtctaacagagcgatcatttatctgtttgttggatttgtgcccttaaacctcaaagttttcaacactcttaaccttgtactacaatttaactcagcaaa

SEQ ID NO: 20011 - DNA, 688 bp, synthetic construct
  source 1..688: mol_type = other DNA
tggtattgcggtacctttgtgcgcctgttttattcacccttccccaatgaaacttagaagtttaactcaaccggtcgatagacagcccagtacaccaactgggttttgaccaagtactcctgttttccccggactgagtatcaataagctgctcgcgcggctgaaggagaaaacgttcgttacccggccaattacttcgagaaacctagtaccaccatggacgttgcgcagtgtttcgctccgcacaaccccagtgtagatcaggtcgatgagtcaccgcaatccccacgggcgaccgtggcggtggctgcgctggcggcctgcccatggggcaacccatgggacgcttcaatactgacatggtgcgaagagtctattgagctaattggtagtcctccggcccctgaatgcggctaatcctaactgcggggcagatacccacacgccagtgggcagtctgtcgtaacgggtaactccgcagcggaaccgactactttgggtgtccgtgtttccttttattcttatattggctgcttatggtgacaattgaaagattgttgccatatagctattggattggccatccagtcagcaatagagcaattatatttctttttgttgggtttgtaccacttgataataacaactacaacaccttactatacattatccatttgaacacgagaaa

SEQ ID NO: 20012 - DNA, 725 bp, synthetic construct
  source 1..725: mol_type = other DNA
tacccatccacagggcccactgggcgttagcacactggtatcccggtacctttgtgcgcctgttttatgtccctttcccccgtattgcaacttagaagacatacaaccccggtcaacagccgacgtagcaacccagctgcgttttgaccaagtacttctgttaccccggactgagtatcaacaagctgctcgcgcggctgaaggagaaaccgtccgttacccggctaactacttcgagaagcctagtagcatcatgaacgttgcggggtgtttcgctcagcacttcccccgtgtagatcaggtcgatgagtcaccgcattccccacgggcgaccgtggcggtggctgcgttggcggcctgcctgtggagcaatccacaggacgctctaatacagacatggtgcgaagagtctattgagctagttggtagtcctccggcccctgaatgcggctaatcccaactgcggagcacattcccacaagccagtgggtagtgtgtcgtaacgggcaactctgcagcggaaccgactactttgggtgtccgtgtttccttttatttttataatggctgcttatggtgacaattgagagattgttaccatatagcttttggattggccatccggtgtctaacagagcaattatttacctgtttgttggttttatacctttaaatttcaaggttctaaaaaccctcaattttataataaaacttaattcaataaa

SEQ ID NO: 20013 - DNA, 722 bp, synthetic construct
  source 1..722: mol_type = other DNA
ttcccactcacagggcccactgggcgctagcacactggtatcatggtacctttgtgtgcctgttttatttacccttccccagtgtaacttagaagcaaacaacgcacggtcaacaggcggctcagtacgccaactgagtctcgaccaagcacttctgttaccccggaccaagtatcaataggccgctcacgcggctgaaggagaaaacgttcgttacccggccagttacttcgagaaacccagtaccaccatgaaggttgcgcagcgtttcgctccacacaaccccagtgtagatcaggccgatgagccaccgcgtccctcacgggcgaccgtggcggtggctgcgctggcggcctgcccatggggtaacccatgggacgcttcaataccgacatggtgtgaagagtctattgagctaattggtagtcctccggcccctgaatgcggctaatcctaactgcggagcagatacccacatgccagtgggcggtctgtcgtaatgggcaactctgcagcggaaccgactactttgggtgtccgtgtttccttttatttttacactggctgcttatggtgacaattgagagattgttgccatatagctattggattggccatccggtgacaaatagagcgattgtttacctatttgttggtttcataccattgaattacaaagtcctaaaaaccttagactttatcttaatacttaacacagcaaa

SEQ ID NO: 20014 - DNA, 722 bp, synthetic construct
  source 1..722: mol_type = other DNA
ttcccacccacagggcccactgggcgccagcacactggtatcacggtacctttgtgcgcctgttttatccacccttccccaacgtaacttagaagtacaccgcatacggtcaataggcagctcagtgcaccaactgagtcacgaccaagcacttctgttaccccggacttagtatcaataggctgctcacgcggctgaaggagaaaacgttcgttacccggccaattacttcgagaaacccagtaccaccatggaggttgcgcggcgtttcgctccacacaaccccagtgtagatcaggctgatgagtcaccacactccccacgggcgaccgtggtggtggctgcgctggcggcctgcccatggggcaacccatgggacgcttcaatactgaaatggtgcgaagagtctattgagctaattggtagtcctccggcccctgaatgcggctaatcctaactgcggagcagatacccacatgccagtgggcagtctgtcgtaacgggcaactctgcagcggaaccgactactttgggtgtccgtgtttccttttattcttgtactggctgcttatggtgacaattgatagattgttgccatatagctattggattggccatccagtgacaaatagagcgattatttatttattcattggtttcgtaccattaaattacacagctttaaacactctcaattttatcttggcacttaacacatcaaa

SEQ ID NO: 20015 - DNA, 722 bp, synthetic construct
  source 1..722: mol_type = other DNA
tcccacccacagggcccactgggcgctagcactctggtatcatggtacctttgtgcgcctgttttatccaccctccccaaaatgcaacttagaagcataatccaaacggtcattaggtagctcagtacaccaactgagcccagaccaagcacttctgtcaccccggaccgagtatcaataggctgctcgcgcggctgaaggagaaaacgttcgttatccggccaattacttcgagaaacccagtaccactatgaaagttgcgcagcgtttcgttccgcacaaccccagtgtagatcaggtcgatgagtcaccgcgttccccacgggcgaccgtggcggtggctgcgttggcggcctgcccatggggcaacccatgggacgcttcaatactgacatggtgtgaagagtctattgagctaattggtagtcctccggcccctgaatgcggctaatcctaactgcggagcagatgctcacaaaccagtgggcagtctgtcgtaatgggtaactctgcagcggaaccgactactttgggtgtccgtgtttcctttcatttttacactggctgcttatggtgacaattgagagattgttaccatatagctattggattggccatccggtgactaacagagcaattgtttacctatttattggttttgtaccgttagattacaaagttctaaagactctgaatcttattatagcactcaatacagtaaa

SEQ ID NO: 20016 - DNA, 718 bp, synthetic construct
  source 1..718: mol_type = other DNA
cccacagggcccactgggcgctagcacactggtatcccggtacctttgtgcgcctgttttatttaccccacccccagctgtaatttagaagttcgacacacatggtcagtagatggctcagtgcaccaactgggtttagaccaagcacttctgttaccccggaccgagtatcaataagctgctcgcgcggctgaaggagaaaacgttcgttacccggccaattacttcgagaaacctagtaccaccatggaggttgcgcagcgtttcgctccgcacagccccagtgtagatcaggccgatgagtcaccgcattcctcacgggcgaccgtggcggtggctgcgttggcggcctgcccatggggcaacccatgggacgcttcaatactaacatggtgtgaagagtctattgagctaattggtagtcctccggcccctgaatgcggctaatcctaactgcggagcagatactcacatgccagtgggcagtctgtcgtaacgggcaactctgcagcggaaccgactactttgggtgtccgtgtttccttttgttcttatactggctgcttatggtgacaattgagaaattgttaccatatagctattggattggccatccagtgacaaacagagcaattgtttacctatttgtcggcttcataccgttaaactttagagttttgaagacccttaacttgattatactattcaactctgtaaa

SEQ ID NO: 20017 - DNA, 792 bp, synthetic construct
  source 1..792: mol_type = other DNA
cccatccacagggcccactgggcgccagtacactggtacgccagtaccttggtatcacggtatcactgtacgccagtacctttgtacgcctgttttatattccccttccccacatgtaaccttagaagtttaaacaaaatctgaccaataggagtccaacatccagttggattgcggtcgagcacttctgtttccccggacctagtagtgataggctgtacccacggccgaagatgaacccgtccgttatccggccagctacttcgagaagcctagtaacatcaaagatctgtcttggcgtttcgctcagcgcgttccccccgcgtagatcgggccgatgggtctccgcatcccccacgggcgaccgtggcggaggccgcgtggcggcccgcctatggcgaaagccataggacgccatttcagtgacagggtgtgaagagcctattgagctagttggtagtcctccggcccctgaatgcggctaatcctaaccatggagcgtccaccgacaatccagtcggcgggacgtcgtaatgggtaactccgtggcggaaccgactactttgggtgtccgtgtttccttttgatcctattttggctgcttatggtgacaacgacaagttgttatcataaagcttttgggttggccacctggaaaaagttatcagtgtttgatattgttcggctttcacgcctaccaataaaacaagctttatacttgttagtttcattttatccatctgaggatattactgagtttcacctacaacttttgctcacattatcagcaag

SEQ ID NO: 20018 - DNA, 710 bp, synthetic construct
  source 1..710: mol_type = other DNA
ttaaaacaaccttggggttgttcccaccccaagggcccacgtggcggctagtactctggtatttcggtacctttgtacgcctgttttatctccctccccaatgtaacttagaagctttcaaatcaaagctcaataggtggagcgcaagccagcgcttccgtgagcaagcactcctgtttccccggtgcggttgtatagactgttcccacggttgaaaacaacctatccgttatccgctatagtacttcgagaaacctagtatcacctttggattgttgatgcgttgcgctcagcacactaacccgtgtgtagcttgggtcgatgagtctggacataccccactggtgacagtggtccaggctgcgttggcggcctactcatggtgaaaaccatgagacgctagacatgaacaaggtgtgaagagtctattgagctactatagagtcctccggcccctgaatgcggctaatcttaaccatggagcaagtgcttacaaaccagtgagttgcttgtcgtaatgcgcaagtccgtggcggaaccgactactttgggtgtccgtgtttcactttttacttttatgactgcttatggtgacaatttaatattgttaccatttagctagtcaaattaatcacataaaactttaaatcctatctaacaattcacatttgaatagcttcattttgaggactttaaacctatttacaaag

SEQ ID NO: 20019 - DNA, 710 bp, synthetic construct
  source 1..710: mol_type = other DNA
ttaaaacagccttggggttgttcccaccccaagggcccacgtggcggctagtactctggtatttcggtacctttgtacgcctgttttatctccctccccaatgtaacttagaagttttcaaatcaaagctcaataggtggagcgcaaaccagcgttttcatgagcaagcactcctgtttccccggtgcgattgtatagactgttcccacggttgaaaacaatctatccgttatccgctatagtacttcgagaaacctagtatcacctttggattgttgatgcgttgcgctcagcacactaacccgtgtgtagcttgggtcgatgagtctggacataccccactggtgacagtggtccaggctgcgttggcggcctactcatggtgaaaaccatgagacgctaaacatgaacaaggtgtgaagagtctattgagctactatagagtcctccggcccctgaatgcggctaatcttaaccatggagcaagtgctcacaaaccagtgagttgcttgtcgtaatgcgcaagtccgtggcggaaccgactactttgggtgtccgtgtttcactttttacttttatgactgcttatggtgacaatttgatattgttaccatttagcttgtcaaattaatcacacaaagccttaaatcttatctatcaatttgcatttggatagcttcattttgaagattctaaacctgttcacaaag

SEQ ID NO: 20020 - DNA, 710 bp, synthetic construct
  source 1..710: mol_type = other DNA
tgaaaacagccttggggttgttcccaccccaagggcccacgtggcggctagtactctggtatttcggtacctttgtacgcctgttttatctccctccccaatgtaacttagaagctttcaaatcaaagctcaataggtggagcgcaagccagcgcttccgtgagcaagcactcctgtttccccggtgcggttgtatagactgttcccacggttgaaaacaacctatccgttatccgctatagtacttcgagaaacctagtatcacctttggattgttgatgcgttgcgctcagcacactaacccgtgtgtagcttgggtcgatgagtctggacataccccactggtgacagtggtccaggctgcgttggcggcctactcatggtgaaaaccatgagacgctaaacatgaacaaggtgtgaagagtctattgagctactatagagtcctccggcccctgaatgcggctaatcttaaccatggagcaagtgctcacaaaccagtgagttgcttgtcgtaatgcgcaagtccgtggcggaaccgactactttgggtgtccgtgtttcactttttacttttatgactgcttatggtgacaatttaatattgttaccatttagctagtcaaattaatcatataaaactttaaatcctatctaacaattcacatttggatagcttcattttgaggactttatacctacttacaaag

SEQ ID NO: 20021 - DNA, 710 bp, synthetic construct
  source 1..710: mol_type = other DNA
tgaaaacagccttggggttgttcccaccccaagggcccacgtggcggctagtactctggtatttcggtacctttgtacgcctgttttatctccctccccaatgtaacttagaagttttcaaatcaaagctcaataggtggagcgcaagccagcgcttccgtgagcaagcactcctgtttccccggtgcggttgtatagactgttcccacggttgaaaacaacctatccgttatccgctatagtacttcgagaaacctagtatcacctttggattgttgatgcgttgcgctcagcacactaacccgtgtgtagcttgggtcgatgagtctggacataccccactggtgacagtggtccaggctgcgttggcggcctactcatggtgaaaaccatgagacgctagacatgaacaaggtgtgaagagtctattgagctactatagagtcctccggcccctgaatgcggctaatcttaaccatggagcaagtgctcacaaaccagtgagttgcttgtcgtaatgcgcaagtccgtggcggaaccgactactttgggtgtccgtgtttcactttttacttttatgactgcttatggtgacaatttaatattgttaccatttagctagtcaaattaatcacataaaactttaaatcctatctaacaattcacatttgaatagcttcattttgaggactttaaacctatttacaaag

SEQ ID NO: 20022 - DNA, 710 bp, synthetic construct
  source 1..710: mol_type = other DNA
ttaaaacagccttggggttgttcccactccaagggcccacgtggcggctagtactctggtatttcggtacctttgtacgcctgttttatctccctccccaatgtaacttagaagttttcaaatcaaagctcaataggtggagcgcaagccagcgcttccgtgagcaagcactcctgtttccccggtgcggttgtatagactgttcccacggttgaaaacaacctatccgttatccgctatagtacttcgagaaacctagtatcacctttggattgttgatgcgttgcgctcagcacactaacccgtgtgtagcttgggtcgatgagtctggacataccccactggtgacagtggtccaggctgcgttggcggcctactcatggtgaaaaccatgagacgctagacatgaacaaggtgtgaagagtctattgagctactatagagtcctccggcccctgaatgcggctaatcttaaccatggagcaagtgctcacaaaccagtgagttgcttgtcgtaatgcgcaagtccgtggcggaaccgactactttgggtgtccgtgtttcactttttacttttatgactgcttatggtgacaatttaatattgttaccatttagctagtcaaattaatcacataaaactttaaatcctatctaacaattcacatttgaatagcttcgttttgaggactttaaacctatttacaaag

SEQ ID NO: 20023 - DNA, 710 bp, synthetic construct
  source 1..710: mol_type = other DNA
ttaaaacagccttggggttgttcccaccccaagggcccacgtggcggctagtactctggtatttcggtacctttgtacgcctgttttatctccctccccaatgtaactcagaagttttcaaatcaaagctcaataggtggagcgcaagccagcgcttccgtgagcaagcactcctgtttccccggtgcggttgtatagactgttcccacggttgaaaacaacctatccgttatccgctatagtacttcgagaaacctagtatcacctttggattgttgatgcgttgcgctcagcacactaacccgtgtgtagcttgggtcgatgagtctggacataccccactggtgacagtggtccaggctgcgttggcggcctactcatggtgaaaaccatgagacgctagacatgaacaaggtgtgaagagtctattgagctactatagagtcctccggcccctgaatgcggctaatcttaaccatggagcaagtgctcacaaaccagtgagttgcttgtcgtaatgcgcaagtctgtggcggaaccgactactttgggtgtccgtgtttcactttttacttttatgactgcttatggtgacaatttaatattgttgccatttagctagtcgaattaatcacataaaactttaaatcctatctaacaattcacatttggatagcttcattttgaggactttaaacctatttacaaag

SEQ ID NO: 20024 - DNA, 732 bp, synthetic construct
  source 1..732: mol_type = other DNA
ctgtgggttgttcccacccacagggcccactgggcgtttgcacactggtatcgcggtacctttgtgcgcctgttttatccaccctcccctaattgaatttagaagtcaagcacaaccggtcaacagatagcccagcataccagctgggtttcgaccaagcacttctgttcacccgggctgagtatcaataggctgctcacgcggctgaaggagaaaacgttcgttacccggccaattacttcgagaaacctagtaccgccatggacgttgcgcagcgtttcgttccacgcaaccccagtgtagatcaggtcgatgagtcaccgcatcccccacgggtgaccgtggcggtggctgcgctggcggcctgcccatggggtaacccatgggacgcttcaatgctgacatggtgcgaagagtctattgagctaattggtagtcctccggcccctgaatgcggctaatcctaactgcggagcagacacccacacgccagtgggcagtctgtcgtaacgggcaactccgcagcggaaccgactactttgggtgtccgtgtttctttttattctttcattggctgcttatggtgacaattgagaggttgttaccatatagctattggattggccatccggtgagcaacagagcaattatatttctttttgttggatatataccacttgattctaataattacaataccctgctttatattctccaattgaatacgaaaag

SEQ ID NO: 20025 - DNA, 720 bp, synthetic construct
  source 1..720: mol_type = other DNA
cccacccacagggcccactgggcgctagcacactggtatcgcggtacctttgtgcgcctgttttatctaccccaccccaaggaaacttagaagcttaatctaaacggtcggtaggaaacccagtacaccaactgggtcatgaccaagcacttctgtaaccccggaccgagtatcaataagctgcttacgcggctgaaggagaaaacgttcgttacccggccaattacttcgagaaacctagtaccaccatggatgttgcgcggtgtttcgttccgcacaaccccagtgtagatcaggccgatgagtcaccgcatcccccacgggcgaccgtggcggtggctgcgctggcggcctgcccatggggcaacccatgggacgcctcaatactgacatggtgcgaagagtctattgagctaattggtagtcctccggcccctgaatgcggctaatcctaactgcggagcagatacccacacgccagtgggcagtctgtcgtaacgggcaactctgcagcggaaccgactactttgggtgtccgtgtttcctgtttttctcatattggctgcttatggtgacaattgagagattgttgccatatagctattggattggccatccggtgacaaacagagcaattatctacttgtttgttggttttgtaccattggactttagagtactgaagacactcaacttaattttaatacttaacacagcaag

SEQ ID NO: 20026 - DNA, 710 bp, synthetic construct
  source 1..710: mol_type = other DNA
ttaaaacagccttggggttgttcccaccccaagggcccacgtggcggctagtactctggtatttcggtacctttgtacgcctgttttatatccctccccaatgtaatttagaagctttcaaatcaaagctcaataggtggagcgcaagccagcgcttccgtgagcaagcacttctgtttccccggtgcggttgtatagactgttcccacggttgaaaacgacctatccgttatccgctatagtacttcgagaaacctagtatcacctttggattgttgatgcgttgcgctcaacacactaacccgtgtgtagcttgggtcgatgagtctggacataccccactggtgacagtggtccaggctgcgttggcggcctactcatggtgaaaaccatgagacgctagacatgaacaaggtgtgaagagtctattgagctactatagagtcctccggcccctgaatgcggctaatcttaaccatggagcaagtgctcacaaaccagtgagttgcttgtcgtaatgcgcaagtccgtggcggaaccgactactttgggtgtccgtgtttcactttttacttttatgactgcttatggtgacaatttaatattgttaccattcagctagtcgaaataatcacataaaactttaaatcctatctaataattcacatttggatagtttcatttcgaggactttaaacctacttacaaag

SEQ ID NO: 20027 - DNA, 710 bp, synthetic construct
  source 1..710: mol_type = other DNA
ttaaaacagccttggggttgttcccaccccaagggcccacgtggcggctagtactctggtatttcggtacctttgtacgcctgttttatatccctccccaatgtaatttagaagctttcaaatcaaagctcaataggtggagcgcaagccagcgcttccgtgagcaagcacttctgtttccccggtgcggttgtatagactgttcccacggttgaaaacgacctatccgttatccgctgtagtacttcgagaaacctagtatcacctttggattgttgatgcgttgcgctcaacacactaacccgtgtgtagcttgggtcgatgagtctggacataccccactggtgacagtggtccaggctgcgttggcggcctactcatggtgaaaaccatgagacgctagacatgaacaaggtgtgaagagtctattgagctactatagagtcctccggcccctgaatgcggctaatcttaaccatggagcaagtgctcacaaaccagtgagttgcttgtcgtaatgcgcaagtccgtggcggaaccgactactttgggtgtccgtgtttcactttttacttttatgactgcttatggtgacaatttaatattgttaccattcagctagtcgaaataatcacataaaactttaaatcctatctaataattcacatttggatagtttcatttcgaggactttaaacctacttacaaag

SEQ ID NO: 20028 - DNA, 710 bp, synthetic construct
  source 1..710: mol_type = other DNA
ttaaaacagccttggggttgttcccaccccaagggcccacgtggcggctagtactctggtatttcggtacctttgtacgcctgttttatctccctccccaatgtaacttagaagctttcaaatcaaagctcaataggtggagcgcaagccagcgcttccgtgagcaagtacttctgtttccccggtgcggttgtatagactgttcccacggttgaaaacaacctatccgttatccgctatagtacttcgagaaacctagtatcacctttggattgttgatgcgttgcgctcaacacactaacccgtgtgtagcttgggtcgatgagtctggacataccccactggtgacagtggtccaggctgcgttggcggcctactcatggtgaaaaccatgagacgctagacatgaacaaggtgtgaagagtctattgagctactatagagtcctccggcccctgaatgcggctaatcttaaccatggagcaagtgctcacaaaccagtgagttgcttgtcgtaatgcgcaagtccgtggcggaaccgactactttgggtgtccgtgtttcactttttacttttatgactgcttatggtgacaatttaatattgttaccattcagctagtcgaaataatcgcataaaacttcaaatcctatctaacagttcacatttggatagttttattttaaggactttaaacctacctagaaag

SEQ ID NO: 20029 - DNA, 710 bp, synthetic construct
  source 1..710: mol_type = other DNA
ttaaaacagccttggggttgttcccaccccaagggcccacgtggcggctagtactctggtatttcggtacctttgtacgcctgttttatctccctccccaatgtaacttagaagctttcaagtcaaagctcaataggtggagcgcaagccagcgcttccgtgagcaagcactcctgtttccccggtgcggttgtatagactgttcccacggttgaaaacaatctatccgttatccgctatagtacttcgagaaacctagtatcacctttggattgttgatgcgttgcgctcagcacactaacccgtgtgtagcttgggtcgatgagtctggacataccccactggtgacagtggtccaggctgcgttggcggcctactcatggtgaaaaccatgagacgctaaacatgaacaaggtgtgaagagtctattgagctactatagagtcctccggcccctgaatgcggctaatctcaaccatggagcaagtgctcacaaaccagtgagttgcttgtcgtaatgcgcaagtccgtggcggaaccgactactttgggtgtccgtgtttcactttttacttttatgactgcttatggtgacaatttaatattgttaccatttagctagtcaaattaatcacataaaactttgaattctacctaataattcacatttggatagcttcatcttgaggactttaaacctatttacaaag

SEQ ID NO: 20030 - DNA, 710 bp, synthetic construct
  source 1..710: mol_type = other DNA
ttaaaacagccttggggttgttcccacctcaagggcccacgtggcggctagtactctggtatttcggtacccttgtacgcctgttttatctccctccccaatgtaacttagaagctttcaaatcaaagctcaataggtggagcgcaagccagcgcttccgtgagcaagcactcctgtttccccggtgcggttgtatagactgttcccacggttgaaaacaacctatccgttatccgctatagtacttcgagaaacctagtatcacctttggattgttgatgcgttgcgctcagcacactaacccgtgtgtagcttgggtcgatgagtctggacataccccactggtgacagtggtccaggctgcgttggcggcctactcatggtgaaaaccatgagacgctagacatgaacaaggtgtgaagagtctattgagctactatagagtcctccggcccctgaatgcggctaatcttaaccatggagcaagtgctcacaaaccagtgagttgcttgtcgtaatgcgcaagtccgtggcggaaccgactactttgggtgtccgtgtttcactttttacttttatgactgcttatggtgacaatttaatattgttaccatttagctagtcaaattaatcacataaaactttaaatcctatctaacaattcacatttggatagcttcattttgaggactttaaacctatttacaaag

SEQ ID NO: 20031 - DNA, 725 bp, synthetic construct
  source 1..725: mol_type = other DNA
ttcccacccacagggcccactgggcgcttgcacactggtatcacggtacctttgtgcgcctgttttatataccaccccccccctgcgtaacttagaagtggaacttacacggtcaataggcaactcggtaagccaaccgggcaatgaccaagcactactgttaccccggaccaagtatcaatagactgctagcgcggttgaaggagaaaacgtccgttacccggccaattacttcaagaaacctagtaccactatggatgttgcgcagtgtttcgctccgcacaaccccagtgtagatcaggccgatgagccaccgcattccccacgggcgaccgtggcggtggctgcgctggcggcctgcccatggggcaacccatgggacgcttcaatactgacatggtgcgaagagtctattgagctaattggtattcctccggcccctgaatgcggctaatcctaactgcggagcagatacccacatgccagtgggcagtctgtcgtaacgggcaactctgcagcggaaccgactactttgggtgtccgtgtttccttttaatcttatattggctgcttatggtgacaattgaaagattgttaccatatagctattggattggccatccggtgacaaacagagcaatcgtttatttgttcgttggttttattccattgaatctcaaagttttgaacactctaaactttatcatttcactcaacacaacaaa

SEQ ID NO: 20032 - DNA, 802 bp, synthetic construct
  source 1..802: mol_type = other DNA
gtgggttgttcccacccacagggcccactgggcgccagtacactggtacgtcagtaccttggtattacggtaccaccgtacgccagtacctttgtacgcctgttttatatccccttcccccatatgcaactttagaagtttaaataaacaaagaccactaggagtccaacatccagttggattgcggtcaagcacttctgtttccccggacctagtagtgataggctgtacccacggccgaagatgaacccgtccgttatccggccagctacttcgagaagcctagtagcatcaaagatctgtcttggcgtttcgctcagcgcgttccccccgcgtagatcgggctgatgggtctccgcataccccacgggcgaccgtggcggaggccgcgtggcggcccgcctatggcgaaagccataggacgccatttcagtgacagggtgtgaagagcctattgagctagttggtagtcctccggcccctgaatgcggctaatcccaaccacggagcgtccaccagcaaaccagctggcagggcgtcgtaacgggtaactctgtggcggaaccgactactttgggtgtccgtgtttccttttgatcctatattggctgcttatggtgacaacgataagttgttatcataaagctcttgggttggccacctggaaaaagttatcagtgtttgatattgttcggctttcacgcctaccacccagactagctctttatttgcttattgcattttacccatcggaggatattacagacttccatctacaacttttattcacattatcaacaaa

SEQ ID NO: 20033 - DNA, 727 bp, synthetic construct
  source 1..727: mol_type = other DNA
gttgttcccacccgcagggcccactgggcgctagcacactggtatctcggtacctttgtgcgcctgttttatagcccctcccccgaatgtaacgtagaagctgaacccaagcggtcaataggcggctcagaacaccatctgggtcttgaccaagcacttctgttaccccggactgagtatcaacaagctgctcacgcggctgaaggagaaaacgttcgttacccggccaattacttcgagaagcccagtaccaccatgaaggttgcgcagcgtttcgctccgcacaaccccagtgtagatcaggtcgatgagtcaccgcgttcctcacgggtgaccgtggcggtggctgcgctggcggcctgcccatggggtaacccatgggacgcttcaatactgacatggtgcgaagagtcgattgagctaattggtagtcctccggcccctgaatgcggctaatcctaactgcggagcagatgcccaagctccagtgggtagtctgtcgtaatgggtaactctgcagcggaaccgactactttgggtgtccgtgtttccttttattcttacattggctgcttatggtgacaattgagagattgttaccatatagctattggattggccatccggtgacaaatagagcaattatatatctttttgtcggattcgtaccactcgacaaaacaaatttccaaaccttgtgttacattattagactaaatacagcaaa

SEQ ID NO: 20034 - DNA, 709 bp, synthetic construct
  source 1..709: mol_type = other DNA
taaaacagccttggggttgttcccaccccaagggcccacgtggcggctagtactctggtatttcggtacctttgtacgcctgttttatctccctccccaatgtaacttagaagctttcaaatcaaagctcaataggtggagcgcaagccagcgcttccgtgagcaagtacttctgtttccccggtgcggttgtatagactgtccccacggttgaaaacaacctatccgttatccgctatagtacttcgagaaacctagtatcacctttggattgttgatgcgttgcgctcaacacactaacccgtgtgtagcttgggtcgatgagtctggacataccccactggtgacagtggtccaggctgcgttggcggcctactcatggtgaaaaccatgagacgctagacatgaacaaggtgtgaagagtctattgagctactatagagtcctccggcccctgaatgcggctaatcttaaccatggagcaagtgctcacaaaccagtgagttgcttgtcgtaatgcgcaagtccgtggcggaaccgactactttgggtgtccgtgtttcactttttacttttatgactgcttatggtgacaatttaatattgttaccattcagctagtcgaaataatcgcataaaacttcaaatcctatctaacagttcacatttggatagttttattttaaagactttaaacctacctagaaag

SEQ ID NO: 20035 - DNA, 676 bp, synthetic construct
  source 1..676: mol_type = other DNA
cacgtggcggctagtactctggtattacggtacctttgtacgcctgttttatatcccttcccccgcaactttagaagcttaacaaaagttcaacagcaggggtgcaaaccagtacctctacgaacaagcacttctgtttccccggtgaaattacatagactgtacccacggtcaaaagtgattgatccgttatccgcttgagtacttcgagaagcctagtatcaccttggaatcttcgacgcgttgcgctcaacactctaccccgggtgtagcttaggctgatgagtctgggcactccccactggtgacagtggcccaggctgcgttggcggcctacccatggctaacgccatgggacgctagttgtgaacaaggtgtgaagagcctattgagctactcaagaatcctccggcccctgaatgcggctaatcctaaccacggagcaatcgctcacgacccagtgagtaggttgtcgtaatgcgcaagtccgtggcggaaccgactactttgggtgtccgtgtttccctttttattcatactggctgcttatggtgacaatttacagattgttaccatatagctattggattggccacccagtattgtgttacacatattaaaatactcttatacaagcaacaacaacattgtgtttgaaccacaatagccattacaa

SEQ ID NO: 20036 - DNA, 704 bp, synthetic construct
  source 1..704: mol_type = other DNA
actgggcgttagcacactggtattccggtacctttgtgcgcctgttttatccaccctccccaatgtaacgtagaagctacgctcaaacggtcaacagatagtccagtaatccagctgggccacgaccaagcacttctgtttccccggacagagtaccaataagctgctcgcgcggctgaaggggaaaacgttcgttatccggccaattacttcgagaaacctagtaccgccatggacgttgcgcagcgtttcgctccacacaaccccagtgtagatcaggtcgatgagccaccgcattccccacgggcgaccgtggcggtggctgcgttggcggcctgcccatggggtaacccatgggacgcttcaatacagacatggtgcgaagagtctattgagctaattggtagtcctccggcccctgaatgcggctaatcctaactgcggagcaggtacccacaacccagtgggtcacctgtcgtaatgggcaactctgcagcggaaccgactactttgggtgtccgtgtttccttttaacctttacactggctgcttatggtgacaattgaaagattgttaccatatagctattggattggccatcctgtgagtaatagagcgattgtatacttatttgttggctttataccactcaatttgaaagctttacagacactgaattatattgtggcattaaacacagcaaa

SEQ ID NO: 20037 - DNA, 709 bp, synthetic construct
  source 1..709: mol_type = other DNA
taaaacagccttggggttgttcccaccccaagggcccacgtggcggctagtactctggtatttcggtacctttgtacgcctgttttatctccctccccaatgtaacttagaagctttcaaatcaaagctcaataggtggagcgcaaaccagcgcttccgtgagcaagtactcctgtttccccggtgcggttgtatagactgtttccacggttgaaaacaacctatccgttatccgctatagtacttcgagaaacctagtatcacctttggattgttgatgcgttgcgctcaacacactaacccgtgtgtagcttgggtcgatgagtctggacataccccactggtgacagtggtccaggctgcgttggcggcctactcatggtgaaaaccatgagacgctagacatgaacaaggtgtgaagagtctattgagctactatagagtcctccggcccctgaatgcggctaatcttaaccatggagcaagtgctcacaagccagtgagttgcttgtcgtaatgcgcaagtccgtggcggaaccgactactttgggtgtccgtgtttcactttttacttttgtgactgcttatggtgacaatttaatattgttaccattcagctagtcgaaataatcgcataaagctttaaatcctatctaacaattcacatttggatagtttcattttgaggactttaaacctgcttacaaag

SEQ ID NO: 20038 - DNA, 714 bp, synthetic construct
  source 1..714: mol_type = other DNA
acagggcccactgggcgctagcactctggtatcatggtacctttgtgcgcctgttttatccaccctccccaaaatgcaacttagaagcataatccaaacggtcattaggtagctcagtacaccaactgagcccagaccaagcacttctgtcaccccggaccgagtatcaataggctgctcgcgcggctgaaggagaaaacgttcgttatccggccaattacttcgagaaacccagtaccactatgaaagttgcgcagcgtttcgttccgcacaaccccagtgtagatcaggtcgatgagtcaccgcgttccccacgggcgaccgtggcggtggctgcgttggcggcctgcccatggggcaacccatgggacgcttcaatactgacatggtgtgaagagtctattgagctaattggtagtcctccggcccctgaatgcggctaatcctaactgcggagcagatgctcacaaaccagtgggcagtctgtcgtaatgggtaactctgcagcggaaccgactactttgggtgtccgtgtttcctttcatttttacactggctgcttatggtgacaattgagagattgttaccatatagctattggattggccatccggtgactaacagagcaattgtttacctatttattggttttgtaccgttagattacaaagttctaaagactctgaatcttattatagcactcaatacagtaaa

SEQ ID NO: 20039 - DNA, 719 bp, synthetic construct
  source 1..719: mol_type = other DNA
cccacccacagggcccactgggcgttagcacactggtattccggtacctttgtgcgcctgttttattcaccccccccattgtaacttagaagcataacctagatggtcaatagacagcccagtgcaccaactgggtctcgaccaagcactcctgttaccccggaccgagtatcaataggctgctcacgcggctgaaggagaaagcgttcgttacccggccaattacttcgagaaacttagtaacaccatgaaagttgcgcagcgtttcgctccgcacaaccccagtgtagatcaggtcgatgagtcaccgcgttcctcacgggcgaccgtggcggtggctgcgttggcggcctgcccatgaggtaactcatgggacgcttcaatactgacatggtgcgaagagtctattgagctaattggtagtcctccggcccctgaatgcggctaatcctcactgtggagcagatactcacaagccagtgggtggtctgtcgtaacgggtaactccgcagcggaaccgactactttgggtgtccgtgtttccttttattccaaatctggctgcttatggtgacaattgaaagattgttgccatatagctattggattggccatccggtgacaggcagagcaattgtttatctgtttgttggtttcattccattaaattataacgttttaagcacactcaactatattttgttactcaacgcaggaaa

SEQ ID NO: 20040 - DNA, 766 bp, synthetic construct
  source 1..766: mol_type = other DNA
tcccacccacagggcctactgggcgccagtacactggtatgccttacctcggtattacggtaccgttgtatatagtacctttgtacgcctgttttaaatcccctcccccaaatgtaaccttagaagtttaagtaaactcagaccaataggagtccaacacccagttggattgcggtcaagcacttctgtctccccggacctagtagtgataggctgtgcccacggccgaagatgaacccgtccgttatccggccagctacttcgagaagcctagtagcatcaaagatctgtcttggcgtttcgctcagcgcgttccccccgcgtagatcgggctgatgggtctccgcattccccacgggcgaccgtggcggaggccgcgtggcggcccgcctatggcgaaagccataggacgccatttcagtgacagggtgtgaagagcctattgagctagttggtagtcctccggcccctgaatgcggctaatcctaaccacggagcgtccgccaacaatccagttggcagggcgtcgtaacgggtaactctgtggcggaaccgactactttgggtgtccgtgtttccttttgatcctattttggctgcttatggtgacaacgataagttgttatcataaagcttttgggttggccgcctggaaaaagatatcagtttgttcgctcgttgctttatcaaaactccctttgaggaaagcaatctatttattagtttcattttacaagcttgaaaatatatcaagtgctcacttaag

SEQ ID NO: 20041 - DNA, 710 bp, synthetic construct
  source 1..710: mol_type = other DNA
ttaaaacacccccccggttgttcccactccaagggcccatgtggcggctagtacactggtacttcggtacctttgtacgcctgttttatctccctccccaatgtaacttagaagctttcaaatcaaagctcaataggtggagcgcaaaccagcgcttccgtgagcaagtactcctgtttccccggtgcggttgtatagactgttcccacggttgaaaacaacctatccgttatccgctatagtacttcgagaaacctagtatcacctttggattgttgatgcgttgcgctcaacacactaacccgtgtgtagcttgggtcgatgagtctggacataccccactggtgacagtggtccaggctgcgttggcggcctactcatggtgaaaaccatgagacgctagacatgaacaaggtgtgaagagtctattgagctactatagagtcctccggcccctgaatgcggctaatcttaaccatggagcaagtgctcacaaaccagtgagttgcttgtcgtaatgcgcaagtccgtggcggaaccgactactttgggtgtccgtgtttcactttttacttttatgactgcttatggtgacaatttaatattgttaccattcagctagtcgaaataatcgcataaaactttaaatcctatctaacgattcacatttggatagtttcattttgaggactttaaacctacttacaaag

SEQ ID NO: 20042 - DNA, 710 bp, synthetic construct
  source 1..710: mol_type = other DNA
ttaaaacaacccctgggttgttcccactccaagggcccacgtggctggtgtactcctgggtattcggtacctttgtacgcctgttttatctcccttcccaatgtaatttagaagcttttaaatcaaggctcaataggtggggcgcaaaccagcgctctcatgagcaagcactcctgtttccccggtgtggttgtataaactgttcccacggttgaaaacaacctatccgttatccgctatagtacttcgagaaacctagtatcacctttggattgttgacgcgttgcgctcagcacactaacccgtgtgtagcttgggtcgatgagtctggacataccccactggcgacagtggtccaggctgcgttggcggcctactcatggtgaaaaccatgagacgctagacatgaacaaggtgtgaagagtctattgagctactatagagtcctccggcccctgaatgcggctaatcctaaccatggagcaagtgctcacaggccagtgagttgcttgtcgtaatgcgcaagtccgtggcggaaccgactactttgggtgtccgtgtttcactttttacttttatgactgcttatggtgacaatttaatattgttaccattcagctagtcgaaataatcgcataaaactttaaatcctatctaacaattcacatttggatagtttcattttgaggactttaaacctacttacaaag

SEQ ID NO: 20043 - DNA, 710 bp, synthetic construct
  source 1..710: mol_type = other DNA
ttaaaacaccccctgggttgttcccactccaagggcccacgtggcggctagtactctggttattcggtacccttgtacgcctgttttatctccctccccaatgtaaattagaagctttcaaatcaaagctcaataggtggagcgcaaaccagcgcttccgtgagcaagtactcctgtttccccggtgcggttgtatagactgttcccacggttgaaaacaacctatccgttatccgttatagtacttcgagaaacctagtatcacctttggattgttgatgcgttgcgctcaacacactaacccgtgtgtagcttgggtcgatgagtctggacataccccactggtgacagtggtccaggctgcgttggcggcctactcatggtgaaaaccatgagacgctagacatgaacaaggtgtgaagagtctattgagctactatagagtcctccggcccctgaatgcggctaatcttaaccatggagcaagtgctcacaaaccagtgagttgcttgtcgtaatgcgcaagtccgtggcggaaccgactactttgggtgtccgtgtttcactttttacttttatgactgcttatggtgacaatctaatattgtttccattcagctagtcgaaataaccgcataaaactttaaatcctatctaacaattcacatttggatagtttcattttgaggactttaaacttacttacaaag

SEQ ID NO: 20044 - DNA, 710 bp, synthetic construct
  source 1..710: mol_type = other DNA
tttaaacgcttctaaggttgtttacattgggggaggggagataaaaaccgactcttggggtattcggtacctttgtacgcctgttttatctccctccccaatgtaacttagaagctttcaaatcaaagctcaataggtggagcgcaaaccagcgcttccgtgagcaagtactcctgtttccccggtgcggttgtatagactgttcccacggttgaaaacaacctatccgttatccgctatagtacttcgagaaacctagtatcacctttggattgttgatgcgttgcgctcaacacactaacccgtgtgtagcttgggtcgatgagtctggacataccccactggtgacagtggtccaggctgcgttggcggcctactcatggtgaaaaccatgagacgctagacatgaacaaggtgtgaagagtctattgagctactatagagtcctccggcccctgaatgcggctaatcttaaccatggagcaagtgctcacaaaccagtgagttgcttgtcgtaatgcgcaagtccgtggcggaaccgactactttgggtgtccgtgtttcactttttacttttatgactgcttatggtgacaatttaatattgttaccattcagctagtcgaaataatcgcataaaactttaaatcctatctaacaattcacatttggatagattcattttgaggactttaaacctacttacaaag

SEQ ID NO: 20045 - DNA, 710 bp, synthetic construct
  source 1..710: mol_type = other DNA
tttaaacgcttctaaggttgtttacattgggggaggggagataaaaaccatattctggggtcttcggtacctttgtacgcctgttttatctccctccccaatgtaacttagaagctttcaaatcaaagctcaataggtggagcgcaaaccagcgcttccgtgagcaagtactcctgtttccccggtgcggttgtatagactgttcccacggttgaaaacaacctatccgttatccgctatagtacttcgagaaacctagtatcacctttggattgttgatgcgttgcgctcaacacactaacccgtgtgtagcttgggtcgatgagtctggacataccccactggtgacagtggtccaggctgcgttggcggcctactcatggtgaaaaccatgagacgctagacatgaacaaggtgtgaagagtctattgagctactatagagtcctccggcccctgaatgcggctaatcttaaccatggagcaagtgctcacaaaccagtgagttgcttgtcgtaatgcgcaagtccgtggcggaaccgactactttgggtgtccgtgtttcactttttacttttatgactgcttatggtgacaatttaatattgttaccattcagctagtcgaaataatcgcatgaaactttaaatcctatctaacaattcacatttggatagattcattttgaggactttaaacctacttacaaag

SEQ ID NO: 20046 - DNA, 710 bp, synthetic construct
  source 1..710: mol_type = other DNA
ttaaaacaacccctgggttgttcccactccaagggcccacgtggcggctgtactctgggtacttcggtacctttgtacgcctgttttatctcccttcccaatgtaatttagaagctcttaaatcaaggctcaataggtggggcgcaaaccagcgctctcatgagcaagcactcctgtctccccggtgtggttgtataaactgttcccacggttgaaaacaacctatccgttatccgctatagtacttcgagaaacctagtatcacctttggattgttgacgcgttgcgctcagcacactaacccgtgtgtagcttgggtcgatgagtctggacacaccccactggcgacagtggtccaggctgcgttggcggcctactcatggtgaaaaccatgagacgctagacatgaacaaggtgtgaagagtctattgagctactatagagtcctccggcccctgaatgcggctaatcctaaccatggagcaagtgctcacaggccagtgagttgcttgtcgtaatgcgcaagtccgtggcggaaccgactactttgggtgtccgtgtttcactttttacttttatgactgcttatggtgacaatttaatattgttaccattcagctagtcgaaataatcgcataaaactttaaatcctatctaacaattcacatttggatagtttcattttgaggactttaaacctacttacaaag

SEQ ID NO: 20047 - DNA, 710 bp, synthetic construct
  source 1..710: mol_type = other DNA
tttaaacgcttctaaagttgttcccattgggggaggggagattaaaaccgactcttggggtcttcggtacctttgtacgcctgttttatctccctccccaatgtaacttagaagctttcaaatcaaagctcaataggtggagcgcaaaccagcgcttccgtgagcaagtactcctgtttccccggtgcggttgtatagactgttcccacggttgaaaacaacctatccgttatccgctgtagtacttcgagaaacctagtatcacctttggattgttgatgcgttgcgctcaacacactaacccgtgtgtagcttgggtcgatgagtctggacataccccactggtgacagtggtccaggctgcgttggcggcctactcatggtgaaaaccatgagacgctagacatgaacaaggtgtgaagagtctattgagctactatagagtcctccggcccctgaatgcggctaatcttaaccatggagcaagtgctcacaaaccagtgagttgcttgtcgtaatgcgcaagtccgtggcggaaccgactactttgggtgtccgtgtttcactttttatttttatgactgcttatggtgacaatttaatattgttaccattcagctagtcgaaataatcgcataaaactttaaatcctatctaacaattcacatttggatagtttcattttgaggactttaaacttacttacaaag

SEQ ID NO: 20048 - DNA, 720 bp, synthetic construct
  source 1..720: mol_type = other DNA
cacccacggggcccactgggcgctagcacactggtatcacggtacctttgtgcgcctgttttatccacccgtcccccccacgtaacttagaagcaaaacctacccggtcaatagataactcagtgagccaactgagcagtgaccaagcacttctgttaccccggaccaagtatcaatagactgctagcgcggttgaaggagaaaacgtccgttacccggccaattacttcgagaaacctagtaccaccatggaggttgcgcagtgtttcgctccgcacaaccccagtgtagatcaggccgatgagccaccgcactccccacgggcgaccgtggcggtggctgcgctggcggcctgcccatggggcaacccatgggacgcttcaatactgacatggtgcgaagagtctattgagctaattggtagtcctccggcccctgaatgcggctaatcctaactgcggagcagatacccacatgccagtgggcagtctgtcgtaacgggcaactctgcagcggaaccgactactttgggtgtccgtgtttccttttattcttacattggctgcttatggtgacaattgaaagattgttaccatatagctattggattggccatccggtgacaaatagagcgatcatttatttgtttgttggttttatcccattgaacctcaaagttttgaacactcttaaccttattatatcacttaacacaacaaa

SEQ ID NO: 20049 - DNA, 709 bp, synthetic construct
  source 1..709: mol_type = other DNA
taaaacagccttggggttgttcccaccccaagggcccacgtggcggctagtactctggtatttcggtacctttgtacgcctgttttatatccctccccaatgtaatttagaagctttcaaatcaaagctcaataggtggagcgcaagccagcgcttccgtgagcaagcacttctgtttccccggtgcggttgtatagactgttcccacggttgaaaacgacctatccgttatccgctatagtacttcgagaaacctagtatcacctttggattgttgatgcgttgcgctcaacacactaacccgtgtgtagcttgggtcgatgagtctggacgtaccccactggtgacagtggtccaggctgcgttggcggcctactcatggtgaaaaccatgagacgctagacatgaacaaggtgtgaagagtctattgagctactatagagtcctccggcccctgaatgcggctaatcttaaccatggagcaagtgctcacaaaccagtgagttgcttgtcgtaatgcgcaagtccgtggcggaaccgactactttgggtgtccgtgtttcactttttacttttatgactgcttatggtgacaatttaatattgttaccattcagctagtcgaaataatcacataaaactttaaatcctatctaataattcacatttggatagtttcatttcgaggactttaaacctacttacaaag

SEQ ID NO: 20050 - DNA, 710 bp, synthetic construct
  source 1..710: mol_type = other DNA
ttaaaacagccttggggttgttcccaccccaagggcccacgtggcggctagtactctggtatctcggtacctttgtacgcctgttttatctcccctcccaatgtaacttagaagttttcaaaccagagctcaataggtggagcgcaaaccagcgttctcatgagcaagcactcctgtctccccggtgcggttgtataaactgttcccacggttgaaaacaacctatccgttaaccgctatagtacttcgagaaacctagtatcacctttggattgttgatgcgttgcgctcagcacactaacccgtgtgtagcttgggtcgatgagtctggacataccccactggcgacagtggtccaggctgcgttggcggcctactcatggtgaaaaccatgagacgctagacatgaacaaggtgtgaagagtctattgagctactatagagtcctccggcccctgaatgcggctaatcttaaccatggagcaagtgctcacaagccagtgagttgcttgtcgtaatgcgcaagtccgtggcggaaccgactactttgggtgtccgtgtttcactttttacttttatgactgcttatggtgacaatttaatattgttaccatttagcttgtcaaattaatcacataagatcctaaatcttatttatcaacttatattttgataacttcattttgaaaactctaagtttattcataaca

SEQ ID NO: 20051 - DNA, 664 bp, synthetic construct
  source 1..664: mol_type = other DNA
ctgttttatctcccctcccccccgtgtaatttagaagcataagcacaatgatcaatagacaacccagtgcaccaactgggccttgatcaagcacttctgttaccccgggccgactatcaataggctgctcacgtggctgaaggagaaaacgctcgttacccggccagttacttcgagaagcctagtaccaccatgaacgttgcgcagtgtttcgctccgcacaaccccagtgtagatcaggtcgatgagtcaccgcatcccccacgggcgaccgtggcggtggctgcgttggcggcctgcccatggggcaacccatgggacgctacaatactgacatggtgtgaagagtctattgagctaactggtagtcctccggcccctgaatgcggctaatcccaactgcggagcacgtgcttccaatccaggaggtagcgtgtcgtaacgggcaactctgcagcggaaccgactactttgggtgtccgtgtttccttttatctctttattggctgcttatggtgacaattgaaagattgttgccatatagctattggattggccatccggtatctaacagagcaatcatatacctgtttgttggatttgttccacttaacaaaacagagttctgtactttgtgttatattattaggttgaacacatcaaa

SEQ ID NO: 20052 - DNA, 787 bp, synthetic construct
  source 1..787: mol_type = other DNA
cacccacagggcccaccgggcgctagtacactggtatgccttacctcggtatttcggtaccattgtacgccagtacctttgtacgcctgttttatatcccctccccaaatgtaaccttagaagtttaagcaaacaaagaccaataggagtccaacatccagttggattgcggtcaagcacttctgtttccccggacctagtagtgataggctgtacccacggccgaagatgaacccgtccgttatccggccagctacttcgagaagcctagtaacatcaaagatctgtcttggcgtttcgctcagcgcgttccccccgcgtagatcgggctgatgggtctccgcataccccacgggcgaccgtggcggaggccgcgtggcggcccgcctatggcgaaagccataggacgccatttcagtgacagggtgtgaagagcctattgagctagttggtagtcctccggcccctgaatgcggctaatcctaaccactgagcgtccaccaacaaaccagctggcagggcgtcgtaacgggtaactctgtggcggaaccgactactttgggtgtccgtgtttccttttgatcctatattggctgcttatggtgacaacgataagttgttatcataaagcttttgggttggccacctggaaaaagttatcagtgtttgatattgttcggctttcacgcctaccaataaaacaagctctatattatttagtttccttttacccaaaggaggaaatttctgaattccatcttcaattgctcttggcattatcagcaag

SEQ ID NO: 20053 - DNA, 722 bp, synthetic construct
  source 1..722: mol_type = other DNA
ctcccacccatagggcccactgggcgcttgcacactggtatcacggtacctttgtgcgcctgttttatccacccccccctgcgtaatttagaagtggaacttacacggtcaataggcaactcggtaagccaaccgggcaatgaccaagcactactgttaccccggaccaagtatcaataaactgctagcgcggtcgaaggagaaaacgtccgttacccggccaattacttcgagaaacctagtaccaccatggatgttgcgcagtgtttcgctccgcacaaccccagtgtagatcaggccgatgagccaccgcattccccacgggcgaccgtggcggtggctgcgctggcggcctgcccatggggcaacccatgggacgcttcaatactgacatggtgcgaagagtctattgagctaattggtagtcctccggcccctgaatgcggctaatcctaactgcggagcagatacccacatgccagtgggcggtctgtcgtaacgggcaactctgcagcggaaccgactactttgggtgtccgtgtttcctctttttccttgtattggctgcatatggtgacaactgaaagattgttaccatatagctattggattggccatccggtgacaaacagagcaattatttatttgttcgtcggttttattccattgaatctcaaagttttgaacactctaaactttattatttcactcaacacaacaaa

SEQ ID NO: 20054 - DNA, 662 bp, synthetic construct
  source 1..662: mol_type = other DNA
ctgttttatacacccttaccctacgtaatatagaagcaaaacaacaaggtcaatagagagcccagtgagccaactgggtcgagaccaagcacttctgtttccccggaccgagtatcaataggctgcttacgcggctgaaggagaaaacgttcgttacccggctaactacttcgaaaaacctagtaacgccatggaagttgcgaaccgtttcgctcggcacttccccagtgtagatcaggtcgatgagtcaccgcattccccacgggcgaccgtggcggtggctgcgttggcggcctgcctatggggcaacccataggacgcttcaatatggacatggtgtgaagagtctattgagctagttagtagtcctccggcccctgaatgcggctaatcctaactgcggagcacatgcccccaacccaggaggtggtgtgtcgtaatgggtaactctgcagcggaaccgactactttgggtgtccgtgtttccttttatcccaatgttggctgcttatggtgacaattgaaagattgttaccatatagctattggattggccatccggtgactaacagagcaattgtatacctattcattggttacgttccattaaatctcaaggaattaacgactctcaattacattttgctcttgaattctgcaaa

SEQ ID NO: 20055 - DNA, 652 bp, synthetic construct; identical to SEQ ID NO: 789
  source 1..652: mol_type = other DNA

SEQ ID NO: 20056 - DNA, 709 bp, synthetic construct
  source 1..709: mol_type = other DNA
ttaaaacagccttggggttgttcccactccaagggcccacgtggcggctagtactctggtactttggtacctttgtacgcctgttttatctcccttcccaatgtaatttagaagctcttaaaccaaggctcaataggtggggcgcaaaccagcgctctcatgagcaagcactcctgtctccccggtgtggttgtataaactgttcccacggttgaaaacaacctatccgttatccgctatagtacttcgagaaacctagtatcacctttggattgttgacgcgttgcgctcagcacactaacccgtgtgtagcttgggtcgatgagtctggacataccccactggcgacagtggtccaggctgcgttggcggcctactcatggtgaaaaccatgagacgctagacatgaacaaggtgtgaagagtctattgagctactatagagtcctccggcccctgaatgcggctaatcctaaccatggagcaagtgctcacaagccagtgagttgcttgtcgtaatgcgcaagtccgtggcggaaccgactactttgggtgtccgtgtttcactttttacttttatgactgcttatggtgacaatttgatattgttaccatttagcttgtcaaatcaattgcaaaagatcctaaatcttatttatcaacttgcattttgataactctattcgaaaattctaaactcatttttaata

SEQ ID NO: 20057 - DNA, 710 bp, synthetic construct
  source 1..710: mol_type = other DNA
ttaaaacagctttggggttgttcccaccccaagggcccacgtggcggctagtactctggtatttcggtacctttgtacgcctgttttatctccctccccaatgtaacttagaagctttcaaatcaaagctcaataggtggagcgcaagccagcgcttccgtgagcaagcactcctgtctccccggtgcggttgtatagactgttcccacggttgaaaacaacctatccgttatccgctatagtacttcgagaaacctagtatcacctttggattgttgatgcgttgcgctcagcacactaacccgtgtgtagcttgggtcgatgagtctggacataccccactggtgacagtggtccaggctgcgttggcggcctactcatggtgaaaaccatgagacgctagacatgaacaaggtgtgaagagtctattgagctactatagagtcctccggcccctgaatgcggctaatcttaaccatggagcaagtgctcacaaaccagtgagttgcttgtcgtaatgcgcaagtccgtggcggaaccgactactttgggtgtccgtgtttcactttttacttttatgactgcttatggtgacaatttaatattgttaccatttagctagtcaaattaatcacataaaactttaaatcctatctaacaattcacatttggatagcttcattttgaggactttaaacctatttacaaag

SEQ ID NO: 20058 - DNA, 709 bp, synthetic construct
  source 1..709: mol_type = other DNA
taaaacagccttggggttgttcccactccaagggcccacgtggcggctagtactctggtactttggtacctttgtacgcctgttttatctcccttcccaatgtaatttagaagcttttaaatcaaggctcaataggtggggcgcaaaccagcgctctcatgagcaagcactcctgtctccccggtgtggttgtataaactgttcccacggttgaaaacaacctatccgttatccgctatagtacttcgagaaacctagtatcgcctttggattgttgacgcgttgcgctcagcacactaacccgtgtgtagcttgggtcgatgagtctggacataccccactggcgacagtggtccaggctgcgttggcggcctactcatggtgaaaaccatgagacgctagacatgaacaaggtgtgaagagtctattgagctactatagagtcctccggcccctgaatgcggctaatcctaaccatggagcaagtgctcacaggccagtgagttgcttgtcgtaatgcgcaagtccgtggcggaaccgactactttgggtgtccgtgtttcactttttacttttatgactgcttatggtgacaatttgatattgttaccatttagctggtcgaaataatcgcataaaactttaaatcctatctaacagttcacatttggatagttttattttaaggactttaaacctacctagaaag

SEQ ID NO: 20059 - DNA, 662 bp, synthetic construct
  source 1..662: mol_type = other DNA
ctgttttatatacccttacccaacgtaatatagaagcaaaacaacaaggtcaatagagagcccagtgagccaactgggtcgagaccaagcacttctgtttccccggaccgagtatcaataggctgcttacgcggctgaaggagaaaacgttcgttacccggctaactacttcgaaaaacctagtaacgccatggaagttgcgaaccgtttcgctcggcacttccccagtgtagatcaggtcgatgagtcaccgcattccccacgggcgaccgtggcggtggctgcgttggcggcctgcctatggggcaacccataggacgcttcaatatggacatggtgtgaagagtctattgagctagttagtagtcctccggcccctgaatgcggctaatcctaactgcggagcacatgcccccaacccaggaggtggtgtgtcgtaatgggtaactctgcagcggaaccgactactttgggtgtccgtgtttccttttatctcaatattggctgcttatggtgacaattgaaaggttgttaccatatagctattggattggccatccggtgactaacagagcaattgtatacctattcattggttacgttccattaaatctcaaggaattaacgactctcaattacattttgctcttgaattctgcaaa

SEQ ID NO: 20060 - DNA, 721 bp, synthetic construct
  source 1..721: mol_type = other DNA
tcccacccacagggcccactgggcgcttgcacactggtatcacggtacccttgtgcgcctgttttatccacccccccctgcgtaatttagaagtggaacttacacggtcaaaaggcaactcggtaagccaaccgggcaatgaccaagcactactgttaccccggaccaagtatcaataaactgctagcgcggttgaaggagaaaacgtccgttacccggccaattacctcgagaaacctagtaccaccatggatgttgcgcagtgtttcgctccgcacaaccccagtgtagatcaggccgatgagccaccgcataccccacgggcgaccgtggcggtggctgcgctggcggcctgcccatggggcaacccatgggacgcttcaatactgacatggtgtgaagagtctattgagctaattggtagtcctccggcccctgaatgcggctaatcctaactgcggagcagatacccacatgccagtgggcagtctgtcgtaacgggcaactctgcagcggaaccgactactttgggtgtccgtgtttcctttttaaccttatattggctgcatatggtgacaattgaaagattgttaccatatagctattggattggccatccggtgacgaacagagcaatcatttatttgtttgttggttttattccattggatctcaaagcttggaacactctaaattttattatttcactcaacacaacaaa

SEQ ID NO: 20061 - DNA, 769 bp, synthetic construct
  source 1..769: mol_type = other DNA
cgctagtacactggtacgccagtaccttggtattacggtaccattgtacgccagtacctttgtacgcctgttttatatccctttccccaaatgtaactttagaagtataaataaacaaagaccaataggggtccaacatccagttggattgcggtcaagcacttctgtctccccggacctagtagtgataggctgtacccacggccgaagatgaacccgtccgttatccggccagctacttcgagaagcctagtaacatcaaagatctgtcttggcgtttcgctcagcgcgttccccccgcgtagatcgggctgatgggtctccgcataccccacgggcgaccgtggcggaggccgcgtggcggcccgcctatggcgaaagccataggacgccatttcagtgacagggtgtgaagagcctattgagctagttggtagtcctccggcccctgaatgcggctaatcctaaccacggagcgttcaccagcaaaccagctgggagggcgtcgtaacgggtaactctgtggcggaaccgactactttgggtgtccgtgtttccttttgatcctatattggctgcttatggtgacaacgataagttgttatcataaagcttttgggttggccacctggaaaaggttatcagtgtttgatattgttcggctctcacgcctgccgataaaacaatccttatacttgctaattgcattttacccaattgagaacatctcagagtttcatttgaagcttttactaacattatcagcaag

SEQ ID NO: 20062 - DNA, 707 bp, synthetic construct
  source 1..707: mol_type = other DNA
aacagccttggggttgttcccactccaagggcccacgtggcggctagtactctggtacttcggtacctttgtacgcctgttttatctcccctcccaatgtaacttagaagttcttaaatcaatgctcaataggtggggcgcaaaccagcgctctcatgagcaagcactcctgtctccccggtgaggttgtataaactgttcccacggttgaaaacaacctatccgttatccgctatagtacttcgagaaacctagtaccacctttggattgttgacgcgttgcgctcagcacactaacccgtgtgtagcttgggtcgatgagtctggacatacctcactggcgacagtggtccaggctgcgttggcggcctactcatggtgaaagccatgagacgctagacatgaacaaggtgtgaagagtctattgagctactatagagtcctccggcccctgaatgcggctaatcctaaccatggagcaagtgctcacaggccagtgagttgcttgtcgtaatgcgcaagtccgtggcggaaccgactactttgggtgtccgtgtttcactttttacttttatgactgcttatggtgacaatttgatattgttaccatttagcttgtcaaatcaattgcaaaagatcctaaatctcatttatcaacttgcatcttgataactttaatttgaaaaattaatttgaaaattttaaca

SEQ ID NO: 20063 - DNA, 707 bp, synthetic construct
  source 1..707: mol_type = other DNA
aacagccttggggttgttcccactccaagggcccacgtggcggctagtactctggtacttcggtacctttgtacgcctgttttatctcccttcccaatgtaacttagaagttcttaaatcaatgctcaataggtggggcgcaaaccagcgctctcatgagcaagcactcctgtctccccggtgaggttgtataaactgttcccacggttgaaaacaacctatccgttatccgctatagtacttcgagaaacctagtaccacctttggattgttgacgcgttgcgctcagcacactaacccgtgtgtagcttgggtcgatgagtctggacatacctcactggcgacagtggtccaggctgcgttggcggcctactcatggtgaaagccatgagacgctagacatgaacaaggtgtgaagagtctattgagctactatagagtcctccggcccctgaatgcggctaatcctaaccatggagcaagtgctcacaggccagtgagttgcttgtcgtaatgcgcaagtccgtggcggaaccgactactttgggtgtccgtgtttcactttttacttttatgactgcttatggtgacaatttgatattgttaccatttagcttgtcaaatcaattgcaaaagatcctaaatcttatttatcaacttgcatcttgataactttaatttgaaaaattaatttgaaaattttaaca

SEQ ID NO: 20064 - DNA, 662 bp, synthetic construct
  source 1..662: mol_type = other DNA
ctgttttatacacccttaccctacgtaatatagaagcaaaacaacaaggtcaatagagagcccagtgagccaactgggtcgagaccaagcacttctgtttccccggaccgagtatcaataggctgcttacgcggctgaaggagaaaacgttcgttacccggctaactacttcgaaaaacctagtaacgccatggaagttgcgaaccgtttcgctcggcacttccccagtgtagatcaggtcgatgagtcaccgcattccccacgggcgaccgtggcggtggctgcgttggcggcctgcctatggggcaacccataggacgcttcaatacggacatggtgtgaagagtctattgagctagttagtagtcctccggcccctgaatgcggctaatcctaactgcggagcacatgcccccaacccaggaggtggtgtgtcgtaatgggtaactctgcagcggaaccgactactttgggtgtccgtgtttccttttatcccaatgttggctgcttatggtgacaattgaaaggttgttaccatatagctattggattggccatccggtgactaacagagcaattgtatacctattcattggttacgttccattaaatctcaaggaattagcgactctcaagtacattttgctcttgaattccgcaaa

SEQ ID NO: 20065 - DNA, 709 bp, synthetic construct
  source 1..709: mol_type = other DNA
ttaaaacagctttggggttgttcccaccccaagggcccacgtggcggctagtactctggtatttcggtacctttgtacgcctgttttatctcccttcccaatgtaacttagaagttttcaaatcgaagctcagtaggtggggcgcaaaccagcgctttcatgagcaagcacttctgtttccccggtgcggttgtatagactgtttccacggttgaaaacaacttatccgttatccgctatagtacttcgagaaacctagtatcacctttggattgttgatgcgttgcgctcagcacactaacccgtgtgtagcttgggctgatgagtctggacgtaccccactggtgacagtggtccaggctgcgttggcggcctactcatggtgaaaaccatgagacgctagacatgaacaaggtgtgaagagtctattgagctactatagagtcctccggcccctgaatgcggctaatcttaaccatggagcaagtgctcacaagccagtgagttgcttgtcgtaacgcgcaagtccgtggcggaaccgactactttgggtgtccgtgtttcactttttacctttatgactgcttatggtgacaatttaatattgttaccatttagcttgtcagattaatcgcgtgaaatcctaaatcttatttatcaatttgtatttggatagcttcatttgaaaattctaaatccattcataaag

SEQ ID NO: 20066 - DNA, 709 bp, synthetic construct
  source 1..709: mol_type = other DNA
ttaaaacagccttggggttgttcccaccccaagggcccacgtggcggctagtactctggtatttcggtacctttgtacgcctgttttatctcccttcccgatgtaacttagaagttttcaaatcaaagctcaataggtggagcgcaaaccagcgctttcatgagcaagcacttctgtttccccggtgcggttgtatagactgtttccacggttgaaaacaacttatccgttatccgctatagtacttcgagaaacctagtatcacctttggattgttgatgcgttgcgctcagcacactaacccgtgtgtagcttgggtcgatgagtctggacgtaccccactggtgacagtggtccaggctgcgttggcggcctactcatggtgaaaaccatgagacgctagacatgaacaaggtgtgaagagtctattgagctactatagagtcctccggcccctgaatgcggctaatcttaaccatggagcaagtgctcacaagccagtgagttgcttgtcgtaacgcgcaagtccgtggcggaaccgactactttgggtgtccgtgtttcactttttacctttatgactgcttatggtgacaatttaatattgttaccatttagctagtcggattaatcacgtgaaatcctaagtcttatttatcaatttgtatttggatagcttcatttgaaaattctaaactcattcataaag

SEQ ID NO: 20067 - DNA, 709 bp, synthetic construct
  source 1..709: mol_type = other DNA
ttaaaacagccttggggttgttcccaccccaagggcccacgtggcggctagtactctggtatttcggtacctttgtacgcctgttttatctcccttcccaatgtaacttagaagttttcaaatcgaagctcagtaggtggggcgcaaaccagcgctttcatgagcaagcacttctgtttccccggtgcggttgtatagactgtttccacggttgaaaacaacttatccgttatccgctatagtacttcgagaaacctagtatcacctttggattgttgatgcgttgcgctcagcacactaacccgtgtgtagcttgggctgatgagtctggacgtgccccactggtgacagtggtccaggctgcgttggcggcctactcatggtgaaaaccatgagacgctagacatgaacaaggtgtgaagagtctattgagctactatagagtcctccggcccctgaatgcggctaatcttaaccatggagcaagtgctcacaagccagtgagttgcttgtcgtaacgcgcaagtccgtggcggaaccgactactttgggtgtccgtgtttcactttttacctttatgactgcttatggtgacaatttaatattgttaccatttagcttgtcagattaatcgcgtgaaatcctaaatcttgttcaccaatttgcattcggatagcttcatttgaaaattctaaactcattcataaag

SEQ ID NO: 20068 - DNA, 709 bp, synthetic construct
  source 1..709: mol_type = other DNA
ttaaaacagccttggggttgttcccaccccaagggcccacgtggcggctagtactctggtatttcggtacctttgtacgcctgttttatctcccttcccaatgtaacttagaagttttcaaatcgaagctcagtaggtggagcgcaaaccagcgctttcatgagcaagcacttctgtttccccggtgcggttgtatagactgtttccacggttgaaaacaacttatccgttatccgctatagtacttcgagaaacctagtatcacctttggattgttgatgcgttgcgctcagcacactaacccgtgtgtagcttgggctgatgagtctggacgtaccccactggtgacagtggtccaggctgcgttggcggcctactcatggtgaaaaccatgagacgctagacatgaacaaggtgtgaagagtctattgagctactatagagtcctccggcccctgaatgcggctaatcttaaccatggagcaagtgctcacaagccagtgagttgcttgtcgtaacgcgcaagtccgtggcggaaccgactactttgggtgtccgtgtttcactttttacctttatgactgcttatggtgacaatttaatattgttaccatttagcttgtcagattaatcgcgtgaaatcctaaatcttgttcaccaatttgcattcggataacttcatttgaaaattctaaactcattcataaag

SEQ ID NO: 20069 - DNA, 703 bp, synthetic construct
  source 1..703: mol_type = other DNA
agtcttggggttgttcccaccccaagggcccacgtggcggctagtactctggtatttcggtacctttgtacgcctgttttatctccctccccaatgtaacttagaagctttcaaatcaaagctcaataggtggagcgcaagccagcgcttccgtgagcaagcactcctgtttccccggtgcggttgtatagactgttcccacggttgaaaacaacctatccgttatccgctatagtacttcgagaaacctagtatcacctttggattgttgatgcgttgccctcagcacactaacccgtgtgtagcttgggtcgatgagtctggacataccccactggtgacagtggtccaggctgcgttggcggcctactcatggtgaaaaccatgagacgctaaacatgaacaaggtgtgaagagtctattgagctactatagagtcctccggcccctgaatgcggctaatcttaaccatggagcaagtgctcacaaaccagtgagttgcttgtcgtaatgcgcaagtccgtggcggaaccgactactttgggtgtccgtgtttcactttttacttttatgactgcttatggtgacaatttaatattgttaccatttagctagtcatattaatcacataaaactttaaattctatctaataattcacatttggatagtttcattttgaggactttaaacctatttacaaaa

SEQ ID NO: 20070 - DNA, 703 bp, synthetic construct
  source 1..703: mol_type = other DNA
ggccttggggttgttcccaccccaagggcccacgtggcggctagtactctggtatttcggtacctttgtacgcctgttttatatccctccccaatgtaatttagaagctttcaaatcaaagctcaataggtggagcgcaagccagcgcttctgtgagcaagcacttctgtttccccggtgcggttgtatagactgttcccacggttgaaaacgacctatccgttatccgctatagtacttcgagaaacctagtatcacctttggattgttgatgcgttgcgctcaacacactaacccgtgtgtagcttgggtcgatgagtctggacataccccactggtgacagtggtccaggctgcgttggcggcctactcatggtgaaaaccatgagacgctagacatgaacaaggtgtgaagagtctattgagctactatagagtcctccggcccctgaatgcggctaatcttaaccatggagcaagtgctcacaaaccagtgagttgcttgtcgtaatgcgcaagtccgtggcggaaccgactactttgggtgtccgtgtttcactttttacttttatgactgcttatggtgacaatttaatattgttaccattcagctagtcgaaataatcacataaaactttaaatcctatctaataattcacatttggatagtttcattttgaggactttaaacctacttacaaag

SEQ ID NO: 20071 - DNA, 703 bp, synthetic construct
  source 1..703: mol_type = other DNA
ggtcttggggttgttcccaccccaagggcccacgtggcggctagtactctggtatttcggtacctttgtacgcctgttttatatccctccccaatgtaatttagaagctttcaaatcaaagctcaataggtggagcgcaagccagcgcttctgtgagcaagcacttctgtttccccggtgcggttgtatagactgttcccacggttgaaaacgacctatccgttatccgctatagtacttcgagaaacctagtatcacctttggattgttgatgcgttgcgctcaacacactaacccgtgtgtagcttgggtcgatgagtctggacataccccactggtgacagtggtccaggctgcgttggcggcctactcatggtgaaaaccatgagacgctagacatgaacaaggtgtgaagagtctattgagctactatagagtcctccggcccctgaatgcggctaatcttaaccatggagcaagtgctcacaaaccagtgagttgcttgtcgtaatgcgcaagtccgtggcggaaccgactactttgggtgtccgtgtttcactttttacttttatgactgcttatggtgacaatttaatattgttaccattcagctagtcgaaataatcacataaaactttaaatcctatctaataattcacatttggatagtttcattttgaggactttaaacctacttacaaag

SEQ ID NO: 20072 - DNA, 709 bp, synthetic construct
  source 1..709: mol_type = other DNA
ttaaaacagccttggggttgttcccaccccaagggcccacgtggcggctagtactctggtatttcggtacctttgtacgcctgttttatctcccttcccaatgtaacttagaagttttcaaatcgaagctcaataggtggagcgcaaaccagcgctttcatgagcaagcacttctgtctccccggtgcggttgtatagactgtttccacggttgaaaacaacttatccgttatccgctatagtacttcgagaaacctagtatcacctttggattgttgatgcgttgcgctcaacacactaacccgtgtgtagcttgggtcgatgagtctggacgtaccccactggtgacagtggtccaggctgcgttggcggcctactcatggtgaaaaccatgagacgctagacatgaacaaggtgtgaagagtctattgagctactatagagtcctccggcccctgaatgcggctaatcttaaccatggagcaagtgctcacaagccagtgagttgcttgtcgtaacgcgcaagtccgtggcggaaccgactactttgggtgtccgtgtttcactttttacttttatgactgcttatggtgacaatttaatattgttaccatttagcttgtcagattaatcacgtgaaatcctaaatcttatttatcaatttgtatttggatagcttcatttgaaaattctaaactcatttataaag

SEQ ID NO: 20073 - DNA, 709 bp, synthetic construct
  source 1..709: mol_type = other DNA
ttaaaacagccttggggttgttcccaccccaagggcccacgtggcggctagtactctggtatttcggtacctttgtacgcctgttttatctcccttccctacgtaacttagaagttttcagatcgaagctcaataggcggagcgcaaaccagcgctttcatgagcaagcacctctgtctccccggtgcggttgtatagactgtttccacggttgaaaacaacttatccgttatccgctatagtacttcgagaaacctagtatcacctttggattgttgatgcgttgcgctcagcacactaacccgtgtgtagcttgggtcgatgagtctggacgtaccccactggtgacagtggtccaggctgcgttggcggcctactcatggtgaaaaccatgagacgctagacatgaacaaggtgtgaagagtctattgagctactatagagtcctccggcccctgaatgcggctaatcttaaccatggagcaagtgctcacaagccagtgagttgcttgtcgtaacgcgcaagtccgtggcggaaccgactactttgggtgtccgtgtttcactttttacttttatgactgcttatggtgacaatttaatattgttaccatttagcttgtcagattaatcacgtgaaatcctaaatcttatttatcaatttgtatttggatagcttcatttgaaaattctaaactcattcataaag

SEQ ID NO: 20074 - DNA, 709 bp, synthetic construct
  source 1..709: mol_type = other DNA
ttaaaacagccttggggttgttcccaccccaagggcccacgtggcggctagtactctggtatttcggtacctttgtacgcctgttttatctcccttcccaatgtaacttagaagttctcaaatcgaagctcaataggtggagcgcaaaccagcgctttcatgagcaagcacttctgtctccccggtgcggttgtatagactgtttccacggttgaaaacaacttatccgttatccgctatagtacttcgagaaacctagtatcacctttggattgttgatgcgttgcgctcaacacactaacccgtgtgtagcttgggtcgatgagtctggacgtaccccactggtgacagtggtccaggctgcgttggcggcctactcatggtgaaaaccatgagacgctagacatgaacaaggtgtgaagagtctattgagctactatagagtcctccggcccctgaatgcggctaatcttaaccatggagcaagtgctcacaagccagtgagttgcttgtcgtaacgcgcaagtccgtggcggaaccgactactttgggtgtccgtgtttcactttttacttttatgactgcttatggtgacaatttaatattgttaccatttagcttgtcagattaatcacgtgaaatcctaaatcttatttatcaatttgtatttggatagcttcatttgaaaattctaaactcatttataaag

SEQ ID NO: 20075 - DNA, 709 bp, synthetic construct
  source 1..709: mol_type = other DNA
ttaaaacagccttggggttgttcccactccaagggcccacgtggcggctagtactctggtatttcgatacctttgtacgcctgttttatctcccttcccaatgtaacttagaagttttcagatcaaagctcaataggtggagcgcaaaccagcgctttcatgagcaagcacttctgtctccccggtgcggttgtatagactgtttccacggttgaaaacaacttatccgttatccgctatagtacttcgagaaacctagtatcacctttggattgttgatgcgttgcgctcagcacactaacccgtgtgtagcttgggtcgatgagtctggacgtaccccactggtgacagtggtccaggctgcgttggcggcctactcatggtgaaaaccatgagacgctagacatgaacaaggtgtgaagagtctattgagctactatagagtcctccggcccctgaatgcggctaatcttaaccatggagcaagtgctcacaagccagtgagttgcttgtcgtaacgcgcaagtccgtggcggaaccgactactttgggtgtccgtgtttcactttttacttttatgactgcttatggtgacaatttaatattgttaccatttagcttgtcagattaatcacgtgaagtcctaaatcttatttatcaatttgtatttggatagcttcatttgaaagttctaaactcattcataaag

SEQ ID NO: 20076 - DNA, 709 bp, synthetic construct
  source 1..709: mol_type = other DNA
ttaaaacagccttggggttgttcccaccccaagggcccacgtggcggctagtactctggtatttcggtacctttgtacgcctgttttatctcccttcccaatgtaacttagaagttttcaaatcgaagctcagtaggtggggcgcaaaccagcgctttcatgagcaagcacttctgtttccccggtgcggttgtatagactgtttccacggttgaaaacaacttatccgttatccgctatagtacttcgagaaacctagtatcacctttggattgttgatgcgttgcgctcagcacactaacccgtgtgtagcttgggctgatgagtctggacgtaccccactggtgacagtggtccaggctgcgttggcggcctactcatggtgaaaaccatgagacgctagacatgaacaaggtgtgaagagtctattgagctactatagagtcctccggcccctgaatgcggctaatcttaaccatggagcaagtgctcacaagccagtgagttgcttgtcgtaacgcgcaagtccgtggcggaaccgactactttgggtgtccgtgtttcactttttacctttatgactgcttatggtgacaatttaatattgttaccatttagcttgtcagattaatcgcgtaaaatcctaaatcttgtttatcaatttgtacttggatagcttcatttgaaaattctaaactcattcataaag

SEQ ID NO: 20077 - DNA, 709 bp, synthetic construct
  source 1..709: mol_type = other DNA
ttaaaacagccttggggttgttcccaccccaagggcccacgtggcggctagtactctggtatttcggtacctttgtacgcctgttttatctcccttcccaatgtaacttagaagttttcaaatcaaagctcaataggtggagcgcaaaccagcgctttcatgagcaagcactcctgtttccccggtgcggttgtatagactgttcccacggttgaaaacaatctatccgttatccgctatagtacttcgagaaacctagtatcacctttggattgttgatgcgttgcgctcagcacactaacccgtgtgtagcttgggtcgatgagtctggacataccccactggtgacagtggtccaggctgcgttggcggcctactcatggtgaaaaccatgagacgctagacatgaacaaggtgtgaagagtcaattgagctactatagagtcctccggcccctgaatgcggctaatcttaaccatggagcaagtgctcacaagccagtgagttgcttgtcgtaatgcgcaagtccgtggcggaaccgactactttgggtgtccgtgtttcactttttacttttgtgactgcttatggtgacaatttgatattgttaccatttagcttgtcagattaatcacataaaatcctaaatcttatttatcaacttgcatttggatagcttcatttgaaaattctgaacttattcataaag

SEQ ID NO: 20078 - DNA, 709 bp, synthetic construct
  source 1..709: mol_type = other DNA
ttaaaacagccttggggttgttcccaccccaagggcccacgtggcggctagtactctggtatttcggtacctttgtacgcctgttttatctcccttcccaatgtaacttagaagttttcaaatcaaagctcaataggtggagcgcaaaccagcgctttcatgagcaagcactcctgtctccccggtgcggttgtatagactgttcccacggttgaaaacaatctatccgttatccgctatagtacttcgagaaacctagtatcacctttggattgttgacgcgttgcgctcagcacactaacccgtgtgtagcttgggtcgatgagtctggacataccccactggtgacagtggtccaggctgcgttggcggcctactcatggtgaaaaccatgagacgctagacatgaacaaggtgtgaagagtctattgagctactatagagtcctccggcccctgaatgcggctaatcttaaccatggagcaagtgctcacaatccagtgagttgcttgtcgtaacgcgcaagtccgtggcggaaccgactactttgggtgtccgtgtttcactttttacttttatgactgcttatggtgacaatttgatattgttaccatttagcttgtcagattaatcacataaaaacctaaatcttatttatcaacttgcatttggatagcttcatttgaaaattctaaacttattcataaag

SEQ ID NO: 20079 - DNA, 709 bp, synthetic construct
  source 1..709: mol_type = other DNA
ttaaaacagccttggggttgttcccaccccaagggcccacgtggcggctagtactctggtatttcggtacctttgtacgcctgttttatctcccttcccaatgtaacttagaagttttcaaatcgaagctcaataggtggagcgcaaaccagcgctttcatgagcaagcacttctgtctccccggtgcggttgtatagactgtttccacggttgaaaacaacttatccgtaatccgctatagtacttcgagaaacctagtatcacctttggattgttgatgcgttgcgctcaacacactaacccgtgtgtagcttgggtcgatgagtctggacgtaccccactggtgacagtggtccaggctgcgttggcggcctactcatggtgaaaaccatgagacgctagacatgaacaaggtgtgaagagtctattgagctactatagagtcctccggcccctgaatgcggctaatcttaaccatggagcaagtgctcacaagccagtgagttgcttgtcgtaacgcgcaagtccgtggcggaaccgactactttgggtgtccgtgtttcactttttacttttatgactgcttatggtgacaatttaatattgttaccatttagcttgtcagattaatcacgtgaaatcctaaatcttatttatcaatttgtatttggatagcttcatttgaaaattctaaactcatttataaag

SEQ ID NO: 20080 - DNA, 709 bp, synthetic construct
  source 1..709: mol_type = other DNA
ttaaaacagccttggggttgttcccaccccaagggcccacgtggcggctagtactctggtatttcggtacctttgtacgcctgttttatctcccttcccaatgtaacttagaagttttcaaatcgaagctcagtaggtggggcgcaaaccagcgctttcatgagcaagcacttctgtttccccggtgcggttgtatagactgtttccacggttgaaaacaactcatccgttatccgctatagtacttcgagaaacctagtatcacctttggattgttgatgcgttgcgctcagcacactaacccgtgtgtagcttgggctgatgagtctggacgtaccccactggtgacagtggtccaggctgcgttggcggcctactcatggtgaaaaccatgagacgctagacatgaacaaggtgtgaagagtctattgagctactatagagtcctccggcccctgaatgcggctaatcttaaccatggagcaagtgctcacaagccagtgagttgcttgtcgtaacgcgcaagtccgtggcggaaccgactactttgggtgtccgtgtttcactttttacctttatgactgcttatggtgacaatttaatattgttaccatttagcttgtcagattaatcgcgtgaaatcctaaatcttgtttatcaatttgtatttggatagcttcatttgaaaattctaaactcattcataaag

SEQ ID NO: 20081 - DNA, 709 bp, synthetic construct
  source 1..709: mol_type = other DNA
ttaaaacagccttggggttgttcccaccccaagggcccacgtggcggctagtactctggtatttcggtacctttgtacgcctgttttatctcccttcccaatgtaacttagaagttttcaaatcgaagctcagtaggtggggcgcaaaccagcgctttcatgagcaagcacttctgtttccccggtgcggttgtatagactgtttccacggttgaaaacaacttatccgttatccgctatagtacttcgagaaacctagtatcacctttggattgttgatgcgttgcgctcagcacactaacccgtgtgtagcttgggctgatgagtctggacgtaccccactggtgacagtggtccaggctgcgttggcggcctactcatggtgaaaaccatgagacgctagacatgaacaaggtgtgaagagtctattgagctactatagagtcctccggcccctgaatgcggctaatcttaaccatggagcaagtgctcacaagccagtgagttgcttgtcgtaacgcgcaagtccgtggcggaaccgactactttgggtgtccgtgtttcactttttacctttatgactgcttatggtgacaatttaatattgttaccatttagcttgtcagattaatcgcgtgaaatcctaaatcttgttcaccaatttgtattcggatagcttcatttgaaaattctaaactcattcataaag

SEQ ID NO: 20082 - DNA, 709 bp, synthetic construct
  source 1..709: mol_type = other DNA
ttaaaacagccttggggttgttcccaccccaagggcccacgtggcggctagtactctggtatttcggtacctttgtacgcctgttttatctcccttcccaatgtaacttagaagttttcaaatcaaagctcaataggtggagcgcaaaccagcgctttcatgagcaagcactcctgtttccccggtgcggttgtatagactgttcccacggttgaaaacaatctatccgttatccgctatagtacttcgagaaacctagtatcacctttggattgttgatgcgttgcgctcagcacactaacccgtgtgtagcttgggtcgatgagtctggacataccccactggtgacagtggtccaggctgcgttggcggcctactcatggtgaaaaccatgagacgctagacatgaacaaggtgtgaagagtctattgagctactatagagtcctccggcccctgaatgcggctaatcttaaccatggagcaagtgctcacaagccagtgagttgcttgtcgtaatgcgcaagtccgtggcggaaccgactactttgggtgtccgtgtttcactttttacttttatgactgcttatggtgacaatttgatattgttaccatttagcttgtcagattaattacataaaatcctaaatcttatttatcaacttgcatttggatagcttcatttgaaaattctaaacttattcataaag

SEQ ID NO: 20083 - DNA, 709 bp, synthetic construct
  source 1..709: mol_type = other DNA
ttaaaacagccttggggttgttcccaccccaagggcccacgtggcggctagtactctggtattacggtacctttgtacgcctgttttatctcccttcccaatgtaacttagaagttttcaaatcaaagctcaataggtggagcgcaaaccagcgctttcatgagcaagtacttctgtttccccggtgcggttgtatagactgtttccacggttgaaaacaacttatccgttatccgctatagtacttcgagaaacctagtatcacctttggattgttgatgcgttgcgctcagcacactaacccgtgtgtagcttgggtcgatgagtctggacgtaccccactggtgacagtggtccaggctgcgttggcggcctactcatggtgaaaaccatgagacgctagacatgaacaaggtgtgaagagtctattgagctactatagagtcctccggcccctgaatgcggctaatcttaaccatggagcaagtgctcacaagccagtgagttgcttgtcgtaacgcgcaagtccgtggcggaaccgactactttgggtgtccgtgtttcactttttacctttatgactgcttatggtgacaatttaatattgttaccatttagcttgtcagattaatcacgtgaaatcctgaatcttatttatcaatttgtatttggatagcttcatttgaaaattctaaactcattcataaag

SEQ ID NO: 20084 - DNA, 709 bp, synthetic construct
  source 1..709: mol_type = other DNA
ttaaaacagccttggggttgttcccaccccaagggcccacgtggcggctagtactctggtatttcggtacctttgtacgcctgttttatctcccttcccaatgtaacttagaagttttcaaatcaaagctcaataggtggagcgcaatccagcgctttcatgagcaagcacttctgtttccccggtgcggttgtatagactgtttccacggttgaaaacaacttatccgttatccgctatagtacttcgagaaacctagtatcacctttggattgttgatgcgttgcgctcagcacactaacccgtgtgtagcttgggtcgatgagtctggacgtaccccactggtgacagtggtccaggctgcgttggcggcctactcatggtgaaaaccatgagacgctagacatgaacaaggtgtgaagagtctattgagctactatagagtcctccggcccctgaatgcggctaatcttaaccatggagcaagtgctcacaagccagtgagttgcttgtcgtaacgcgcaagtccgtggcggaaccgactactttgggtgtccgtgtttcactttttacctttatgactgcttatggtgacaatttaatattgttaccatttagctagtcggattaatcacgtgaaatcctaagtctcatttatcaatttgtatttggatagtttcatttgaaaattctaaactcattcataaag

SEQ ID NO: 20085 - DNA, 709 bp, synthetic construct
  source 1..709: mol_type = other DNA
ttaaaacagccttggggttgttcccaccccaagggcccacgtggcggctagtactctggtatttcggtacctttgtacgcctgttttatctcccttcccaatgtaacttagaagttttcaaatcgaagctcagtaggtggggcgcaaaccagcgctttcatgagcaagcacttctgtttccccggtgcggttgtatagactgtttccacggttgaaagcaacttatccgttatccgctatagtacttcgagaaacctagtatcacctttggattgttgatgcgttgcgctcagcacactaacccgtgtgtagcttgggctgatgagtctggacgtaccccactggtgacagtggtccaggctgcgttggtggcctactcatggtgaaaaccatgagacgctagacatgaacaaggtgtgaagagtctattgagctactatagagtcctccggcccctgaatgcggctaatcttaaccatggagcaagtgctcacaagccagtgagttgcttgtcgtaacgcgcaagtccgtggcggaaccgactactttgggtgtccgtgtttcactttttacctttatgactgcttatggtgacaatttaatattgttaccatttagcttgtcagattaatcgcgtgaaatcctaaatcttatttatcaatttgtatttggatagcttcatttgaagattctaaacccattcataaag

SEQ ID NO: 20086 - DNA, 709 bp, synthetic construct
  source 1..709: mol_type = other DNA
ttaaaacagccttggggttgttcccaccccaagggcccacgtggcggctagtactctggtatttcggtacctttgtacgcctgttttatctcccttcccaatgtaacttagaagttttcaaatcgaagctcagtaggtggggcgcaaaccagcgctttcatgagcaagcacttctgtttccccggtgcggttgtatagactgtttccacggttgaaaacaacttatccgttatccgctatagtacttcgagaaacctagtatcacctttggattgttgatgcgttgcgctcagcacactaacccgtgtgtagcttgggctgatgagtctggacgtaccccactggtgacagtggtccaggctgcgttggcggcctactcatggtgaaaaccatgagacgctagacatgaacaaggtgtgaagagtctattgagctactatagagtcctccggcccctgaatgcggctaatcttaaccatggagcaagtgctcacaagccagtgagttgcttgtcgtaacgcgcaagtccgtggcggaaccgactactttgggtgtccgtgtttcactttttacctttatgactgcttatggtgacaatttaatattgttaccatttagcttgtcagattaatcgcgtgaaatcctaaatcttgtttatcaatttgtattcggatagcttcatttgaaaattctaaactcattcataaag

SEQ ID NO: 20087 - DNA, 718 bp, synthetic construct
  source 1..718: mol_type = other DNA
cacccacagggcccactgggcgctagcactctggtattgcggtacctttgtgcgcctgttttacccaccctcccccaacgtaacttagaagcctgacatatacggtcacaagccagcccagtacgccaactgggtaccgaccaagcacttctgttaccccggactgagtatcaataagctgccaaagcggctgaaggagaaaacgttcgttatccggccaattacttcgagaaacccagtaacaccatgaaagttgcgtagcgtttcattcagcacaatcccagtgtagatcaggtcgatgagtcaccgcattccccacaggcgactgtggcggtggctgcgttggcggcctgcccatggggcaacccatgggacgcttcaatactgacatggtgcgaagagtctattgagctaattggtagtcctccggcccctgaatgcggctaatcctaactgcggagcaggcactcgcagaccagcgagcagcttgtcgtaatgggcaactccgcagcggaaccgactactttgggtgtccgtgtttcctatttcctttacactggctgcttatggtgacaattgagaaattgttaccatatagctattggagtggccatccggtgactaacagagcaataatatatttgtttgttggctttgtgccacttaatttgaaggttgttaagacgctcaatctgatactacttctaaataaagcaaa

SEQ ID NO: 20088 - DNA, 699 bp, synthetic construct
  source 1..699: mol_type = other DNA
gggttgttcccaccccagaggcccacgtggcggctagtactctggtatcacggtacctttgtacgcctgttttatatcccttcccccgtaactttagaagcttaacaaaagttcaacagcaggggtgcaaaccagtacctctacgaacaagcacttctgtctccccggtgaagttacatagactgtacccacggtcaaaagtaattgatccgttatccgcttgagtacttcgagaagcctagtatcaccttggaatcttcgacgcgttgcgctcaacactctaccccgggtgtagcttaggctgatgagtctgggcactccccaccggtgacggtggcccaggctgcgttggcggcctacccatggctaacgccatgggacgctagttgtgaacaaggtgtgaagagcctattgagctactcaagaatcctccggcccctgaatgcggctaatcctaaccacggagcaatcgctcacgacccagtgggtaggttgtcgtaacgcgcaagtccgtggcggaaccgactactttgggtgtccgtgtttccctttttacttatactggctgcttatggtgacaatttacagattgttaccatatagctattgggttggccatccagtattgtgttacacatattaaaatacttttctacaagcaataacaacactgtgtttgaaccacaatagtcactacaa

SEQ ID NO: 20089 - DNA, 702 bp, synthetic construct
  source 1..702: mol_type = other DNA
gtcttggggttgttcccaccccaagggcccacgtggcggctagtactctggtacttcggtacctttgtacgcctgttttatctccctccccaatgtaacttagaagctttcaaatcaaagctcaataggtggaacgcaagccagcgcttccgtgagcaagcactcctgtttccccggtgcggttgtatagactgttcccacggttgaaaacaacctatccgttatccgctatagtacttcgagaaacctagtatcacctttggattgttgatgcgttgcgctcagcacactaacccgtgtgtagcttgggtcgatgagtctggacataccccactggtgacagtggtccaggctgcgttggcggcctactcatggtgaaaaccatgagacgctaaacatgaacaaggtgtgaagagtctattgagctactatagagtcctccggcccctgaatgcggctaatcttaaccatggagcaagtgctcacaaaccagtgagttacttgtcgtaatgcgcaagtccgtggcggaaccgactactttgggtgtccgtgtttcactttttacttttatgactgcttatggtgacaatttaatattgttaccatttagctagtcatattaatcacataaaactttaaattctatctaataattcacatttggatagcttcattttgaggactttaaacctatttacaaaa

SEQ ID NO: 20090 - DNA, 662 bp, synthetic construct
  source 1..662: mol_type = other DNA
ctgttttatacacccttaccctacgtaatatagaagcaaaacaacaaggtcaatagagagcccggtgagccaactgggtcgagaccaagcacttctgtttccccggaccgagtatcaataggctgcttacgcggctgaaggagaaaacgttcgttacccggctaactacttcgaaaaacctagtaacgccatggaagttgcgaatcgtttcgctcggcacttccccagtgtagatcaggtcgatgagtcaccgcattccccacgggcgaccgtggcggtggctgcgttggcggcctgcctatggggcaacccataggacgcttcaatatggacatggtgtgaagagtctattgagctagttagtagtcctccggcccctgaatgcggctaatcctaactgcggagcacatgcccccaacccaggaggtggtgtgtcgtaatgggtaactctgcagcggaaccgactactttgggtgtccgtgtttccttttatcccaatgttggctgcttatggtgacaattgaaagattgttaccatatagctattggattggccatccggtgactaacagagcaattgtatacctattcattggttacgttccattaaatctcaaggaattaacgactctcaattacattttgctcttgaattctgcaaa

SEQ ID NO: 20091 - DNA, 708 bp, synthetic construct
  source 1..708: mol_type = other DNA
aacagccttggggttgttcccactccaagggcccacgtggcggctagtactctggtacttcggtacctttgtacgcctgttttatctcccttcccaatgtaacttagaagttcttaaatcaatgctcaataggtggggcgcaaaccagcgctctcatgagcaagcactcctgtctccccggtgaggttgtataaattgttcccacggttgaaaacaacctatccgttatccgctatagtacttcgagaaacctagtaccacctttggattgttgacgcgttgcgctcagcacactaacccgtgtgtagcttgggtcgatgagtctggacatacctcactggcgacagtggtccaggctgcgttggcggcctactcatggtgaaagccatgagacgctagacatgaacaaggtgtgaagagtctattgagctactatagagtcctccggcccctgaatgcggctaatcctaaccatggagcaagtgctcacaggccagtgagttgcttgtcgtaatgcgcaagtccgtggcggaaccgactactttgggtgtccgtgtttcactttttacttttatgactgcttatggtgacaatttgatattgttaccatttagcttgtcaaatcaattgcaaaagatcctaactcttatttatcaacttgcatcttgataactttaatttgaaaatattaatttgaaaattataaca

SEQ ID NO: 20092 - DNA, 708 bp, synthetic construct
  source 1..708: mol_type = other DNA
cccactgggcgctagcacactggtatcccggtacctttgtgcgcctgttttataccccctcctccaaccgtaacctagaagcagcaccatatggccaatagtagacgtggcgcaccagccacgttttggtcaagcacttctgtttccccgggccgagtatcaataggctgctcacgcggctgaaggagaaagcgtccgttacccggccaattacttcgagaaacctagtaccaccatggaagttgcgcggcgtttcgctccacacaaccccagtgtagatcgggtcgatgagtcaccgcatttccccacgggtgaccgtggcggtggctgcgttggcggcctgcccatgaggaaactcatgggacgcttcaatactgacatggtgtgaagagtctattgagctaattggtagtcctccggcccctgaatgcggctaatcctaactgcggagcagatgctcacaaaccagtgggtggtctgtcgtaatgggcaactctgcagcggaaccgactactttgggtgtccgtgtttccttttattttcacactggctgcttatggtgacaattgaaggattgttaccatatagctattggattggccatccggtgacaaacagagcgattgtctatctatttgttggttttgtaccattagatttcaaagtcctgaaaaccctcaatttcgtcttaacactcaattcggcaag

SEQ ID NO: 20093 - DNA, 730 bp, synthetic construct
  source 1..730: mol_type = other DNA
gttgttcccacccacagggcccactgggcgctagcacactggtatcacggtacctttgtgcgcctgttttatgcttcctcccccactatagtaatttagaagcttgaaccacacggccaacagacaacccggtacaccaaccgggccccggccaagcacttctgtatccccggactgagtatcagtaggctgctcgcgcggctgaaggagaaaacgttcgttacccggccacttacttcgagaaacctagtaacgccatgaaagttgcgcagcgtttcgctccgcacaaacccagtgtagatcaggtcgatgagtcaccgcatcccccacgggcgaccgtggcggtggctgcgttggcggcctgcccatggggtaacccatgggacgcttcaatactgacatggtgcgaagagtctattgagctaagtggtagtcctccggcccctgaatgcggctaatcctaactgcggagcagatacccacactccagtgggcagtctgtcgtaacgggcaactctgcagcggaaccgactactttgggtgtccgtgtttcctcttgtcttttacactggctgcttatggtgacaattgaaagattgttaccatatagctattggattggccatccggtatcaaacagagcaattatttacttgtttgttggttatatacctctcgacaccaaggttctaaaaacactcaactacatcttgttattgaatacgttgaa

SEQ ID NO: 20094 - DNA, 718 bp, synthetic construct
  source 1..718: mol_type = other DNA
acccacagggcccactgggcgctagcacactggtatcacggtacctttgtgcgcctgtttgacttaccctccccaaacgcaacttagaagcacaacttaaatggtcaataggcggctcagtatgccaactgagtctcgatcaagcacttctgttaccccggactgagtaccaataggctgctcacgcggctgaaggggaaaccgttcgttacccgactaactacttcgagaaacctagtaccaccatgaaagttgcgcagcgtttcgctccgcacaaccccagtgtagatcaggtcgatgagtcaccgcaaaccccacgggcgaccgtggcggtggctgcgctggcggcctgcccatggggcaactcatgggacgcttcaatactgacatggtgcgaagagtctattgagctagttggtagtcctccggcccctgaatgcggctaatcctaactgcggagcagacacccacgcaccagtgggcagtctgtcgtaatgggcaactctgcagcggaaccgactactttgggtgtccgtgtttccttttgttcttatactggctacttatggtgacaattgagagattgtaaccatattgctattggattggccacccggcgacgaatagaacagttgcttacctgtttgttagtctcgtatcactgaactacaaatccttaaacaccctttaatttcgtcataacgctcaatacgttaaa

SEQ ID NO: 20095 - DNA, 707 bp, synthetic construct
  source 1..707: mol_type = other DNA
cagccttggggttgttcccactccaagggcccacgtggcggctagtactctggtacttcggtacctttgtacgcctgttttatctcccttcccaatgtaacttagaagttcttaaatcaatgctcaataggtggggcgcaaaccagcgctctcatgagcaagcactcctgtctccccggtgaggttgtataaactgttcccacggttgaaaacaacctatccgttatccgctatagtacttcgagaaacctagtaccacctttggattgttgacgcgttgcgctcagcacactaacccgtgtgtagcttgggtcgatgagtctggacatacctcactggcgacagtggtccaggctgcgttggcggcctactcatggtgaaagccatgagacgctagacatgaacaaggtgtgaagagtctattgagctactatagagtcctccggcccctgaatgcggctaatcctaaccatggagcaagtgctcacaggccagtgagttgcttgtcgtaatgcgcaagtccgtggcggaaccgactactttgggtgtccgtgtttcactttttacttttatgactgcttatggtgacaatttgatattgttaccatttagcttgtcaaatcaattgcaaaagatcctaactcttatttatcaacttgcatcttgataactttaatttgaaaattattaatttgaaaattataaca

SEQ ID NO: 20096 - DNA, 708 bp, synthetic construct
  source 1..708: mol_type = other DNA
aacagccttggggttgttcccactccaagggcccacgtggcggctagtactctggtacttcggtacctttgtacgcctgttttatctcccttcccaatgtaacttagaagttcttaaatcaatgctcaataggtggggcgcaaaccagcgctctcatgagcaagcactcctgtctccccggtgaggttgtataaactgttcccacggttgaaaacaacctatccgttatccgctatagtacttcgagaaacctagtaccacctttggattgttgacgcgttgcgctcagcacactaacccgtgtgtagcttgggtcgatgagtctggacatacctcactggcgacagtggtccaggctgcgttggcggcctactcatggtgaaagccatgagacgctagacatgaacaaggtgtgaagagtctattgagctactatagagtcctccggcccctgaatgcggctaatcctaaccatggagcaagtgctcacaggccagtgagttgcttgtcgtaatgcgcaagtctgtggcggaaccgactactttgggtgtccgtgtttcactttttacttttatgactgcttatggtgacaatttgatattgttaccatttagcttgtcaaatcaattgcaaaagatcctaactcttatttatcaacttgcatcttgataactttaatttgaaaatattaatttgaaaattataaca

SEQ ID NO: 20097 - DNA, 645 bp, synthetic construct
  source 1..645: mol_type = other DNA
tgttcccacccccagggcccaccgggcgttagtactctggtatcacggtaccttagtatgcctgttttatgtcccctttcccccgcaactttagaagtaaccaagttatggctcaatagtcgccacacctccagtgtggtttcgagcaagcacttctgttccccggttgcgtcctatatgttgtgtgaacggcagaaagggacaatatcgttatccgctcaactactacgggaagcccagtaccaccatggattgacttgagagttgcgttcggcgcacccccagcgtagctcaggtcgatgaggctccgaataccccacgggcgaccgtgtcggagcctgcgttggcggcctgcccacgttgtaaaacgtgggacgctcatttcatgacatggtgcgaagagcctactgtgctagttgagagtcctccggcccctgaatgtggataatcctaaccactgaacctacgggcgcaaaccagcgtctgataggccgtaacgcgcaagtcggtggcggaaccaactactttgggtgtccgtgtttccttttatctcctttgaatgtttatggtgacaattgttgtgtacagttgttgccatagtttgcattcagaaataaacttaacacttcccaattatttgtcaca

SEQ ID NO: 20098 - DNA, 663 bp, synthetic construct
  source 1..663: mol_type = other DNA
cctgttttatatacccttacccaacgtaatatagaagtaaaacaacaaggtcaatagagagcccagtgagccaactgggtcgagaccaagcacttctgtttccccggactgagtatcaataggctgcctacgcggctgaaggagaaaacgttcgttacccggctaactacttcgaaaaacctagtaacgccatggaagttgcgaaacgtttcgctcggcacttccccagtgtagatcaggtcgatgagtcaccgcattccccacgggcgaccgtggcggtggctgcgttggcggcctgcctatggggcaactcataggacgcttcaatatggacatggtgtgaagagtctattgagctagttagttgtcctccggcccctgaatgcggctaatcctaactgcggagcacatgcccccaacccaggaggtggtgtgtcgtaatgggtaactctgcagcggaaccgactactttgggtgtccgtgtttccttttatcccaatattggctgcttatggtgacaattgaaagattgttaccatatagctattggattggccatccggtgactaacagagctattgtatacctattcattgggtacgttccactaaatctcaaggaattaacgactctcaattacattttgctcttgaattctgcaaa

SEQ ID NO: 20099 - DNA, 600 bp, synthetic construct
  source 1..600: mol_type = other DNA
cagtgaaccaactgagcctcgaccaagtacttctgttaccccggactgagtatcaataggctgctcacgtggctgatggagaaaacgtccgttacccggccaattacttcgagaaacctagtaccaccatgaaggttgcgcagcgtttcgctccgcacaaccccagtgtagatcaggtcgatgagtcactgcgctccccacgggcgaccgtggcggtgactgcgttggcggcctgcccatggggcatcccatgggacgcttcaatactgacatggtgtgaagagtctattgagctaattggtagtcctccggcccctgaatgcggctaatcctaactgcggagcagatacccacgcaccagtgggcagtctgtcgtaacgggcaactctgcagcggaaccgactactttgggtgaccgtgtttccttttattctaatgctggctgcttatggtgacaattgaaagattgttaccatatagctattggattggccatccggtaacaaacagagcaattatttacctgtttattggttttatacctctcaactacaaggttataaatactcttaactttattttagcacttaacacagcaaa

SEQ ID NO: 20100 - DNA, 662 bp, synthetic construct
  source 1..662: mol_type = other DNA
ctgttttatacacccttaccccacgcaatatagaagcaaaacaacaaggtcaatagagagcccagtgaaccaactgggtcgagaccaagcacttctgtttccccggaccgagtatcaataggctgcttacgcggctgaaggagaaaacgttcgttacccggctaactacttcgaaaaacctagtaacgccatggaagttgcgaaccgtttcgctcggcacttccccagtgtagatcaggtcgatgagtcaccgcattccccacgggcgaccgtggcggtggctgcgttggcggcctgcctatggggcaacccataggacgcttcaatacggacatggtgtgaagagtctattgagctagttagtagtcctccggcccctgaatgcggctaatcctaactgcggagcacatgcccccaacccaggaggtgatgtgtcgtaatgggtaactctgcagcggaaccgactactttgggtgtccgtgtttccttttatcccaatgttggctgcttatggtgacaattgaaaggttgttaccatatagctattggattggccatccggtgactaacagagcaattgtatacctattcattggttacgttccattaaatctcaaggaattaacgactctcaattacattttgctcttgaattccgcaaa

SEQ ID NO: 20101 - DNA, 709 bp, synthetic construct
  source 1..709: mol_type = other DNA
gcccattgggcgctagcacactggtattacggtacctttgtgcgcctgttttatccacccttccctcaaatgaaacttagaagcttaacttgaatggtcaacaggaaacccagtacaccaactgggtcgcgaccaagcacttctgtaaccccggaccgagtatcaataagctgcttgcgtggctgaaagagaaaacgttcgttacccgaccaattacttcgagaaacctagtaccaccatggaggttgcgcagtgtttcgctccgcacaaccctagtgcagatcgggccgatgagtcaccgcgttccccacgggcgaccgtggcggtggctgcgctggcggcccgcccatggggcaacccatgggacgcttcaatactgacatggtgcgaagagtctattgagctaattggtagtcctccggcccctgaatgcggctaatcccaactgcggagcagatacccacacgccagtgggcagtctgtcgtaacgggcaactctgcagcggaaccgactactttgggtgtccgtgtttccttttaccttttactggctgcttatggtgacaattgagagattgttaccatatagctactggattggccatccggtgtctaacagagcgattatttatctgtttgttggatttgtgcccttaaacctcaaagttctcaacactcttaaccttgtattacaatttaactcagcaaa

SEQ ID NO: 20102 - DNA, 699 bp, synthetic construct
  source 1..699: mol_type = other DNA
tttaaaacagccttggggttgttcccatcccaagggcccacgtggcggctagtactctggtatttcggtacctttgtacgcctgttttatctcccttcccaatgtaacctagaagctcttaaatcaaggctcaataggtggagcgcaaaccagcgctctcatgagcaagcactcctgtctccccggtgtggttgtataaactgttcccacggttgaaaacaacctatccgttatccgctatagtacttcgagaaacctagtatcacctttggattgttgatgcgttgcgctcagcacactaacccgtgtgtagcttgggtcgatgagtctggacgtacctcactggcgacagtggtccaggctgcgttggcggcctactcatggtgaaaaccatgagacgctaaacatgaacaaggtgtgaagagtctattgagctactatagagtcctccggcccctgaatgcggctaatcttaaccatggagcaagtgctcacaagccagtgagttgcttgtcgtaatgcgcaagtccgtggcggaaccgactactttgggtgtccgtgtttcactttttacttttatgactgcttatggtgacaatttgatattgttaccatttagcttgtcaaaccaattgcaaaagaccctaaatcttatttgtcaacttgtattttaataacttcaatttgaaaattttaata

SEQ ID NO: 20103 - DNA, 696 bp, synthetic construct
  source 1..696: mol_type = other DNA
gttgttcccaccccagaggcccacgtggcggctagtactctggtattacggtacctttgtacgcctgttttatatcccctcccccgcaactttagaagcttaacaacagttcaacagcaggggtgcaaaccagcacctctacgaacaagtacttctgtttccccggtgaaattacatagactgtacccacggtcaaaagtgattgatccgttatccgcttgagtacttcgagaagcctagtatcaccttggaatcttcgacgcgttgcgctcaacactctaccccgggtgtagcttaggctgatgagtctgggcactcctcaccggtgacggtggcccaggctgcgttggcggcctacccatggctaacgccatgggacgctagttgtgaacaaggtgtgaagagcctattgagctactcaagagtcctccggcccctgaatgcggctaatcctaaccacggagcaatcgctcacgatccagtgagtaggttgtcgtaatgcgtaagtctgtggcggaaccgactactttgggtgtccgtgtttcccttttattcatactggctgcttatggtgacaatttacagattgttaccatatagctattggattggccatccagtattgtgttacacatattaaaatacttttctacaagcaacaacaacattgtgtttgaaccacaatagccattacaa

SEQ ID NO: 20104 - DNA, 699 bp, synthetic construct
  source 1..699: mol_type = other DNA
ttaaaacagccttggggttgttcccaccccaagggcccatgtggcggctagtactctggtacttcggtacctttgtacgcctgttttatctcccttcccaatgtaatttagaagctcttaaatcaaggctcaataggtggggcgcaaaccagcgctctcatgagcaagcactcctgtctccccggtgtggttgtataaactgttcccacggttgaaaacaacctatccgttatccgctatagtacttcgagaaacctagtatcacctttggattgttgacgcgttgcgctcagcacactaacccgtgtgtagcttgggtcgatgagtctggacataccccactggcgacagtggtccaggctgcgttggcggcctactcatggtgaaaaccatgagacgctagacatgaacaaggtgtgaagagtctattgagctactatagagtcctccggcccctgaatgcggctaatcctaaccatggagcaagtgctcacaggccagtgagttgcttgtcgtaatgcgcaagtccgtggcggaaccgactactttgggtgtccgtgtttcactttttacttttatgactgcttatggtgacaatttgatattgttaccatttagcttgtcaaattaattgtaaaagatcctaaatcttacttaccaacttgtattttgacaaccttgatttgaaaatttttaata

SEQ ID NO: 20105 - DNA, 698 bp, synthetic construct
  source 1..698: mol_type = other DNA
ttaaaacaccccccccggtgttcccactccaagggcccacgtggcggctagtactctggtacttcggtacctttgtacgcctgttttatctcccttcccgatgtaatttagaagctcttaaatcaaggctcaataggtggggcgcaacccagcgctctcatgagcaagcacttctgtctccccggtgtggttgtataaactgttcccacggttgaaaacaacctatccgttatccgctatagtacttcgagaaacctagtatcacctttggattgttgacgcgttgcgctcagcacactaacccgtgtgtagcttgggtcgatgagtctggacataccccactggcgacagtggtccaggctgcgttggcggcctactcatggtgaaaaccatgagacgctagacatgaacaaggtgtgaagagtctattgagctactatagagtcctccggcccctgaatgcggctaatcctaaccatggagcaagtgctcacaggccagtgagttgcttgtcgtaatgcgcaagtccgtggcggaaccgactactttgggtgtccgtgtttcactttttacttttatgactgcttatggtgacaatttgatattgttaccatttagcttgtcaaattaattgcaaaagatcctaaatcttacttaccaacttgcattttgataaccttgatttgaaaattttaata

SEQ ID NO: 20106 - DNA, 698 bp, synthetic construct
  source 1..698: mol_type = other DNA
ttaaaacaccccccccggttgtcccactccaagggcccacgtggcggctagtactctggtacttcggtacctttgtacgcctgttttatctcccttcccgatgtaatttagaagctcttaaatcaaggctcaataggtggggcgcaacccagcgctctcatgagcaagcacttctgtctccccggtgtggttgtataaactgttcccacggttgaaaacaacctatccgttatccgctatagtacttcgagaaacctagtatcacctttggattgttgacgcgttgcgctcagcacactaacccgtgtgtagcttgggtcgatgagtctggacataccccactggcgacagtggtccaggctgcgttggcggcctactcatggtgaaaaccatgagacgctagacatgaacaaggtgtgaagagtctattgagctactatagagtcctccggcccctgaatgcggctaatcctaaccatggagcaagtgctcacaggccagtgagttgcttgtcgtaatgcgcaagtccgtggcggaaccgactactttgggtgtccgtgtttcactttttacttttatgactgcttatggtgacaatttgatattgttaccatttagcttgtcaaattaattgcaaaagatcctaaatcttacttaccaacttgcattttgataaccttgatttgaaaattttaata

SEQ ID NO: 20107 - DNA, 704 bp, synthetic construct
  source 1..704: mol_type = other DNA
agccttggggttgttcccactccaagggcccacgtggcggctagtactctggtacttcggtacctttgtacgcctgttttatctcccttcccaatgtaacttagaagttcttaaatcaatgctcaataggtggggcgcaaaccagcgctctcatgagcaagcactcctgtctccccggtgaggttgtataaactgttcccacggttgaaaacaacctatccgttatccgctatagtacttcgagaaacctagtaccacctttggattgttgacgcgttgcgctcagcacactaacccgtgtgtagcttgggtcgatgagtctggacatacctcactggcgacagtggtccaggctgcgttggcggcctactcatggtgaaagccatgagacgctagacatgaacaaggtgtgaagagtctattgagctactatagagtcctccggcccctgaatgcggctaatcctaaccatggagcaagtgctcacaggccagtgagttgcttgtcgtaatgcgcaagtccgtggcggaaccgactactttgggtgtccgtgtttcactttttacttttatgactgcttatggtgacaatttgatattgttaccatttagcttgtcaaatcaattgcaaaagatcctaaatcttatttatcaacttgcatcttgataactttaatttgaaaaattaatttgaaaattttaaca

SEQ ID NO: 20108 - DNA, 700 bp, synthetic construct
  source 1..700: mol_type = other DNA
taaaacagccttggggttgttcccactccaagggcccacgtggcggctagtactctggtacttcggtacctttgtacgcctgttttatctcccttcccaatgcaatttagaagctcttaaatcaaggctcaataggtggggcgcaaaccagcgctctcatgagcgagcactcctgtctccccggtgtggttgtataaactgttcccacggttgaaaacaacctatccgttatccgctatagtacttcgagaaacctagtatcacctttggattgttgacgcgttgcgctcagcacactaacccgtgtgtagcttgggtcgatgagtctggacataccccactggcgacagtggtccaggctgcgttggcggcctactcatggtgaaagccatgagacgctagacatgaacaaggtgtgaagagtctattgagctactatagagtcctccggcccctgaatgcggctaatcctaaccatggagcaagtgctcacaggccagtgagttgcttgtcgtaatgcgcaagtccgtggcggaaccgactactttgggtgtccgtgtttcactttttacttttatgactgcttatggtgacaatttgatattgttaccatttagcttgtcaaactaattgcaaaagattctaaatcttacttaccaacttgcattttgacaaccttggtttgaaaattttaataata

SEQ ID NO: 20109 - DNA, 700 bp, synthetic construct
  source 1..700: mol_type = other DNA
taaaacagccttggggttgttcccactccaagggcccacgtggcggctagtactctggtatttcggtacctttgtacgcctgttttatctcccttcccaacgcaatttagaagctctcaaatcaaggctcaataggtggggcgcaaaccagcgctctcatgagcaagcactcctgtctccccggtgcggttgtataaactgttcccacggttgaaaacaacctatccgttatccgctatagtacttcgagaaacctagtatcacctttggattgttgacgcgttgcgctcagcacactaacccgtgtgtagcttgggtcgatgagtctggacataccccactggcgacagtggtccaggctgcgttggcggcctactcatggtgaaaaccatgagacgctagacatgaacaaggtgtgaagagtctattgagctactatagagtcctccggcccctgaatgcggctaatcctaaccatggagcaagtgctcacaggccagtgagttgcttgtcgtaatgcgcaagtccgtggcggaaccgactactttgggtgtccgtgtttcactttttacttttatgactgcttatggtgacaatttgatattgttaccatttagcttgtcaaattaattgcaaaagatcctaaatcttacttaccaacttgcattttgacaaccttggtttgaaaactttaataata

SEQ ID NO: 20110 - DNA, 730 bp, synthetic construct
  source 1..730: mol_type = other DNA
tgggttgttcccacccacagggcccaccgggcgctagcacactggtatctcggtacccttgtgcgcctgttttatccacccttttcccatttaacttagaagcacgcgccaagacggtcaaaagggagcccagtaagccaattgggctatgaccaagcactcctgtaaccccgggccgagtatcaataagctgctcgcgcggctgaaggagaaaaagctcgttacccggccaattacttcgagaaacccagtagcatcatgaaagttgcgcagcgtttcgctccacacaaccccagtgtagatcaggtcgatgagtcaccgcgttccccacgggtgaccgtggcggtggctgcgctggcggcctgcccatggggccacccatgggacgcttcaatactgacatggtgtgaagagtctattgagctaattggtagtcctccggcccctgaatgcggctaatcctaactgcggagcagatgcccacacaccagtgggaagtctgtcgtaacgggtaactctgcagcggaaccgactactttgggtgtccgtgtttccttttatttctactctggctgcttatggtgacaattgaaaggttgttaccatatagctattggattggccatccggtgtcacatagagcgattatttacttgtttgttgggtttataccactgaactataaagttttaaatactcttaactacattttaatccttaactcattaaa

SEQ ID NO: 20111 - DNA, 699 bp, synthetic construct
  source 1..699: mol_type = other DNA
ttaaaacagccttggggttgttcccactccaagggcccacgtggcggctagtactctggtacttcggtacctttgtacgcctgttttatctcccttcccaatgtaatttagaagctcttaaatcaaggctcaataggtggggcgcaaaccagcgctctcatgagcaagcactcctgtctccccggtgtggttgtataaactgttcccacggttgaaaacaacctatccgttatccgctatagtacttcgagaaacctagtatcacctttggattgttgacgcgttgcgctcagcacactaacccgtgtgtagcttgggtcgatgagtctggacacaccccactggcgacagtggtccaggctgcgttggcggcctactcatggtgaaaaccatgagacgctagacatgaacaaggtgtgaagagtctattgagctactatagagtcctccggcccctgaatgcggctaatcctaaccatggagcaagtgctcacaagccagtgagttgcttgtcgtaatgcgcaagtccgtggcggaaccgactactttgggtgtccgtgtttcactttttacttttatgactgcttatggtgacaatttgatattgttaccatttagcttgtcaaattaattgcaaaagatcctaaatcttacttaccaacttgcattttgacaaccttgatttgaaaatttttaata

SEQ ID NO: 20112 - DNA, 699 bp, synthetic construct
  source 1..699: mol_type = other DNA
ttaaaacagccttggggttgttcccactccaagggcccacgtggcggctagtactctggtacttcggtacctttgtacgcctgttttatctcccttcccaatgtaatttagaagctcttaaatcaaggctcaataggtggggcgcaaaccagcgctctcatgagcaagcactcctgtctccccggtgtggttgtataaactgttcccacggttgaaaacaacctatccgttatccgctatagtacttcgagaaacctagtatcacctttggattgttgacgcgttgcgctcagcacactaacccgtgtgtagcttgggtcgatgagtctggacacaccccactggcgacagtggtccaggctgcgttggcggcctactcatggtgaaaaccatgagacgctagacatgaacaaggtgtgaagagtctattgagctactatagagtcctccggcccctgaatgcggctaatcctaaccatggagcaagtgctcacaggccagtgagttgcttgtcgtaatgcgcaagtccgtggcggaaccgactactttgggtgtccgtgtttcactttttacttttatgactgcttatggtgacaatttgatattgttaccatttagcttgtcaaattaattgcaaaagatcctaaatcttacttaccaacttgcattttgacaaccttgatttgaaaatttttaata

SEQ ID NO: 20113 - DNA, 698 bp, synthetic construct
  source 1..698: mol_type = other DNA
ttaaaacagccttggggttgttcccactccaagggcccacgtggcggctagtactctggtacttcggtacctttgtacgcctgttttatctcccttcccaatgtaacttagaagttcttaaatcaatgctcaataggtggggcgcaaaccagcgctctcatgagcaagcactcctgtctccccggtgaggttgtataaactgttcccacggttgaaaacaacctatccgttatccgctatagtacttcgagaaacctagtaccacctttggattgttgacgcgttgcgctcagcacactaacccgtgtgtagcttgggtcgatgagtctggacatacctcactggcgacagtggtccaggctgcgttggcggcctactcatggtgaaagccatgagacgctagacatgaacaaggtgtgaagagtctattgagctactatagagtcctccggcccctgaatgcggctaatcctaaccatggagcaagtgctcacaggccagtgagttgcttgtcgtaatgcgcaagtccgtggcggaaccgactactttgggtgtccgtgtttcactttttacttttatgactgcttatggtgacaatttgatattgttaccatttagcttgtcaaatcaattgcaaaagatcctaactcttatttatcaacttgcatcttgataactttaatttgaaaattttaaca

SEQ ID NO: 20114 - DNA, 698 bp, synthetic construct
  source 1..698: mol_type = other DNA
ttaaaacagccttggggttgttcccactccaagggcccacgtggcggctagtactctggtacttcggtacctttgtacgcctgttttatctcccttcccaatgtaacttagaagttcttaaaccaatgctcaataggtggggcgcaaaccagcgctctcatgagcaagcactcctgtctccccggtgaggttgtataaactgttcccacggttgaaaacaacctatccgttatccgctatagtacttcgagaaacctagtaccacctttggattgttgacgcgttgcgttcagcacactaacccgtgtgtagcttgggtcgatgagtctggacatacctcactggcgacagtggtccaggctgcgttggcggcctactcatggtgaaagccatgagacgctagacatgaacaaggtgtgaagagtctattgagctactatagagtcctccggcccctgaatgcggctaatcctaaccatggagcaagtgctcacaggccagtgagttgcttgtcgtaatgcgcaagtccgtggcggaaccgactactttgggtgtccgtgtttcactttttacttttatgactgcttatggtgacaatttgatattgttaccatttagcttgtcaaatcaattgcaaaagatcctaactcttatttatcaacttgcatcttgataactttaatttgaaaattttaaca

SEQ ID NO: 20115 - DNA, 708 bp, synthetic construct
  source 1..708: mol_type = other DNA
cccattgggcgctagcacactggtattgcggtacctttgtgcgcctgttttatccacccttccctcaaatgaaacttagaagcttaacttgaatggtcaacaggaaacccagtacgccaactgggtcgcgaccaagcacttctgtaaccccggactgagtatcaataagctgcttgcgtggctgaaagagaaaacgtccgttacccggccaattacttcgagaaacctagtaccaccatggaggttgcgcagtgtttcgctccgcacaaccccagtgcagatcgggccgatgagtcaccgcgttccccacgggcgaccgtggcggtggctgcgctggcggcctgcccatggggtaacccatgggacgcttcaatactgacatggtgcgaagagtctattgagctagttggtagtcctccggcccctgaatgcggctaatcccaactgcggagcagatacccacacgccagtgggcagtctgtcgtaacgggcaactctgcagcggaaccgactactttgggtgtccgtgtttccttttatcttatactggctgcttatggtgacaattgagagattgttaccatatagctactggattggccatccggtgtctaacagagcgatcatttatctgtttgttggatttgtgcccttaaacctcaaagttctcaacactcttaaccttgtactacaatttaactcagcaaa

SEQ ID NO: 20116 - DNA, 698 bp, synthetic construct
  source 1..698: mol_type = other DNA
ttaaaacagccttggggttgttcccactccaagggcccacgtggcggttagtactctggtacttcggtacctttgtacgcctgttttatctcccttcccaatgtaacttagaagctcttaaatcaaggctcaataggtggggcgcaaaccagcgctctcatgagcaagcactcctgtctccccggtgtggttgtataaactgttcccacggttaaaaacaacctatccgttatccgctatagtacttcgagaaacctagtatcacctttggattgttgacgcgttgcgttcagcacactaacccgtgtgtagcttgggtcgatgagtctggacgtaccccactggtgacagtggtccaggctgcgttggcggcctactcatggtgaaaaccatgagacgctagacatgaacaaggtgtgaagagtctattgagctactatagagtcctccggcccctgaatgcggctaatcctaaccatggagcaagtgctcacaggccagtgagttgcttgtcgtaatgcgcaagtccgtggcggaaccgactactttgggtgtccgtgtttcactttttacttttatgactgcttatggtgacaatttgatattgttaccatttagcttgtcaaattaattgcaaaagatcctaagtctcatttaccaacttgcattttgattaccttgatttgtaaattttaata

SEQ ID NO: 20117 - DNA, 698 bp, synthetic construct
  source 1..698: mol_type = other DNA
ttaaaacagccttggggttgttcccactccaagggcccacgtggcggctagtactctggtacttcggtacctttgtacgcctgttttatctcccttcccaatgtaacttagaagttcttaaatcaatgctcaataggtggggcgcaaaccagcgctctcatgagcaagcactcctgtctccccggtgaggttgtataaactgttcccacggttgaaaacaaccaatccgttatccgctatagtacttcgagaaacctagtaccacctttggattgttgacgcgttgcgctcagcacactaacccgtgtgtagcttgggtcgatgagtctggacatacctcactggcgacagtggtccaggctgcgttggcggcctactcatggtgaaaaccatgagacgctagacatgaacaaggtgtgaagagtctattgagctactatagagtcctccggcccctgaatgcggctaatcctaaccatggagcaagtgctcacaggccagtgagttgcttgtcgtaatgcgcaagtccgtggcggaaccgactactttgggtgtccgtgtttcactttttacttttatgactgcttatggtgacaatttgatattgttaccatttagcttgtcaaatcaattgcaaaagatcctaaatcttatttatcaatttgcatcttgataactttaatttgaaaattttaaca

SEQ ID NO: 20118 - DNA, 699 bp, synthetic construct
  source 1..699: mol_type = other DNA
ttaaaacagctttggggttgttcccactccaagggcccacgtggcggctagtactctggtacttcggtacctttgtacgcctgttttatctcccttcccaatgtaatttagaagctcttaaatcaaggctcaataggtggggcgcaaaccagcgctctcatgagcaagcactcctgtctccccggtgtggttgtataaactgttcccacggttgaaaacaacctatccgttatccgctatagtacttcgagaaacctagtatcacctttggattgttgacgcgttgcgctcagcacactaacccgtgtgtagcttgggtcgatgagtctggacataccccactggcgacagtggtccaggctgcgttggcggcctactcatggtgaaaaccatgagacgctagacatgaacaaggtgtgaagagtctattgagctactatagagtcctccggcccctgaatgcggctaatcctaaccatggagcaagtgctcacaggccagtgagttgcttgtcgtaatgcgcaagtccgtggcggaaccgactactttgggtgtccgtgtttcactttttacttttatgactgcttatggtgacaatttgatattgttaccatttagcttgtcaaattaattgcaaaagatcctaaatcttacttaccaacttgcattttgacaaccttgatttgaaaatttttaata

SEQ ID NO: 20119 - DNA, 701 bp, synthetic construct
  source 1..701: mol_type = other DNA
ttaaaacagctttggggttgttcccactccaagggcccacgtggcggctagtactctggtgcttcggtacctttgtacgcctgttttatctcccttcccaatgtaacttagaagttcttaaatcaaggctcaataggtggggcgcaaaccagcgctctcatgagcaagcactcctgtctccccggtgtggttgtataaactgttcccacggttgaaaacaacctatccgttatccgctatagtacttcgagaaacctagtatcacctttggattgttgacgcgttgcgctcagcacactaacccgtgtgtagcttgggtcgatgagtctggacgtaccccactggcgacagtggtccaggctgcgttggcggcctactcatggtgaaaaccatgagacgctagacatgaacaaggtgtgaagagtctattgagctactatagagtcctccggcccctgaatgcggctaatcctaaccatggagcaagtgctcacaggccagtgagttgcttgtcgtaatgcgcaagtccgtggcggaaccgactactttgggtgtccgtgtttcactttttacttttatgactgcttatggtgacaatttgatattgttaccatttagcttgtcaaattaattgcaaaagatcctaaatcttacttaccaacttgcattttgataaccttgatttgaaaattttaataata

SEQ ID NO: 20120 - DNA, 698 bp, synthetic construct
  source 1..698: mol_type = other DNA
taaaacagccttggggttgttcccactccaagggcccacgtggcggctagtactctggtacttcggtacctttgtacgcctgttttatctcccttcccaatgtaatttagaagctcttaaatcaaggctcactaggtggggcgcaaaccagcgctctcatgagcaagcactcctgtctccccggtgtggttgtataaactgttcccacggttgaaaacaacctatccgttatccgctatagtacttcgagaaacctagtatcacctttggattgttgacgcgttgcgctcagcacactaacccgtgtgtagcttgggtcgatgagtctggacataccccactggcgacagtggtccaggctgcgttggcggcctactcatggtgaaaaccatgagacgctagacatgaacaaggtgtgaagagtctattgagctactatagagtcctccggcccctgaatgcggctaatcctaaccatggagcaagtgctcacaggccagtgagttgcttgtcgtaatgcgcaagtccgtggcggaaccgactactttgggtgtccgtgtttcactttttacttttatgactgcttatggtgacaatttgatattgttaccatttagcttgtcaaattaattgcaaaagatcctaaatcttacttaccaacttgcattttgacaaccttgatttgaaaatttttaata

SEQ ID NO: 20121 - DNA, 698 bp, synthetic construct
  source 1..698: mol_type = other DNA
taaaacagccttggggttgttcccactccaagggcccacgtggcggctagtactctggtacttcggtacctttgtacgcctgttttatcccccttcccaatgtaatttagaagctcttaaattaaggctcaataggtggggcgcaaaccagcgctctcatgagcaagcactcctgtctccccggtgtggttgtataaactgttcccacggttgaaaacaacctatccgttatccgctatagtacttcgagaaacctagtatcacctttggattgttgacgcgttgcgctcagcacactaacccgtgtgtagcttgggtcgatgagtctggacataccccactggcgacagtggtccaggctgcgttggcggcctactcatggtgaaaaccatgagacgctagacatgaacaaggtgtgaagagtctattgagctactatagagtcctccggcccctgaatgcggctaatcctaaccatggagcaagtgctcacaggccagtgagttacttgtcgtaatgcgcaagtccgtggcggaaccgactactttgggtgtccgtgtttcactttttacttttatgactgcttatggtgacaatttgatattgttaccatttagcttgtcaaatcaattgcaaaagatcctaaatcttacttaccaacttgcattttgacaaccttgatttgaaaatttttaata

SEQ ID NO: 20122 - DNA, 698 bp, synthetic construct
  source 1..698: mol_type = other DNA
ttaaaacagccttggggttgttcccgctccaagggcccacgtggcggctagtactctggtacttcggtacctttgtacgcctgttttatctcccttcccaatgtaacttagaagctcttaaatcaaggctcaataggtggggcgcaaaccagcgctctcatgagcaagcactcctgtctccccggtgtggttgtataaactgttcccacggttgaaaacaacctatccgttatccgctatagtacttcgagaaacctagtatcacctttggattgttgacgcgttgcgctcagcacactaacccgtgtgtagcttgggtcgatgagtctggacatacctcactggcgacagtggtccaggctgcgttggcggcctactcatggtgaaaaccatgagacgctagacatgaacaaggtgtgaagagtctattgagctactatagagtcctccggcccctgaatgcggctaatcctaaccatggagcaagtgctcacaagccagtgagttgcttgtcgtaatgcgcaagtccgtggcggaaccgactactttgggtgtccgtgtttcactttttacttttatgactgcttatggtgacaatttgatattgttaccatttagcttgtcaaatcaattgcaaaagatcctaaatcttatttatcaacttgcattttgataactttgatttgaaaattttaata

SEQ ID NO: 20123 - DNA, 698 bp, synthetic construct
  source 1..698: mol_type = other DNA
ttgaaacagccttggggttgttcccactccaagggcccacgtggcggctagtactctggtacttcggtacctttgtacgcctgttttatctcccttcccaatgtaacttagaagctcttaaatcaaggctcaataggtggggcgcaaaccagcgctctcatgagcaagcactcctgtctccccggtgtggttgtataaactgttcccacggttgaaaacaacctatccgttatccgctatagtacttcgagaaacctagtatcacctttggattgttgacgcgttgcgctcagcacactaacccgtgtgtagcttgggtcgatgagtctggacgtaccccactggcgacagtggtccaggctgcgttggcggcctactcatggtgaaaaccatgagacgctagacatgaacaaggtgtgaagagtctattgagctactatagagtcctccggcccctgaatgcggctaatcctaaccatggagcaagtgctcacaggccagtgagttgcttgtcgtaatgcgcaagtctgtggcggaaccgactactttgggtgtccgtgtttcactttttacttttatgactgcttatggtgacaatttgatattgttaccatttagcttgtcaaatcaattgcaaaagatcctaaatcttacttaccaacttgcattttaataaccttgatttgaaaattttaata

SEQ ID NO: 20124 - DNA, 698 bp, synthetic construct
  source 1..698: mol_type = other DNA
ttaaaacagccttggggttgttcccaccccaagggcccacgtggcggctagtactctggtatttcggtacctttgtacgcctgttttatctcccttcccaatgtaacttagaagctctcaaattaaagctcaataggtggagcgcaaaccagcgctctcacgagcaagcactcctgtctccccggtgtggttgtataaactgtccccacggttgaaaacaacctatccgttatccgctatagtacttcgagaaacctagtatcacctttggattgttgatgcgttgcgctcagcacactaacccgtgtgtagcttgggtcgatgagtctggacataccccactggcgacagtggtccaggctgcgttggcggcctactcatggtggaaaccatgagacgctagacatgaacaaggtgtgaagagtctattgagctactatagagtcctccggcccctgaatgcggctaatcttaaccatggagcaagtgctcacaagccagtgagttgcttgtcgtaatgcgcaagtccgtggcggaaccgactactttgggtgtccgtgtttcactttttacttttatgactgcttatggtgacaatttgatattgttaccatttagcttgtcaaatcaattacaaaagaccctaaatcttatttatcaacttgcattttgataactttaatttgaaaattttaata

SEQ ID NO: 20125 - DNA, 698 bp, synthetic construct
  source 1..698: mol_type = other DNA
ttaaaacagccttggggttgttcccaccccaagggcccacgtggcggctagtactctggtatttcggtacctttgtacgcctgttttatctcccttcccaatgtaacttagaagctctcaaatcaaagctcaataggtggagcgcaaaccagcgctctcatgagcaagcactcctgtctccccggtgtggttgtataaactgttcccacggttgaaaacaacctatccgttatccgctatagtacttcgagaaacctagtatcacctttggattgttgatgcgttgcgctcagcacactaacccgtgtgtagcttgggtcgatgagtctggacataccccactggcgacagtggtccaggctgcgttggcggcctactcatggtgaaaaccatgagacgctaaacatgaacaaggtgtgaagagtctattgagctactatagagtcctccggcccctgaatgcggctaatcttaaccatggagcaagtgctcacaagccagtgagttgcttgtcgtaatgcgcaagtccgtggcggaaccgactactttgggtgtccgtgtttcactttttacttttatgactgcttatggtgacaatttgatattgttaccatttagcttgtcaaatcaattgcaaaagaccctaaatcttatttatcaacttgcattttgataacttcaatttgaaaattttaata

SEQ ID NO: 20126 - DNA, 698 bp, synthetic construct
  source 1..698: mol_type = other DNA
ttaaaacagccttggggttgttcccaccccaagggcccacgtggcggctagtactctggtatttcggtacctttgtacgcctgttttatctcccttcccaatgtaacttagaagctcttaaatcaaagctcaataggtggagcgcaaaccagcgctctcatgagcaagcactcctgtctccccggtgtggttgtataaactgttcccacggttgaaaacaacctatccgttatccgctatagtacttcgagaaacctagtatcacctttggattgttgatgcgttgcgctcagcacactaacccgtgtgtagcttgggtcgatgagtctggacataccccactggcgacagtggtccaggctgcgttggcggcctactcatggtgaaaaccatgagacgctaaacatgaacaaggtgtgaagagtctattgagctactatagagtcctccggcccctgaatgcggctaatcttaaccatggagcaagtgctcacaagccagtgagttgcttgtcgtaatgcgcaagtccgtggcggaaccgactactttgggtgtccgtgtttcactttttacttttatgactgcttatggtgacaatttgatattgttaccatttagcttgtcaaatcaattgcaagagaccctagatcttatttatcaacttgcattttgataacttcaatttgaaaattttaata

SEQ ID NO: 20127 - DNA, 698 bp, synthetic construct
  source 1..698: mol_type = other DNA
ttaaaacagccttggggttgttcccaccccaagggcccacgtggcggctagtactctggtacttcggtacctttgtacgcctgttttatctcccttcccaatgtaacttagaagctctcaaatcaaagctcgataggtggagcgcaaaccagcgctctcatgagcaagcactcctgtctccccggtgtggttgtataaactgttcccacggttgaaaacaacctatccgttatccgctatagtacttcgagaaacctagtatcacctttggattgttgatgcgttgcgctcagcacactaacccgtgtgtagcttgggtcgatgagtctggacataccccactggcgacagtggtccaggctgcgttggcggcctactcatggtgaaaaccatgagacgctaaacatgaacaaggtgtgaagagtctattgagctactatagagtcctccggcccctgaatgcggctaatcttaaccatggagcaagtgctcacaagccagtgagttgcttgtcgtaatgcgcaagtccgtggcggaaccgactactttgggtgtccgtgtttcactttttacttttatgactgcttatggtgacaatttgatattgttaccatttagcttgtcaaatcaattgcaaaagaccctaaatcttatttatcaacttgcattttgataacttcaatttgaaaattttaata

SEQ ID NO: 20128 - DNA, 698 bp, synthetic construct
  source 1..698: mol_type = other DNA
ttaaaacagccttggggttgttcccaccccaagggcccacgtggcggctagtactctggtatttcggtacctttgtacgcctgttttatctcccttcccaatgtaacttagaagctctcaaatcaaagctcgataggtggagcgcaaaccagcgctctcatgagcaagcactcctgtctccccggtgtggttgtataaactgttcccacggttgaaaacaacctatccgttatccgctatagtacttcgagaaacctagtatcacctttggattgttgatgcgttgcgctcagcacactaacccgtgtgtagcttgggtcgatgagtctggacataccccactggcgacagtggtccaggctgcgttggcggcctactcatggtgaaaaccatgagacgctaaacatgaacaaggtgtgaagagtctattgagctactatagagtcctccggcccctgaatgcggctaatcttaaccatggagcaagtgctcacaagccagtgagttgcttgtcgtaatgcgcaagtccgtggcggaaccgactactttgggtgtccgtgtttcactttttacttttatgactgcttatggtgacaatttgatattgttaccatttagcttgtcaaatcaattgcaaaagaccctaaatcttatttatcaacttgcattttgataacttcaatttgaaaattttaata

SEQ ID NO: 20129 - DNA, 698 bp, synthetic construct
  source 1..698: mol_type = other DNA
ttaaaacagccttggggttgttcccaccccaagggcccacgtggcggctagtactctggtacttcggtacctttgtacgcctgttttatctcccttcccaatgcaacttagaagctctcaaatcaaagctcgataggtggagcgcaaaccagcgctctcatgagcaagcactcctgtctccccggtgcggttgtataaactgttcccatggttgaaaacaacctatccgttatccgctatagtacttcgagaaacctagtatcacctttggattgttgatgcgttgcgctcagcacactaacccgtgtgtagcttgggtcgatgagtctggacgtaccccactggcgacagtggtccaggctgcgttggcggcctactcatggtgaaaaccatgagacgctaaacatgaacaaggtgtgaagagtctattgagctactatagagtcctccggcccctgaatgcggctaatcttaaccatggagcaagtgctcacaagccagtgagttgcttgtcgtaatgcgcaagtccgtggcggaaccgactactttgggtgtccgtgtttcactttttacttttatgactgcttatggtgacaatttgatattgttaccatttagcttgtcaaatcaattgcaaaagaccctaaatcttatttatcaacttgtattttgataacttcaatttgaaaattttaata

SEQ ID NO: 20130 - DNA, 698 bp, synthetic construct
  source 1..698: mol_type = other DNA
ttaaaacagccttggggttgttcccaccccaagggcccacgtggcggctagtactctggtacttcggtacctttgtacgcctgttttatctcccttcccaatgtaacttagaagttctcaaatcaaagctcgataggtggagcgcaaaccagcgctctcatgagcaagcactcctgtctccccggtgcggttgtataaactgttcccacggttgaaaacaacctatccgttatccgctatagtacttcgagaaacctagtatcacctttggattgttgatgcgttgcgctcagcacactaacccgtgtgtagcttgggtcgatgagtctggacacaccccactggcgacagtggtccaggctgcgttggcggcctactcatggtgaaaaccatgagacgctaaacatgaacaaggtgtgaagagtctattgagctactatagagtcctccggcccctgaatgcggctaatcttaaccatggagcaagtgctcacaagccagtgggttgcttgtcgtaatgcgcaagtccgtggcggaaccgactactttgggtgtccgtgtttcactttttacttttatgactgcttatggtgacaatttgatattgttaccatttagcttgtcaaatcaattaacttcaatcagaaaatttcaataagcttgtcaaatcaattaacttcaatcagaaaatttcaata

SEQ ID NO: 20131 - DNA, 698 bp, synthetic construct
  source 1..698: mol_type = other DNA
ttaaaacagccttggggttgttcccactccaagggcccacgtggcggctagtactctggtacttcggtacctttgtacgcctgttttatctcccttcccaatgtaatttagaagcttttaaatcaaggctcaataggtggggcgcaaaccagcgctctcatgagcaagcactcctgtctccccggtgtggttgtataaactgttcccacggttgaaaacaacctatccgttatccgctatagtacttcgagaaacctagtatcacctttggattgttgacgcgttgcgctcagcacactaacccgtgtgtagcttgggtcgatgagtctggacataccccactggcgacagtggtccaggctgcgttggcggcctactcatggtgaaaaccatgagacgctagacatgaacaaggtgtgaagagtctattgagctactatagagtcctccggcccctgaatgcggctaatcctaaccatggagcaagtgctcacaggccagtgagttgcttgtcgtaatgcgcaagtccgtggcggaaccgactactttgggtgtccgtgtttcatttttttacttttatgactgcttatggtgacaatttgatattgttaccatttagctgtcaaattaattgcaaaagatcctaagtcttacttaccaatttgcattttgataaccttgatttgaaaattttaata

SEQ ID NO: 20132 - DNA, 698 bp, synthetic construct
  source 1..698: mol_type = other DNA
ttaaaacagccttggggttgttcccactccaagggcccacgtggcggctagtactctggtacttcggtacctttgtacgcctgttttatctcccttcccaatgtaatttagaagctcttaaatcaaggctcaataggtggggcgcaaaccagcgctctcatgagcaagcactcctgtctccccggtgtggttgtataaactgttcccacggttgaaaacaacctatccgttatccgctatagtacttcgagaaacctagtatcacctttggattgttgacgcgttgcgctcagcacactaacccgtgtgtagcttgggtcgatgagtctggacataccccactggcgacagtggtccaggctgcgttggcggcctactcatggtgaaaaccatgagacgctagacatgaacaaggtgtgaagagtctattgagctactatagagtcctccggcccctgaatgcggctaatcctaaccatggagcaagtgctcacaggccagtgagttacttgtcgtaatgcgcaagtccgtggcggaaccgactactttgggtgtccgtgtttcactttttacttttatgactgcttatggtgacaatttgatattgttgccatttagcttgtcaaattaattacaaaagatcctaaatcttacttaccaacttgcattttgacaaccttgatttgaaaattttaata

SEQ ID NO: 20133 - DNA, 698 bp, synthetic construct
  source 1..698: mol_type = other DNA
ttaaaacagccttggggttgttcccactccaagggcccacgtggcggctagtactctggtacttcggtacctttgtacgcctgttttatctcccttcccaatgtaatttagaagctcttaaatcaaggctcaataggcggggcgcaacccagcgctctcatgagcaagcacttctgtctccccggtgtggttgtataaactgttcccacggttgaaaacaacctatccgttatccgctatagtacttcgagaaacctagtatcacctttggattgttgacgcgttgcgctcagcacactaacccgtgtgtagcttgggtcgatgagtctggacataccccactggcgacagtggtccaggctgcgttggcggcctactcatggtgaaaaccatgagacgctaaacatgaacaaggtgtgaagagtctattgagctactatagagtcctccggcccctgaatgcggctaatcctaaccatggagcaagcgctcacaagccagtgagttgcttgtcgtaatgcgcaagtccgtggcggaaccgactactttgggtgtccgtgtttcactttttacttttatgactgcttatggtgacaatttgatattgttaccatttagcttgtcaaattaattacaaaaggttctaaatcttacttactaacttgcattttgataaccttgatttgaaaattttaata

SEQ ID NO: 20134 - DNA, 698 bp, synthetic construct
  source 1..698: mol_type = other DNA
ttaaaacagccttggggttgttcccactccaagggcccacgtggcggctagtactctggtacttcggtacctttgtacgcctgttttatctcccttcccaatgtaatttagaagctcttaaaccaaggctcaataggcggggcgcaacccagcgctctcatgagcaagcacttctgtctccccggtgtggttgtataaactgttcccacggttgaaaacaacctatccgttatccgctatagtacttcgagaaacctagtatcacctttggattgttgacgcgttgcgctcagcacactaacccgtgtgtagcttgggtcgatgagtctggacataccccactggcgacagtggtccaggctgcgttggcggcctactcatggtgaaaaccatgagacgctaaacatgaacaaggtgtgaagagtctattgagctactatagagtcctccggcccctgaatgcggctaatcctaaccatggagcaagcgctcacaagccagtgagttgcttgtcgtaatgcgcaagtccgtggcggaaccgactactttgggtgtccgtgtttcactttttacttttatgactgcttatggtgacaatttgatattgttaccatttagcttgtcaaattaattacaaaaggttctaaatcttacttaccaacttgcattttgataaccttgatttgaaaattttaata

SEQ ID NO: 20135 - DNA, 698 bp, synthetic construct
  source 1..698: mol_type = other DNA
ttaaaacagccttggggttgttcccactccaagggcccacgtggcggctagtactctggtacttcggtacctttgtacgcctgttttatctcccttcccaatgtaatttagaagctcttaaatcaaggctcaataggcggggcgcaacccagcgctctcatgagcaagcacttctgtctccccggtgtggttgtataaactgttcccacggttgaaaacaacctatccgttatccgctatagtacttcgagaaacctagtatcacctttggattgttgacgcgttgcgctcagcacactaacccgtgtgtagcttgggtcgatgagtctggacataccccactggcgacagtggtccaggctgcgttggcggcctactcatggtgaaaaccatgagacgctaaacatgaacaaggtgtgaagagtctattgagctactatagagtcctccggcccctgaatgcggctaatcctaaccatggagcaagcgctcacaagccagtgagttgcttgtcgtaatgcgcaagtccgtggcggaaccgactactttgggtgtccgtgtttcactttttacttttatgactgcttatggtgacaatttgatattgttaccatttagcttgtcaaattaattacaaaaggttctaaatcttacttaccaacttgcattttgataaccttgatttgaaaattttaata

SEQ ID NO: 20136 - DNA, 698 bp, synthetic construct
  source 1..698: mol_type = other DNA
ttaaaacagccttggggttgttcccactccaagggcccacgtggcggctagtactctggtacttcggtacctttgtacgcctgttttatctcctttcccaatgtaatttagaagctcttaaaccaaggctcaataggcggggcgcaacccagcgctctcatgagcaagcacttctgtctccccggtgtggttgtataaactgttcccacggttgaaaacaacctatccgttatccgctatagtacttcgagaaacctagtatcacctttggattgttgacgcgttgcgctcagcacactaacccgtgtgtagcttgggtcgatgagtctggacataccccactggcgacagtggtccaggctgcgttggcggcctactcatggtgaaaaccatgagacgctaaacatgaacaaggtgtgaagagtctattgagctactatagagtcctccggcccctgaatgcggctaatcctaaccatggagcaagcgctcacaagccagtgagttgcttgtcgtaatgcgcaagtccgtggcggaaccgactactttgggtgtccgtgtttcactttttacttttatgactgcttatggtgacaatttgatattgttaccatttagcttgtcaaattaattacaaaaggttctaaatcttacttaccaacttgcattttgataaccttgatttgaaaattttaata

SEQ ID NO: 20137 - DNA, 698 bp, synthetic construct
  source 1..698: mol_type = other DNA
ttaaaacagccttggggttgttcccactccaagggcccacgtggcggctagtactctggtacttcggtacctttgtacgcctgttttatctcccttcccaatgtaatttagaagctcttaaatcaaggctcaataggtggggcgcaaaccagcgctctcatgagcaagcactcctgtctccccggtgtggttgtataaactgttcccacggttgaaaacaacctatccgttatccgctatagtacttcgagaaacctagtaccacctttggattgttgacgcgttgcgctcagcacactaacccgtgtgtagcttgggtcgatgagtctggacataccccactggcgacagtggtccaggctgcgttggcggcctactcatggtgaaaaccatgagacgctagacatgaacaaggtgtgaagagtctattgagctactatagagtcctccggcccctgaatgcggctaatcctaaccatggagcaagtgctcacaggccagtgagttgcttgtcgtaatgcgcaagtccgtggcggaaccgactactttgggtgtccgtgtttcactttttacttttatgactgcttatggtgacaatttgatattgttaccatttagcttgtcaaattaattgcaaaggatcttaaatcttacttaccaatttgcattttgacaatcttgatttgaaaattttaata

SEQ ID NO: 20138 - DNA, 698 bp, synthetic construct
  source 1..698: mol_type = other DNA
ttaaaacagccttggggttgttcccactccaagggcccacgtggcggctagtactctggtacttcggtacctttgtacgcctgttttatctcccttcccaatgtaatttagaagctcttaaatcaaggctcaataggtggggcgcaaaccagcgctctcatgagcaagcactcctgtctccccggtgtggttgtataaactgttcccacggttgaaaacaacctatccgttatccgctatagtacttcgagaaacctagtatcacctttggattgttgacgcgttgcgctcagcacactaacccgtgtgtagcttgggtcgatgagtctggacataccccactggcgacagtggtccaggctgcgttggcggcctactcatggtgaaaaccatgagacgctagacatgaacaaggtgtgaagagtctattgagctactatagagtcctccggcccctgaatgcggctaatcctaaccatggagcaagtgctcacaggccagtgagttgcttgtcgtaatgcgcaagtccgtggcggaaccgactactttgggtgtccgtgtttcactttttacttttatgactgcttatggtgacaatttgatattgttaccatttagcttgtcaaattaattgcaaaggatcctaaatcttacttaccaatttgcattttgacaatcttgatttgaaaattttaata

SEQ ID NO: 20139 - DNA, 698 bp, synthetic construct
  source 1..698: mol_type = other DNA
ttaaaacagccttggggttgttcccaccccaagggcccacgtggcggctagtactctggtacttcggtacctttgtacgcctgttttatctcccttcccaatgtaatttagaagctcttaaatcaaggctcaataggtggggcgcaaaccagcgctctcatgagcaagcactcctgtctccccggtgtggttgtataaactgttcccacggttgaaaacaacctatccgttatccgctatagtacttcgagaaacctagtatcacctttggattgttgacgcgttgcgctcagcacactaacccgtgtgtagcttgggtcgatgagtctggacacaccccactggtgacagtggtccaggctgcgttggcggcctactcatggtgaaaaccatgagacgctagacatgaacaaggtgtgaagagtctattgagctactatagagtcctccggcccctgaatgcggctaatcctaaccatggagcaagtgctcacaggccagtgagtagcttgtcgtaatgcgtaagtccgtggcggaaccgactactttgggtgtccgtgtttcactttttacttttatgactgcttatggtgacaatttgatattgttaccatttagcttgtcaaattgattgcaaaagatactaaatcttacttaccaacttgcattttgataaccttgatttgaaaattttaata

SEQ ID NO: 20140 - DNA, 698 bp, synthetic construct
  source 1..698: mol_type = other DNA
ttaaaacagccttggggttgttcccactccaagggcccacgtggcggctagtactctggtacttcggtacctttgtacgcctgttttatctcccttcccaatgtaatttagaagctcttaaatcaaggctcaataggtggggcgcaaaccagcgctctcatgagcaagcactcctgtctccccggtgtggttgtataaactgttcccacggttgaaaacaacctatccgttatccgctatagtacttcgagaaacctagtatcacctttggaatgttgacgcgttgcgctcagcacactaacccgtgtgtagcttgggtcgatgagtctggacataccccactggcgacagtggtccaggctgcgttggcggcctactcatggtgaaaaccatgagacgctagacatgaacaaggtgtgaagagtctattgagctactatagagtcctccggcccctgaatgcggctaatcctaaccatggagcaagtgctcacaggccagtgagttgcttgtcgtaatgcgcaagtccgtggcggaaccgactactttgggtgtccgtgtttcactttttacttttatgactgcttatggtgacaatttgatattgttaccatttagcttgtcaaattaattgcaaaagatcctaaaacttacttaccaatttgcattttgataaccttgatttgaaaattttaata

SEQ ID NO: 20141 - DNA, 698 bp, synthetic construct
  source 1..698: mol_type = other DNA
ttaaaacagccttggggttgttcccactccaagggcccacgtggcggctagtactctggtacttcggtacctttgtacgcctgttttatctcccttcccaatgtaatttagaagctcttaaatcaaggctcaataggtggggcgcaaaccagcgctctcatgagcaagcactcctgtctccccggtgtggttgtataaactgttcccacggttgaaaacaacctatccgttatccgctatagtacttcgagaaacctagtatcacctttggattgttgacgcgttgcgctcagcacactaacccgtgtgtagcttgggtcgatgagtctggacataccccactggcgacagtggtccaggctgcgttggcggcctactcatggtgaaaaccatgagacgctagacatgaacaaggtgtgaagagtctattgagctactatagagtcctccggcccctgaatgcggctaatcctaaccatggagcaagtgctcacaggccagtgagttacttgtcgtaatgcgcaagtccgtggcggaaccgactactttgggtgtccgtgtttcactttttacttttatgactgcttatggtgacaatttgatattgttgccatttagcttgtcaaattaattacaaaagatcccaaatcttacttaccaacttgcattttgacaaccttgatttgaaaattttaata

SEQ ID NO: 20142 - DNA, 698 bp, synthetic construct
  source 1..698: mol_type = other DNA
ttaaaacagccttggggttgttcccactccaagggcccacgtggcggctagtactctggtacttcggtacctttgtacgcctgttttatctcccctcccaatgtaatttagaagctcttaaatcaaggctcaataggtggggcgcaaaccagcgctctcatgagcaagcactcctgtctccccggtgtggttgtataaactgttcccacggttgaaaacaacttatccgttatccgctatagtacttcgagaaacctagtatcacctttggattgttgacgcgttgcgctcagcacactaacccgtgtgtagcttgggtcgatgagtctggacataccccactggcgacagtggtccaggctgcgttggcggcctactcatggtgaaaaccatgagacgctagacatgaacaaggtgtgaagagtctattgagctactatagagtcctccggcccctgaatgcggctaatcctaaccatggagcaagtgctcacaggccagtgagttgcttgtcgtaatgcgcaagtccgtggcggaaccgactactttgggtgtccgtgtttcactttttacttttatgactgcttatggtgacaatttgatattgttaccatttagcttgtcaaattaattgcaaaagatcctaaatcttacttaccaacttgcattttgacaaccttgatttgaaaattttaata

SEQ ID NO: 20143 - DNA, 698 bp, synthetic construct
  source 1..698: mol_type = other DNA
ttaaaacagccttggggttgttcccactccaagggcccacgtggcggctagtactctggtacttcggtacctttgtacgcctgttttatctcccttcccaatgtaatttagaagcttttaaatcaaggctcaataggtggggcgcaaaccagcgctctcatgagcaagcactcctgtctccccggtgtggatgtataaactgttcccacggttgaaaacaacctatccgttatccgctatagtacttcgagaaacctagtatcacctttggattgttgacgcgttgcgctcagcacactaacccgtgtgtagcttgggtcgatgagtctggacacaccccactggcgacagtggtccaggctgcgttggcggcctactcatggtgaaaaccatgagacgctagacatgaacaaggtgtgaagagtctattgagctactatagagtcctccggcccctgaatgcggctaatcctaaccatggagcaagtgctcacaggccagtgagtagcttgtcgtaacgcgcaagtccgtggcggaaccgactactttgggtgtccgtgtttcactttttacttttatgactgcttatggtgacaatttgatattgttaccatttagcttgtcaaattaattgcaaaagatcctaaattttacttaccaacttgcattttgataaccttgatttgaaaattttaata

SEQ ID NO: 20144 - DNA, 697 bp, synthetic construct
  source 1..697: mol_type = other DNA
ttaaaacagccttggggttgttcccaccccaagggcccacgtggcggctagtactctggtacttcggtacctttgtacgcctgttttatctcccttcccaatgtaacttagaagttctcaaatcaaagctcaataggtggagcgcaaaccagcgctctcatgagcaagcactcctgtctccccggtgcggttgtataaactgttcccacggttgaaaacaacctatccgttatccgctatagtacttcgagaaacctagtatcacctttggattgttgatgcgttgcgctcagcacactaacccgtgtgtagcttgggtcgatgagtctggacataccccactggcgacagtggtccaggctgcgttggcggcctactcatggtgaaaaccatgagacgctaaacatgaacaaggtgtgaagagtctattgagctactatagagtcctccggcccctgaatgcggctaatcttaaccatggagcaagtgctcacaagccagtgggttgcttgtcgtaatgcgcaagtccgtggcggaaccgactactttgggtgtccgtgtttcactttttacttttatgactgcttatggtgacaatttgatattgttaccatttagcttgtcaaatcaattacaaaagaccgaaatcttatttatcaacttgctttttgataacttcaatcagaaaatttcaata

SEQ ID NO: 20145 - DNA, 695 bp, synthetic construct
  source 1..695: mol_type = other DNA
cccacccccagggtccaatggacgctagtacaccggtatcacggtacccttgtacgcctgttttataatccccttcccccgtaacattagaagcataaaagcaaccgctcaatagacaccatacatccagtgtggttacgagcaagcacttctgtctccccggttgcgccctatatgctgtgtgaacggcaaaaaggggcaatatcgttacccgcttgactactacgggaaacccagtatcatcttcgattgatttgagagttgcgttcagcgcctgacccccggcgtagctcaggctgatgaggctccgaacaccccacaggcgactgtgccggagcctgcgttggcggcctgcctataccctgcggtatgggacgctcacttcatgacatggtgcgaagagtctactgtgctagtcaagattcctccggcccctgaatgtggataatcctaaccactgatcctacgttcgcaatccagcgttcggtaggtcgtaacgcgcaagtcggtggcggaaccaactactttgggtgtccgtgtttcctttatttcctactgaatgcttatggtgacaattgttttgatcagttgttgccattgctcgcgttcagtgtgtaattacgaaaacaagactatcagttgttaccatcccccacgttcagtgcataatcacaaaaacaagattttctgtcata

SEQ ID NO: 20146 - DNA, 698 bp, synthetic construct
  source 1..698: mol_type = other DNA
ttaaaacagccttggggttgttcccactccaagggcccacgtggcggctagtactctggtacttcggtacctttgtacgcctgttttatctcccttcccaatgtaacttagaagctcttaaatcaaggctcaataggtggggcgcaaaccagcgctctcatgagcaagcactcctgtctccccggtgtggttgtataaactgttcccacggttaaaaacaacctatccgttatccgctatagtacttcgagaaacctagtatcacctttggattgttgacgcgttgcgttcagcacactaacccgtgtgtagcttgggtcgatgagtctggacgtaccccactggtgacagtggtccaggctgcgttggcggcctactcatggtgaaaaccatgagacgctagacatgaacaaggtgtgaagagtctattgagctactatagagtcctccggcccctgaatgcggctaatcctaaccatggagcaagtgctcacaggccagtgagttgcttgtcgtaatgcgcaagtccgtggcggaaccgactactttgggtgtccgtgtttcactttttacttttatgactgcttatggtgacaatttgatattgttaccatttagcttgtcaaattaattgcaaaagatcctaagtctcatttaccaacttgcattttgattaccttgatttgtaaattttaata

SEQ ID NO: 20147 - DNA, 697 bp, synthetic construct
  source 1..697: mol_type = other DNA
taaaacagccttggggttgttcccactccaagggcccacgtggcggctagtactctggtacttcggtacctttgtacgcctgttttacctcccttcccaatgtaacttagaagttcttaaatcaatgctcaataggtggggcgcaaaccagcgttctcatgagcaagcactcctgtctccccggtgaggttgtataaactgttcccacggttgaaaacgacctatccgttatccgctatagtacttcgagaaacctagtaccacctttggattgttgacgcgttgcgctcagcacactaacccgtgtgtagcttgggtcgatgagtctggacatacctcactggcgacagtggtccaggctgcgttggcggcctactcatggcgaaagccatgagacgctagacatgaacaaggtgtgaagagtctattgagctactatagagtcctccggcccctgaatgcggctaatcctaaccatggagcaagtgctcacaggccagtgagttgcttgtcgtaatgcgcaagtccgtggcggaaccgactactttgggtgtccgtgtttcactttttacttttatgactgcttatggtgacaatttgatattgttaccatttagcttgtcaaatcaattgcaaaagatcctaaatcttatttatcaacttgcatcttgataactttaatttgaaaattttaaca

SEQ ID NO: 20148 - DNA, 697 bp, synthetic construct
  source 1..697: mol_type = other DNA
taaaacagccttggggttgttcccactccaagggcccacgtggcggctagtactctggtacttcggtacctttgtacgcctgttttatctcccttcccaatgtaacttagaagttcttaaatcaatgctcaataggtggggcgcaaaccagcgctctcatgagcaagcactcctgtctccccggtgaggttgtataaactgttcccacggttgaaaacaacctatccgttatccgctatagtacttcgagaaacctagtaccacctttggattgttgacgcgttgcgctcagcacactaacccgtgtgtagcttgggtcgatgagtctggacatacctcactggcgacagtggtccaggctgcgttggcggcctactcatggtgaaagccatgagacgctagacatgaacaaggtgtgaagagtctattgagctactatagagtcctccggcccctgaatgcggctaatcctaaccatggagcaagtgctcacaggccagtgagttgcttgtcgtaatgcgcaagtccgtggcggaaccgactactttgggtgtccgtgtttcactttttacttttatgactgcttatggtgacaatttgatattgttaccatttagcttgtcaaatcaattgcaaaagatcctaaatcttatttatcaacttgcatcttgataactttaatttgaaaattttaaca

SEQ ID NO: 20149 - DNA, 697 bp, synthetic construct
  source 1..697: mol_type = other DNA
taaaacagccttggggttgttcccactccaagggcccacgtggcggctagtactctggcacttcggtacctttgtacgcctgttttatctcccttcccaatgtaacttagaagttcttaaatcaatgctcaataggtggggcgcaaaccagcgttctcatgagcaagcactcctgtctccccggtgaggttgtataaactgttcccacggttgaaaacgacctatccgttatccgctatagtacttcgagaaacctagtaccacctttggattgttgacgcgttgcgctcagcacactaacccgtgtgtagcttgggtcgatgagtctggacatacctcactggcgacagtggtccaggctgcgttggcggcctactcatggcgaaagccatgagacgctagacatgaacaaggtgtgaagagtctattgagctactatagagtcctccggcccctgaatgcggctaatcctaaccatggagcaagtgctcacaggccagtgagttgcttgtcgtaatgcgcaagtccgtggcggaaccgactactttgggtgtccgtgtttcactttttacttttatgactgcttatggtgacaatttgatattgttaccatttagcttgtcaaatcaattgcaaaagatcctaaatcttatttatcaacttgcatcttgataactttaatttgaaaattttaaca

SEQ ID NO: 20150 - DNA, 697 bp, synthetic construct
  source 1..697: mol_type = other DNA
taaaacagccttggggttgttcccactccaagggcccacgtggcggctagtactctggtacttcggtacctttgtacgcctgttttatctcccttcccaatgtaacttagaagttcttaaatcaatgctcaataggtggggcgcaaaccagcgctctcatgagcaagcactcctgtctccccggtgaggttgtataaactgttcccacggttgaaaacaacctatccgttatccgctatagtacttcgagaaacctagtaccacctttggattgttgacgcgttgcgctcagcacactaacccgtgtgtagcttgggtcgatgagtctggacatacctcactggcgacagtggtccaggctgcgttggcggcctactcatggcgaaagccatgagacgctagacatgaacaaggtgtgaagagtctattgagctactatagagtcctccggcccctgaatgcggctaatcctaaccatggagcaagtgctcacaggccagtgagttgcttgtcgtaatgcgcaagtccgtggcggaaccgactactttgggtgtccgtgtttcactttttacttttatgactgcttatggtgacaatttgatattgttaccatttagcttgtcaaatcaactgcaaaagatcctaaatcttatttatcaacttgcatcttgataactttaatttgaaaattttaaca

SEQ ID NO: 20151 - DNA, 698 bp, synthetic construct
  source 1..698: mol_type = other DNA
ttaaaacagccttggggttgttcccactccaagggcccacgtggcggctagtactctggtacttcggtacctttgtacgcctgttttatctcccttcccaatgtaacttagaagctcttaaatcaaggctcaataggtggggcgcaaaccagcgctctcatgagcaagcactcctgtctccccggtgtggttgtataaactgttcccacggttgaaaacaacctatccgttatccgctatagtacttcgagaaacctagtatcacctttggattgttgacgcgttgcgctcagcacactaacccgtgtgtagcttgggtcgatgagtctggacgtaccccactggtaacagtggtccaggctgcgttggcggcctactcatggtgaaaaccatgagacgctagacatgaacaaggtgtgaagagtctattgagctactatagagtcctccggcccctgaatgcggctaatcctaaccatggagcaagtgctcacaggccagtgagttgcttgtcgtaatgcgcaagtccgtggcggaaccgactactttgggtgtccgtgtttcactttttacttttatgactgcttatggtgacaatttgatattgttaccatttagcttgtcaaattaattgcaaaagatcctaagtctcatttaccaacttgcattttgataaccttgatttgtaaattttaata

SEQ ID NO: 20152 - DNA, 698 bp, synthetic construct
  source 1..698: mol_type = other DNA
ttaaaacagccttggggttgttcccactccaagggcccacgtggcggctagtactctggtacttcggtacctttgtacgcctgttttatctcccttcccaatgtaacttagaagctcttaaattaaggctcaataggtggggcgcaaaccagcgctctcatgagcaagcactcctgtctccccggtgtggttgtataaactgttcccacggttgaaaacaacctatccgttatccgctatagtacttcgagaaacctagtatcacctttggattgttgacgcgttgcgctcagcacactaacccgtgtgtagcttgggtcgatgagtctggacgtaccccactggcgacagtggtccaggctgcgttggcggcctactcatggtgaaaaccatgagacgctagacatgaacaaggtgtgaagagtctattgagctactatagagtcctccggcccctgaatgcggctaatcctaaccatggagcaagtgctcacaggccagtgagttgcttgtcgtaatgcgcaagtctgtggcggaaccgactactttgggtgtccgtgtttcactttttacttttatgactgcttatggtgacaatttgatattgttaccatttagcttgtcaaatcaattgcaaaagatcctaaatcttacttaccaacttgcattttgataaccttgatttgaaaattttaata

SEQ ID NO: 20153 - DNA, 698 bp, synthetic construct
  source 1..698: mol_type = other DNA
ttaaaacagccttggggttgttcccactccaagggcccacgtggcggctagtactctggtacttcggtacccttgtacgcctgttttatctcccttcccaatgtaacttagaagctcttaaatcaaggctcaataggtggggcgcaaaccagcgctctcatgagcaagcactcctgtctccccggtgtggttgtataaactgttcccacggttgaaaacaacctatccgttatccgctatagtacttcgagaaacctagtatcacctttggattgttgacgcgttgcgctcagcacactaacccgtgtgtagcttgggtcgatgagtctggacgtaccccactggcgacagtggtccaggctgcgttggcggcctactcatggtgaaaaccatgagacgctagacatgaacaaggtgtgaagagtctattgagctactatagagtcctccggcccctgaatgcggctaatcctaaccatggagcaagtgctcacaggccagtgagttgcttgtcgtaatgcgcaagtctgtggcggaaccgactactttgggtgtccgtgtttcactttttacttttatgactgcttatggtgacaatttgatattgttaccatttagcttgtcaaatcaattgcaaaagatcctaaatcttacttaccaacttgcattttgataaccttgatttgaaaattttaata

SEQ ID NO: 20154 - DNA, 698 bp, synthetic construct
  source 1..698: mol_type = other DNA
ttaaaacagccttggggttgttcccactccaagggcccacgtggcggctagtactctggtacttcggtacctttgtacgcctgttttatctcccttcccaatgtaacttagaagctcttaaatcaaggctcaataggtggggcgcaaaccagcgctctcatgagcaagcactcctgtctccccggtgtggttgtataaactgttcccacggttgaaaacaacctatccgttatccgctatagtacttcgagaaacctagtatcacctttggattgttgacgcgttgcgctcagcacactaacccgtgtgtagcttgggtcgatgagtctggacgtaccccactggcgacagtggtccaggctgcgttggcggcctactcatggtgaaaaccatgagacgctagacatgaacaaggtgtgaagagtctattgagctactatagagtcctccggcccctgaatgcggctaatcctaaccatggagcaagtgctcacaggccagtgagttgcttgtcgtaatgcgcaagtccgtggcggaaccgactactttgggtgtccgtgtttcactttttacttttatgactgcttatggtgacaatttgatattgttaccatttagcttgtcaaattaattacaaaagatcctaaatcttatttaccaacttgcattttgataactttgatttgaaaattttaata

SEQ ID NO: 20155 - DNA, 698 bp, synthetic construct
  source 1..698: mol_type = other DNA
ttaaaacagccttggggttgttcccactccaagggcccacgtggcggctagtactctggtacttcggtacctttgtacgcctgttttatctcccctcccaatgtaacttagaagctcttaaatcaaggctcaataggtggggcgcaaaccagcgctctcatgagcaagcactcctgtctccccggtgtggttgtataaactgttcccacggttgaaaataacctatccgttatccgctatagtacttcgagaaacctagtatcacctttggattgttgacgcgttgcgctcagcacactaacccgtgtgtagcttgggtcgatgagtctggacgtaccccactggcgacagtggtccaggctgcgttggcggcctactcatggtgaaaaccatgagacgctagacatgaacaaggtgtgaagagtctattgagctactatagagtcctccggcccctgaatgcggctaatcctaaccatggagcaagtgctcacaggccagtgagttgcttgtcgtaatgcgcaagtctgtggcggaaccgactactttgggtgtccgtgtttcactttttacttttatgactgcttatggtgacaatttgatattgttaccatttagcttgtcaaattaattgcaaaagatcctaaatcttatttaccaacttgcattttgataaccttggtttgaaaattttaata

SEQ ID NO: 20156 - DNA, 698 bp, synthetic construct
  source 1..698: mol_type = other DNA
ttaaaacagccttggggttgttcccactccaagggcccacgtggcggctagtactctggtacttcggtacctttgtacgcctgttttatctcccttcccaatgtaacttagaagctcttaaatcaaggctcaataggtggggcgcaaaccagcgctctcatgagcaagcactcctgtctccccggtgtggttgtataaactgttcccacggttgaaaacaacctatccgttatccgctatagtacttcgagaaacctagtatcacctttggattgttgacgcgttgcgctcagcacactaacccgtgtgtagcttgggtcgatgagtctggacataccccactggcgacagtggtccaggctgcgttggcggcctactcatggtgaaaaccatgagacgctagacatgaacaaggtgtgaagagtctattgagctactatagagtcctccggcccctgaatgcggctaatcctaaccatggagcaagtgctcacaggccagtgagttgcttgtcgtaatgcgcaagtccgtggcggaaccgactactttgggtgtccgtgtttcactttttacttttatgactgcttatggtgacaatttgatattgttaccatttagcttgtcaaatcaattgcaaaagatcctaaatcttatttatcaacttgcattttgataactctgatttaaaaattttaata

SEQ ID NO: 20157 - DNA, 698 bp, synthetic construct
  source 1..698: mol_type = other DNA
ttaaaacagccttggggttgttcccactccaagggcccacgtggcggctagtactctggtacttcggtacctttgtacgcctgttttatctcccttccccatgtaacttagaagctcttaaatcaaggctcaataggtggggcgcaaaccagcgctctcatgagcaagcactcctgtctccccggtgtggttgtataaactgttcccacggttgaaaacaacctatccgttatccgctatagtacttcgagaaacctagtatcacctttggattgttgacgcgttgcgctcagcacactaacccgtgtgtagcttgggtcgatgagtctggacataccccactggcgacagtggtccaggctgcgttggcggcctactcatggtgaaaaccatgagacgctagacatgaacaaggtgtgaagagtctattgagctactatagagtcctccggcccctgaatgcggctaatcctaaccatggagcaagtgctcacaggccagtgagttgcttgtcgtaatgcgcaagtccgtggcggaaccgactactttgggtgtccgtgtttcactttttacttttatgactgcttatggtgacaatttgatattgttaccatttagcttgtcaaatcaattgtaaaagattctaaatcttatttatcaacttgcattttgataactttgatttgaaaattttaata

SEQ ID NO: 20158 - DNA, 697 bp, synthetic construct
  source 1..697: mol_type = other DNA
taaaacagccttggggttgttcccactccaagggcccacgtggcggctagtactctggtacttcggtacctttgtacgcctgttttatctcccttcccaatgtaacttagaagttcttaaatcaatgctcaataggtggggcgcaaaccagcgctctcatgagcaagcactcctgtctccccggtgaggttgtataaactgttcccacggttgaaaacaacctatccgttatccgctatagtacttcgagaaacctagtaccacctttggattgttgacgcgttgcgttcagcacactaacccgtgtgtagcttgggtcgatgagtctggacatacctcactggcgacagtggtccaggctgcgttggcggcctactcatggtgaaagccatgagacgctagacatgaacaaggtgtgaagagtctattgagctactatagagtcctccggcccctgaatgcggctaatcctaaccatggagcaagtgctcacaggccagtgagttgcttgtcgtaatgcgcaagtccgtggcggaaccgactactttgggtgtccgtgtttcactttttacttttatgactgcttatggtgacaatttgatattgttaccatttagcttgtcaaatcaattgcaaaagatcctaaatcttatttatcaacttgcatcttgataactttaatttgaaaattttaaca

SEQ ID NO: 20159 - DNA, 698 bp, synthetic construct
  source 1..698: mol_type = other DNA
ttaaaacagccttggggttgttcccactccaagggcccacgtggcggctagtactctggtacttcggtacctttgtacgcctgttttatctcccttcccaatgtaacttagaagctcttaaatcaaggctcaataggtggggcgcaaaccagcgctctcatgagcaagcactcctgtctccccggtgtggttgtataaactgttcccacggttgaaaacaacctatccgttatccgctatagtacttcgagaaacctagtatcacctttggattgttgacgcgttgcgctcagcacactaacccgtgtgtagcttgggtcgatgagtctggacatacctcactggcgacagtggtccaggctgcgttggcggcctactcatggtgaaaaccatgagacgctagacatgaacaaggtgtgaagagtctattgagctactatagagtcctccggcccctgaatgcggctaatcctaaccatggagcaagtgctcacaggccagtgagttgcttgtcgtaatgcgcaagtccgtggcggaaccgactactttgggtgtccgtgtttcactttttatttttatgactgcttatggtgacaatttgatattgttaccatttagcttgtcaaatcaattgcaaaagatcctaaatcttatttatcaacttgcattttgataactttgatttgaaaattttaata

SEQ ID NO: 20160 - DNA, 730 bp, synthetic construct
  source 1..730: mol_type = other DNA
gtgggttgttcccacccacagggcccactgggcgctagcacactggtatcacggtacctttgtgcgcctgttttatccaccccctccccaactaacgtagaagcacaaaccaagtggtcaatagatggctcagtacaccaactgggtttagaccaagtacttctgttaccccggactaagtatcaataggctgctcacgcggctgaaggagaaaacgttcgttacccggccaactacttcgagaagcccagtaccgccatggaggatgcgcagtgtttcgttcagcacaaccccagtgtagatcaggccgatgagtcaccgctaaccccacgggtgaccgtggcggtggctgcgctggcggcctgcccatggggtaacccatgggacgcttcaattccgacatggtgcgaagagcctattgagctagttggtagtcctccggcccctgaatgcggctaatcccaactgcggagcagacacccacaaaccagtgggcagtttgtcgtaacgggcaactctgcagcggaaccgactactttgggtgtccgtgtttccttttactcctatattgactgcttatggtgacaattgaaagattgttaccatatagctattggattggtcatccggtgacaaacagagctattatttacctttttattggctttgtgccattgaattttaaagttataaaaaccataaactttatcttgattcttaacacagcaaa

SEQ ID NO: 20161 - DNA, 698 bp, synthetic construct
  source 1..698: mol_type = other DNA
taaaacagccttggggttgttcccactccaagggcccacgtggcggctagtactctggtacttcggtacctttgtacgcctgttttatctcccttcccaatgtaatttagaagctcttaaatcaaggctcaataggtggggcgcaaaccagcgctctcatgagcaagcactcctgtctccccggtgtggttgtataaactgttcccacggttgaaaacaacctatccgttatccgctatagtacttcgagaaacctagtatcacctttggattgttgacgcgttgcactcagcacactaacccgtgtgtagcttgggtcgatgagtctggacataccccactggcgacagtggtccaggctgcgttggcggcctactcatggtgaaaaccatgagacgctagacatgaacaaggtgtgaagagtctattgagctactatagagtcctccggcccctgaatgcggctaatcctaaccatggagcaagtgctcacaggccagtgagttgcttgtcgtaatgcgcaagtccgtggcggaaccgactactttgggtgtccgtgtttcactttttacttttatgactgcttatggtgacaatttgatattgttaccatttagcttgtcaaattaattgcaaaagatcctaaatcttacttaccaacttgcattttgacaaccttgatttgaaaatttttaata

SEQ ID NO: 20162 - DNA, 698 bp, synthetic construct
  source 1..698: mol_type = other DNA
ttaaaacagccttggggttgttcccactccaagggcccacgtggcggctagtactctggtacttcggtacctttgtacgcctgttttatctcccttcccaatgtaatttagaagctgttaaatcaaggctcaataggtggggcgcaaaccagcgctctcatgagcaagcactcctgtctccccggtgtggttgtataaactgttcccacggttgaaaacaacctatccgttatccgctatagtacttcgagaaacctagtatcacctttggattgttgacgcgttgcgctcagcacactaacccgtgtgtagcttgggtcgatgagtctggacataccccactggcgacagtggtccaggctgcgttggcggcctactcatggtgaaaaccatgagacgctagacatgaacaaggtgtgaagagtctattgagctactatagagtcctccggcccctgaatgcggctaatcctaaccatggagcaagtgctcacaggccagtgagttgcttgtcgtaatgcgcaagtccgtggcggaaccgactactttgggtgtccgtgtttcactttttacttttatgactgcttatggtgacaatttgatattgttaccatttagctcgtcaaattaattgcaaaagatcctaaatcttacttaccaacttgcattttgacaaccttgatttgaaaattttaata

SEQ ID NO: 20163 - DNA, 698 bp, synthetic construct
  source 1..698: mol_type = other DNA
ttaaaacagccttggggttgttcccactccaagggcccacgtggcggctagtactctggtacttcggtacctttgtacgcctgttttatctcccttcccaatgtaatttagaagctcttaaatcaaggctcaataggtggggcgcaaaccagcgctctcatgagcaagcactcctgtctccccggtgtggttgtataaactgttcccacggttgaaaacaacctatccgttatccgctatagtacttcgagaaacctagtatcacctttggattgttgacgcgttgcgctcagcacactaacccgtgtgtagcttgggtcgatgagtctggacataccccactggcgacagtggtccaggctgcgttggcggcctactcatggtgaaaaccatgagacgctagacatgaacaaggtgtgaagagtctattgagctactatagagtcctccggcccctgaatgcggctaatcctaaccatggagcaagtgctcacaggccagtgagttgcttgtcgtaatgcgtaagtccgtggcggaaccgactactttgggtgtccgtgtttcactttttacttttatgactgcttatggtgacaatttgatattgttaccatttagcttgtcaaattaattgcaaaagatcctaaatcttacttgccaacttgcattttgacaaccttgatttgaaaattttaata

SEQ ID NO: 20164 - DNA, 698 bp, synthetic construct
  source 1..698: mol_type = other DNA
taaaacagccttggggttgttcccactccaagggcccacgtggcggctagtactctggtacttcggtacctttgtacgcctgttttatctcccttcccaatgtaatttagaagctcttaaatcaaggctcaataggtggggcgcaaaccagcgctctcatgagcaagcacttctgtctccccggtgtggttgtataaactgttcccacggttgaaaacaacctatccgttatccgctatagtacttcgagaaacctagtatcacctttggattgttgacgcgttgcgctcagcacactaacccgtgtgtagcttgggtcgatgagtctggacataccccactggcgacagtggtccaggctgcgttggcggcctactcatggtgaaaaccatgagacgctagacatgaacaaggtgtgaagagtctattgagctactatagagtcctccggcccctgaatgcggctaatcctaaccatggagcaagtgctcacaggccagtgagttgcttgtcgtaatgcgcaagtccgtggcggaaccgactactttgggtgtccgtgtttcactttttacttttatgactgcttatggtgacaatttgatattgttaccatttagcttgtcaaattaattgcaaaagatcctaaatcttacttaccaatttgcattttgacaaccttgatttgaaaatttttaata

SEQ ID NO: 20165 - DNA, 698 bp, synthetic construct
  source 1..698: mol_type = other DNA
taaaacagccttggggttgttcccactccaagggcccacgtggcggctagtaccctggtacttcggtacctttgtacgcctgttttatctcccttcccaatgtaatttagaagctcttaaatcaaggctcaataggtggggcgcaaaccagcgctctcatgagcaagcactcctgtctccccggtgtggttgtataaactgttcccacggttgaaaacaacctatccgttatccgctatagtacttcgagaaacctagtatcacctttggattgttgacgcgttgcgctcagcacactaacccgtgtgtagcttgggtcgatgagtctggacataccccactggcgacagtggtccaggctgcgttggcggcctactcatggtgaaaaccatgagacgctagacatgaacaaggtgtgaagagtctattgagctactatagagtcctccggcccctgaatgcggctaatcctaaccatggagcaagtgctcacaggccagtgagttgcttgtcgtaatgcgcaagtccgtggcggaaccgactactttgggtgtccgtgtttcactttttacttttatgactgcttatggtgacaatttgatattgttaccatttagcttgtcaaattaattgcaaaagatcctaaatcttacttaccaacctgcattttgacaaccttgatttgaaaatttttaata

SEQ ID NO: 20166 - DNA, 698 bp, synthetic construct
  source 1..698: mol_type = other DNA
taaaacagccttggggttgttcccaccccaagggcccacgtggcggctagtactctggtacttcggtacctttgtacgcctgttttatctcccttcccaatgtaatttagaagctcttaaatcaaggctcaataggtggggcgcaaaccagcgctctcatgagcaagcactcctgtctccccggtgtggttgtataaactgttcccacggttgaaaacaacctatccgttatccgctatagtacttcgagaaacctagtatcacctttggattgttgacgcgttgcgctcagcacactaacccgtgtgtagcttgggtcgatgagtctggacataccccactggcgacagtggtccaggctgcgttggcggcctactcatggtgaaaaccatgagacgctagacatgaacaaggtgtgaagagtctattgagctactatagagtcctccggcccctgaatgcggctaatcctaaccatggagcaagtgctcacaggccagtgagttgcttgtcgtaatgcgcaagtccgtggcggaaccgactactttgggtgtccgtgtttcactttttacttttatgactgcttatggtgacaatttgatattgttaccatttagcttgtcaaattaattgcaaaagatcctaaatcttacttaccaacttgtattttgacaaccttgatttgaaaatttttaata

SEQ ID NO: 20167 - DNA, 711 bp, synthetic construct
  source 1..711: mol_type = other DNA
agggcccactgggcgctagcactctggtattgcggtacctttgtgcgcctgttttatggcccccccccagttggaacttagaagtgaagcctctcgaccaatagtgggcgtggcacaccagccacgtcttggtcaagcacatctgtttccccggactgagtatcaataaactgctcgcgcggttgaaggagaaaacgttcgttacccggctaactacttcgggaaacccagtagtatcatggaaattgcgaggcgtttcgctcagcactccccccgtgcagatcaggtcgatgagtcactgcaccccccacgggtgaccgtggcagtggctgcgttggcggcctgcctatggggtgacccataggacgcttcaaaatggacatggtgcgaagagtctactgagctagttagtagtcctccggcccctgaatgcggcaaatcctaaccgcggagcaagtgtccacaaaccagtgggttgcttgtcgtaatgggtaactctgcggcggaaccgactactttgggtgtccgtgtttccttttatcttttattatggctgcttatggtgacaattgagagattgttaccatatagctattggattggccatccggtgaacaacagagcgatcatttacctctttgttggtttcgttccattgagtcccaaagtttttacgacactcaaatttattctcctacttaacaaagcaaa

SEQ ID NO: 20168 - DNA, 811 bp, synthetic construct
  source 1..811: mol_type = other DNA
taaaatagcctatggggcgctcccacccacagggccaatctggcgctagtacactggtacgccagtaccttggtatcacggtaccactgtacgttagtacctttgtatgcctgttttatatccccttccccaaagtaactttagaagcttaagaaaacaaagaccactaggagtccaacacccagttggattgcggtcaagcacttctgtttccccggacctagtagtgataggctgtacccacggccgaagatgaacccgtccgttatccggccagctacttcgagaagcctagtagcatcaaagatctgtcttggcgtttcgctcagcgcgttccccccgcgtagatcgggtcgatgggtctccgcatcccccacgggcgaccgtggcggaggccgcgtggcggcccgcctatggcgaaagccataggacgccatttcagtgacagggtgtgaagagcctattgagctagttggtagtcctccggcccctgaatgcggctaatcctaaccacggagcgtccaccagcaaaccagctggcagggcgtcgtaacgggtaactctgtggcggaaccgactactttgggtgtccgtgtttccttttgatcctattttggctgcttatggtgacaacgataagttgttatcataaagcttttggattggccatccggaaagagttgacagtttgttcgctcattgctttatcaagacttcctttgaggaaagcaatttacttattaatttcattttacaaccttgaagtgatttcaagtgcccatttaaacttgttaattcaattacatcgaac

SEQ ID NO: 20169 - DNA, 697 bp, synthetic construct
  source 1..697: mol_type = other DNA
ttaaaacagccttggggttgttcccaccccaagggcccacgtggcggctagtactctggtactttggtacctttgtacgcctgttttatctcccttcccaatgtaacttagaagttctcaaatcaaagctcgataggtggagcgcaaaccagcgctctcatgagcaagcactcctgtctccccggtgcggttgtataaactgttcccacggttgaaaacaacctatccgttatccgctatagtacttcgagaaacctagtatcacctttggattgttgatgcgttgcgctcatcacactaacccgtgtgtagcttgggtcgatgagtctggacataccccactggcgacagtggtccaggctgcgttggcggcctactcatggtgaaaaccatgagacgctaaacatgaacaaggtgtgaagagtctattgagctactatagagtcctccggcccctgaatgcggctaatcttaaccatggagcaagtgctcacaagccagtgggttgcttgtcgtaatgcgcaagtccgtggcggaaccgactactttgggtgtccgtgtttcactttttacttttatgactgcttatggtgacaatttgatattgttaccatttagcttgtcaaatcaattacaagagacctaaatcttatttatcaacttgctttttgataacttcaatcagaaaatttcaata

SEQ ID NO: 20170 - DNA, 697 bp, synthetic construct
  source 1..697: mol_type = other DNA
ttaaaacagccttggggttgttcccaccccaagggcccacgtggcggctagtactctggtacttcggtacctttgtacgcctgttttatctcccttcccaatgtaacttagaagttctcaaatcaaagctcgataggtggagcgcaaaccagcgctctcatgagcaagcactcctgtctccccggtgcggttgtataaactgttcccacggttgaaaacaacctatccgttatccgctatagtacttcgagaaacctagtatcacctttggattgttgatgcgttgcgctcatcacactaacccgtgtgtagcttgggtcgatgagtctggacataccccactggcgacagtggtccaggctgcgttggcggcctactcatggtgaaaaccatgagacgctaaacatgaacaaggtgtgaagagtctattgagctactatagagtcctccggcccctgaatgcggctaatcttaaccatggagcaagtgctcacaagccagtgggttgcttgtcgtaatgcgcaagtccgtggcggaaccgactactttgggtgtccgtgtttcactttttacttttatgactgcttatggtgacaatttgatattgttaccatttagcttgtcaaatcaattacaagagacctaaatcttatttatcaacttgctttttgataacttcaatcagaaaatttcaata

SEQ ID NO: 20171 - DNA, 697 bp, synthetic construct
  source 1..697: mol_type = other DNA
ttaaaacagccttggggttgttcccaccccaagggcccacgtggcggctagtactctggtacttcggtacctttgtacgcctgttttatctcccttcccaatgtaacttagaagttctcaaaccaaagctcgataggtggagcgcaaaccagcgctctcatgagcaagcactcctgtctccccggtgcggttgtataaactgttcccacggttgaaaacaacctatccgttatccgctatagtacttcgagaaacctagtatcacctttggattgttgatgcgttgcgctcagcacactaacccgtgtgtagcttgggtcgatgagtctggacataccccactggcgacagtggtccaggctgcgttggcggcctactcatggtgaaaaccatgagacgctaaacatgaacaaggtgtgaagagtctattgagctactatagagtcctccggcccctgaatgcggctaatcttaaccatggagcaagtgctcacaagccagtgggttgcttgtcgtaatgcgcaagtccgtggcggaaccgactactttgggtgtccgtgtttcactttttacttttacgactgcttatggtgacaatttgatattgttaccatttagcttgtcaaatcaattacaaaagacctaaatcttatttaccaacttgctttttgataacttcaatcagaaaatttcaata

SEQ ID NO: 20172 - DNA, 697 bp, synthetic construct
  source 1..697: mol_type = other DNA
ttaaaacagccttggggttgttcccactccaagggcccacgtggcggctagtactctggtacttcggtacctttgtacgcctgttttatctcccttcccaatgtaatttagaagcttttaaatcaaggctcaataggtggggcgcaaaccagcgctctcatgagcaagcactcctgtctccccggtgtggctgtataaactgttcccacggttgaaaacaacctatccgttatccgctatagtacttcgagaaacctagtatcacctttggattgttgacgcgttgcgctcaacacactaacccgtgtgtagcttgggtcgatgagtctggacataccccactggcgacagtggtccaggctgcgttggcggcctactcatggtgaaaaccatgagacgctagacatgaacaaggtgtgaagagtctattgagctactatagagtcctccggcccctgaatgcggctaatcctaaccatggagcaagtgctcacaggccagtgagttgcttgtcgtaatgcgcaagtccgtggcggaaccgactactttgggtgtccgtgtttcactttttacttttatgactgcttatggtgacaatttgatattgttaccatttagctgtcaaattaattgcaaaagatcctaagtcttacttaccaatttgcattttgataaccttgatttgaaaattttaata

SEQ ID NO: 20173 - DNA, 697 bp, synthetic construct
  source 1..697: mol_type = other DNA
ttaaaacagccttggggttgttcccactccaagggcccacgtggcggctagtactctggtactttggtacctttgtacgcctgttttatctcccttcccaatgtaatttagaagcttttaaatcaaagctcaataggtggggcgcaaaccagcgctctcatgagcaagcactcctgtttccccggtgtggttgtataaactgttcccacggttgaaaacaacctatccgttatccgctatagtacttcgagaaacctagtatcacctttggattgttgacgcgttgcgctcagcacactaacccgtgtgtagcttgggtcgatgagtctggacataccccactggcgacagtggtccaggctgcgttggcggcctactcatggtgaaaaccatgagacgctagacatgaacaaggtgtgaagagtctattgagctactatagagtcctccggcccctgaatgcggctaatcctaaccatggagcaagtgctcacaggccagtgagttgcttgtcgtaatgcgcaagtccgtggcggaaccgactactttgggtgtccgtgtttcactttttacttttatgactgcttatggtgacaatttgatattgttaccatttagctgtcaaattaattgcaaaagatcctaagtcttacttaccaatttgcattttgataaccttgatttgaaaattttaata

SEQ ID NO: 20174 - DNA, 697 bp, synthetic construct
  source 1..697: mol_type = other DNA
ttaaaacagccttggggttgttcccactccaagggcccacgtggcggctagtactctggtacttcggtacctttgtacgcctgttttatctcccttcccaatgtaatttagaagcttttaaatcaaggctcaataggtggggcgcaaaccagcgctctcatgagcaagcactcctgtctccccggtgtggttgtataaactgttcccacggttgaaaacaacctatccgttatccgctatagtacttcgagaaacctagtatcacctttggattgttgacgcgttgcgctcagcacactaacccgtgtgtagcttgggtcgatgagtctggacataccccactggcgacagtggtccaggctgcgttggcggcctactcatggtgaaaaccatgagacgctagacatgaacaaggtgtgaagagtctattgagctactatagagtcctccggcccctgaatgcggctaatcctaaccatggagcaagtgctcacaggccagtgagttgcttgtcgtaatgcgcaagtccgtggcggaaccgactactttgggtgtccgtgtttcactttttacttttatgactgcttatggtgacaatttgatattgttaccatttagctgtcaaattaattgcaaaagatcctaagtcttacttaccaatttgcattttgataaccttgatttgaaaattttaata

SEQ ID NO: 20175 - DNA, 697 bp, synthetic construct
  source 1..697: mol_type = other DNA
ttaaaacagccttggggttgttcccactccaagggcccacgtggcggctagtactctggtacttcggtacctttgtacgcctgttttatctcccttcccaatgtaatttagaagcttttaaatcaaggctcaataggtggggcgcaaaccagcgctctcatgagcaagcactcctgtctccccggtgtggttgtataaactgttcccacggttgaaaacaacctatccgttatccgctatagtacttcgagaaacctagtatcacctttggattgttgacgcgttgcgctcagcacactaacccgtgtgtagcttgggtcgatgagtctggacataccccactggcgacagtggtccaggctgcgttggcggcctactcatggtgaaaaccatgagacgctagacatgaacaaggtgtgaagagtctattgagctactatagagtcctccggcccctgaatgcggctaatcctaaccatggagcaagtgctcacaggccagtgagttgcttgtcgtaatgcgcaagtccgtggcggaaccgactactttgggtgtccgtgtttcactttttacttttatgactgcttatggtgacaatttgatattgttaccatttagctgtcaaattaattgcaaaagatcccaagtcttacttaccaatttgcattttgataaccttgatttgaaaattttaata

SEQ ID NO: 20176 - DNA, 697 bp, synthetic construct
  source 1..697: mol_type = other DNA
ttaaaacagccttggggttgttcccactccaagggcccacgtggcggctagtactctggtacttcggtacctttgtacgcctgttttatctcccttcccaacgtaatttagaagtttttaaatcaaggctcaataggtggggcgcaaaccagcgctctcatgagcaagcactcctgtctccccggtgtggttgtataaactgttcccacggttgaaaacaacctatccgttatccgctatagtacttcgagaaacctagtatcacctttggattgttgacgcgttgcgctcagcacactaacccgtgtgtagcttgggtcgatgagtctggacataccccactggcgacagtggtccaggctgcgttggcggcctactcatggtgaaaaccatgagacgctagacatgaacaaggtgtgaagagtctattgagctactatagagtcctccggcccctgaatgcggctaatcctaaccatggagcaagtgctcacaggccagtgagttgcttgtcgtaatgcgcaagtccgtggcggaaccgactactttgggtgtccgtgtttcactttttacttttatgactgcttatggtgacaatttgatattgttaccatttagctgtcaaattaattgcaaaagatcctaagtcttacttaccaatttgcattttgataaccttgatttgaaaattttaata

SEQ ID NO: 20177 - DNA, 697 bp, synthetic construct
  source 1..697: mol_type = other DNA
ttaaaacagccttggggttgttcccactccaagggcccacgtggcggctagtactctggtacttcggtacctttgtacgcctgttttatctcccttcccaatgtaatttagaagcttttaaatcaaggctcaataggtggggcgcaaaccagcgctctcatgagcaagcactcctgtctccccggtgtggttgtataaactgttcccacggttgaaaacaacctatccgttacccgctatagtacttcgagaaacctagtatcacctttggattgttgacgcgttgcgctcagcacactaacccgtgtgtagcttgggtcgatgagtctggacataccccactggcgacagtggtccaggctgcgttggcggcctactcatggtgaaaaccatgagacgctagacatgaacaaggtgtgaagagtctattgagctactatagagtcctccggcccctgaatgcggctaatcctaaccatggagcaagtgctcacaggccagtgagttgcttgtcgtaatgcgcaagtccgtggcggaaccgactactttgggtgtccgtgtttcactttttacttttatgactgcttatggtgacaatttgatattgttaccatttagctgtcaaattaattgcaaaagatcctaagtcttacttaccaatttgcattttgataaccttgatttgaaaactttaata

SEQ ID NO: 20178 - DNA, 697 bp, synthetic construct
  source 1..697: mol_type = other DNA
ttaaaacagccttggggttgttcccactccaagggcccacgtggcggctagtactctggtacttcggtacctttgtacgcctgttttatctcccttcccagtgtaatttagaagcttttaaatcaaggctcaataggtggggcgcaaaccagcgctctcatgagcaagcactcctgtctccccggtgtggttgtataaactgttcccacggttgaaaacaacctatccgttatccgctatagtacttcgagaaacctagtatcacctttggattgttgacgcgttgcgctcagcacactaacccgtgtgtagcttgggtcgatgagtctggacacaccccactggcgacagtggtccaggctgcgttggcggcctactcatggtgaaaaccatgagacgctagacatgaacaaggtgtgaagagtctattgagctactatagagtcctccggcccctgaatgcggctaatcctaaccatggagcaagtgctcacaggccagtgagttgcttgtcgtaatgcgcaagtccgtggcggaaccgactactttgggtgtccgtgtttcactttttacttttatgactgcttatggtgacaatttgatattgttaccatttagctgtcaaattaattgcaaaagatcctaagtcttacttaccaatttgcattttgataaccttgatttgaaaattttaata

SEQ ID NO: 20179 - DNA, 697 bp, synthetic construct
  source 1..697: mol_type = other DNA
ttaaaacagccttggggttgttcccactccaagggcccacgtggcggctagtactctggtacttcggtacctttgtacgcctgttttatctcccttcccaatgtaatttagaagctcttaaatcaaggctcaataggtggggcgcaaaccagcgctctcatgagcaagcactcctgtctccccggtgtggttgtataaactgttcccacggttgaaaacaacctatccgttatccgctatagtacttcgagaaacctagtatcacctttggattgttgacgcgttgcgctcagcacactaacccgtgtgtagcttgggtcgatgagtctggacataccccactggcgacagtggtccaggctgcgttggcggcctactcatggtgaaaaccatgagacgctagacatgaacaaggtgtgaagagtctattgagctactatagagtcctccggcccctgaatgcggctaatcctaaccatggagcaagtgctcacaggccagtgagttgcttgtcgtaatgcgcaagtccgtggcggaaccgactactttgggtgtccgtgtttcactttttacttttatgactgcttatggtgacaatttgatattgttaccatttagcttgtcaaattaattgcaaaagatcctaaatcttacttaccaatttgcattttgacaaccttatttgaaaattttaata

SEQ ID NO: 20180 - DNA, 697 bp, synthetic construct
  source 1..697: mol_type = other DNA
ttaaaacagccttggggttgttcccactccaagggcccatgtggcggctagtactctggtacttcggtacctttgtacgcctgttttatctcccttcccaatgtaatttagaagctcttaaatcaaggctcaataggcggggcgcaacccagcgctctcatgagcaagcacttctgtctccccggtgtggttgtataaactgttcccacggttgaaaacaacctatccgttatccgctatagtacttcgagaaacctagtatcacctttggattgttgacgcgttgcgctcagcacactaacccgtgtgtagcttgggtcgatgagtctggacataccccactggcgacagtggtccaggctgcgttggcggcctactcatggtgaaaaccatgagacgctaaacatgaacaaggtgtgaagagtctattgagctactatagagtcctccggcccctgaatgcggctaatcctaaccatggagcaagcgctcataagccagtgagttgcttgtcgtaatgcgcaagtccgtggcggaaccgactactttgggtgtccgtgtttcactttttacttttatgactgcttatggtgacaatttgatattgttaccatttagcttgtcaaattaattacaaaaggttctaaatcttacttaccaacctgcatttgataaccttgatttgaaaattttaata

SEQ ID NO: 20181 - DNA, 697 bp, synthetic construct
  source 1..697: mol_type = other DNA
ttaaaacagccttggggttgttcccactccaagggcccacgtggcggctagtactctggtatttcggtacctttgtacgcctgttttatctcccttcccaatgtaatttagaagcttttaaatcaaggctcaataggtggggcgcaaaccagcgctctcatgagcaagcactcctgtttccccggtgtggttgtataaactgttcccacggttgaaaacaacctatccgttatccgctatagtacttcgagaaacctagtatcacctttggattgttgacgcgttgcgctcagcacactaacccgtgtgtagcttgggtcgatgagtctggacataccccactggcgacagtggtccaggctgcgttggcggcctactcatggtgaaaaccatgagacgctagacatgaacaaggtgtgaagagtctattgagctactatagagtcctccggcccctgaatgcggctaatcctaaccatggagcaagtgctcacaggccagtgagttgcttgtcgtaatgcgcaagtccgtggcggaaccgactactttgggtgtccgtgtttcactttttacttttatgactgcttatggtgacaatttgatattgttaccatttagctgtcaaattaattgcaaaagatcctaagtcttacttaccaatttgcattttgataaccttgatttgaaaatttaaata

SEQ ID NO: 20182 - DNA, 697 bp, synthetic construct
  source 1..697: mol_type = other DNA
ttaaaacagccttggggttgttcccactccaagggcccacgtggcggctagtactctggtacttcggtacctttgtacgcctgttttatctcccttcccaacgtaacttagaagctcttaaatcaaggctcaataggtggagcgcaaaccagcgctcttatgagcaagtactcctgtttccccggtgcggttatatagactgttcccacggttaaaaataacctatccgttatccgctatagtacttcgagaaacctagtatcacctttggattgttgacgcgttgcgctcagcacactaacccgtgtgtagcttgggtcgatgagtctggacataccccactggcgacagtggtccaggctgcgttggcggcctactcatggtgaaaaccatgagacgctagacatgaacaaggtgtgaagagtctattgagctactatagagtcctccggcccctgaatgcggctaatcctaaccatggagcaagtgctcacagaccagtgagttgcttgtcgtaatgcgcaagtccgtggcggaaccgactactttgggtgtccgtgtttcactttttacctttatgactgcttatggtgacaatttgatattgttaccatttagcttgtcaaatcaattgcaaaagatcttaagttttatttatcaacttgcattttgataactttaaattgaagatttaata

SEQ ID NO: 20183 - DNA, 696 bp, synthetic construct
  source 1..696: mol_type = other DNA
ttaaaacagccttggggttgttcccaccccaagggcccacgtggcggctagtactctggtacttcggtacctttgtacgcctgttttatctcccttcccaatgtaacttagaagttctcaaatcaaagctcaataggtggagcgcaaaccagcgctctcatgagcaagtactcctgtctccccggtgcggttgtataaactgttcccacggttgaaaacaacctatccgttatccgctatagtacttcgagaaacctagtatcacctttggattgttgatgcgttgcgctcggcacactaacccgtgtgtagcttgggtcgatgagtctggacataccccactggcgacagtggtccaggctgcgttggcggcctactcatggtgaaaaccatgagacgctaaacatgaacaaggtgtgaagagtctattgagctactatagagtcctccggcccctgaatgcggctaatcttaaccatggagcaagtgctcacaagccagtgggttgcttgtcgtaatgcgcaagtccgtggcggaaccgactactttgggtgtccgtgtttcactttttacttttatgactgcttatggtgacaatttgatattgttaccatttagcttgtcaaatcaattacaaaagacctaaatcttatttatcaacttgcttttgataacttcaatcagaaaatttcaata

SEQ ID NO: 20184 - DNA, 696 bp, synthetic construct
  source 1..696: mol_type = other DNA
aaaacagccttggggttgttcccactccaagggcccacgtggcggctagtactctggtacttcggtacctttgtacgcctgttttatctcccttcccaatgtaacttagaagttcttaaatcaatgctcaataggtggggcgcaaaccagcgctctcatgagcaagcactcctgtctccccggtgaggttgtataaactgttcccacggttgaaaacaacctatccgttatccgctatagtacttcgagaaacctagtaccacctttggattgttgacgcgttgcgctcagcacactaacccgtgtgtagcttgggtcgatgagtctggacatacctcactggcgacagtggtccaggctgcgttggcggcctactcatggtgaaagccatgagacgctagacatgaacaaggtgtgaagagtctattgagctactatagagtcctccggcccctgaatgcggctaatcctaaccatggagcaagtgctcacaggccagtgagttgcttgtcgtaatgcgcaagtccgtggcggaaccgactactttgggtgtccgtgtttcactttttacttttatgactgcttatggtgacaatttgatattgttaccatttagcttgtcaaatcaattgcaaaagatcctaaatcttatttatcaacttgcatcttgataactttaatttgaaaattttaaca

SEQ ID NO: 20185 - DNA, 701 bp, synthetic construct
  source 1..701: mol_type = other DNA
ggctagtactccggtattacggtacccttgtacgcctgttttatactcccttcccccgtaacttagaagaaataaaccaagttcaatagaaggcggtacaaaccagtaccaccacgaacaagcacttctgtttccccggtgaagttgtatagactgtacccacggttgaaggcgactgatccgttatccgcttttgtacttcgagaagcttagtatcatcttggaatcttcgacgcgttgcactcagcactcaaccccagagtgtagcttaggctgatgagtctggacactcctcaccggtgacggtggtccaggctgcgttggcggcctacctgtggcccaaagccacaggacgctagttgtgaacaaggtgtgaagagcctattgagctacaaaagagtcctccggcccctgaatgcggctaatcctaaccacggagcaagggtgcgcaaaccagtgcatgccttgtcgtaacgcgcaagtctgtggcggaaccgactactttgggtgtccgtgtttccttttattcttataatggctgcttatggtgacaatcatagattgttatcataaagcgaattggattggccatccagtgaaagtgaaatacattatttatctttttgttggattcactccattcacttccctttcttttaaactcatcactacagtcttattgattagagacttatatcaca

SEQ ID NO: 20186 - DNA, 697 bp, synthetic construct
  source 1..697: mol_type = other DNA
taaaacagctttggggttgttcccactccaagggcccacgtggcggctagtactctggtacttcggtacctttgtacgcctgttttatcccccttcccaatgtaatttagaagctcttaaattaaggctcaataggtggggcgcaaaccagcgctctcatgagcaagcactcctgtctccccggtgtggttgtataaactgttcccacggttgaaaacaacctatccgttatccgctatagtacttcgagaaacctagtatcacctttggattgttgacgcgttgcgctcagcacactaacccgtgtgtagcttgggtcgatgagtctggacataccccactggcgacagtggtccaggctgcgttggcggcctactcatggtgaaaaccatgagacgctagacatgaacaaggtgtgaagagtctattgagctactatagagtcctccggcccctgaatgcggctaatcctaaccatggagcaagtgctcacaggccagtgagttgcttgtcgtaatgcgcaagtccgtggcggaaccgactactttgggtgtccgtgtttcactttttacttttatgactgcttatggtgacaatttgatattgttaccatttagcttgtcaaatcaattgcaaaagatcctaaatcttacttaccaacttgcattttgacaaccttgatttgaaaattttaata

SEQ ID NO: 20187 - DNA, 697 bp, synthetic construct
  source 1..697: mol_type = other DNA
taaaacagctttggggttgttcccactccaagggcccacgtggcggctagtactctggtacttcggtacctttgtacgcctgttttatcccccttcccaatgtaatttagaagctcttaaattaaggctcaataggtggggcgcaaaccagcgctctcatgagcaagcactcctgtctccccggtgtggttgtataaactgtttccacggttgaaaacaacctatccgttatccgctatagtacttcgagaaacctagtatcacctttggattgttgacgcgttgcgctcagcacactaacccgtgtgtagcttgggtcgatgagtctggacataccccactggcgacagtggtccaggctgcgttggcggcctactcatggtgaaaaccatgagacgctagacatgaacaaggtgtgaagagtctattgagctactatagagtcctccggcccctgaatgcggctaatcctaaccatggagcaagtgctcacaggccagtgagttgcttgtcgtaatgcgcaagtccgtggcggaaccgactactttgggtgtccgtgtttcactttttacttttatgactgcttatggtgacaatttgatattgttaccatttagcttgtcaaatcaattgcaaaagatcctaaatcttacttaccaacttgtattttgacaaccttgatttgaaaattttaata

SEQ ID NO: 20188 - DNA, 697 bp, synthetic construct
  source 1..697: mol_type = other DNA
taaaacagccttggggttgttcccactccaagggcccacgtggcggctagtactctggtacttcggtacctttgtacgcctgttttatcccccttcccaatgtaatttagaagctcttaaattaaggctcaataggtggggcgcaaaccagcgctctcatgagcaagcactcctgtctccccggtgtggttgtataaactgttcccacggttgaaaacaacctatccgttatccgctatagtacttcgagaaacctagtatcacctttggattgttgacgcgttgcgctcagcacactaacccgtgtgtagcttgggtcgatgagtctggacataccccactggcgacagtggtccaggctgcgttggcggcctactcatggtgaaaaccatgagacgctagacatgaacaaggtgtgaagagtctattgagctactatagagtcctccggcccctgaatgcggctaatcctaaccatggagcaagtgctcacaggccagtgagttgcttgtcgtaatgcgcaagtccgtggcggaaccgactactttgggtgtccgtgtttcactttttacttttatgactgcttatggtgacaatttgatattgttaccatttagcttgtcaaatcaattgcaaaagatcctaaatcttacttaccaacttgcattttgacaaccttgatttgaaaattttaata

SEQ ID NO: 20189 - DNA, 720 bp, synthetic construct
  source 1..720: mol_type = other DNA
cccacccacagggcccactgggcgtcagcacactggtattgcggtacccttgtgcgcctgttttatccaccccacccaaaagcaacttagaagcacgtcatatacggtcaataggcggcccagcactccaactgggtctcgaccaagcacttctgttaccccggaccgagtatcaataggctgctcacgcggctgagggagaaagcgttcgttacccgaccaattacttcgagaaacctagtaccaccatgaaggttgcgcagcgtttcgttccgcacaaccccagtgtagatcaggccgatgagtcaccgcattccccacgggcgaccgtggcggtggctgcgttggcggcctgcccatggggcaacccatgggacgcttcgatactgacatggtgtgaagagtctattgagctaattggtagtcctccggcccctgaatgcggctaatcctaactgcggagcagatacccacaaaccagtgggcggtctgtcgtaacgggcaactctgcagcggaaccgactactttgggtgtccgtgtttccttttattcttgtattggctgcttatggtgacaattgagagattgttaccatatagctattggattggccatccggtgacaaatagagcaatcatctatctattcgttggttttgtaccgctaacctttaaagttttaaaaactttaaatttcattttagccctaaacatagcaaa

SEQ ID NO: 20190 - DNA, 696 bp, synthetic construct
  source 1..696: mol_type = other DNA
taaaacagccttggggttgttcccactccaagggcccacgtggcggctagtactctggtacttcggtacctttgtacgcctgttttatctcccttcccaatgtaatttagaagcttttaaatcaaggctcaataggtggggcgcaaaccagcgctctcatgagcaagcactcctgtctccccggtgtggttgtataaactgttcccacggttgaaaacaacctatccgttatccgctatagtacttcgagaaacctagtatcacctttggattgttgacgcgttgcgctcagcacactaacccgtgtgtagcttgggtcgatgagtctggacacaccccactggcgacagtggtccaggctgcgttggcggcctactcatggtgaaaaccatgagacgctagacatgaacaaggtgtgaagagtctattgagctactatagagtcctccggcccctgaatgcggctaatcctaaccatggagcaagtgctcacaggccagtgagttgcttgtcgtaatgcgcaagtccgtggcggaaccgactactttgggtgtccgtgtttcactttttacttttatgactgcttatggtgacaatttgatattgttaccatttagctgtcaaattaattgcaaaagatcctaagtcttacttaccaatttgcattttgataaccttgatttgaaaattttaata

SEQ ID NO: 20191 - DNA, 696 bp, synthetic construct
  source 1..696: mol_type = other DNA
taaaacagccttggggttgttcccactccaagggcccacgtggcggctagtactctggtacttcggtacctttgtacgcctgttttatctcccttcccaatgtaatttagaagcttttaaatcaaagctcaataggtggggcgcaaaccagcgctctcatgagcaagcactcctgtctccccggtgtggttgtataaactgttcccacggttgaaaacaacctatccgttatccgctatagtacttcgagaaacctagtatcacctttggattgttgacgcgttgcgctcagcacactaacccgtgtgtagcttgggtcgatgagtctggacataccccactggcgacagtggtccaggctgcgttggcggcctactcatggtgaaaaccatgagacgctagacatgaacaaggtgtgaagagtctattgagctactatagagtcctccggcccctgaatgcggctaatcctaaccatggagcaagtgctcacaggccagtgagttgcttgtcgtaatgcgtaagtccgtggcggaaccgactactttgggtgtccgtgtttcactttttacttttatgactgcttatggtgacaatttgatattgttaccatttagctgtcaaattaattgcaaaagatcctaagtcttacttaccaatttgcattttgataaccttgatttgaaaattttaata

SEQ ID NO: 20192 - DNA, 696 bp, synthetic construct
  source 1..696: mol_type = other DNA
taaaacagccttggggttgttcccactccaagggcccacgtggcggctagtactctggtacttcggtacctttgtacgcctgttttatcccccttcccaatgtattttagaagcttttaaatcaaggctcaataggtggggcgcaaaccagcgctctcatgagcaagcactcctgtctccccggtgtggttgtataaactgttcccacggtcgaaaacaacctatccgttatccactatagtacttcgagaaacctagtatcacctttggattgttgacgcgttgcgctcagcacactaacccgtgtgtagcttgggtcgatgagtctggacataccccactggcgacagtggtccaggctgcgttggcggcctactcatggtgaaaaccatgagacgctagacatgaacaaggtgtgaagagtctattgagctactatagagtcctccggcccctgaatgcggctaatcctaaccatggagcaagtgctcacaggccagtgagttgcttgtcgtaatgcgcaagtccgtggcggaaccgactactttgggtgtccgtgtttcactttttacttttatgactgcttatggtgacaatttgatattgttaccatttagctgtcaaattaattgcaaaagatcctaagtcttacttaccaatttgcattttgataaccttgatttgaaaattttaata

SEQ ID NO: 20193 - DNA, 696 bp, synthetic construct
  source 1..696: mol_type = other DNA
taaaacagccttggggttgttcccactccaagggcccacgtggcggctagtactctggtacttcggtacctttgtacgcctgttttatctcccttcccaatgtaatttagaagcttttaaatcaaggctcaataggtggggcgcaaaccagcgctctcatgagcaagcactcctgtctccccggtgtggttgtataaactgttcccacggttgaaaacaacctatccgttatccgctatagtacttcgagaaacctagtatcacctttggattgttgacgcgttgcgctcagcacactaacccgtgtgtagcttgggtcgatgagtctggacataccccactggcgacagtggtccaggctgcgttggcggcctactcatggtgaaaaccatgagacgctagacatgaacaaggtgtgaagagtctattgagctactatagagtcctccggcccctgaatgcggctaatcctaaccatggagcaagtgctcacaggccagtgagttgcttgtcgtaacgcgcaagtccgtggcggaaccgactactttgggtgtccgtgtttcactttttacttttatgactgcttatggtgacaatttgatattgttaccatttagctgtcaaattaattgcaaaagatcctaagtcttacttaccaatttgcattttgataaccttgatttgaaaattttaata

SEQ ID NO: 20194 - DNA, 696 bp, synthetic construct
  source 1..696: mol_type = other DNA
taaaacagccttggggttgttcccactccaagggcccacgtggcggctagtactctggtacttcggtacctttgtacgcctgttttatctcccttcccaatgtaatttagaagcttttaaatcaaggctcaataggtggggcgcaaaccagcgctctcatgagcaagcactcctgtctccccggtgtggttgtataaactgttcccacggttgaaaacaacctatccgttatccgctatagtacttcgagaaacctagtatcacctttggattgttgacgcgttgcgctcagcacactaacccgtgtgtagcttgggtcgatgagtctggacataccccactggcgacagtggtccaggctgcgttggcggcctactcatggtgaaaaccatgagacgctagacatgaacaaggtgtgaagagtctattgagctactatagagtcctccggcccctgaatgcggctaatcctaaccatggagcgagtgctcacaggccagtgagttgcttgtcgtaatgcgcaagtccgtggcggaaccgactactttgggtgtccgtgtttcactttttacttttatgactacttatggtgacaatttgatattgttaccatttagctgtcaaattaattgcaaaagatcctaagttttacttaccaatttgcattttgataaccttgatttgaaaactttaata

SEQ ID NO: 20195 - DNA, 696 bp, synthetic construct
  source 1..696: mol_type = other DNA
taaaacagccttggggttgttcccactccaagggcccacgtggcggctagtactctggtacttcggtacctttgtacgcctgttttatctcccttcccaatgtaatttagaagcttttaaatcaaggctcaataggtggggcgcaaaccagcgctctcatgagcaagcactcctgtctccccggtgtggttgtataaactgttcccacggttgaaaacaacctatccgttatccgctatagtacttcgagaaacctagtatcacctttggattgttgacgcgttgcgctcagcacactaacccgtgtgtagcttgggtcgatgagtctggacataccccactggcgacagtggtccaggctgcgttggcggcctactcatggtgaaaaccatgagacgctagacatgaacaaggtgtgaagagtctattgagctactatagagtcctccggcccctgaatgcggctaatcctaaccatggagcaagtgctcacaggccagtgagttgcttgtcgtaatgcgcaagtccgtggcggaaccgactactttgggtgtccgtgtttcactttttacttttatgactgcttatggtgacaatttgatattgttaccatttagctgtcaaattaattgcaaaagatcctaagtcttacttaccaatttgcattttgataaccttgatttgaaaattttaata

SEQ ID NO: 20196 - DNA, 696 bp, synthetic construct
  source 1..696: mol_type = other DNA
taaaacagccttggggttgttcccactccaagggcccacgtggcggctagtactctggtacttcggtacctttgtacgcctgttttatctcccttcccaatgtaatttagaagcttttaaatcaaggctcaataggtggggcgcaaaccagcgctctcatgagcaagcactcctgtctccccggtgtggttgtataaactgttcccacggttgaaaacaacctatccgttatccgctatagtacttcgagaaacctagtatcacctttggattgttgacgcgttgcgctcagcacactaacccgtgtgtagcttaggtcgatgagtctggacataccccactggcgacagtggtccaggctgcgttggcggcctactcatggtgaaaaccatgagacgctagacatgaacaaggtgtgaagagtctattgagctactatagagtcctccggcccctgaatgcggctaatcctaaccatggagcaagtgctcacaggccagtgagttgcttgtcgtaatgcgcaagtccgtggcggaaccgactactttgggtgtccgtgtttcactttttacttttatgactgcttatggtgacaatttcatattgttaccatttagctgtcaaattaattgcaaaagatcctaagtcttacttaccaatttgcattttgataaccttgatttgaaaattttaata

SEQ ID NO: 20197 - DNA, 696 bp, synthetic construct
  source 1..696: mol_type = other DNA
taaaacagccttggggttgttcccactccaagggcccacgtggcggctagtactctggtacttcggtacctttgtacgcctgttttatctcccttcccaatgtaatttagaagcttttaaatcaaagctcaataggtggggcgcaaaccagcgctctcatgagcaagcactcctgtctccccggtgtggttgtataaactgttcccacggttgaaaacaacctatccgttatccgctatagtacttcgagaaacctagtatcacctttggattgttgacgcgttgcgctcagcacactaacccgtgtgtagcttgggtcgatgagtctggacataccccactggcgacagtggtccaggctgcgttggcggcctactcatggtgaaaaccatgagacgctagacatgaacaaggtgtgaagagtctattgagctactatagagtcctccggcccctgaatgcggctaatcctaaccatggagcaagtgctcacaggccagtgagttgcttgtcgtaatgcgcaagtccgtggcggaaccgactactttgggtgtccgtgtttcactttttacttttatgactgcttatggtgacaatttgatattgttaccatttagctgtcaaattaattgcaaaagatcctaagtcttacttaccaatttgcattttgataaccttgatttgaaaattttaata

SEQ ID NO: 20198 - DNA, 696 bp, synthetic construct
  source 1..696: mol_type = other DNA
taaaacagccttggggttgttcccactccaagggcccacgtggcggctagtactctggtacttcggtacctttgtacgcctgttttatctcccttcccaatgtaatttagaagcttttaaatcaaggctcaataggtggggcgcaaaccagcgctctcatgagcaagcactcctgtctccccggtgtggttgtataaactgttcccacggttgaaaacaacctatccgttatccgctatagtacttcgagaaacctagtatcacctttgaattgttgacgcgttgcgctcagcacactaacccgtgtgtagcttgggtcgatgagtctggacataccccactggtgacagtggtccaggctgcgttggcggcctactcatggtgaaaaccatgagacgctagacatgaacaaggtgtgaagagtctattgagctactatagagtcctccggcccctgaatgcggctaatcctaaccatggagcaagtgctcacaggccagtgagttgcttgtcgtaatgcgcaagtccgtggcggaaccgactactttgggtgtccgtgtttcactttttacttttatgactgcttatggtgacaatttgatattgttaccatttagctgtcaaattaattgcaaaagatcctaagtcttacttaccaatttgcattttgataaccttgatttgaaaactttaata

SEQ ID NO: 20199 - DNA, 696 bp, synthetic construct
  source 1..696: mol_type = other DNA
taaaacagccttggggttgttcccactccaagggcccacgtggcggctagtactctggtacttcggtacctttgtacgcctgttttatctcccttcccaatgtaatttagaagcttttacatcaaggctcaataggtggggcgcaaaccagcgctctcatgagcaagcactcctgtctccccggtgtggttgtataaactgttcccacggttgaaaacaacctatccgttatccgctatagtacttcgagaaacttagtatcacctttggattgttgacgcgttgcgctcagcacactaacccgtgtgtagcttgggtcgatgagtctggacataccccactggcgacagtggtccaggctgcgttggcggcctactcatggtgaaaaccatgagacgctagacatgaacaaggtgtgaagagtctattgagctactatagagtcctccggcccctgaatgcggctaatcctaaccatggagcaagtgctcacaggccagtgagttgcttgtcgtaatgcgcaagtccgtggcggaaccgactactttgggtgtccgtgtttcactttttacttttatgactgcttatggtgacaatttgatattgttaccatttagctgtcaaattaattgcaaaagatcctaagtcttacttaccaatttgcattttgataaccttgatttgaaaattttaata

SEQ ID NO: 20200 - DNA, 696 bp, synthetic construct
  source 1..696: mol_type = other DNA
taaaacagccttggggttgttcccactccaagggcccacgtggcggctagtactctggtacttcggtacctttgtacgcctgttttatctcccttcccaatgtaatttagaagcttttaaactaaggctcaataggtggggcgcaaaccagcgctctcatgagcaagcactcctgtctccccggtgtggttgtataaactgttcccacggttgaaaacaacctatccgttatccgctatagtacttcgagaaacctagtatcacctttggattgttgacgcgttgcgctcagcacactaacccgtgtgtagcttgggtcgatgagtctggacataccccactggtgacagtggtccaggctgcgttggcggcctactcatggtgaaaaccatgagacgctagacatgaacaaggtgtgaagagtctattgagctactatagagtcctccggcccctgaatgcggctaatcctaaccatggagcaagtgctcacaggccagtgagttgcttgtcgtaatgcgcaagtccgtggcggaaccgactactttgggtgtccgtgtttcactttttacttttatgactgcttatggtgacaatttgatattgttaccatttagctgtcaaattaattgcaaaagatcctaagtcttacttaccaatttgcattttgataaccttgatttgaaaattttaata

SEQ ID NO: 20201 - DNA, 696 bp, synthetic construct
  source 1..696: mol_type = other DNA
taaaacagccttggggttgttcccactccaagggcccacgtggcggctagtactctggtacttcggtacctttgtacgcctgttttatctcccttcccaatgtaatttagaagcttttaaatcaaggctcaataggtggggcgcaaaccagcgctctcatgagcaagcactcctgtctccccggtgtggttgtataaactgttcccacggttgaaaacaacctatccgttatccgctatagtacttcgagaaacctagtatcacctttggattgttgacgcgttgcgctcagcacactaacccgtgtgtagcttgggtcgatgagtctggacataccccactggcgacagtggtccaggctgcgttggcggcctactcatggtgaaaaccatgagacgctagacatgaacaaggtgtgaagagtctattgagctactatagagtcctccggcccctgaatgcggctaatcctaaccatggagcaagtgctcacaggccagtgagttgcttgtcgtaatgcgcaagtccgtggcggaaccgactactttgggtgtccgtgtttcactttttacttttatgactgcttatggtgacaatttgatattgttaccatttagctgtcaaattaattgctaaagatcctaagtcttacttaccaatttgcattttgataaccttgatttgaaaattttaata

SEQ ID NO: 20202 - DNA, 696 bp, synthetic construct
  source 1..696: mol_type = other DNA
taaaacagccttggggttgttcccactccaagggcccacgtggcggctagtactctggtacttcggtacctttgtacgcctgttttatctcccttcccaatgtaatttagaagcttttaaatcaaggctcaataggtggggcgcaaaccagcgctctcatgagcaagcactcctgtctccccggtgtggttgtataaactgttcccacggttgaaaataacctatccgttatccgctatagtacttcgagaaacctagtatcacctttggattgttgacgcgttgcgctcagcacactagcccgtgtgtagcttgggtcgatgagtctggacataccccactggcgacagtggtccaggctgcgttggcggcctactcatggtgaaaaccatgggacgctagacatgaacaaggtgtgaagagtctattgagctactatagagtcctccggcccctgaatgcggctaatcctaaccatggagcaagtgctcacaggccagtgagttgcttgtcgtaatgcgcaagtccgtggcggaaccgactactttgggtgtccgtgtttcactttttacttttatgactgcttatggtgacaatttgatattgttaccatttagctgtcaaattaattgcaaaagatcctaagtcttacttaccaatttgcattttgataaccttgatttgaaaattttaata

SEQ ID NO: 20203 - DNA, 696 bp, synthetic construct
  source 1..696: mol_type = other DNA
taaaacagccttggggttgttcccactccaagggcccacgtggcggctagtactctggtacttcggtacctttgtacgcctgttttatctcccttcccaatgtaatttagaagcttttaaatcaaggctcaataggtggggcgcaaaccagcgctctcatgagcaagcactcctgtctccccggtgtggttgtataaactgttcccacggttgaaaacaacctatccgttatccgctatagtacttcgagaaacctagtatcacctttggattgttgacgcgttgcgctcagcacactaacccgtgtgtagcttgggtcgatgagtctggacataccccactggcgacagtggtccaggctgcgttggcggcctactcatggtgaaaaccatgagacgctagacatgaacaaggtgtgaagagtctattgagctactatagagtcctccggcccctgaatgcggctaatcctaaccatggagcaagtgctcacaggccagtgagttgcttgtcgtaatgcgcaagtccgtggcggaaccgactactttgggtgtccgtgtttcactttttacttttatgactgcttatggtgacaatttgatattgttaccatttagctgtcaaattaattgcaaaagatcctaagtcttacttatcaatttgcattttgataaccttgatttgaaaattttaata

SEQ ID NO: 20204 - DNA, 722 bp, synthetic construct
  source 1..722: mol_type = other DNA
ttcccatccacagggcccactgggcgctagcacactggtattgcggtacctttgtgcgcctgttttatccaccctgaccccagggcaacatagaagcataccactaaaggtcaataggcaatccagtactccaactgggtcatgaccaagcacttctgttaccccggactgagtaccaataagctgctcacgcggctgaaggggaaagcgttcgttacccgaccaattacttcgagaaacccagtaccaccatgaaagtcgcgcagcgtttcgctcagcacgaccccagtgtagatcaggctgatgagtcaccgcattccccacgggcgaccgtggcggtggctgcgttggcggcctgcccatggggcaacccatgggacgcttcaatactgacatggtgcgaagagtctattgagctaattggtagtcctccggcccctgaatgcggctaatcctaactgcggagcagatacccacatgccagtgggcagtctgtcgtaatgggtaactctgcagcggaaccgactactttgggtgtccgtgtttccttttattttatactggctgcttatggtgacaattgatagattgttaccatatagctattggattggccatccagtgacaaaccgagctatcgtctacctgtttgttggttttgttccattgaactttaaagttctaaaaactattaactttgtcctagcactcaacacggcgaa

SEQ ID NO: 20205 - DNA, 697 bp, synthetic construct
  source 1..697: mol_type = other DNA
tgggaacagccttggggttgttcccactccaagggcccacgtggcggctagtactctggtacttcggtacctttgtacgcctgttttatctcccttcccaatgtaatttagaagcttttaaatcaaggctcaataggtggggcgcaaaccagcgctctcatgagcaagcactcctgtctccccggtgtggttgtataaactgttcccacggttgaaaacaacctatccgttatccgctatagtacttcgagaaacctagtatcacctttggattgttgacgcgttgcgctcagcacactaacccgtgtgtagcttgggtcgatgagtctggacataccccactggcgacagtggtccaggctgcgttggcggcctactcatggtgaaaaccatgagacgctagacatgaacaaggtgtgaagagtctattgagctactatagagtcctccggcccctgaatgcggctaatcctaaccatggagcaagtgctcacaggccagtgagttgcttgtcgtaatgcgcaagtccgtggcggaaccgactactttgggtgtccgtgtttcactttttacttttatgactgcttatggtgacaatttgatattgttaccatttagctgtcaaattaattgcaaaagatcctaagtcttacttaccaatttgcactttgataaccttgatttgaaaactttaata

SEQ ID NO: 20206 - DNA, 697 bp, synthetic construct
  source 1..697: mol_type = other DNA
taaaacagccttggagttgttcccactccaagggcccacgtggcggctagtactctggtacttcggtacctttgtacgcctgttttatctcccttcccaatgtaatttagaagctcttaaatcaaggctcaataggtggggcgcaaaccagcgctctcatgagcaagcactcctgtctccccggtgcggttgtataaactgttcccacggttgaaaacgacctatccgttatccgctatagtacttcgagaaacctagtatcacctttggattgttgacgcgttgcgctcagcacactaacccgtgtgtagcttgggtcgatgagtctggacgtaccccactggcgacagtggtccaggctgcgttggcggcctactcatggtgaaaaccatgagacgctagacatgaacaaggtgtgaagagtctattgagctactatagagtcctccggcccctgaatgcggctaatcctaaccatggagcaagtgctcacagaccagtgagttgcttgtcgtaatgcgcaagtccgtggcggaaccgactactttgggtgtccgtgtttcactttttacttttatgactgcttatggtgacaatttaatattgttaccatttagcttgtcaaattaattgcaaaacatcctaaatcttacttaccaacttgcattttgataaccttggtttgaaaatttcaata

SEQ ID NO: 20207 - DNA, 636 bp, synthetic construct
  source 1..636: mol_type = other DNA
ttagaagcatacaattcaagctcaataggagggggtgcaagccagcgcctccgtgggcaagcactactgtttccccggtgaggccgcatagactgttcccacggttgaaagtgtccgatccgttatccgctcatgtacttcgagaagcctagtatcgctctggaatcttcgacgcgttgcgctcagcactcaaccccggagtgtagcttgggccgatgagtctggacagtccccactggcgacagtggtccaggctgcgctggcggcccacctgtggcccaaagccacgggacgctagttgtgaacagggtgtgaagagcctattgagctacatgagagtcctccggcccctgaatgcggctaatcctaaccatggagcaggcagctgcaacccagcagccagcctgtcgtaacgcgcaagtccgtggcggaaccgactactttgggtgtccgtgtttccttttattcttgaatggctgcttatggtgacaatcatagattgttatcataaagcgagttggattggccatccagtgtgaatcagattaattactcccttgtttgttggatccactcccgaaacgttttactccttaacttattgaaattgtttgaagacaggatttcagtgtcaca

SEQ ID NO: 20208 - DNA, 696 bp, synthetic construct
  source 1..696: mol_type = other DNA
aaaacagccttggggttgttcccactccaagggcccacgtggcggctagtactctggtacttcggtacctttgtacgcctgttttatctcccttcccaatgtaacttagaagctcttaaatcaaggctcaataggtggagcgcaaaccagcgctctcatgagcaagcactcctgtctccccggtgtggttgtataaactgttcccacggttgaaaacaacctatccgttatccgctatagtacttcgagaaacctagtatcacctttggattgttgacgcgttgcgctcagcacactaacccgtgtgtagcttgggtcgatgagtctggacataccccactggcgacagtggtccaggctgcgttggcggcctactcatggtgaaaaccatgagacgctagacatgaacaaggtgtgaagagtctattgagctactatagagtcctccggcccctgaatgcggctaatcctaaccatggagcaagtgctcacaggccagtgagttgcttgtcgtaatgcgcaagtccgtggcggaaccgactactttgggtgtccgtgtttcactttttacctttatgactgcttatggtgacaatttgatattgttaccatttagcttgtcaaatcaattgcaaaagatcctaaatcttatttatcaacttgcattttgataactttaatttgaaaattttaata

SEQ ID NO: 20209 - DNA, 697 bp, synthetic construct
  source 1..697: mol_type = other DNA
ttaaaacagccttggggttgttcccactccaagggcccacgtggcggctagtactctggtacttcggtacctttgtacgcctgttttatctcccttcccaatgtaacttagaagctcttaaatcaaggctcaataggtggagcgcaaaccagcgctcttatgagcaagtacttctgtttccccggtgcggttatataaactgttcccacggttgaaaataacctatccgttatccgctatagtacttcgagaaacctagtatcacctttggattgttgacgcgttgcgctcagcacactaacccgtgtgtagcttgggtcgatgagtctggacataccccactggcgacagtggtccaggctgcgttggcggcctactcatggtgaaaaccatgagacgctagacatgaacaaggtgtgaagagtctattgagctactatagagtcctccggcccctgaatgcggctaatcctaaccatggagcaagtgctcacagaccagtgagttgcttgtcgtaatgcgcaagtccgtggcggaaccgactactttgggtgaccgtgtttcactttttacccttatgactgcttatggtgacaatttgatattgttgccatttagcttgtcaaatcaattgcaaaagatcctaaatcttatttatcaacttgcattttgataactttaatttgaagatttaata

SEQ ID NO: 20210 - DNA, 698 bp, synthetic construct
  source 1..698: mol_type = other DNA
ttaaaacagctttggggttgttcccactccaagggcccacgtggcggctagtactctggtgcttcggtacctttgtacgcctgttttatctcccttcccaatgtaacttagaagttcttaaatcaaggctcaataggtggggcgcaaaccagcgctctcatgagcaagcactcctgtctccccggtgtggttgtataaactgttcccacggttgaaaacaacctatccgttatccgctatagtacttcgagaaacctagtatcacctttggattgttgacgcgttgcgctcagcacactaacccgtgtgtagcttgggtcgatgagtctggacgtaccccactggcgacagtggtccaggctgcgttggcggcctactcatggtgaaaaccatgagacgctagacatgaacaaggtgtgaagagtctattgagctactatagagtcctccggcccctgaatgcggctaatcctaaccatggagcaagtgctcacaggccagtgagttgcttgtcgtaatgcgcaagtccgtggcggaaccgactactttgggtgtccgtgtttcactttttatttttatgactgcttatggtgacaatttgatattgttaccatttagcttgtcaaattaattgcaaaagatcctaaatcttacttaccaacttgcattttgataaccttgatttgaaaattttaata

SEQ ID NO: 20211 - DNA, 698 bp, synthetic construct
  source 1..698: mol_type = other DNA
ttaaaacagctttggggttgttcccactccaagggcccacgtggcggctagtactctggtgcttcggtacctttgtacgcctgttttatctcccttcccaatgtaacttagaagttcttaaatcaaggctcaataggtggggcgcaaaccagcgctctcgtgagcaagcactcctgtctccccggtgtggttgtataaactgttcccacggttgaaaacaacctatccgttatccgctatagtacttcgagaaacctagtatcacctttggattgttgacgcgttgcgctcagcacactaacccgtgtgtagcttgggtcgatgagtctggacgtaccccactggcgacagtggtccaggctgcgttggcggcctactcatggtgaaaaccatgagacgctagacatgaacaaggtgtgaagagtctattgagctactatagagtcctccggcccctgaatgcggctaatcctaaccatggagcaagcgctcacaggccagtgagttgcttgtcgtaatgcgcaagtccgtggcggaaccgactactttgggtgtccgtgtttcactttttacttttatgactgcttatggtgacaatttgatattgttaccatttagcttgtcaaattaattgcaaaagatcctaaatcttacttaccaacttgcattttgataaccttgatttgaaaatttcaata

SEQ ID NO: 20212 - DNA, 698 bp, synthetic construct
  source 1..698: mol_type = other DNA
ttaaaacagctttggggttgttcccactccaagggcccacgtggcggctagtactctggtgcttcggtacctttgtacgcctgttttatctcccttcccaatgtaacttagaagttcttaaatcaaggctcaataggtggggcgcaaaccagcgctctcatgagcaagcactcctgtctccccggtgtggttgtataaactgttcccacggttgaaaacaacctatccgttatccgctatagtacttcgagaaacctagtatcacctttggattgttgacgcgttgcgctcagcacactaacccgtgtgtagcttgggtcgatgagtctggacgtaccccactggcgacagtggtccaggctgcgttggcggcctactcatggtgaaaaccatgagacgctagacatgaacaaggtgtgaagagtctattgagctactatagagtcctccggcccctgaatgcggctaatcctaaccatggagcaagtgctcacaggccagtgagttgcttgtcgtaatgcgcaagtccgtggcggaaccgactactttgggtgtccgtgtttcactttttacttttatgactgcttatggtgacaatttgatattgttaccatttagcttgtcaaattaattgcaaaagatcctaaatcttacttaccaacttgcattttgataaccttgatttgaaaattttaata

SEQ ID NO: 20213 - DNA, 698 bp, synthetic construct
  source 1..698: mol_type = other DNA
ttaaaacagctttggggttgttcccactccaagggcccacgtggcggctagtactctggtacttcggtacctttgtacgcctgttttatctcccttcccaatgtaacttagaagctcttaaatcaaggctcaataggtggggcgcaaaccagcgctctcatgagcaagcactcctgtctccccggtgtggttgtataaactgttcccacggttgaaaacaacctatccgttatccgctatagtacttcgagaaacctagtatcacctttggattgttgacgcgttgcgctcagcacactaacccgtgtgtagcttgggtcgatgagtctggacgtaccccactggcgacagtggtccaggctgcgttggcggcctactcatggtgaaaaccatgagacgctagacatgaacaaggtgtgaagagtctattgagctactatagagtcctccggcccctgaatgcggctaatcctaaccatggagcaagtgctcacaggccagtgagttgcttgtcgtaatgcgcaagtctgtggcggaaccgactactttgggtgtccgtgtttcactttttacttttatgactgcttatggtgacaatttgatattgttaccatttagcttgtcaaattaattgcaaaagatcctaaatcttacttaccaacttgtattttgataaccttgatttgaaaattctaata

SEQ ID NO: 20214 - DNA, 698 bp, synthetic construct
  source 1..698: mol_type = other DNA
ttaaaacagctttggggttgttcccactccaagggcccacgtggcggctagtactctggtacttcggtacctttgtacgcctgttttatctcccttcccaatgtaacttagaagctcttaaatcaaggctcaataggtggggcgcaaaccagcgctctcatgagcaagcactcctgtctccccggtgtggttgtataaactgttcccacggttgaaaacaacctatccgttatccgctatagtacttcgagaaacctagtatcacctttggattgttgacgcgttgcgctcagcacactaacccgtgtgtagcttgggtcgatgagtctggacgtacctcactggcgacagtggtccaggctgcgttggcggcctactcatggtgaaaaccatgagacgctagacatgaacaaggtgtgaagagtctattgagctactatagagtcctccggcccctgaatgcggctaatcctaaccatggagcaagtgctcacaagccagtgagttgcttgtcgtaatgcgcaagtctgtggcggaaccgactactttgggtgtccgtgtttcactttttacttttatgactgcttatggtgacaatttgatattgttaccatttagcttgtcaaattaattgcaaaagatcctaaatcttatttaccaacttgcactttgataaccttgatttgaaaattttaata

SEQ ID NO: 20215 - DNA, 698 bp, synthetic construct
  source 1..698: mol_type = other DNA
ttaaaacagctttggggttgttcccactccaagggcccacgtggcggctagtactctggtacttcggtacctttgtacgcctgttttatctcccttcccaatgtaacttagaagctcttaaatcaaggctcaataggtggggcgcaaaccagcgctctcatgagcaagcactcctgtctccccggtgtggttgtataaactgttcccacggttgaaaacaacctatccgttatccgctatagtacttcgagaaacctagtatcacctttggattgttgacgcgttgcgctcagcacactaacccgtgtgtagcttaggtcgatgagtctggacgtaccccactggcgacagtggtccaggctgcgttggcggcctactcatggtgaaaaccatgagacgctagacatgaacaaggtgtgaagagtctattgagctactatagagtcctccggcccctgaatgcggctaatcctaaccatggagcaagtgctcacaggccagtgagttgcttgtcgtaatgcgcaagtctgtggcggaaccgactactttgggtgtccgtgtttcactttttacttttatgactgcttatggtgacaatttgatattgttaccatttagcttgtcaaatcaattgcaaaagatcctaaatcttacttaccaacttgcattttgataaccttgatttgaaaattttaata

SEQ ID NO: 20216 - DNA, 809 bp, synthetic construct
  source 1..809: mol_type = other DNA
aacagcctatggggcgttcccacccacagggcccactgggcgctagtacactggtacgccagtaccttggtatcacggtaccactgtacgttagtacctttgtatgcctgttttatatccccttcccccaatgtaactttagaagcttaagaaaacaaagaccactaggagtccaacacccagttggattgcggtcaagcacttctgtttccccggacctagtagtgataggctgtacccacggccgaagatgaacccgtccgttatccggccagctacttcgagaagcctagtagcatcaaagatctgtcttggcgtttcgctcagcgcgttccccccgcgtagatcgggtcgatgggtctccgcatcccccacgggcgaccgtggcggaggccgcgtggcggcccgcctatggcgaaagccataggacgccatttcagtgacagggtgtgaagagcctattgagctagttggtagtcctccggcccctgaatgcggctaatcctaaccacggagcgtccaccagcaaaccagctggcagggcgtcgtaacgggtaactctgtggcggaaccgactactttgggtgtccgtgtttccttttgatcctattgtggctgcttatggtgacaacttacagttgttatcataaagcttttggattggccatccggaaagagttgacagtttgttcgctcattgctttatcaagacttcctttgaggaaagcaatttacttattaatttcattttacaaccttgaagtgatttcaagtgcccatttaaacttgttaattcaattacatcgaac

SEQ ID NO: 20217 - DNA, 679 bp, synthetic construct
  source 1..679: mol_type = other DNA
ggtacccttgtgcgcctgttttatccaccccctccccaatgcaacatagaagcacaaactaagtggtcaatagacggctcagtgcaccaactgggtttagaccaagcacttctgttaccccggactgagtatcaataggctgctcacgcggctgaaggagaaaacgttcgttacccggccaactacttcgagaagcccagtaccaccatgaaggttgcgcagtgtttcgttcagcacaaccccagtgtagatcaggtcgatgagtcaccgcaatccccacgggcgaccgtggcggtggctgcgctggcggcctgcccatggggtgacccatgggacgcttcaattccgacatggtgcgaagagcctattgagctagttggtagtcctccggcccctgaatgcggctaatcccaactgcggagcaagcacccacaaaccagtgggctgtttgtcgtaacgggcaactctgcagcggaaccgactactttgggtgtccgtgtttccttttattcctacactggctgcttatggtgacaattgaaagattgttgccatatagctattggattggccatccggtaacaaacagagctattatttacttatttgttggctttgtgccgttgaatttcaaagttataaaaaccataacctccatcttgacactcaacacagcaaa

SEQ ID NO: 20218 - DNA, 708 bp, synthetic construct
  source 1..708: mol_type = other DNA
aacagccttggggttgttcccactccaagggcccacgtggcggctagtactctggtacttcggtacctttgtacgcctgttttatctcccttcccaatgtaacttagaagttcttaaatcaatgctcaataggtggggcgcaaaccagcgctctcatgagcaagcactcctgtctccccggtgaggttgtataaactgttcccacggttgaaaacaacctatccgttatccgctatagtacttcgagaaacctagtaccacctttggattgttgacgcgttgcgctcagcacactaacccgtgtgtagcttgggtcgatgagtctggacacacctcactggcgacagtggtccaggctgcgttggcggcctactcatggtgaaagccatgagacgctagacatgaacaaggtgtgaagagtctattgagctactatagagtcctccggcccctgaatgcggctaatcctaaccatggagcaagtgctcacaggccagtgagttgcttgtcgtaatgcgcaagtccgtggcggaaccgactactttgggtgtccgtgtttcactttttacttttatgactgcttatggtgacaatttgatattgttaccatttagcttgtcaaatcaattgcaaaagatcctaaatcttatttgtcaacttgcatcttgataactttaatttgaaaatattaatttgaaaattttaaca

SEQ ID NO: 20219 - DNA, 708 bp, synthetic construct
  source 1..708: mol_type = other DNA
aacagccttggggttgttcccactccaagggcccacgtggcggctagtactctggtacttcggtacctttgtacgcctgttttatctcccttcccaatgtaacttagaagttcttaaatcaatgctcaataggtggggcgcaaaccagcgttctcatgagcaagcactcctgtctccccggtgaggttgtataaactgttcccacggttgaaaacgacctatccgttatccgctatagtacttcgagaaacctagtaccacctttggattgttgacgcgttgcgctcagcacactaacccgtgtgtagcttgggtcgatgagtctggacatacctcactggcgacagtggtccaggctgcgttggcggcctactcatggcgaaagccatgagacgctagacatgaacaaggtgtgaagagtctattgagctactatagagtcctccggcccctgaatgcggctaatcctaaccatggagcaagtgctcacaggccagtgagttgcttgtcgtaatgcgcaagtccgtggcggaaccgactactttgggtgtccgtgtttcactttttacttttatgactgcttatggtgacaatttgatattgttaccatttagcttgtcaaatcaattgcaaaagatcctaaatcttatttatcaacttgcatcttgataactttaatttgaaaatattaatttgaaaattttaata

SEQ ID NO: 20220 - DNA, 700 bp, synthetic construct
  source 1..700: mol_type = other DNA
agccttggggttgttcccactccaagggcccacgtggcggctagtactctggtacttcggtacctttgtacgcctgttttatctcccttcccaatgtaacttagaagttcttaaatcgatgctcaataggtggggcgcaaaccagcgctctcatgagcaagcactcctgtctccccggtgaggttgtataaactgttcccacggttgaaaacaacctatccgttatccgctatagtacttcgagaaacctagtaccacctttggattgttgacgcgttgcgctcagcacactaacccgtgtgtagcttgggtcgatgagtctggacatacctcactggcgacagtggtccaggctgcgttggcggcctactcatggtgaaagccatgagacgctagacatgaacaaggtgtgaagagtctattgagctactatagagtcctccggcccctgaatgcggctaatcctaaccatggagcaagtgctcacaggccagtgagttgcttgtcgtaatgcgcaagtccgtggcggaaccgactactttgggtgtccgtgtttcactttttacttttatgactgcttatggtgacaatttgatattgttaccatttagcttgtcaaatcaattgcaaaagatcctaaatcttatttatcaacttgcatcttgataactttaatttgaaaaatttgaaaattttaaca

SEQ ID NO: 20221 - DNA, 658 bp, synthetic construct
  source 1..658: mol_type = other DNA
gctttcccccccactatagtaatttagaagcttgaactacacggccaacagacaacccggtccaccaaccgggccccggccaagcacttctgtatccccggactgagtatcaataggctgctcgcgcggctgaaggagaaaacgttcgttacccggccacttacttcgagaaacctagtaacaccatgaaagttgcgcagcgtttcgctccgcacaaacccagtgtagatcaggtcgatgagtcaccgcattccccacgggcgaccgtggcggtggctgcgttggcggcctgcccatggggtaacccacgggacgcttcaatactgacatggtgcgaagagtctattgagctaagtggtagtcctccggcccctgaatgcggctaatcctaactgcggagcagatacccacactccagtgggcagtctgtcgtaacgggcaactctgcagcggaaccgactactttgggtgtccgtgtttccttttgtcttttacactggctgcttatggtgacaattgaaagattgttaccatatagctattggattggccatccggtatcaaacagagcaattatttacttgtttgttggttatatacctctcgataccaaggttctaaaaacactcaactatatcttgttattgaatacgttgaa

SEQ ID NO: 20222 - DNA, 726 bp, synthetic construct
  source 1..726: mol_type = other DNA
gttttccccaccacagggcccaccgtgcgctagccccatggtatctcggtacccttgtgcgcctgttttatccacccttttcccatttaacttagaagcacgcgccaagacggtcaaaagggagcccagtaagccaattgggctatgaccaagcactcctgtaaccccgggccgagtatcaataagctgctcgcgcggctgaaggagaaaaagctcgttacccggccaattacttcgagaaacccagtagcatcatgaaagttgcgcagcgtttcgctccacacaaccccagtgtagatcaggtcgatgagtcaccgcgttccccacgggtgaccgtggcggtggctgcgctggcggcctgcccatggggccacccatgggacgcttcaatactgacatggtgtgaagagtctattgagctaattggtagtcctccggcccctgaatgcggctaatcctaactgcggagcagatgcccacacaccagtgggaagtctgtcgtaacgggtaactctgcagcggaaccgactactttgggtgtccgtgtttccttttatttctactctggctgcttatggtgacaattgaaaggttgttaccatatagctattggattggccatccggtgtcacatagagcgattatttacttgtttgttgggtttataccactgaactataaagttttaaatactcttaactacattttaatccttaactcattaaa

SEQ ID NO: 20223 - DNA, 698 bp, synthetic construct
  source 1..698: mol_type = other DNA
ttaaaacacccccccggttgttcccactccaagggcccacgtggcggctagtactctggtactttggtacctttgtacgcctgttttatctcccttcccaatgtaatttagaagctcttaaatcaaggctcaataggtggggcgcaaaccagcgctctcatgagcaagcactcctgtctccccggtgtggttgcataaactgttcccacggttgaaaacaacctatccgttatccgctatagtacttcgagaaacctagtatcacctttggattgttgacgcgttgcgctcagcacactaacccgtgtgtagcttgggtcgatgagtctggacataccccactggcgacagtggtccaggctgcgttggcggcctactcatggtgaaaaccatgagacgctagacatgaacaaggtgtgaagagtctattgagctactatagagtcctccggcccctgaatgcggctaatcctaaccatggagcaagtgctcacaggccagtgagttgcttgtcgtaatgcgtaagtctgtggcggaaccgactactttgggtgtccgtgtttcactttttacttttatgactgcttatggtgacaatttgatattgttaccatttagcttgtcaaattaattgcaaaagatcctaaatcttacttatcaacttgcattttgataaccttgatttgaaaattttaata

SEQ ID NO: 20224 - DNA, 698 bp, synthetic construct
  source 1..698: mol_type = other DNA
ttaaaacacccccccggttgttcccactccaagggcccacgtggcggctagtactctggtacttcggtacctttgtacgcctgttttatctcccttcccaatgtaatttagaagctcttaaatcaaggctcaataggtggggcgcaaaccagcgctctcatgagcaagcactcctgtctccccggtgtggttgtataaactgttcccacggttgaaaacaacctatccgttatccgctatagtacttcgagaaacctagtatcacctttggattgttgacgcgttgcgctcagcacactaacccgtgtgtagcttgggtcgatgagtctggacataccccactggcgacagtggtccaggctgcgttggcggcctactcatggtgaaaaccatgagacgctagacatgaacaaggtgtgaagagtctattgagctactatagagtcctccggcccctgaatgcggctaatcctaaccatggagcaagtgctcacaggccagtgagttgcttgtcgtaatgcgcaagtccgtggcggaaccgactactttgggtgtccgtgtttcactttttacttttatgactgcttatggtgacaatttgatattgttaccatttagcttgtcaaattaattgcaaaagatcctaaatcttatttaccaacttgcattttgataaccttgatttgaaagttttaata

SEQ ID NO: 20225 - DNA, 698 bp, synthetic construct
  source 1..698: mol_type = other DNA
ttaaaacacccccccggttgttcccactccaagggcccacgtggcggctagtactctggtacttcggtacctttgtacgcctgttttatctcccttcccaatgtaatttagaagcttttaaatcaaggctcaataggtggggcgcaaaccagcgctctcatgagcaagcactcctgtctccccggtgtggttgtataaactgttcccacggttgaaaacaacctatccgttatccgctatagtacttcgagaaacctagtatcacctttggattgttgacgcgttgcgctcagcacactaacccgtgtgtagcttgggtcgatgagtctggacataccccactggcgacagtggtccaggctgcgttggcggcctactcatggtgaaaaccatgagacgctagacatgaacaaggtgtgaagagtctattgagctactatagagtcctccggcccctgaatgcggctaatcctaaccatggagcaagtgctcacaggccagtgagttgcttgtcgtaatgcgcaagtccgtggcggaaccgactactttgggtgtccgtgtttcactttttacttttatgactgcttatggtgacaatttgatattgttaccatttagcttgtcaaattaattgcaaaagaccctaaatcttacttaccaacttgcattttgacaaccttgatttgaaaattttaata

SEQ ID NO: 20226 - DNA, 698 bp, synthetic construct
  source 1..698: mol_type = other DNA
ttaaaacaccccctgggttgttcccactccaagggcccacgtggcggctagtactctggtacttcggtacctttgtacgcctgttttatctcccttcccaatgtaatttagaagctcttaaatcaaggctcaataggtggggcgcaaaccagcgctctcatgagcaagcactcctgtctccccggtgtggttgtataaactgttcccacggttgaaaacaacctatccgttatccgctatagtacttcgagaaacctagtaccacctttggattgttgacgcgttgcgctcagcacactaacccgtgtgtagcttgggtcgatgagtctggacataccccactggcgacagtggtccaggctgcgttggcggcctactcatggtgaaaaccatgagacgctagacatgaacaaggtgtgaagagtctattgagctactatagagtcctccggcccctgaatgcggctaatcctaaccatggagcaagtgctcacaggccagtgagttgcttgtcgtaatgcgcaagtccgtggcggaaccgactactttgggtgtccgtgtttcactttttacttttatgactgcttatggtgacaatttgatattgttaccatttagcttgtcaaattaattgcaaaagatcctaaatcttacttaccaacttgcattttgataaccttgatttgaaaattttaata

SEQ ID NO: 20227 - DNA, 698 bp, synthetic construct
  source 1..698: mol_type = other DNA
ttaaaacaccccccgggttgttcccactccaagggcccacgtggcggctagtactctggtatttcggtacctttgtacgcctgttttatctccctccccaatgtaacttagaagctttcaaatcaaagctcaataggtggagcgcaaaccagcgcttccgtgagcaagtactcctgtttccccggtgcggttgtatagactgttcccacggttgaaaacaacctatccgttatccgctatagtacttcgagaaacctagtatcacctttggattgttgatgcgttgcgctcaacacactaacccgtgtgtagcttgggtcgatgagtctggacataccccactggtgacagtggtccaggctgcgttggcggcctactcatggtgaaaaccatgagacgctagacatgaacaaggtgtgaagagtctattgagctactatagagtcctccggcccctgaatgcggctaatcttaaccatggagcaagtgctcacaaaccagtgagttgcttgtcgtaatgcgcaagtccgtggcggaaccgactactttgggtgtccgtgtttcactttttacttttatgactgcttatggtgacaatctaatattgttaccattcagctagtcgaaataaccgcataaaactttaaatcctatctaacaattcacattttgataaccttgatttgaaaattttaata

SEQ ID NO: 20228 - DNA, 698 bp, synthetic construct
  source 1..698: mol_type = other DNA
ttaaaacaccccctgggttgttcccactccaagggcccacgtggcggctagtactctggtacttcggtacctttgtacgcctgttttatctcccttcccaacgtaatttagaagctcttgaatcaaggctcaataggtggggcgcaaaccagcgctctcatgagcaagcactcctgtctccccggtgtggttgtataaactgttcccacggttgaaaacaacctatccgttatccgctatagtacttcgagaaacctagtatcacctttggattgttgacgcgttgcgctcagcacactaacccgtgtgtagcttgggtcgatgagtctggacataccccactggcgacagtggtccaggctgcgttggcggcctactcatggtgaaaaccatgagacgctagacatgaacaaggtgtgaagagtctattgagctactatagagtcctccggcccctgaatgcggctaatcctaaccatggagcaagtgctcacaggccagtgagttgcttgtcgtaatgcgtaagtccgtggcggaaccgactactttgggtgtccgtgtttcactttttacttttatgactgcttatggtgacaatttgatattgttaccatttagcttgtcaaattaattgtaaaagatcctaaatcttacttaccaacttgcattttgataaccttgatttgaaaattttaata

SEQ ID NO: 20229 - DNA, 698 bp, synthetic construct
  source 1..698: mol_type = other DNA
ttaaaacaacccctgggttgttcccactccaagggcccacgtggcggctagtactctggtacttcggtacctttgtacgcctgttttatctcccttcccaatgtaatttagaagctcttaaatcaaggctcaataggtggggcgcaaaccagcgctctcatgagcaagcactcctgtctccccggtgtggttgtataaactgttcccacggttgaaaacaacctatccgttatccgctatagtacttcgagaaacctagtatcacctttggattgttgacgcgttgcgctcagcacactaacccgtgtgtagcttgggtcgatgagtctggacacaccccactggcgacagtggtccaggctgcgttggcggcctactcatggtgaaaaccatgagacgctagacatgaacaaggtgtgaagagtctattgagctactatagagtcctccggcccctgaatgcggctaatcctaaccatggagcaagtgctcacaggccagtgagttgcttgtcgtaatgcgcaagtccgtggcggaaccgactactttgggtgtccgtgtttcactttttacttttatgactgcttatggtgacaatttgatattgttaccatttagcttgtcaaattaattgcaaaagatcctaaatcttacttaccaacttgcattttgacaaccttgatttgaaaattttaata

SEQ ID NO: 20230 - DNA, 698 bp, synthetic construct
  source 1..698: mol_type = other DNA
ttaaaacaccccctgggttgttcccactccaagggcccacgtggcggctagtactctggtacttcggtacctttgtacgcctgttttatctcccttcccaatgtaatttagaagctcttaaatcaaggctcaataggtggggcgcaaaccagcgctctcatgagcaagcactcctgtctccccggtgtggttgtataaactgttcccacggttgaaaacaacctatccgttatccgctatagtacttcgagaaacctagtatcacctttggattgttgacgcgttgcgctcagcacactaacccgtgtgtagcttgggtcgatgagtctggacataccccactggcgacagtggtccaggctgcgttggcggcctactcatggtgaaaaccatgagacgctagacatgaacaaggtgtgaagagtctattgagctactatagagtcctccggcccctgaatgcggctaatcctaaccatggagcaagtgctcacaggccagtgagttgcttgtcgtaatgcgcaagtccgtggcggaaccgactactttgggtgtccgtgtttcactttttacttttatgactgcttatggtgacaatttgatattgttaccatttagcttgtcaaattaattgcaaaagatcctaaatcttatttaccaatttgcattttgataaccttgatttgaaaattttaata

SEQ ID NO: 20231 - DNA, 698 bp, synthetic construct
  source 1..698: mol_type = other DNA
ttaaaacaccccctgggttgttcccactccaagggcccacgtggcggctagtactctggtacttcggtacctttgtacgcctgttttatcttccttcccaatgtaatttagaagctcttaaatcaaggctcaataggtggggcgcaaaccagcgctctcatgagcaagcactcctgtctccccggtgtggttgtataaactgttcccacggttgaaaacagcctatccgttatccgctatagtacttcgagaaacctagtatcacctttggattgttgacgcgttgcgctcagcacactaacccgtgtgtagcttgggtcgatgagtctggacataccccactggcgacagtggtccaggctgcgttggcggcctactcatggtgtaaaccatgagacgctagacatgaacaaggtgtgaagagtctattgagctactatagagtcctccggcccctgaatgcggctaatcctaaccatggagcaagtgctcacaggccagtgagttgcttgtcgtaatgcgcaagtccgtggcggaaccgactactttgggtgtccgtgtttcactttttacttttatgactgcttatggtgacaatttgatattgttaccatttagcttgtcaaattaattgcaaaagatcctaaatcttacttaccaacttgcattttgacaaccttgatttgaaaattttaata

SEQ ID NO: 20232 - DNA, 698 bp, synthetic construct
  source 1..698: mol_type = other DNA
ttaaaacaccccctgggttgttcccactccaagggcccacgtggcggctagtactctggtacttcggtacctttgtacgcctgttttatctcccttcccaatgtaatttagaagctcttaaatcaaggctcaataggtggggcgcaaaccagcgctctcatgagcaagcactcctgtctccccggtgtggttgtataaactgttcccacggttgaaaacaacctatccgttatccgctatagtacttcgagaaacctagtatcacctttggattgttgacgcgttgcgctcagcacactaacccgtgtgtagcttgggtcgatgagtctggacataccccactggcgacagtggtccaggctgcgttggcggcctactcatggtgaaaaccatgagacgctagacatgaacaaggtgtgaagagtctattgagctactatagagtcctccggcccctgaatgcggctaatcctaaccatggagcaagtgctcacaggccagtgagttgcttgtcgtaatgcgcaagtccgtggcggaaccgactactttgggtgtccgtgtttcactttttacttttatgactgcttatggtgacaatttgatattgttaccatttagcttgtcaaattaattgcaaaagatcctatatcttatttaccaacttgcattttgataaccttgatttgaaaattttaata

SEQ ID NO: 20233 - DNA, 698 bp, synthetic construct
  source 1..698: mol_type = other DNA
ttaaaacaccccccgggttgttcccactccaagggcccacgtggcggctagtactctggtacttcggtacctttgtacgcctgttttatctcccttcccaatgtaatttagaagctcttaaatcaaggctcaataggtggggcgcaaaccagcgctctcatgagcaagcactcctgtctccccggtgtggttgtataaactgttcccacggttaaaaacgacctatccgttatccgctatagtacttcgagaaacctagtatcacctttggattgttgacgcgttgcgctcagcacactaacccgtgtgtagcttgggtcgatgagtctggacataccccactggcgacagtggtccaggctgcgttggcggcctactcatggtgaaaaccatgagacgctagacatgaacaaggtgtgaagagtctattgagctactatagagtcctccggcccctgaatgcggctaatcctaaccatggagcaagtgctcacaggccagtgagttgcttgtcgtaatgcgcaagtccgtggcggaaccgactactttgggtgtccgtgtttcactttttacttttatgactgcttatggtgacaatttgatattgttaccatttagcttgtcaaattaattgcaaaagatcctaaatcttacttaccaatttgcattttgataaccttgatttgaaaattttaata

SEQ ID NO: 20234 - DNA, 698 bp, synthetic construct
  source 1..698: mol_type = other DNA
ttaaaacacccccccggttgttcccactccaagggcccacgtggcggctagtactctggtacttcggtacctttgtacgcctgttttatctcccttcccgatgtaatttagaagctcttaaatcaaggctcaataggtggggcgcaacccagcgctctcatgagcaagcacttctgtctccccggtgtggttgtataaactgttcccacggttgaaaacaacctatccgttatccgctatagtacttcgagaaacctagtatcacctttggattgttgacgcgttgcgctcagcacactaacccgtgtgtagcttgggtcgatgagtctggacataccccactggcgacagtggtccaggctgcgttggcggcctactcatggtgaaaaccatgagacgctagacatgaacaaggtgtgaagagtctattgagctactatagagtcctccggcccctgaatgcggctaatcctaaccatggagcaagtgctcacaggccagtgagttgcttgtcgtaatgcgcaagtccgtggcggaaccgactactttgggtgtccgtgtttcactttttacttttatgactgcttatggtgacaatttgatattgttaccatttagcttgtcaaattaattgcaaaagatcctaaatcttacttaccaacttgcattttgataaccttgatttgaaaattttaata

SEQ ID NO: 20235 - DNA, 698 bp, synthetic construct
  source 1..698: mol_type = other DNA
ttaaaacaccccccgggttgttcccactccaagggcccacgtggcggctagtactctggtacttcggtacctttgtacgcctgttttatctcccttcccgatgtaatttagaagctcttaaatcaaggctcaataggtggggcgcaacccagcgctctcatgagcaagcacttctgtctccccggtgtggttgtataaactgttcccacggttgaaaacaacctatccgttatccgctatagtacttcgagaaacctagtatcacctttggattgttgacgcgttgcgctcagcacactaacccgtgtgtagcttgggtcgatgagtctggacataccccactggcgacagtggtccaggctgcgttggcggcctactcatggtgaaaaccatgagacgctagacatgaacaaggtgtgaagagtctattgagctactatagagtcctccggcccctgaatgcggctaatcctaaccatggagcaagtgctcacaggccagtgagttgcttgtcgtaatgcgcaagtccgtggcggaaccgactactttgggtgtccgtgtttcactttttacttttatgactgcttatggtgacaatttgatattgttaccatttagcttgtcaaattaattgcaaaagatcctaaatcttacttaccaacttgcattttgataaccttgatttgaaaattttaata

SEQ ID NO: 20236 - DNA, 698 bp, synthetic construct
  source 1..698: mol_type = other DNA
ttaacacacccccccggttgttcccactccaagggcccacgtggcggctagtactctggtactttggtacctttgtacgcctgttttatctcccttcccaatgtaatttagaagctcttaaatcaaggctcaataggtggggcgcaaaccagcgctctcatgagcaagcactcctgtctccccggtgtggttgcataaactgttcccacggttgaaaacaacctatccgttatccgctatagtacttcgagaaacctagtatcacctttggattgttgacgcgttgcgttcagcacactaacccgtgtgtagcttgggtcgatgagtctggacataccccactggcgacagtggtccaggctgcgttggcggcctactcatggtgaaaaccatgagacgctagacatgaacaaggtgtgaagagtctattgagctactatagagtcctccggcccctgaatgcggctaatcctaaccatggagcaagtgctcacaggccagtgagttgcttgtcgtaatgcgtaagtccgtggcggaaccgactactttgggtgtccgtgtttcactttttacttttatgactgcttatggtgacaatttgatattgttaccatttagcttgtcaaattaattgcaaaagatcctaaatcttacttatcaacttgcattttgataaccttgatttgaaaattttaata

SEQ ID NO: 20237 - DNA, 698 bp, synthetic construct
  source 1..698: mol_type = other DNA
ttaaaacacccccccggttgttcccactccaagggcccacgtggcggctagtactctggtacttcggtacctttgtacgcctgttttatctcccttcccgatgtaatttagaagctcttaaatcaaggctcaataggtggggtgcaacccagcgctctcatgagcaagcacttctgtctccccggtgtggttgtataaactgttcccacggttgaaaacaacctatccgttatccgctatagtacttcgagaaacctagtatcacctttggattgttgacgcgttgcgctcagcacactaacccgtgtgtagcttgggtcgatgagtctggacataccccactggcgacagtggtccaggctgcgttggcggcctactcatggtgaaaaccatgagacgctagacatgaacaaggtgtgaagagtctattgagctactatagagtcctccggcccctgaatgcggctaatcctaaccatggagcaagtgctcacaagccagtgagttgcttgtcgtaatgcgcaagtccgtggcggaaccgactactttgggtgtccgtgtttcactttttacttttatgactgcttatggtgacaatttgatattgttaccatttagcttgtcaaattaattacaaaagatcctaaatcttatttaccaacttgcattttgataaccttgacttgaaaattttaata

SEQ ID NO: 20238 - DNA, 697 bp, synthetic construct
  source 1..697: mol_type = other DNA
taaaacagccttggggttgttcccactccaagggcccacgtggcggctagtactctggtacttcggtacctttgtacgcctgttttatctcccttcccaatgtaatttagaagctcttaaatcaaggctcaataggtggggcgcaaaccagcgctctcatgagcaagcactcctgtctccccggtgtggttgtataaactgttcccacggttgaaaacaacctatccgttatccgctatagtacttcgagaaacctagtatcacctttggattgttgacgcgttgcgctcagcacactaacccgtgtgtagcttgggtcgatgagtctggacataccccactggcgacagtggtccaggctgcgttggcggcctactcatggtgaaaaccatgagacgctagacatgaacaaggtgtgaagagtctattgagctactatagagtcctccggcccctgaatgcggctaatcctaaccatggagcaagtgctcacaagccagtgagttgcttgtcgtaatgcgcaagtccgtggcggaaccgactactttgggtgtccgtgtttcactttttacttttatgactgcttatggtgacaatttgatattgttaccatttagcttgtcaaattaattgcaaaggatcctaaatcttacttaccaatttgcattttgacaatcttgatttgaaaattttaata

SEQ ID NO: 20239 - DNA, 705 bp, synthetic construct
  source 1..705: mol_type = other DNA
aacagccttggggttgttcccactccaagggcccacgtggcggctagtactctggtacttcggtacctttgtacgcctgttttatctcccttcccaatgtaacttagaagttcttaaatcaatgctcaataggtggggcgcaaaccagcgctctcatgagcaagcactcctgtctccccggtgaggttgtataaactgttcccacggttgaaaacaacctatccgttatccgctatagtacttcgagaaacctagtaccacctttggattgttgacgcgttgcgctcagcacactaacccgtgtgtagcttgggtcgatgagtctggacatacctcactggcgacagtggtccaggctgcgttggcggcctactcatggtgaaagccatgagacgctagacatgaacaaggtgtgaagagtctattgagctactatagagtcctccggcccctgaatgcggctaatcctaaccatggagcaagtgctcacaagccagtgagttgcttgtcgtaatgcgcaagtccgtggcggaaccgactactttgggtgtccgtgtttcactttttacttttatgactgcttatggtgacaatttgatattgttaccatttagcttgtcaaatcaattgcaaaagatcctaaatcttatttatcaacttgcatcttgataactttaatttgaaaataatttgaaaattttaaca

SEQ ID NO: 20240 - DNA, 707 bp, synthetic construct
  source 1..707: mol_type = other DNA
aacagccttggggttgttcccactccaagggcccacgtggcggctagtactctggtacttcggtacctttgtacgcctgttttatctcccttcccaatgtaacttagaagttcttaaatcaatgctcaataggtggggcgcaaaccagcgctctcatgagcaagcactcctgtctccccggtgaggttgtataaactgttcccacggttgaaaacaacctatccgttatccgctatagtacttcgagaaacctagtaccacctttggattgttgacgcgttgcgctcagcacactaacccgtgtgtagcttgggtcgatgagtctggacatacctcactggcgacagtggtccaggctgcgttggcggcctactcatggtgaaagccatgagacgctagacatgaacaaggtgtgaagagtctattgagctactatagagtcctccggcccctgaatgcggctaatcctaaccatggagcaagtgctcacaggccagtgagttgcttgtcgtaatgcgcaagtccgtggcggaaccgactactttgggtgtccgtgtttcactttttacttttatgactgcttatggtgacaatttgatattgttaccatttagcttgtcaaatcaattgcaagagatcctaaatcttatttatcaacttgcatcttgataactttaatttgaaaaattaatttgaaaattttgaca

SEQ ID NO: 20241 - DNA, 699 bp, synthetic construct
  source 1..699: mol_type = other DNA
tgggaacagccttggggttgttcccactccaagggcccacgtggcggctagtactctggtacttcggtacctttgtacgcctgttttatctcccttcccaatgtaatttagaagctcttaaatcaaggctcaataggtggggcgcaaaccagcgctctcatgagcaagcactcctgtctccccggtgtggttgtataaactgttcccacggttgaaaacaacctatccgttatccgctatagtacttcgagaaacctagtatcacctttggattgttgacgcgttgcgctcagcacactaacccgtgtgtagcttgggtcgatgagtctggacataccccactggcgacagtggtccaggctgcgttggcggcctactcatggtgaaaaccatgagacgctagacatgaacaaggtgtgaagagtctattgagctactatagagtcctccggcccctgaatgcggctaatcctaaccatggagcaagtgctcacaggccagtgagttgcttgtcgtaatgcgcaagtccgtggcggaaccgactactttgggtgtccgtgtttcactttttacttttatgactgcttatggtgacaatttgatattgttaccatttagcttgtcaaattaattgcaaaagatcctaaatcttacttaccaacttgcattttgacaaccttgatttgaaaatttttaata

SEQ ID NO: 20242 - DNA, 699 bp, synthetic construct
  source 1..699: mol_type = other DNA
tgggaacagccttggggttgttcccactccaagggcccacgtggcggctagtactctggtacttcggtacctttgtacgcctgttttatctcccttcccaatgtaatttagaagctcttaaatcaaggctcaataggtggggcgcaaaccagcgctctcatgagcaagcactcctgtctccccggtgtggttgtataaactgttcccacggttgaaaacaacctatccgttatccgctatagtacttcgagaaacctagtatcacctttggattgttgacgcgttgcgctcagcacactaacccgtgtgtagcttgggtcgatgagtctggacataccccactggcgacagtggtccaggctgcgttggcggcctactcatggtgaaaaccatgagacgctagacatgaacaaggtgtgaagagtctattgagctactatagagtcctccggcccctgaatgcggctaatcctaaccatggagcaagtgctcacaggccagtgagttgcttgtcgtaatgcgcaagtccgtggcggaaccgactactttgggtgtccgtgtttcactttttacttttatgactgcttatggtgacaatttgatattgttaccatttagcttgtcaaattaattgcaaaagatcctaaatcttacttaccaacttgcattttgacaaccttgatttaaaaatttttaata

SEQ ID NO: 20243 - DNA, 633 bp, synthetic construct; identical to SEQ ID NO: 759
  source 1..633: mol_type = other DNA

SEQ ID NO: 20244 - DNA, 701 bp, synthetic construct
  source 1..701: mol_type = other DNA
ccttggggttgttcccaccccaagggcccacgtggcggctagtactctggtatttcggtacctttgtacgcctgttttatatccctccccaatgtaatttagaagctttcaaatcaaagctcaataggtggagcgcaagccagcgcttccgtgagcaagcacttctgtttccccggtgcggttgtatagactgttcccacggttgaaaacgacctatccgttatccgctatagtacttcgagaaacctagtatcacctttggattgttgatgcgttgcgctcaacacactaacccgtgtgtagcttgggtcgatgagtctggacgtaccccactggtgacagtggtccaggctgcgttggcggcctactcatggtgaaaaccatgagacgctagacatgaacaaggtgtgaagagtctattgagctactatagagtcctccggcccctgaatgcggctaatcttaaccatggagcaagtgctcacaaaccagtgagttgcttgtcgtaatgcgcaagtccgtggcggaaccgactactttgggtgtccgtgtttcactttttacttttatgactgcttatggtgacaatttaatattgttaccattcagctagttgaaataatcacataaaactttaaatcctatctaataattcacatttggatagtttcatttcgaggactttaaacctacttacaaag

SEQ ID NO: 20245 - DNA, 701 bp, synthetic construct
  source 1..701: mol_type = other DNA
agccttggggttgttcccactccaagggcccacgtggcggctagtactctggtacttcggtacctttgtacgcctgttttatctcccttcccaatgtaacttagaagttcttaaatcaatgctcaataggtggggcgcaaaccagcgctctcatgagcaagcactcctgtctccccggtgaggttgtataaactgttcccacggttgaaaacaacctatccgttatccgctatagtacttcgagaaacctagtaccacctttggattgttgatgcgttgcgctcagcacactaacccgtgtgtagcttgggtcgatgagtctggacatacctcactggcgacagtggtccaggctgcgttggcggcctactcatggtgaaagccatgagacgctagacatgaacaaggtgtgaagagtctattgagctactatagagtcctccggcccctgaatgcggctaatcctaaccatggagcaagtgctcacaggccagtgagttgcttgtcgtaatgcgcaagtccgtggcggaaccgactactttgggtgtccgtgtttcactttttacttttatgactgcttatggtgacaatttgatattgttaccatttagcttgtcaaatcaattgcaaaagatcctaaatcttatttatcaacttgcatcttgataactttaatttgaaaatatttgaaaattttaaca

SEQ ID NO: 20246 - DNA, 704 bp, synthetic construct
  source 1..704: mol_type = other DNA
gccttggggttgttcccactccaagggcccacgtggcggctagtactctggtacttcggtacctttgtacgcctgttttatctcccttcccaatgtaacttagaagttcttaaatcaatgctcaataggtggggcgcaaaccagcgctctcatgagcaagcactcctgtctccccggtgaggttgtataaactgttcccacggttgaaaacaacctatccgttatccgctatagtacttcgagaaacctagtaccacctttggattgttgacgcgttgcgctcagcacactaacccgtgtgtagcttgggtcgatgagtctggacatacctcactggcgacagtggtccaggctgcgttggcggcctactcatggtgaaagccatgagacgctagacatgaacaaggtgtgaagagtctattgagctactatagagtcctccggcccctgaatgcggctaatcctaaccatggagcaagtgctcacaggccagtgagttgcttgtcgtaatgcgcaagtccgtggcggaaccgactactttgggtgtccgtgtttcactttttacttttatgactgcttatggtgacaatttgatattgttaccatttagcttgtcaaatcaattgcaaaagatcctaactcttatttatcaacttgcatcttgataactttaatttgaaaatattaatttgaaaattataaca

SEQ ID NO: 20247 - DNA, 732 bp, synthetic construct
  source 1..732: mol_type = other DNA
aaaacaacttatccgttatccgtttaaaacagccttggggttgttcccaccccaagggcccacgtggcggctagtactctggtatctcggtacctttgtacgcctgttttatctcccttcccaacgcaacttagaagttttcaaatcgaggctcaataggtgaagcgcaaaccagcgctttcatgagcaagcacttctgtctccccggtgcagttgtatagactgtttccacggttgaaaacaacttatccgttatccgctatagtacttcgagaaacctagtatcacctttggattgttgatgcgttgcgctcagcacactaacccgtgtgtagcttgggtcgatgagtctggacgtaccccactggtgacagtggtccaggctgcgttggcggcctactcatggtgaaaaccatgagacgctaaacatgaacaaggtgtgaagagtctattgagctactatagagtcctccggcccctgaatgcggctaatcttaaccatggagcaagtgctcacaagccagtgagttgcttgtcgtaatgcgcaagtccgtggcggaaccgactactttgggtgtccgtgtttcactttttacttttatgactgcttatggtgacaatttaatattgttaccatttagcttgtcagatcaatcacgtgaaatcccaaatcttattcaataacctgtatttggataacttcatttgaaaatcctaaactcgttcgcaaac

SEQ ID NO: 20248 - DNA, 698 bp, synthetic construct
  source 1..698: mol_type = other DNA
tgggaacagccttggggttgttcccactccaagggcccacgtggcggctagtactctggtacttcggtacctttgtacgcctgttttatctcccttcccaatgtaatttagaagctcttaaatcaaggctcaataggtggggcgcaaaccagcgctcttatgagcaagcactcctgtctccccggtgtggttgtataaactgttcccacggttgaaaacaacctatccgttatccgctatagtacttcgagaaacctagtatcacctttggattgttgacgcgttgcgctcagcacactaacccgtgtgtagcttgggtcgatgagtctggacacaccccactggcgacagtggtccaggctgcgttggcggcctactcatggtgaaaaccatgagacgctagacatgaacaaggtgtgaagagtctattgagctactatagagtcctccggcccctgaatgcggctaatcctaaccatggagcaagtgctcacaggccagtgagttgcttgtcgtaatgcgcaagtccgtggcggaaccgactactttgggtgtccgtgtttcactttttacttttatgactgcttatggtgacaatttgatattgttaccatttagcttgtcaaattaattgcaaaagatcctaaatcttacttaccaacttgcattttgataaccttgatttgaaaattttaata

SEQ ID NO: 20249 - DNA, 636 bp, synthetic construct
  source 1..636: mol_type = other DNA
ccccagggcccaccgggcgttagtactctggtatcacggtaccttagtatgcctgttttatgttccctttcccccgcaactttagaagtaaccaagttatggctcaatagtcgccacacctccagtgtggttccgagcaagcacttctgttccccggttgcgtcctatatgttgtgtgaacggcagaaagggacaacatcgttacccgctcaactactacgggaagcccagtaccaccatggattgacttgagagttgcgttcggcgcacccccagcgtagctcaggccgatgaggctccgaataccccacgggcgaccgtgtcggagcctgcgttggcggcctgcccacgttgtaaagcgtgggacgctcatttcatgacatggtgcgaagagcctactgtgctagttgagagtcctccggcccctgaatgtggataatcctaaccactgaacctacgggcgcaagccagcgtctggtaggccgtaacgcgcaagtcggtggcggaaccaactactttgggtgtccgtgtttccttttatctcctttgaatgtttatggtgacaattgttgtgtacagttgttgccatagtttgcattcaaaaataaacttaacacttcccaattatttgtcaca

SEQ ID NO: 20250 - DNA, 722 bp, synthetic construct
  source 1..722: mol_type = other DNA
ttcccacccacagggcccactgggcgctagcacactggtatcacggtacctttgtgcgcctgttttatcaaccctaccccaaggcaatatagaagcacgccacaaaaggtcaataggtaacccagtactccaactgggtcttgaccaagcacttctgttaccccggactgagtatcaataggctgctcgcgcggctgaaggagaaaacgttcgttacccggccaattacttcgagaaacctagtaccaccatgaaggttgcgcggcgtttcgttccgcacaaccccagtgcagatcaggccgatgagtcaccgcattccccacgggcgaccgtggcggtggctgcgctggcggcctgcccatggggcgacccatgggacgcttcaatactgacatggtgtgaagagtctattgagctaattggtagtcctccggcccctgaatgcggctaatcctaactgcggagcagatacccacataccagtgggcagtctgtcgtaacgggcaactctgcagcggaaccgactactttgggtgtccgtgtttccttttattcttatactggctgcttatggtgacaattgagagattgttgccatatagctattggattggccatccggtgacaaacagagcaatcgtctacctatttgttggttttgtcccattggattttaaagttctaaaaacccttgattttatcttagtactcaatacggcaaa

SEQ ID NO: 20251 - DNA, 698 bp, synthetic construct
  source 1..698: mol_type = other DNA
tgggaacagccttggggttgttcccactccaagggcccacgtggtggctagtactctggtacttcggtacctttgtacgcctgttttatctcccttcccaatgtaatttagaagctcttaaatcaaggctcaataggtggggcgcaaaccagcgctctcatgagcaagcactcctgtctccccggtatggttgtataaactgttcccacggttgaaaacaacctatccgttatccgctatagtacttcgagaaacctagtatcacctttggattgttgacgcgttgcgctcagcacactaacccgtgtgtagcttgggtcgatgagtctggacataccccactggcgacagtggtccaggctgcgttggcggcctactcatggtgaaaaccatgagacgctagacatgaacaaggtgtgaagagtctattgagctactatagagtcctccggcccctgaatgcggctaatcctaaccatggagcaagtgctcacaggccagtgagttgcttgtcgtaatgcgcaagtccgtggcggaaccgactactttgggtgtccgtgtttcactttttacttttatgactgcttatggtgacaatttgatattgttaccatttagcttgtcaaattaattgcaaaagatcctaaatcttacttaccaacttgcattttgacaaccttggtttgaaaattttaata

SEQ ID NO: 20252 - DNA, 701 bp, synthetic construct
  source 1..701: mol_type = other DNA
ccttggggttgttcccaccccaagggcccacgtggcggctagtactctggtatttcggtacctttgtacgcctgttttatctccctccccaatgtaacttagaagttttcaaatcaaagctcaataggtggagcgcaaaccagcgttttcatgagcaagcactcctgtttccccggtgcgattgtatagactgttcccacggttgaaaacaatctatccgttatccgctatagtacttcgagaaacctagtatcacctttggattgttgatgcgttgcgctcagcacactaacccgtgtgtagcttgggtcgatgagtctggacataccccactggtgacagtggtccaggctgcgttggcggcctactcatggtgaaaaccatgagacgctagacatgaacaaggtgtgaagagtctattgagctactatagagtcctccggcccctgaatgcggctaatcttaaccatggagcaagtgctcacaaaccagtgagttgcttgtcgtaatgcgcaagtccgtggcggaaccgactactttgggtgtccgtgtttcactttttacttttatgactgcttatggtgacaatttgatattgttaccatttagcttgtcaaattaatcacacaaagccttaaatcttatctatcaatttgcatttggatagcttcattttgaagattctaaacctgttcacaaag

SEQ ID NO: 20253 - DNA, 691 bp, synthetic construct
  source 1..691: mol_type = other DNA
gccttggggttgttcccactccaagggcccacgtggcggctagtactctggtacttcggtacctttgtacgcctgttttatctcccttcccaatgtaatttagaagctcttaaatcaaggctcaataggtggggcgcaaaccagcgctctcatgagcaagcactcctgtctccccggtgtggttgtataaactgttcccacggttgaaaacaacctatccgttatccgctatagtacttcgagaaacctagtatcacctttggattgttgacgcgttgcgctcagcacactaacccgtgtgtagcttgggtcgatgagtctggacataccccactggcgacagtggtccaggctgcgttggcggcctactcatggtgaaaaccatgagacgctagacatgaacaaggtgtgaagagtctattgagctactatagagtcctccggcccctgaatgcggctaatcctaaccatggagcaagtgctcacaggccagtgagttgcttgtcgtaatgcgtaagtccgtggcggaaccgactactttgggtgtccgtgtttcactttttacttttatgactgcttatggtgacaatttgatattgttaccatttagcttgtcaaattaattgcaaaagatcctaaatcttacttaacaacttgcattttgacaactttgatttgaaaatttttaata

SEQ ID NO: 20254 - DNA, 691 bp, synthetic construct
  source 1..691: mol_type = other DNA
gccttggggttgttcccactccaagggcccacgtggcggctagtactctggtacttcggtacctttgtacgcctgttttatctcccttcccaatgtgatttagaagctcttaaatcaaggctcaataggtggggcgcaaaccagcgctctcatgagcaagcactcctgtctccccggtgtggttgtataaactgttcccacggttgaaaacaacctatccgttatccgctatagtacttcgagaaacctagtatcacctttggattgttgacgcgttgcgctcagcacactaacccgtgtgtagcttgggtcgatgagtctggacataccccactggcgacagtggtccaggctgcgttggcggcctactcatggtgaaaaccatgagacgctagacatgaacaaggtgtgaagagtctattgagctactatagagtcctccggcccctgaatgcggctaatcctaaccatggagcaagtgctcacaggccagtgagttgcttgtcgtaatgcgcaagtccgtggcggaaccgactactttgggtgtccgtgtttcactttttacttttatgactgcttatggtgacaatttgatattgttaccatttagcttgtcaaatcaattgcaaaagatcctaaatcttacttaccaacttgcattttgataaccttgatttgaaaatttttaata

SEQ ID NO: 20255 - DNA, 691 bp, synthetic construct
  source 1..691: mol_type = other DNA
ggtcttggggttgttcccactccaagggcccacgtggcggctagtactctggtacttcggtacctttgtacgcctgttttatctcccttcccaatgtaatttagaagctcttaaatcaaggctcaataggtggggcgcaaaccagcgctctcatgagcaagcactcctgtctccccggtgtggttgtataaactgttcccacggttgaaaacaacctatccgttatccgctatagtacttcgagaaacctagtatcacctttggattgttgacgcgttgcgctcagcacactaacccgtgtgtagcttgggtcgatgagtctggacataccccactggcgacagtggtccaggctgcgttggcggcctactcatggtgaaaaccatgagacgctagacatgaacaaggtgtgaagagtctattgagctactatagagtcctccggcccctgaatgcggctaatcctaaccatggagcaagtgctcacaggccagtgagttgcttgtcgtaatgcgcaagtccgtggcggaaccgactactttgggtgtccgtgtttcactttttacttttatgactgcttatggtgacaatttgatattgttaccatttagcttgtcaaattaattgcaaaagatcctaaatcttacttaccaatttgcattttgataaccttgatttgaaaattttaata

SEQ ID NO: 20256 - DNA, 691 bp, synthetic construct
  source 1..691: mol_type = other DNA
gggcttggggttgttcccactccaagggcccacgtggcggctagtactctggtacttcggtacctttgtacgcctgttttatctcccttcccaatgtaatttagaagctcttaaatcaaggctcaataggtggggcgcaaaccagcgctctcatgagcaagcactcctgtctccccggtgtggttgtataaactgttcccacggttgaaaacaacctatccgttatccgctatagtacttcgagaaacctagtatcacctttggattgttgacgcgttgcgctcagcacactaacccgtgtgtagcttgggtcgatgagtctggacataccccactggcgacagtggtccaggctgcgttggcggcctactcatggtgaaaaccatgagacgctagacatgaacaaggtgtgaagagtctattgagctactatagagtcctccggcccctgaatgcggctaatcctaaccatggagcaagtgctcacaggccagtgagttgcttgtcgtaatgcgcaagtccgtggcggaaccgactactttgggtgtccgtgtttcactttttacttttatgactgcttatggtgacaatttgatattgttaccatttagcttgtcaaattaattgcaaaggatcctaaatcttacttaccaatttgcattttgacaatcttgatttgaaaattttaata

SEQ ID NO: 20257 - DNA, 691 bp, synthetic construct
  source 1..691: mol_type = other DNA
gggcttggggttgttcccactccaagggcccacgtggcggctagtactctggtacttcggtacctttgtacgcctgttttatctcccttcccaatgtaatttagaagctcttaaatcaaggctcaataggtggggcgcaaaccagcgctctcatgagcaagcactcctgtctccccggtgtggttgtataaactgttcccacggttgaaaacaacctatccgttatccgctatagtacttcgagaaacctagtatcacctttggattgttgacgcgttgcgctcagcacactaacccgtgtgtagcttgggtcgatgagtctggacataccccactggcgacagtggtccaggctgcgttggcggcctactcatggtgaaaaccatgagacgctagacatgaacaaggtgtgaagagtctattgagctactatagagtcctccggcccctgaatgcggctaatcctaaccatggagcaagtgctcacaggccagtgagttgcttgtcgtaatgcgcaagtccgtggcggaaccgactactttgggtgtccgtgtttcactttttacttttatgactgcttatggtgacaatttgatattgttaccatttagcttgtcaaattaattgcaaaggatcctaaatctcacttaccaatttgcattttgacaatcttgatttgaaaattttaata

SEQ ID NO: 20258 - DNA, 691 bp, synthetic construct
  source 1..691: mol_type = other DNA
ggtcttggggttgttcccactccaagggcccacgtggcggctagtactctggtacttcggtacctttgtacgcctgttttatctcccttcccaatgtaatttagaagctcttaaatcaaggctcaataggtggggcgcaaaccagcgctctcatgagcaagcactcctgtctccccggtgtggttgtataaactgttcccacggttgaaaacaacctatccgttatccgctatagtacttcgagaaacctagtatcacctttggattgttgacgcgttgcgctcagcacactaacccgtgtgtagcttgggtcgatgagtctggacataccccactggcgacagtggtccaggctgcgttggcggcctactcatggtgaaaaccatgagacgctagacatgaacaaggtgtgaagagtctattgagctactatagagtcctccggcccctgaatgcggctaatcctaaccatggagcaagtgctcacaggccagtgagttgcttgtcgtaatgcgcaagtccgtggcggaaccgactactttgggtgtccgtgtttcactttttacttttatgactgcttatggtgacaatttgatattgttaccatttagcttgtcaaattaattgcaaaggatcctaaatcttacttaccaatttgcattttgataatcttgatttgaaaattttaata

SEQ ID NO: 20259 - DNA, 710 bp, synthetic construct
  source 1..710: mol_type = other DNA
ccacttggcggctagtacactggtattacggtacccttgtacgcctgttttacacccctttcccccgtaacttagaagctttaaatccaagttcaacagtcagtggtacaacccagtactaccacgaacaagcacctctgttaccccggtgagattgcataggccgtccccacggctaaaagcgattgatccgttatccgctcttgtacttcgagaagcctagtaagaccttgggatcctcgatgcgttgcgctcaacactcaaccccagagtgtagcttgggctgatgagtctggacattcctcaccggtgacggtggtccaggctgcgttggcggcctacctgtggcccaaagccacaggacgctagttgtgaacaaggtgtgaagagcctattgagctacaagagagtcctccggcccctgaatgcggctaatcccaaccacggagcaggcgattgcaacccagcaactagcctgtcgtaacgcgcaagtctgtggcggaaccgactactttgggtgtccgtgtttccttttattacataatggctgcttatggtgacaatcacagattgttgtcataaagcgaattggattggccatccggtgagaattaaaacaattatttacttatttgttggatttgttcctatacacacccaaacaccttgcttgattgaagtaattctgttgataagacaacactattaca

SEQ ID NO: 20260 - DNA, 690 bp, synthetic construct
  source 1..690: mol_type = other DNA
gccttggggttgttcccactccaagggcccacgtggcggctagtactctggtacttcggtacctttgtacgcctgttttatctcccttcccaatgtaacttagaagttcttaaatcaatgctcaataggtggggcgcaaaccagcgctctcatgagcaagcactcctgtctccccggtgaggttgtataaactgttcccacggttgaaaacaacctatccgttatccgctatagtacttcgagaaacctagtaccacctttggattgttgacgcgttgcgctcagcacactaacccgtgtgtagcttgggtcgatgagtctggacatacctcactggcgacagtggtccaggctgcgttggcggcctactcatggtgaaagccatgagacgctagacatgaacaaggtgtgaagagtctattgagctactatagagtcctccggcccctgaatgcggctaatcctaaccatggagcaagtgctcacaggccagtgagttgcttgtcgtaatgcgcaagtccgtggcggaaccgactactttgggtgtccgtgtttcactttttacttttatgactgcttatggtgacaatttgatattgttaccatttagcttgtcaaatcaattgcaaaagatcctaaatcttatttatcaacttgcatcttgataactttaatttgaaaattttaaca

SEQ ID NO: 20261 - DNA, 690 bp, synthetic construct
  source 1..690: mol_type = other DNA
gccttggggttgttcccactccaagggcccacgtggcggctagtactctggtacttcggtacctttgtacgcctgttttatctcccttcccaatgtaacttagaagtttttaaatcaatgctcaataggtggggcacaaaccagtgctctcatgagcaagcactcctgtctccccggtgaggttgtataaactgttcccacggttgaaaacaacctatccgttatccgctatagtacttcgagaaacctagtaccacctttggattgttgacgcgttgcgctcagcacactaacccgtgtgtagcttgggtcgatgagtctggacatacctcactggcgacagtggtccaggctgcgttggcggcctactcatggtgaaagccatgagacgctagacatgaacaaggtgtgaagagtctattgagctactatagagtcctccggcccctgaatgcggctaatcctaaccatggagcaagtgctcacaggccagtgagttgcttgtcgtaatgcgcaagtccgtggcggaaccgactactttgggtgtccgtgtttcactttttacttttatgactgcttatggtgacaatttgatattgttaccatttagcttgtcaaatcaattgtaaaagatcctaaatcttatttatcaacttgcatcttgataactttaatttgaaaattttaaca

SEQ ID NO: 20262 - DNA, 691 bp, synthetic construct
  source 1..691: mol_type = other DNA
gccttggggttgttcccactccaagggcccacgtggcggctagtactctggtacttcggtacctttgtacgcctgttttatctcccttcccaatgtaatttagaagctcttaaatcaaggctcaataggtggggcgcaaaccagcgctctcatgagcaagcactcctgtctccccggtgtggttgtataaactgttcccacggttgaaaacaacctatccgttatccgctatagtacttcgagaaacctagtatcacctttggattgttgacgcgttgcgctcagcacactaacccgtgtgtagcttgggtcgatgagtctggacataccccactggcgacagtggtccaggctgcgttggcggcctactcatggtgaaaaccatgagacgctagacatgaacaaggtgtgaagagtctattgagctactatagagtcctccggcccctgaatgcggctaatcctaaccatggagcaagtgctcacaggccagtgagttgcttgtcgtaatgcgcaagtccgtggcggaaccgactactttgggtgtccgtgtttcactttttacttttatgactgcttatggtgacaatttgatattgttaccatttagcttgtcaaattaattgcaaaagatcctaaatcttacttaccaacttgcattttgacaaccttgatttgaaaatttttaata

SEQ ID NO: 20263 - DNA, 707 bp, synthetic construct
  source 1..707: mol_type = other DNA
cactgggcgctagcacactggtatcccggtacctttgtgcgcctgttttatttaccccacccccagctgtaatttagaagtacgacacacatggtcaatagatggctcagtgcaccaactgggtttagaccaagcacttctgttaccccggaccgagtatcaataagctgctcgcgcggctgaaggagaaaacgttcgttacccggccaattacttcgagaaacctagtaccaccatggaggttgcgcagcgtttcgctccgcacagccccagtgtagatcaggccgatgagtcaccgcattcctcacgggcgaccgtggcggtggctgcgttggcggcctgcccatggggtaacccatgggacgcttcaatactaacatggtgtgaagagtctattgagctaattggtagtcctccggcccctgaatgcggctaatcctaactgcggagcagatactcacatgccagtgggcagtctgtcgtaacgggcaactctgcagcggaaccgactactttgggtgtccgtgtttccttttattcttatactggctgcttatggtgacaattgagaaattgttaccatatagctattggattggccatccagtgacaaacagagcaattgtttacctatttgtcggcttcataccgttaaacttaagagttttgaagacccttaacttgattatactattcaactctgtaaa

SEQ ID NO: 20264 - DNA, 691 bp, synthetic construct
  source 1..691: mol_type = other DNA
ggacttggggttgttcccactccaagggcccacgtggcggctagtactctggtacttcggtacctttgtacgcctgttttatctcccttcccaatgtaatttagaagctcttaaatcaaggctcaataggtggggcgcaaaccagcgctctcatgagcaagcactcctgtctccccggtgtggttgtataaactgttcccacggttgaaaacaacctatccgttatccgctatagtacttcgagaaacctagtatcacctttggattgttgacgcgttgcgctcagcacactaacccgtgtgtagcttgggtcgatgagtctggacacaccccactggcgacagtggtccaggctgcgttggcggcctactcatggtgaaaaccatgagacgctagacatgaacaaggtgtgaagagtctattgagctactatagagtcctccggcccctgaatgcggctaatcctaaccatggagcaagtgctcacaggccagtgagttgcttgtcgtaatgcgcaagtccgtggcggaaccgactactttgggtgtccgtgtttcactttttacttttatgactgcttatggtgacaatttgatattgttaccatttagcttgtcaaattaattgcaaaaggccctaaatcttacctaccaacttgcattttgacaaccttgatttgaaaattttaata

SEQ ID NO: 20265 - DNA, 697 bp, synthetic construct
  source 1..697: mol_type = other DNA
cgcctgcacactggtatcccggtacctttgtgtgcctgttttattcaccctaccccattgtaacctagaagctaatcaaatatggtcactaggtagcccagtgcgccaactgggtcttgaccaagcacttctgttaccccggactgagtatcaataggctgcttacgcggccgaaggagaaaacgttcgttacccggccaattacttcgagaaacccagtaccaccatgaaggttgcgcagcgtttcgctccgcacaaccccagtgtagatcaggtcgatgggtcaccgcatccctcacgggtgaccgtggcggtggctgcgctggcggcctgcccatggggtatcccatgggacgcttcaatactgacatggtgcgaagagtctattgagctaattggtagtcctccggcccctgaatgcggctaatcctaactgcggagcagatacccacataccagtgggcagtctgtcgtaatgggcaactctgcagcggaaccgactactttgggtgtccgtgtttctttttattcctatttggctgcttatggtgacaattgaagaattgttaccatatagctattggattggccatccggtgactaatagagccattgtttacctctttgttggttttgtaccactgaatcacatagttctaaatactctaaatttgattttagtgctcaacacatcaaa

SEQ ID NO: 20266 - DNA, 690 bp, synthetic construct
  source 1..690: mol_type = other DNA
agccttggggttgttcccactccaagggcccacgtggcggctagtactctggtacttcggtacctttgtacgcctgttttatctcccttcccaatgtaatttagaagctttcaaatcaaggctcaataggtggggcgcaaaccagcgctctcatgagcaagcactcctgtctccccggtgtggttgtataaactgttcccacggttgaaaacaacctatccgttatccgctatagtacttcgagaaacctagtatcacctttggattgttgacgcgttgcgctcagcacactaacccgtgtgtagcttgggtcgatgagtctggacataccccactggcgacagtggtccaggctgcgttggcggcctactcatggtgaaaaccatgagacgctagacatgaacaaggtgtgaagagtctattgagctactatagagtcctccggcccctgaatgcggctaatcctaaccatggagcaagtgctcacaggccagtgagttgcttgtcgtaatgcgcaagtccgtggcggaaccgactactttgggtgtccgtgtttcactttttacttttatgactgcttatggtgacaatttgatattgttaccatttagctgtcaaattaattgcaaaagatcctaagtcttacttaccaatttgcattttgataaccttggtttgaaaactttaata

SEQ ID NO: 20267 - DNA, 690 bp, synthetic construct
  source 1..690: mol_type = other DNA
agccttggggttgttcccactccaagggcccacgtggcggctagtactctggtacttcggtacctttgtacgcctgttttatctcccttcccaatgtaatttagaagcttttaaatcaaggctcaataggtggggcgcaaaccagcgctctcatgagcaagcactcctgtctccccggtgtggttgtataaactgttcccacggttgaaaacaacctatccgttatccgctatagtacttcgagaaacctagtatcacctttggattgttgacgcgttgcgctcagcacactaacccgtgtgtagcttgggtcgatgagtctggacataccccactggcgacagtggtccaggctgcgttggcggcctactcatggtgaaaaccatgagacgctagacatgaacaaggtgtgaagagtctattgagctactatagagtcctccggcccctgaatgcggctaatcctaaccatggagcaagtgctcacaggccagtgagttgcttgtcgtaatgcgcaagtccgtggcggaaccgactactttgggtgtccgtgtttcactttttacttttatgactgcttatggtgacaatttgatattgttaccatttagctgtcaaattaattgcaaaagatcctaagtcttacttaccaatttgcattttgataaccttgatttgaaaattttaata

SEQ ID NO: 20268 - DNA, 683 bp, synthetic construct
  source 1..683: mol_type = other DNA
agttgttcccactccaagggcccacgtggcggctagtactctggtacttcggtacctttgtacgcctgttttatctcccttcccaatgtaatttagaagctcttaaatcaaggctcaataggtggggcgcaaaccagcgctctcacgagcaagcactcctgtctccccggtgcggttgtataaactgttcccacggttgaaaacgacctatccgttatccgctatagtacttcgagaaacctagtatcacctttggattgttgacgcgttgcgctcagcacactaacccgtgtgtagcttgggtcgatgagtctggacataccccactggcgacagtggtccaggctgcgttggcggcctactcatggtgaaaaccatgagacgctagacatgaacaaggtgtgaagagtctattgagctactatagagtcctccggcccctgaatgcggctaatcctaaccatggagcaagtgctcacaggccagtgagttgcttgtcgtaatgcgcaagtccgtggcggaaccgactactttgggtgtccgtgtttcactttttacttttatgactgcttatggtgacaatttaatattgttaccatttagcttgtcaaattaattgcaaaacatcctaaatcttacttaccaacttgcattttgataaccttggtttgaaaatttcaata

SEQ ID NO: 20269 - DNA, 689 bp, synthetic construct
  source 1..689: mol_type = other DNA
gccttggggttgttcccactccaagggcccacgtggcggctagtactctggtacttcggtacctttgtacgcctgttttatctcccttcccaatgtaatttagaagctttcaaatcaaggctcaataggtggggcgcaaaccagcgctctcatgagcaagcactcctgtctccccggtgtggttgtataaactgttcccacggttgaaaacaacctatccgttatccgctatagtacttcgagaaacctagtatcacctttggattgttgacgcgttgcgctcagcacactaacccgtgtgtagcttgggtcgatgagtctggacataccccactggcgacagtggtccaggctgcgttggcggcctactcatggtgaaaaccatgagacgctagacatgaacaaggtgtgaagagtctattgagctactatagagtcctccggcccctgaatgcggctaatcctaaccatggagcaagtgctcacaggccagtgagttgcttgtcgtaatgcgcaagtccgtggcggaaccgactactttgggtgtccgtgtttcactttttacttttatgactgcttatggtgacaatttgatattgttaccatttagctgtcaaattaattgcaaaagatcctaagtcttacttaccaatttgcattttgataaccttggtttgaaaactttaata

SEQ ID NO: 20270 - DNA, 689 bp, synthetic construct
  source 1..689: mol_type = other DNA
gccttggggttgttcccactccaagggcccacgtggcggctagtactctggtacttcggtacctttgtacgcctgttttatctcccttcccaatgtaatttagaagcttttaaatcaaggctcaataggtggggcgcaaaccagcgctctcatgagcaagcactcctgtctccccggtgtggttgtataaactgttcccacggttgaaaacaacctatccgttatccgctatagtacttcgagaaacctagtatcacctttggattgttgacgcgttgcgctcagcacactaacccgtgtgtagcttgggtcgatgagtctggacataccccactggcgacagtggtccaggctgcgttggcggcctactcatggtgaaaaccatgagacgctagacatgaacaaggtgtgaagagtctattgagctactatagagtcctccggcccctgaatgcggctaatcctaaccatggagcaagtgctcacaggccagtgagttgcttgtcgtaatgcgcaagtccgtggcggaaccgactactttgggtgtccgtgtttcactttttacttttatgactgcttatggtgacaatttgatattgttaccatttagctgtcaaattaattgcaaaagatcctaagttttacttaccaatttgcattttgataaccttgatttgaaaattttaata

SEQ ID NO: 20271 - DNA, 689 bp, synthetic construct
  source 1..689: mol_type = other DNA
gccttggggttgttcccactccaagggcccacgtggcggctagtactctggtacttcggtacctttgtacgcctgttttatctcccttcccaatgtaatttagaagcttttaaatcaaggctcaataggtggggcgcaaaccagcgctctcatgagcaagcactcctgtctccccggtgtggttgtataaactgttcccacggttgaaaacaacctatccgttatccgctatagtacttcgagaaacctagtatcacctttggattgttgacgcgttgcgctcagcacactaacccgtgtgtagcttgggtcgatgagtctggacataccccactggcgacagtggtccaggctgcgttggcggcctactcatggtgaaaaccatgagacgctagacatgaacaaggtgtgaagagtctattgagctactatagagtcctccggcccctgaatgcggctaatcctaaccatggagcaagtgctcacaggccagtgagttgcttgtcgtaatgcgcaagtccgtggcggaaccgactactttgggtgtccgtgtttcactttttacttttatgactgcttatggtgacaatttgatattgttaccatttagctgtcaaattaattgcaaaagatcctaagtcttacttaccaatttgcattttgataaccttgatttgaaaactttaata

SEQ ID NO: 20272 - DNA, 689 bp, synthetic construct
  source 1..689: mol_type = other DNA
gctttggggttgttcccactccaagggcccacgtggcggctagtactctggtacttcggtacctttgtacgcctgttttatctcccttcccaatgtaatttagaagcttttaaatcaaggctcaataggtggggcgcaaaccagcgctctcatgagcaagcactcctgtctccccggtgtggttgtataaactgttcccacggttgaaaacaacctatccgttatccgctatagtacttcgagaaacctagtatcacctttggattgttgacgcgttgcgctcagcacactaacccgtgtgtagcttgggtcgatgagtctggacataccccactggcgacagtggtccaggctgcgttggcggcctactcatggtgaaaaccatgagacgctagacatgaacaaggtgtgaagagtctattgagctactatagagtcctccggcccctgaatgcggctaatcctaaccatggagcaagtgctcacaggccagtgagttgcttgtcgtaatgcgcaagtccgtggcggaaccgactactttgggtgtccgtgtttcactttttacttttatgactgcttatggtgacaatttgatattgttaccatttagctgtcaaattaattgcaaaagatcctaagtcttacttaccaatttgcattttgataaccttgatttgaaaattttaata

SEQ ID NO: 20273 - DNA, 689 bp, synthetic construct
  source 1..689: mol_type = other DNA
gccttggggttgttcccactccaagggcccacgtggcggctagtactctggtacttcggtacctttgtacgcctgttttatctcccttcccaatgtaatttagaagcttttaaatcaaggctcaataggtggggcgcaaaccagcgctctcatgagcaagcactcctgtctccccggtgtggttgtataaactgttcccacggttgaaaacaacctatccgttatccgctatagtacttcgagaaacctagtatcacctttggattgttgacgcgttgcgctcagcacactaacccgtgtgtagcttgggtcgatgagtctggacacaccccactggcgacagtggtccaggctgcgttggcggcctactcatggtgaaaaccatgagacgctagacatgaacaaggtgtgaagagtctattgagctactatagagtcctccggcccctgaatgcggctaatcctaaccatggagcaagtgctcacaggccagtgagttgcttgtcgtaatgcgcaagtccgtggcggaaccgactactttgggtgtccgtgtttcactttttacttttatgactgcttatggtgacaatttgatattgttaccatttagctgtcaaattaattgcaaaagatcctaagtcttacttaccaatttgcattttgataaccttgatttgaaaattttaata

SEQ ID NO: 20274 - DNA, 689 bp, synthetic construct
  source 1..689: mol_type = other DNA
gccttggggttgttcccactccaagggcccacgtggcggctagtactctggtacttcggtacctttgtacgcctgttttatctcccttcccaatgtaatttagaagcttttaaatcaaggctcaataggtggggcgcaaaccagcgctctcatgagcaagcactcctgtctccccggtgtggttgtataaactgttcccacggttgaaaacaacctatccgttatccgctatagtacttcgagaaacctagtatcacctttggattgttgacgcgttgcgctcagcacactaacccgtgtgtagcttgggtcgatgagtctggacataccccactggcgacagtggtccaggctgcgttggcggcctactcatggtgaaaaccatgagacgctagacatgaacaaggtgtgaagagtctattgagctactatagagtcctccggcccctgaatgcggctaatcctaaccatggagcaagtgctcacaggccagtgagttgcttgtcgtaatgcgcaagtccgtggcggaaccgactactttgggtgtccgtgtttcactttttacttttatgactgcttatggtgacaatttgatattgttaccatttagctgtcaaattaattgcaaaagatcctaagtcttacttaccaatttgcattttgataaccttgatttgaaaattttaata

SEQ ID NO: 20275 - DNA, 689 bp, synthetic construct
  source 1..689: mol_type = other DNA
gccttggggttgttcccactccaagggcccacgtggcggctagtactctggtacttcggtacctttgtacgcctgttttatctcccttcccaatgtaatttagaagcttttaaatcaaggctcaataggtggggcgcaaaccagcgctctcatgagcaagcactcctgtctccccggtgtggttgtataaactgttcccacggttgaaaacaacctatccgttatccgctatagtacttcgagaaacctagtatcacctttggattgttgacgcgttgcgctcagcacactaacccgtgtgtagcttgggtcgatgagtctggacataccccactggcgacagtggtccaggctgcgttggcggcctactcatggtgaaaaccatgagacgctagacatgaacaaggtgtgaagagtctattgagctactatagagtcctccggcccctgaatgcggctaatcctaaccatggagcaagtgctcacaggccagtgagttgcttgtcgtaatgcgcaagtccgtggcggaaccgactactttgggtgtccgtgtttcactttttacttttatgactgcttatggtgacaatttgatattgttaccatttagctgtcaaattaattgcaaaagatcctaaatcttacttaccaatttgcattttgataaccttgatttgaaaattttaata

SEQ ID NO: 20276 - DNA, 689 bp, synthetic construct
  source 1..689: mol_type = other DNA
gccttggggttgttcccactccaagggcccacgtggcggctagtactctggtacttcggtacctttgtacgcctgttttatctcccttcccaatgtaatttagaagcttttaaatcaaggctcaataggtggggcgcaagccagcgctctcatgagcaagcactcctgtctccccggtgtggttgtataaactgttcccacggttgaaaacaacctatccgttatccgctatagtacttcgagaaacctagtatcacctttggattgttgacgcgttgcgctcagcacactaacccgtgtgtagcttgggtcgatgagtctggacataccccactggcgacagtggtccaggctgcgttggcggcctactcatggtgaaaaccatgagacgctagacatgaacaaggtgtgaagagtctattgagctactatagagtcctccggcccctgaatgcggctaatcctaaccatggagcaagtgctcacaggccagtgagttgcttgtcgtaatgcgcaagtccgtggcggaaccgactactttgggtgtccgtgtttcactttttacttttatgactgcttatggtgacaatttgatattgttaccatttagctgtcaaattaattgcaaaagatcctaagtcttacttaccaatttgcattttgataaccttgatttgaaaattttaata

SEQ ID NO: 20277 - DNA, 689 bp, synthetic construct
  source 1..689: mol_type = other DNA
gccttggggttgttcccactccaagggcccacgtggcggctagtactctggtacttcggtacctttgtacgcctgttttatctcccttcccaatgtaatttagaagcttttaaatcaaggctcaataggtggggcgcaaaccagcgctctcatgagcaagcactcctgtctccccggtgtggttgtataaactgttcccacggttgaaaacaacctatccgttatccgctatagtacttcgagaaacctagtatcacctttggattgttgacgcgttgcgctcagcacactaacccgtgtgtagcttgggtcgatgagtctggacataccccactggcgacagtggtccaggctgcgttggcggcctactcatggtgaaaaccatgagacgctagacatgaacaaggtgtgaagagtctattgagctactatagagtcctccggcccctgaatgcggctaatcctaaccatggagcaagtgctcacaggccagtgagttgcttgtcgtaatgcgcaagtccgtggcggaaccgactactttgggtgtccgtgtttcattttttacttttatgactgcttatggtgacaatttgatattgttaccatttagctgtcaaattaattgcaaaagatcctaagtcttacttaccaatttgcattttgataaccttgatttgaaaattttaata

SEQ ID NO: 20278 - DNA, 689 bp, synthetic construct
  source 1..689: mol_type = other DNA
gccttggggttgttcccactccaagggcccacgtggcggctagtactctggtactttggtacctttgtacgcctgttttatctcccttcccaatgtaatttagaagcttttaaatcaaggctcaataggtggggcgcaaaccagcgctctcatgagcaagcactcctgtctccccggtgtggttgtataaactgttcccacggttgaaaacaacctatccgttatccgctatagtacttcgagaaacctagtatcacctttggattgttgacgcgttgcgctcagcacactaacccgtgtgtagcttgggtcgatgagtctggacataccccactggcgacagtggtccaggctgcgttggcggcctactcatggtgaaaaccatgagacgctagacatgaacaaggtgtgaagagtctattgagctactatagagtcctccggcccctgaatgcggctaatcctaaccatggagcaagtgctcacaggccagtgagttgcttgtcgtaatgcgcaagtccgtggcggaaccgactactttgggtgtccgtgtttcactttttacttttatgactgcttatggtgacaatttgatattgttaccatttagctgtcaaattaattgcaaaagatcctaagtcttacttaccaatttgcattttgataaccttgatttgaaaattttaata

SEQ ID NO: 20279 - DNA, 689 bp, synthetic construct
  source 1..689: mol_type = other DNA
gccttggggttgttcccactccaagggcccacgtggcggctagtactctggtacttcggtacctttgtacgcctgttttatctcccttcccaatgtaatttagaagcttttacatcaaggctcaataggtggggcgcaaaccagcgctctcatgagcaagcactcctgtctccccggtgtggttgtataaactgtttccacggttgaaaacaacctatccgttatccgctatagtacttcgagaaacctagtatcacctttggattgttgacgcgttgcgctcagcacactaacccgtgtgtagcttgggtcgatgagtctggacataccccactggcgacagtggtccaggctgcgttggcggcctactcatggtgaaaaccatgagacgctagacatgaacaaggtgtgaagagtctattgagctactatagagtcctccggcccctgaatgcggctaatcctaaccatggagcaagtgctcacaggccagtgagttgcttgtcgtaatgcgcaagtccgtggcggaaccgactactttgggtgtccgtgtttcactttttacttttatgactgcttatggtgacaatttgatattgttaccatttagctgtcaaattaattgcaaaagatcctaagtcttacttaccaatttgcattttgataaccttgatttgaaaattttaata

SEQ ID NO: 20280 - DNA, 689 bp, synthetic construct
  source 1..689: mol_type = other DNA
gccttggggttgttcccactccaagggcccacgtggcggctagtactctggtacttcggtacctttgtacgcctgttttatctcccttcccaatgtaatttagaagcttttaaatcaaggctcaataggtggggcgcaaaccagcgctctcatgagcaagcactcctgtctccccggtgtggttgtataaactgttcccacggttgaaaacaacctatccgttatccgctatagtacttcgagaaacctagtatcacctttggattgttgacgcgttgcgctcagcacactaacccgtgtgtagcttgggtcgatgagtctggacataccccactggcgacagtggtccaggctgcgttggcggcctactcatggtgaaaaccatgagacgctagacatgaacaaggtgtgaagagtctattgagctactatagagtcctccggcccctgaatgcggctaatcctaaccatggagcaagtgctcacaggccagtgagttgcttgtcgtaatgcgcaagtccgtggcggaaccgactactttgggtgtccgtgtttcactttttacttttatgactgcttatggtgacaatttgatattgttaccatttagctgtcaaattaattgcaaaagatcccaagtcttacttaccaatttgcattttgataaccttgatttgaaaattttaata

SEQ ID NO: 20281 - DNA, 689 bp, synthetic construct
  source 1..689: mol_type = other DNA
gccttggggttgttcccactccaagggcccacgtggcggctagtactctggtacttcggtacctttgtacgcctgttttatctcccttcccaatgtaatttagaagcttttaaatcaaggctcaataggtggggcgcaaaccagcgctctcatgagcaagcactcctgtctccccggtgtggttgtataaactgttcccacggttgaaaacaacctatccgttatccgctatagtacttcgagaaacctagtatcacctttggattgttgacgcgttgcgctcagcacactaacccgtgtgtagcttgggtcgatgagtctggacataccccactggcgacagtggtccaggctgcgttggcggcctactcatggtgaaaaccatgagacgctagacatgaacaaggtgtgaagagtctattgagctactatagagtcctccggcccctgaatgcggctaatcctaaccatggagcaagtgctcacaagccagtgagttgcttgtcgtaatgcgcaagtccgtggcggaaccgactactttgggtgtccgtgtttcactttttacttttatgactgcttatggtgacaatttgatattgttaccatttagctgtcaaattaattgcaaaagatcctaagtcttacttaccaatttgcattttgataaccttgatttgaaaattttaata

SEQ ID NO: 20282 - DNA, 689 bp, synthetic construct
  source 1..689: mol_type = other DNA
gccttggggttgttcccactccaagggcccacgtggcggctagtactctggtacttcggtacctttgtacgcctgttttatctcccttcccaacgtaatttagaagtttttaaatcaaggctcaataggtggggcgcaaaccagcgctctcatgagcaagcactcctgtctccccggtgtggttgtataaactgttcccacggttgaaaacaacctatccgttatccgctatagtacttcgagaaacctagtatcacctttggattgttgacgcgttgcgctcagcacactaacccgtgtgtagcttgggtcgatgagtctggacataccccactggcgacagtggtccaggctgcgttggcggcctactcatggtgaaaaccatgagacgctagacatgaacaaggtgtgaagagtctattgagctactatagagtcctccggcccctgaatgcggctaatcctaaccatggagcaagtgctcacaggccagtgagttgcttgtcgtaatgcgcaagtccgtggcggaaccgactactttgggtgtccgtgtttcactttttacttttatgactgcttatggtgacaatttgatattgttaccatttagctgtcaaattaattgcaaaagatcctaagtcttacttaccaatttgcattttgataaccttgatttgaaaattttaata

SEQ ID NO: 20283 - DNA, 689 bp, synthetic construct
  source 1..689: mol_type = other DNA
gccttggggttgttcccactccaagggcccacgtggcggctagtactctggtacttcggtacctttgtacgcctgttttatctcccttcccaatgtaatttagaagcttttaaatcaaggctcaataggtggggcgcaaaccagcgctcttatgagcaagcactcctgtctccccggtgtggttgtataaactgttcccacggttgaaaacaacctatccgttatccgctatagtacttcgagaaacctagtatcacctttggattgttgacgcgttgcgctcagcacactaacccgtgtgtagcttgggtcgatgagtctggacataccccactggcgacagtggtccaggctgcgttggcggcctactcatggtgaaaaccatgagacgctagacatgaacaaggtgtgaagagtctattgagctactatagagtcctccggcccctgaatgcggctaatcctaaccatggagcaagtgctcacaggccagtgagttgcttgtcgtaatgcgcaagtccgtggcggaaccgactactttgggtgtccgtgtttcactttttacttttatgactgcttatggtgacaatttgatattgttaccatttagctgtcaaattaattgcaaaagatcttaagtcttacttaccaatttgcattttgataaccttgatttgaaaattttaata

SEQ ID NO: 20284 - DNA, 689 bp, synthetic construct
  source 1..689: mol_type = other DNA
gccttggggttgttcccactccaagggcccacgtggcggctagtactctggtacttcggtacctttgtacgcctgttttatctcccttcccaatgtaatttagaagcttttaaatcaaggctcaataggtggggcgcaaaccagcgctctcatgagcaagcactcctgtctccccggtgtggttgtataaactgttcccacggttgaaaacaacctatccgttatccgctatagtacttcgagaaacctagtatcacctttggattgttgacgcgttgcgctcagcacactaacccgtgtgtagcttgggtcgatgagtctggacatgccccactggcgacagtggtccaggctgcgttggcggcctactcatggtgaaaaccatgagacgctagacatgaacaaggtgtgaagagtctattgagctactatagagtcctccggcccctgaatgcggctaatcctaaccatggagcaagtgctcacaggccagtgagttgcttgtcgtaatgcgcaagtccgtggcggaaccgactactttgggtgtccgtgtttcactttttacttttatgactgcttatggtgacaatttgatattgttaccatttagctgtcaaattaattgcaaaagatcctaagtcttacttaccaatttgcattttgataaccttgatttgaaaactttaata

SEQ ID NO: 20285 - DNA, 689 bp, synthetic construct
  source 1..689: mol_type = other DNA
gccttggggttgttcccactccaagggcccacgtggcggctagtactctggtacttcggtacctttgtacgcctgttttatctcccttcccaatgtaatttagaagcttttaaatcaaggctcaataggtggggcgcaaaccagcgctctcatgagcaagcactcctgtctccccggtgtggttgtataaactgttcccacggttgaaaacaacctatccgttatccgctatagtacttcgagaaacctagtatcacctttggattgttgacgcgttgcgctcaacacactaacccgtgtgtagcttgggtcgatgagtctggacataccccactggcgacagtggtccaggctgcgttggcggcctactcatggtgaaaaccatgagacgctagacatgaacaaggtgtgaagagtctattgagctactatagagtcctccggcccctgaatgcggctaatcctaaccatggagcaagtgctcacaggccagtgagttgcttgtcgtaatgcgcaagtccgtggcggaaccgactactttgggtgtccgtgtttcactttttacttttatgactgcttatggtgacaatttgatattgttaccatttagctgtcaaattaattacaaaagatcctaagtcttacttaccaatttgcattttgataaccttgatttgaaaattttaata

SEQ ID NO: 20286 - DNA, 689 bp, synthetic construct
  source 1..689: mol_type = other DNA
gccttggggttgttcccactccaagggcccacgtggcggctagtactctggtacttcggtacctttgtacgcctgttttatctcccttccctatgtaatttagaagcttttaaatcaaggctcaataggtggggcgcaaaccagcgctctcatgagcaagcactcctgtctccccggtgtggttgtataaactgttcccacggttgaaaacaacctatccgttatccgctatagtacttcgagaaacctagtatcacctttggattgttgacgcgttgcgctcagcacactaacccgtgtgtagcttgggtcgatgagtctggacataccccactggtgacagtggtccaggctgcgttggcggcctactcatggtgaaaaccatgagacgctagacatgaacaaggtgtgaagagtctattgagctactatagagtcctccggcccctgaatgcggctaatcctaaccatggagcaagtgctcacaggccagtgagttgcttgtcgtaatgcgcaagtccgtggcggaaccgactactttgggtgtccgtgtttcactttttacttttatgactgcttatggtgacaatttgatattgttaccatttagctgtcaaattaattgcaaaagatcctaagtcttacttaccaatttgcattttgataaccttgatttgaaaattttaata

SEQ ID NO: 20287 - DNA, 689 bp, synthetic construct
  source 1..689: mol_type = other DNA
gccttggggttgttcccactccaagggcccacgtggcggctagtactctggtacttcggtacctttgtacgcctgttttatctcccttcccaatgtaatttagaagcttttaaatcaaggctcaataggtggggcgcaaaccagcgctctcatgagcaagcactcctgtctccccggtgtggttgtataaactgttcccacggttgaaaacaacctatccgttatccgctatagtacttcgagaaacctagtatcacctttggattgttgacgcgttgcgctcagcacactaacccgtgtgtagcttgggtcgatgagtctggacataccccactggcgacagtggtccaggctgcgttggcggcctactcatggtgaaaaccatgagacgctagacatgaacaaggtgtgaagagtctattgagctactatagagtcctccggcccctgaatgcggctaatcctaaccatggagcaagtgctcacaggccagtgagttgcttgtcgtaatgcgcaagtccgtggcggaaccgactactttgggtgtccgtgtttcactttttacttttatgactgcttatggtgacaatttgatattgttaccatttagctgtcaaattaattgcaaaagatcctaagtcttacttactaatttgcattttgataaccttgatttgaaaattttaata

SEQ ID NO: 20288 - DNA, 689 bp, synthetic construct
  source 1..689: mol_type = other DNA
gccttggggttgttcccactccaagggcccacgtggcggctagtactctggtgcttcggtacctttgtacgcctgttttatctcccttcccaatgtaatttagaagcttttaaatcaaggctcaataggtggggcgcaaaccagcgctctcatgagcaagcactcctgtctccccggtgtggttgtataaactgttcccacggttgaaaacaacctatccgttatccgctatagtacttcgagaaacctagtatcacctttggattgttgacgcgttgcgctcagcacactaacccgtgtgtagcttgggtcgatgagtctggacataccccactggcgacagtggtccaggctgcgttggcggcctactcatggtgaaaaccatgagacgctagacatgaacaaggtgtgaagagtctattgagctactatagagtcctccggcccctgaatgcggctaatcctaaccatggagcaagtgctcacaggccagtgagttgcttgtcgtaatgcgcaagtccgtggcggaaccgactactttgggtgtccgtgtttcactttttacttttatgactgcttatggtgacaatttgatattgttaccatttagctgtcaaattaattgcaaaagatcctaagtcttacttaccaatttgcattttgataaccttgatttgaaaatttcaata

SEQ ID NO: 20289 - DNA, 689 bp, synthetic construct
  source 1..689: mol_type = other DNA
gccttggggttgttcccactccaagggcccacgtggcggctagtactctggtacttcggtacctttgtacgcctgttttatctcccttcccaatgtaatttagaagcttttaaatcaaggctcaataggtggggcgcaaaccagcgctctcatgagcaagcactcctgtctccccggtgtggttgtataaactgttcccacggttgaaaacaacctatccgttatccgctatagtacttcgagaaacctagtatcacctttggattgttgacgcgttgcgctcagcacactaacccgtgtgtagcttgggtcgatgagtctggacataccccactggcgacagtggtccaggctgcgttggcggcctactcatggtgaaaaccatgagacgctagacatgaacaaggtgtgaagagtctattgagctactatagagtcctccggcccctgaatgcggctaatcctaaccatggagcaagtgctcacaggccagtgagttgcttgtcgtaatgcgcaagtccgtggcggaaccgactactttgggtgtccgtgtttcactttttacttttatgactgcttatggtgacaatttgatattgttaccatttagctgtcaaattaattacaaaagatcctaagtcttacttaccaatttgcattttgataaccttgatttgaaaattttaata

SEQ ID NO: 20290 - DNA, 689 bp, synthetic construct
  source 1..689: mol_type = other DNA
gccttggggttgttcccactccaagggcccacgtggcggctagtactctggtacttcggtacctttgtacgcctgttttatctcccttcccaatgtaatttagaagcttttaaatcaaggctcaataggtggggcgcaaaccagcgctctcatgagcaagcactcctgtctccccggtgtggttgtataaactgttcccacggttgaaaacaacctatccgttacccgctatagtacttcgagaaacctagtatcacctttggattgttgacgcgttgcgctcagcacactaacccgtgtgtagcttgggtcgatgagtctggacataccccactggcgacagtggtccaggctgcgttggcggcctactcatggtgaaaaccatgagacgctagacatgaacaaggtgtgaagagtctattgagctactatagagtcctccggcccctgaatgcggctaatcctaaccatggagcaagtgctcacaggccagtgagttgcttgtcgtaatgcgcaagtccgtggcggaaccgactactttgggtgtccgtgtttcactttttacttttatgactgcttatggtgacaatttgatattgttaccatttagctgtcaaattaattgcaaaagatcctaagtcttacttaccaatttgcattttgataaccttgatttgaaaactttaata

SEQ ID NO: 20291 - DNA, 692 bp, synthetic construct
  source 1..692: mol_type = other DNA
actctggtattacggtacccttgtgcgcctgttttatccacccctcccgatgtaacttataagttgatcaaagaaaaggtcagtaggatgcccagtacaccaactgggttttgaccaagcacttctgttaccccggaccgagtatcaataggccactcacgtggctgaaggagaaaacgttcgttatccggccaattacttcgagaaacccagtaacaccatgaaggttgcgcggcgtttcgctccacacaaccccagtgtagatcaggccgatgagtcaccgcattccccacgggcgaccgtggcggtggctgcgctggcggcctgcccatggggcaacccatgggacgcctcaataccgatatggtgcgaagagtctattgagctaattggtagtcctccggcccctgaatgcggctaatcccaactgcggagcagatgcccacaaaccagtgggtggtctgtcgtaacgggcaactctgcagcggaaccgactactttgggtgtccgtgtttccttttattcttatactggctgcttatggtgacaattgggaaattgttaccatatagctattggatcggccacccggtttgcaacagagcacttgtatttctgtttgttgggttcgtaccacttgactttaatagttacagaactttactctacattgtccaattgaatacaaaaag

SEQ ID NO: 20292 - DNA, 688 bp, synthetic construct
  source 1..688: mol_type = other DNA
ccttggggttgttcccactccaagggcccacgtggcggctagtactctggtacttcggtacctttgtacgcctgttttatctcccttcccaatgtaatttagaagcttttaaatcaaagctcaataggtggggcgcaaaccagcgctctcatgagcaagcactcctgtctccccggtgtggttgtataaactgttcccacggttgaaaacaacctatccgttatccgctatagtacttcgagaaacctagtatcacctttggattgttgacgcgttgcgctcagcacactaacccgtgtgtagcttgggtcgatgagtctggacataccccactggcgacagtggtccaggctgcgttggcggcctactcatggtgaaaaccatgagacgctagacatgaacaaggtgtgaagagtctattgagctactatagagtcctccggcccctgaatgcggctaatcctaaccatggagcaagtgctcacaggccagtgagttgcttgtcgtaatgcgcaagtccgtggcggaaccgactactttgggtgtccgtgtttcactttttacttttatgactgcttatggtgacaatttgatattgttaccatttagctgtcaaattaattgcaaaagatcctaagtcttacttaccaatttgcattttgataaccttgatttgaaaattttaata

SEQ ID NO: 20293 - DNA, 688 bp, synthetic construct
  source 1..688: mol_type = other DNA
gccttggggttgttcccactccaagggcccacgtggcggctagtactctggtacttcggtacctttgtacgcctgttttatctcccttcccaatgtaatttagaagcttttaaatcaaggctcaataggtggggcgcaaaccagcgctctcatgagcaagcactcctgtctccccggtgtggttgtataaactgttcccacggttgaaaacaacctatccgttatccgctatagtacttcgagaaacctagtatcacctttggattgttgacgcgttgcactcagcacactaacccgtgtgtagcttgggtcgatgagtctggacataccccactggcgacagtggtccaggctgcgttggcggcctactcatggtgaaaaccatgagacgctagacatgaacaaggtgtgaagagtctattgagctactatagagtcctccggcccctgaatgcggctaatcctaaccatggagcaagtgctcacaggccagtgagttgcttgtcgtaatgcgcaagtccgtggcggaaccgactactttgggtgtccgtgtttcactttttacttttatgactgcttatggtgacaatttgatattgttaccatttagctgtcaaattaattgcaaaagatcctaagtcttacttaccaattgcattttgataaccttgatttgaaaattttaata

SEQ ID NO: 20294 - DNA, 643 bp, synthetic construct
  source 1..643: mol_type = other DNA
ctatgtaacttagaagcacatcacaaacggtcaacaggcagctcagtaaaccaactgagccacgaccaggtacttctgttaccccggaccgagtatcaatagactgctgacgcggtcgaaggagaaaacgttcgttacccggccaactacttcgagaaacccagtaccaccatggaggttgcgtggcgtttcgctccacacaaccccagtgtagatcaggtcgatgagtcaccgcattccccacgggcgaccgtggcggtggctgcgttggcggcctgcccatgaggtaactcatgggacgctacaataccgacatggtgcgaagagtctattgagctagttggtagtcctccggcccctgaatgcggctaatcctaactgcagagcggacacctacaaaccagtgggcagtccgtcgtaacgggcaactctgcagcggaaccgactactttgggtgtccgtgtttccttttattctcatattggctgcttatggtgacaattgagagattgttgccatatagctattggattggccatccggtgactaacagagctattgtctacttatttgttggttacgcaccgctcaatttcaaagtcttaaacacgattaatttcatattatcactcaacacaacaaa

SEQ ID NO: 20295 - DNA, 684 bp, synthetic construct
  source 1..684: mol_type = other DNA
ccccaagggcccacgtggcggctagtactctggtatttcggtacctttgtacgcctgttttatctccctccccaatgtaacttagaagcttttaaatcaaagctcaataggtggagcgcaagccagcgcttccgtgagcaagcactcctgtttccccggtgcagttgtatagactgttcccacggttgaaaacaacctatccgttatccgctatagtacttcgagaaacctagtatcacctttggattgttgatgcgttgcgctcagcacactaacccgtgtgtagcttgggtcgatgagtctggacataccccactggtgacagtggtccaggctgcgttggcggcctactcgtggtgaaaaccacgagacgctagacatgaacaaggtgtgaagagtctattgagctactatagagtcctccggcccctgaatgcggctaaccttaaacctgcagccattgctcacaatccagtgagtttgtggtcgtaatgagcaattgcgggatgggaccgactactttgggtgtccgtgtttctctttttacttttatgactgcttatggtgacaatttaatattgttaccatttagctagtcaaattaatcacataaaactttaaatcctatctaacaattcacatttggatagctttattttgaggattttaaacctatttacaaag

SEQ ID NO: 20296 - DNA, 688 bp, synthetic construct
  source 1..688: mol_type = other DNA
ccttggggttgttcccactccaagggcccacgtggcggctagtactctggtacttcggtacctttgtacgcctgttttatctcccttcccaatgcaatttagaagcttttaaatcaaggctcaataggtggggcgcaaaccagcgctctcatgagcaagcactcctgtctccccggtgtggttgtataaactgttcccacggttgaaaacaacctatccgttatccgctatagtacttcgagaaacctagtatcacctttggattgttgacgcgttgcgctcggcacactaacccgtgtgtagcttgggtcgatgagtctggacataccccactggcgacagtggtccaggctgcgttggcggcctactcatggtgaaaaccatgagacgctagacatgaacaaggtgtgaagagtctattgagctactatagagtcctccggcccctgaatgcggctaatcctaaccatggagcaagtgctcacaggccagtgagttgcttgtcgtaatgcgcaagtccgtggcggaaccgactactttgggtgtccgtgtttcactttttacttttatgactgcttatggtgacaacttgatattgttaccatttagctgtcaaattaattgcaaaagatcctaagtcttacttaccaatttgcattttgataaccttgatttgaaaattttaata

SEQ ID NO: 20297 - DNA, 698 bp, synthetic construct
  source 1..698: mol_type = other DNA
tgggaacagccttggggttgttcccactccaagggcccacgtggcggctagtactctggtacttcggtacctttgtacgcctgttttatctcccttcccaatgtaatttagaagctcttaaatcaaggctcaataggtggggcgcaaaccagcgctctcatgagcaagcactcctgtctccccggtgtggttgtataaactgttcccacggttgaaaacaacctatccgttatccgctatagtacttcgagaaacctagtatcacctttggattgttgacgcgttgcgctcagcacactaacccgtgtgtagcttgggtcgatgagtctggacataccccactggcgacagtggtccaggctgcgttggcggcctactcatggtgaaaaccatgagacgctagacatgaacaaggtgtgaagagtctattgagctactatagagtcctccggcccctgaatgcggctaatcctaaccatggagcaagtgctcacaggccagtgagttgcttgtcgtaatgcgcaagtccgtggcggaaccgactactttgggtgtccgtgtttcactttttacttttatgactgcttatggtgacaatttgatattgttaccatttagcttgtcaaattaattacaaaagatcctaaatcttacttaccaacttgcattttgacaaccttggtttgaaaattttaata

SEQ ID NO: 20298 - DNA, 697 bp, synthetic construct
  source 1..697: mol_type = other DNA
taaaacagccttggggttgttcccactccaagggcccacgtggcggctagtactctggtacttcggtacctttgtacgcctgttttatctcccttcccaatgtaacttagaagttcttaaatcaatgctcagtaggtggggcgcaaaccagcgctctcatgagcaagcactcctgtctccccggtgaggttgtataaactgttcccacggttgaaaacaacctatccgttatccgctatagtacttcgagaaacctagtaccacctttggattgttgacgcgttgcgctcagcacactaacccgtgtgtagcttgggtcgatgagtctggacatacctcactggcgacagtggtccaggctgcgttggcggcctactcatggtgaaaaccatgagacgctagacatgaacaaggtgtgaagagtctattgagctactatagagtcctccggcccctgaatgcggctaatcctaaccatggagcaagtgctcacaggccagtgagttgcttgtcgtaatgcgcaagtccgtggcggaaccgactactttgggtgtccgtgtttcactttttacttttatgactgcttatggtgacaatttgatattgttaccatttagcttgtcaaatcaattgcgaaagatcctaaatcttatttatcaatttgcatcttgataactttaatttgaaaattttaaca

SEQ ID NO: 20299 - DNA, 697 bp, synthetic construct
  source 1..697: mol_type = other DNA
taaaacagccttggggttgttcccactccaagggcccacgtggcggctagtactctggtacttcggtacctttgtacgcctgttttatctcccttcccaatgtaacttagaagttcttaaatcaatgctcaataggtagggcgcaaaccagcgctctcatgagcaagcactcctgtctccccggtgaggttgtataaactgttcccacggttgaaaacaacctatccgttatccgctatagtacttcgagaaacctagtaccacctttggattgttgacgcgttgcgctcagcacactaacccgtgtgtagcttgggtcgatgagtctggacatacctcactggcgacagtggtccaggctgcgttggcggcctactcatggtgaaagccatgagacgctagacatgaacaaggtgtgaagagtctattgagctactatagagtcctccggcccctgaatgcggctaatcctaaccatggagcaagtgctcacaagccagtgagttgcttgtcgtaatgcgcaagtccgtggcggaaccgactactttgggtgtccgtgtttcactttttacttttatgactgcttatggtgacaatttgatattgttaccatttagcttgtcaaatcaattgcaaaagatcctaaatcttatttatcaacttgcatcttaacaactttaatttgaaaattttaaca

SEQ ID NO: 20300 - DNA, 687 bp, synthetic construct
  source 1..687: mol_type = other DNA
ttggggttgttcccactccaagggcccacgtggcggctagtactctggtacttcggtacctttgtacgcctgttttatctcccttcccaatgtaatttagaagctcttaaatcaaggctcaataggtggggcgcaaaccagcgctctcatgagcaagcactcctgtctccccggtgtggttgtataaactgttcccacggttgaaaacaacctatccgttatccgctatagtacttcgagaaacctagtatcacctttggattgttgacgcgttgcgctcagcacactaacccgtgtgtagcttgggtcgatgagtctggacataccccactggcgacagtggtccaggctgcgttggcggcctactcatggtgaaaaccatgagacgctagacatgaacaaggtgtgaagagtctattgagctactatagagtcctccggcccctgaatgcggctaatcctaaccatggagcaagtgctcacaggccagtgagttgcttgtcgtaatgcgcaagtccgtggcggaaccgactactttgggtgtccgtgtttcattttttacttttatgactgcttatggtgacaatttgatattgttaccatttagcttgtcaaattaattgcaaaagatcctgaatcttacttaccaacttgcattttgacaaccttgatttgaaaattttaata

SEQ ID NO: 20301 - DNA, 687 bp, synthetic construct
  source 1..687: mol_type = other DNA
ttggggttgttcccactccaagggcccacgtggcggctagtactctggtacttcggtacctttgtacgcctgttttatctcccttcccaatgtaatttagaagctcttaaatcaaggctcaataggtggggcgcaaaccagcgctctcatgagcaagcactcctgtctccccggtgtggttgtataaactgttcccacggttgaaaacaacctatccgttatccgctatagtacttcgagaaacctagtatcacctttggattgttgacgcgttgcgctcagcacactaacccgtgtgtagcttgggtcgatgagtctggacataccccactggcgacagtggtccaggctgcgttggcggcctactcatggtgaaaaccatgagacgctagacatgaacaaggtgtgaagagtctattgagctactatagagtcctccggcccctgaatgcggctaatcctaaccatggagcaagtgctcacaggccagtgagttgcttgtcgtaatgcgcaagtccgtggcggaaccgactactttgggtgtccgtgtttcactttttacttttatgactgcttatggtgacaatttgatattgttaccatttagcttgtcaaatcaattgcaaaagatcctaaatcttacttaccaacttgcattttgataaccttgacttgaaaattttaata

SEQ ID NO: 20302 - DNA, 693 bp, synthetic construct
  source 1..693: mol_type = other DNA
cggtattacggtacccttgtacgcctgttttatactcccctcccccgtaacttagaaaacttcaaaaccaaagttcaacaggagggggtacaaaccagtgccaccatgaacaagcacttctgtttccccggtgatgttgtatagactgtccccacggttgaaaacgactgatccgttatccgctctggtacttcgagaagcccagtaccaccttggaatcttcgatgcgttgcgctcagcactcaatcccagagtgtagcttaggtcgatgagtctggacgctcctcaccggtgacggtggtccaggctgcgttggcggcctacctgtggcccaaagccacaggacgctagttgtgaacaaggtgtgaagagcctattgagctaccagagattcctccggcccctgaatgcggctaatcctaaccacggagcaggtactcacaacccagtgaacagcctgtcgtaacgcgcaagtctgtggcggaaccgactactttgggtgtccgtgtttccttttattttttatatggctgcttatggtgacaatcacagattgttatcataaagcgaattggattggccatccagtgaaagtgagactcatcatttacttgtttgttggattcacacctttgaccaaatccacccctgacatcatctcagttgtgttactaattaggagacattatcaca

SEQ ID NO: 20303 - DNA, 686 bp, synthetic construct
  source 1..686: mol_type = other DNA
ttggggttgttcccactccaagggcccacgtggcggctagtactctggtacttcggtacctttgtacgcctgttttatctcccttcccaatgtaatttagaagcttttaaatcaaggctcaataggtggggcgcaaaccagcgctctcatgagcaagcactcctgtctccccggtgtggttgtataaactgttcccacggttgaaaacaacctatccgttatccgctatagtacttcgagaaacctagtatcacctttggattgttgacgcgttgcgctcagcacactaacccgtgtgtagcttgggtcgatgagtctggacataccccactggcgacagtggtccaggctgcgttggcggcctactcatggtgaaaaccatgagacgctagacatgaacaaggtgtgaagagtctattgagctactatagagtcctccggcccctgaatgcggctaatcctaaccatggagcaagtgctcacaggccagtgagttgcttgtcgtaatgcgcaagtccgtggcggaaccgactactttgggtgtccgtgtttcactttttacttttatgactgcttatggtgacaatttgatattgttaccatttagctgtcaaattaattgcaaaagatcctaagtcttacttactaatttgcattttgataaccttgatttgaaaactttaata

SEQ ID NO: 20304 - DNA, 699 bp, synthetic construct
  source 1..699: mol_type = other DNA
tggggttgttcccactccaagggcccacgtggcggctagtactctggtacttcggtacctttgtacgcctgttttatctcccttcccaatgtaacttagaagttcttaaatcaatgctcaataggtggggcgcaaaccagcgctctcatgagcaagcactcctgtctccccggtgaggttgtataaactgttcccacggttgaaaacaacctatccgttatccgctatagtacttcgagaaacctagtaccacctttggattgttgacgcgttgcgctcagcacactaacccgtgtgtagcttgggtcgatgagtctggacatacctcactggtgacagtggtccaggctgcgttggcggcctactcatggtgaaagccatgagacgctagacatgaacaaggtgtgaagagtctattgagctactatagagtcctccggcccctgaatgcggctaatcctaaccatggagcaagtgctcacaggccagtgagttgcttgtcgtaatgcgcaagtccgtggcggaaccgactactttgggtgtccgtgtttcactttttacttttatgactgcttatggtgacaatttgatattgttaccatttagcttgtcaaatcaattgcaaaagatcctaaatcttatttatcaacttgcatcttgataactttaatttgaaaaattaatttgaaaattttaaca

SEQ ID NO: 20305 - DNA, 680 bp, synthetic construct
  source 1..680: mol_type = other DNA
ggtacctttgtgcgcctgttttatagtcccttcccccggacgcaacttagaagctgaacctaagcggtcaacaggcggctcagaacaccatctgggtctcgaccaagcacttctgtttccccggactgagtatcaataagctgcttacgcggctgaaggagaaaacgtccgttatccggccaattacttcaagaaacccagtaccaccatgaaggttgcgcagcgtttcgctccgcacaaccccagtgtagatcaggtcgatgagtcaccgcattcctcacgggcgaccgtggcggtggctgcgctggcggcctgcccatggggcaacccatgggacgcttcaatactgacatggtgcgaagagtcaattgagctaattggtagtcctccggcccctgaatgcggctaatcctaactgtggagcagatgcccacgtaccagtgggtagtctgtcgtaacgggcaactccgcagcggaaccgactactttgggtgtccgtgtttctctttattcttatgttggctgcttatggtgacaattgagagattgttaccatatagctattggattggccatccggtgacgaatagagcgattgtatatctttttgttggattcgtaccattaaacaaaacaaattacaaaaccttgtgttacattattagattaaacacagcaaa

SEQ ID NO: 20306 - DNA, 694 bp, synthetic construct
  source 1..694: mol_type = other DNA
aacagccttggggttgttcccactccaagggcccacgtggcggctagtactctggtacttcggtacctttgtacgcctgttttatctcccttcccaatgtaatttagaagctcttaaatcaaggctcaataggtggggcgcaaaccagcgctctcatgagcaagcactcctgtctccccggtgtggttgtataaactgttcccacggttgaaaacaacctatccgttatccgctatagtacttcgagaaacctagtatcacctttggattgttgacgcgttgcgctcagcacactaacccgtgtgtagcttgggtcgatgagtctggacataccccactggcgacagtggtccaggctgcgttggcggcctactcatggtgaaaaccatgagacgctagacatgaacaaggtgtgaagagtctattgagctactatagagtcctccggcccctgaatgcggctaatcctaaccatggagcaagtgctcacaggccagtgagttgcttgtcgtaatgcgcaagtccgtggcggaaccgactactttgggtgtccgtgtttcactttttacttttatgactgcttatggtgacaatttgatattgttaccatttagcttgtcaaattaattgcaaaagatcctaaatcttacttaccaacttgcattttgacgaccttggtttgaaaattttaata

SEQ ID NO: 20307 - DNA, 692 bp, synthetic construct
  source 1..692: mol_type = other DNA
agccttggggttgttcccactccaagggcccacgtggcggctagtactctggtacttcggtacctttgtacgcctgttttatctcccttcccaatgtaatttagaagctcttaaatcaaggctcaataggtggggcgcaaaccagcgctctcatgagcaagcactcctgtctccccggtgtggttgtataaactgttcccacggttgaaaacaacctatccgttatccgctatagtacttcgagaaacctagtatcacctttggattgttgacgcgttgcgctcagcacactaacccgtgtgtagcttgggtcgatgagtctggacataccccactggcgacagtggtccaggctgcgttggcggcctactcatggtgaaaaccatgagacgctagacatgaacaaggtgtgaagagtctattgagctactatagagtcctccggcccctgaatgcggctaatcctaaccatggagcaagtgctcacaggccagtgagttgcttgtcgtaatgcgcaagtccgtggcggaaccgactactttgggtgtccgtgtttcactttttacttttatgactgcttatggtgacaatttgatattgttaccatttagcttgtcaaattaattgcaaaagatcctaaatcttacttaccaacttgcattttgacaaccttgatttgaaaatttttaata

SEQ ID NO: 20308 - DNA, 692 bp, synthetic construct
  source 1..692: mol_type = other DNA
cagccttggggttgttcccactccaagggcccacgtggcggctagtactctggtacttcggtacctttgtacgcctgttttatcccccttcccaatgtaatttagaagctcttaaattaaggctcaataggtggggcgcaaaccagcgctctcatgagcaagcactcctgtctccccggtgtggttgtataaactgttcccacggttgaaaacaacctatccgttatccgctatagtacttcgagaaacctagtatcacctttggattgttgacgcgttgcgctcagcacactaacccgtgtgtagcttgggtcgatgagtctggacacaccccactggcgacagtggtccaggctgcgttggcggcctactcatggtgaaaaccatgagacgctagacatgaacaaggtgtgaagagtctattgagctactatagagtcctccggcccctgaatgcggctaatcctaaccatggagcaagtgctcacaggccagtgagttgcttgtcgtaatgcgcaagtccgtggcggaaccgactactttgggtgtccgtgtttcactttttacttttatgactgcttatggtgacaatttgatattgttaccatttagcttgtcaaattaattgcaaaagatcctaaatcttacttaccaacttgcattttgacaaccttgatttgaaaattttaata

SEQ ID NO: 20309 - DNA, 692 bp, synthetic construct
  source 1..692: mol_type = other DNA
agccttggggttgttcccactccaagggcccacgtggcggctagtactctggtacttcggtacctttgtacgcctgttttatctcccttcccaatgtaatttagaagctcttaaatcaaggctcaataggtggggcgcaaaccagcgctctcatgagcaagcactcctgtctccccggtgtggttgtataaactgttcccacggttgaaaacaacctatccgttatccgctatagtacttcgagaaacctagtatcacctttggattgttgacgcgttgcgctcagcacactaacccgtgtgtagcttgggtcgatgagtctggacataccccactggcgacagtggtccaggctgcgttggcggcctactcatggtgaaaaccatgagacgctagacatgaacaaggtgtgaagagtctattgagctactatagagtcctccggcccctgaatgcggctaatcctaaccatggagcaagtgctcacaggccagtgagttgcttgtcgtaatgcgcaagtccgtggcggaaccgactactttgggtgtccgtgtttcactttttacttttatgactgcttatggtgacaatttgatattgttaccatttagcttgtcaaattaattgcaaaagatcctaaatcttacttaccaacctgcattttgacaaccttgatttgaaaatttttaata

SEQ ID NO: 20310 - DNA, 691 bp, synthetic construct
  source 1..691: mol_type = other DNA
agccttggggttgttcccactccaagggcccacgtggcggctagtactctggtacttcggtacctttgtacgcctgttttatcccccttcccaatgtaatttagaagctcttaaattaaggctcaataggtggggcgcaaaccagcgctctcatgagcaagcactcctgtctccccggtgtggttgtataaactgttcccacggttgaaaacaacctatccgttatccgctatagtacttcgagaaacctagtatcacctttggattgttgacgcgttgcgctcagcacactaacccgtgtgtagcttgggtcgatgagtctggacataccccactggcgacagtggtccaggctgcgttggcggcctactcatggtgaaaaccatgagacgctagacatgaacaaggtgtgaagagtctattgagctactatagagtcctccggcccctgaatgcggctaatcctaaccatggagcaagtgctcacaggccagtgagttgcttgtcgtaatgcgcaagtccgtggcggaaccgactactttgggtgtccgtgtttcactttttacttttatgactgcttatggtgacaatttgatattgttaccatttagcttgtcaaatcaattgcaaaagatcctaaatcttacttaccaacttgcattttgacaaccttgatttgaaaattttaata

SEQ ID NO: 20311 - DNA, 695 bp, synthetic construct
  source 1..695: mol_type = other DNA
aacagccttggggttgttcccactccaagggcccacgtggcggctagtactctggtacttcggtacctttgtacgcctgttttatctcccttcccaatgtaatttagaagctcttaaatcaaggctcaataggtggggcgcaaaccagcgctctcatgagcaagcactcctgtctccccggtgtggttgtataaactgttcccacggttgaaaacaacctatccgttatccgctatagtacttcgagaaacctagtatcacctttggattgttgacgcgttgcgctcagcacactaacccgtgtgtagcttgggtcgatgagtctggacataccccactggcgacagtggtccaggctgcgttggcggcctactcatggtgaaaaccatgagacgctagacatgaacaaggtgtgaagagtctattgagctactatagagtcctccggcccctgaatgcggctaatcctaaccatggagcaagtgctcataggccagtgagttgcttgtcgtaatgcgcaagtccgtggcggaaccgactactttgggtgtccgtgtttcactttttacttttatgactgcttatggtgacaatttgatattgttaccatttagcttgtcaaattaattacaaaagatcctaaatcttacttaccaacttgcattttgacaaccttgatttgaaaatttttaata

SEQ ID NO: 20312 - DNA, 689 bp, synthetic construct
  source 1..689: mol_type = other DNA
ttcccaccccaagggcccacatggcggctagtactctggtatttcggtacctttgtacgcctgttttatctcccttcccaatgtaacttagaagttttcaaatcgaagctcagtaggtggggcgcaaaccagcgctttcatgagcaagcacttctgtttccccggtgcggttgtatagactgtttccacggttgaaaacaacttatccgttatccgctatagtacttcgagaaacctagtatcacctttggattgttgatgcgttgcgctcagcacactaacccgtgtgtagcttgggctgatgagtctggacgtaccccactggtgacagtggtccaggctgcgttggcggcctactcatggtgaaaaccatgagacgctagacatgaacaaggtgtgaagagtctattgagctactatagagtcctccggcccctgaatgcggctaatcttaaccatggagcaagtgctcacaagccagtgagttgcttgtcgtaacgcgcaagtccgtggcggaaccgactactttgggtgtccgtgtttcactttttacctttatgactgcttatggtgacaatttaatattgttaccatttagcttgtcagattaatcgcgtgaaatcctaaatcttgttcaccaatttgtattcggatagcttcatttgaaaattctaaactcattcataaag

SEQ ID NO: 20313 - DNA, 685 bp, synthetic construct
  source 1..685: mol_type = other DNA
gggttgttcccactccaagggcccacgtggcggctagtactctggtacttcggtacctttgtacgcctgttttatctcccttcccaatgtaatttagaagctcttaaatcaaggctcaataggtggggcgcaaaccagcgctctcatgagcaagcactcctgtctccccggtgtggttgtataaactgttcccacggttgaaaacaacctatccgttatccgctatagtacttcgagaaacctagtatcacctttggattgttgacgcgttgcgctcagcacactaacccgtgtgtagcttgggtcgatgagtctggacataccccactggcgacagtggtccaggctgcgttggcggcctactcatggtgaaaaccatgagacgctagacatgaacaaggtgtgaagagtctattgagctactatagagtcctccggcccctgaatgcggctaatcctaaccatggagcaagtgctcacaggccagtgagttgcttgtcgtaatgcgcaagtccgtggcggaaccgactactttgggtgtccgtgtttcactttttacttttatgactgcttatggtgacaatttgatattgttaccatttagcttgtcaaatcaattgcaaaagatcctaaatcttacttaccaacttgcattttgacaaccttgatttgaaaatttttaata

SEQ ID NO: 20314 - DNA, 696 bp, synthetic construct
  source 1..696: mol_type = other DNA
taaaacagccttggggttgttcccactccaagggcccacgtggcggctagtactctggtacttcggtacctttgtacgcctgttttatctcccttcccaatgtaatttagaagcttttaaatcaaggctcaataggtggggcgcaaaccagcgctctcatgagcaagcactcctgtctccccggtgtggttgtataaactgttcccacggttgaaaacaacctatccgttatccgctatagtacttcgagaaacctagtatcacctttggattgttgacgcgttgcgctcagcacactaacccgtgtgtagcttgggtcgatgagtctggacataccccactggcgacagtggtccaggctgcgttggcggcctactcatggtgaaaaccatgagacgctagacatgaacaaggtgtgaagagtctattgagctactatagagtcctccggcccctgaatgcggctaatcctaaccatggagcaagtgctcacaggccagtgagttgcttgtcgtaatgcgcaagtccgtggcggaaccgactactttgggtgtccgtgtttcactttttacttttatgactgcttatggtgacaatttgatattgttaccatttagctgtcaaattaattgcaaaagatcctaagtcttacttaccaatttgcattttgataaccttgatttgaaaactttaata

SEQ ID NO: 20315 - DNA, 685 bp, synthetic construct
  source 1..685: mol_type = other DNA
tggggttgttcccactccaagggcccacgtggcggctagtactctggtacttcggtacctttgtacgcctgttttatctcccttcccaatgtaatttagaagcttttaaatcaaggctcaataggtggggcgcaaaccagcgctctcatgagcaagcactcctgtctccccggtgtggttgtataaactgttcccacggttgaaaacaacctatccgttatccgctatagtacttcgagaaacctagtatcacctttggattgttgacgcgttgcgctcagcacactaacccgtgtgtagcttgggtcgatgagtctggacataccccactggcgacagtggtccaggctgcgttggcggcctactcatggtgaaaaccatgagacgctagacatgaacaaggtgtgaagagtctattgagctactatagagtcctccggcccctgaatgcggctaatcctaaccatggagcaagtgctcacaggccagtgagttgcttgtcgtaatgcgcaagtccgtggcggaaccgactactttgggtgtccgtgtttcactttttacttttatgactgcttatggtgacaatttgatattgttaccatttagctgtcaaattaattgcaaaagatcctaagtcttacttaccaatttgcattttgataaccttgatttgaaaattttaata

SEQ ID NO: 20316 - DNA, 691 bp, synthetic construct
  source 1..691: mol_type = other DNA
agccttggggttgttcccactccaagggcccacgtggcggctagtactctggtacttgggtacctttgtacgcctgttttatctcccttcccaatgtaatttagaagctcttaaatcaaggctcaataggtggggcgcaaaccagcgctctcatgagcaagcactcctgtctccccggtgtggttgtataaactgttcccacggttgaaaacaacctatccgttatccgctatagtacttcgagaaacctagtatcacctttggattgttgacgcgttgcgctcagcacactaacccgtgtgtagcttgggtcgatgagtctggacataccccactggcgacagtggtccaggctgcgttggcggcctactcatggtgaaaaccatgagacgctagacatgaacaaggtgtgaagagtctattgagctactatagagtcctccggcccctgaatgcggctaatcctaaccatggagcaagtgctcacaggccagtgagttgcttgtcgtaatgcgcaagtccgtggcggaaccgactactttgggtgtccgtgtttcactttttacttttatgactgcttatggtgacaatttgatattgttaccatttagcttgtcaaattaattgcaaaagatcctaaattttacttaccaacttgcattttgacaaccttgatttgaaaattttaata

SEQ ID NO: 20317 - DNA, 682 bp, synthetic construct
  source 1..682: mol_type = other DNA
atcacggtacctttgtgcgcctgttttataaccctttccccaacgcaacatagaagctatacacactgatcaacagcaggcacagcgcaccagttgtgtctcgatcaagcacttctgtctccccggaccgagtatcaatagactgcttacgcggttgaaggagaaaacgttcgttacccggctgactacttcgaaaagcctagtagtgccatgaaagttgcggagcgttttgttcagcacttcccccgtgtagatcaggtcgatgagtcactgcgttccccacgggtgaccgtggcagtggctgcgttggcggcctgcccgtggggcaacccatgggacgcttcaatacaaacatggtgcgaagagtctattgagctagtcagtagtcctccggcccctgaatgcggctaatcccaactgcggagcatgcgccttcgacccagagggtagcatgtcgtaacgggcaactctgcagcggaaccgactactttgggtgtccgtgtttccttttattcttatactggctgcttatggtgacaattgagagattgttaccatatagctattggattggccatccggtgagtaatagagctattatatactcctttgtgggttttgtgccactggatcacaaggtcttgaaaactctcacttttatcacaacacttaacactgcaaa

SEQ ID NO: 20318 - DNA, 708 bp, synthetic construct
  source 1..708: mol_type = other DNA
cacccaagggcccacgtggcggctagtactctggtatcttggtacctttgtacgcctgttttaattccctccccaacctaacttagaagctttcaaaccaaagctcaataggtggagcgcaaaccagcgctcttatgagcaagcacttctgtctccccggtgcggttgcatagactgtccccacggttgaaaacaacttatccgttaaccgctatagtacttcgagaaacctagtatcaccttcggagtgtcgatgcgttgcgctcagcacactaacccgtgtgtagcttgggtcgatgagtctggacgtaccccactggcgacagtggtccaggctgcgttggcggcctactcatggtgaaaaccatgagacgctagacatgaacaaggtgtgaagagtttattgagctactatagagtcctccggcccctgaatgcggctaatcctaaccatggagcaagtgctcacaaaccagtgggttgcttgtcgtaacgcgcaagtccgtggcggaaccgactactttgggtgtccgtgtttcactttttacttttatgactgctaatggtgacaatttaatattgttaccatttggcttgtcaaattgatcacataagatctatagttttgtttactgagttattttgaagtaatcttacctcaaaacctccagtacataacatttaaagagtttaaacttaattataata

SEQ ID NO: 20319 - DNA, 697 bp, synthetic construct
  source 1..697: mol_type = other DNA
taaaacagccttggggttgttcccactccaagggcccacgtggcggctagtactctggtacttcggtacctttgtacgcctgttttatctcccttcccaatgtaatttagaagctcttgaatcaaggctcaataggtggggcgcaaaccagcgctctcatgagcaagcactcctgtctccccggtgtggttgtataaactgttcccacggttgaaaacaacctatccgttatccgctatagtacttcgagaaacctagtatcacctttggattgttgacgcgttgcgctcagcacactaacccgtgtgtagcttgggtcgatgagtctggacataccccactggcgacagtggtccaggctgcgttggcggcctactcatggtgaaaaccatgagacgctagacatgaacaaggtgtgaagagtctattgagctactatagagtcctccggcccctgaatgcggctaatcctaaccatggagcaagtgctcacaggccagtgagttgcttgtcgtaatgcgcaagtccgtggcggaaccgactactttgggtgtccgtgtttcactttttacttttatgactgcttatggtgacaatttgatattgttaccatttagcttgtcaaattaattgcaaaagatcctaaatcttacttaccaacttgcattttgataaccttgatttgaaaattttaata

SEQ ID NO: 20320 - DNA, 697 bp, synthetic construct
  source 1..697: mol_type = other DNA
taaaacagccttggggttgttcccactccaagggcccacgtggcggctagtactctggtacttcggtacctttgtacgcctgttttatctcccttcccaatgtaatttagaagctcttaaatcaaggctcaataggtggggcgcaaaccagcgctctcatgagcaagcactcctgtctccccggtgtggttgtataaactgttcccacggttgaaaacaacctatccgttatccgctatagtacttcgagaaacctagtatcacctttggattgttgacgcgttgcgctcagcacactaacccgtgtgtagcttgggtcgatgagtctggacacaccccactggcgacagtggtccaggctgcgttggcggcctactcatggtgaaaaccatgagacgctagacatgaacaaggtgtgaagagtctattgagctactatagagtcctccggcccctgaatgcggctaatcctaaccatggagcaagtgctcacaggccagtgagttgcttgtcgtaatgcgcaagtccgtggcggaaccgactactttgggtgtccgtgtttcactttttacttttatgactgcttatggtgacaatttgatattgttaccatttagcttgtcaaattaattgcaaaggatcctaaatcttacttaccaatttgcattttgacaatcttgatttgaaaattttaata

SEQ ID NO: 20321 - DNA, 690 bp, synthetic construct
  source 1..690: mol_type = other DNA
ccttggggttgttcccactccaagggcccacgtggcggctagtactctggtacttcggtacctttgtacgcctgttttatctcccttcccaatgtaatttagaagctcttaaatcaaggctcaataggtggggcgcaaaccagcgctctcatgagcaagcactcctgtctccccggtgtggttgtataaactgttcccacggttgaaaacaacctatccgttatccgctatagtacttcgagaaacctagtatcacctttggattgttgacgcgttgcgctcagcacactaacccgtgtgtagcttgggtcgatgagtctggacataccccactggcgacagtggtccaggctgcgttggcggcctactcatggtgaaaaccatgagacgctagacatgaacaaggtgtgaagagtctattgagctactatagagtcctccggcccctgaatgcggctaatcctaaccatggagcaagtgctcacaggccagtgagttgcttgtcgtaatgcgcaagtccgtggcggaaccgactactttgggtgtccgtgtttcactttttacttttatgactgcttatggtgacaatttgatattgttaccatttagcttgtcaaattaattgcaaaagatcctaaatcttacttaccaacttgcattttgacaaccttgatttgaaaatttttaata

SEQ ID NO: 20322 - DNA, 690 bp, synthetic construct
  source 1..690: mol_type = other DNA
gccttggggttgttcccactccaagggcccacgtggcggctagtactctggtacttgggtacctttgtacgcctgttttatctcccttcccaatgtaatttagaagctcttaaatcaaggctcaataggtggggcgcaaaccagcgctctcatgagcaagcactcctgtctccccggtgtggttgtataaactgttcccacggttgaaaacaacctatccgttatccgctatagtacttcgagaaacctagtatcacctttggattgttgacgcgttgcgctcagcacactaacccgtgtgtagcttgggtcgatgagtctggacataccccactggcgacagtggtccaggctgcgttggcggcctactcatggtgaaaaccatgagacgctagacatgaacaaggtgtgaagagtctattgagctactatagagtcctccggcccctgaatgcggctaatcctaaccatggagcaagtgctcacaggccagtgagttgcttgtcgtaatgcgcaagtccgtggcggaaccgactactttgggtgtccgtgtttcactttttacttttatgactgcttatggtgacaatttgatattgttaccatttagcttgtcaaattaattgcaaaagatcctaaatcttacttaccaacttgcattttgacaacctagatttgaaaattttaata

SEQ ID NO: 20323 - DNA, 712 bp, synthetic construct
  source 1..712: mol_type = other DNA
acatgggcacccagagggcccacgtggcgtagaactccggtattacggtacccttgttcgcctatttttaccacccctcccccagaaacttagaagttataaatacaaagctcaatagatacttgggcaaaccagtccaaggacgagcaagcacttctgtctccccggaaggcaacgctgttaggctgttcccacggctgaaggcaacgctaccgttaaccggcgtggtactgcgggaagtctagtagcatcattgaatttctttgacgttacgctcagcacacaaacccagtgtgtagttttggccgatgagtgcctgcactccccactggcgacagtggcaggcgctgcgttggcggccaactctcagggcaacctgagagacgtcaaattaaggacatggtgtgaagaacctactgcgctactgcgtagtcctccggcccctgaatgcggctaatcctaactcgggagcatctgcacacaatccagtgtgaagggtgtcgtaacgggcaactcctgagcggaaccgactactttgggtgtccgtgtttcctgttttatttaccttggctgcttatggtgacaatttagattgttaccatatagcaattgggctggccacctggtttaatagaattgtgaattgtattacgctaagagcttttaatataacacaagacagacatcactataaaaccacttgaaagaaagg

SEQ ID NO: 20324 - DNA, 658 bp, synthetic construct
  source 1..658: mol_type = other DNA
actctggtattgcggtacctttgtacgcctgttttatatcccttccccatgtaactttagaagcaattcacaaggttcaatagagggggtacaaaccagtaccaccacgaacaagcacttctgtttccccggtgaagctgtatagactgtccccacggtcaaaaacggcagatccgttatccgcttatgtacttcgagaagcctagtatcatcttggaatcttcgatgcgttgcgttcagcactctatcccgagtgtagcttaggtcgatgagtctgggcattccccaccggcgacggtggcccaggctgcgttggcggcctacccatggctaacgccatgggacgctagttgtgaacaaggtgtgaagagcctattgagctacatgagagtcctccggcccctgaatgcggctaatcccaaccacggagcaagtactcacaacccagtgggcagcttgtcgtaacgcgtaagtctgtggcggaaccgactactttgggtgtccgtgtttcctttttatttttgatatggctgcttatggtgacatctaagattgttatcatatagcttttggattggccatccggtgatttttgagactaaaacgcttgtttgccttatcacacaatttagtattttgttatattcatacggtcata

SEQ ID NO: 20325 - DNA, 706 bp, synthetic construct
  source 1..706: mol_type = other DNA
ctcaagggcccacgtggcggctagtactctggtatctcggtacctttgtacgcctgttttaattccctccccaacgtaacttagaagcttttaaaccaaagctcaataggcggagcgcaaaccagcgctcttatgagcaagcacttctgtctccccggtgtggttgtatagactgtccccacggttgaaaacaacttatccgttaaccgctatagtacttcgagaaacctagtattgccttcggagtgtcgatgcgttgcgctcagcacactaacccgtgtgtagcttgggtcgatgagtctggacgtaccccactggcgacagtggtccaggctgcgttggcggcctactcatggtgaaaaccatgagacgctagacatgaacaaggtgtgaagagtctattgagctactatagagtcctccggcccctgaatgcggctaatcctaaccatggagcaagtgctcacaaaccagtgggttacttgtcgtaacgcgcaagtccgtggcggaaccgactactttgggtgtccgtgtttcactttttacttttatgactgctaatggtgacaatttaatattgttaccatttggcttgtcgaattgatcacataagatctatagttttgttcactgatttgctttgaaacaatctcacctcaaaacctccagtacataacatttaaagagtttaaacttatttataaca

SEQ ID NO: 20326 - DNA, 693 bp, synthetic construct
  source 1..693: mol_type = other DNA
gttgttcccaccccaagggcccacgtggcggctagtactctggtatttcggtacctttgtacgcctgttttatctcccttcccaatgtaacttagaagttttcaaatcgaagctcaataggtggagcgcaaaccagcgctttcatgagcaagcacttctgtctccccggtgcggttgtatagactgtttccacggttgaaaacaacttatccgttatccgctatagtacttcgagaaacccagtatcacctttggattgttgatgcgttgcgctcagcacactaacccgtgtgtagcttgggtcgatgagtctggacgtaccccactggtgacagtggtccaggctgcgttggcggcctactcatggtgaaaaccatgagacgctagacatgaacaaggtgtgaagagtctattgagctactatagagtcctccggcccctgaatgcggctaatcttaaccatggagcaagtgctcacaagccagtgagttgcttgtcgtaacgcgcaagtccgtggcggaaccgactactttgggtgtccgtgtttcactttttacttttatgactgcttatggtgacaatttaatattgttaccatttagcttgtcaaattaatcacgtgaaatcctaaatcttatttatcaatttgtatttggatagcttcatttgaaaatcctaaactcattcataagg

SEQ ID NO: 20327 - DNA, 693 bp, synthetic construct
  source 1..693: mol_type = other DNA
gttcccaccccagaggcccacgtggcggctagtactctggtatcacggtacctttgtacgcctgttttatatcccttcccccgcaactttagaagcttaacaaaagttcaatagcaggggtgcaagccagtacctctatgaacaagcacttctgtttccccggtgaagttacatagactgtacccacggtcaaaagtaattgatccgttatccgcttgagtacttcgagaagcctagtatcaccttggaatcttcgacgcgttgcgctcgacactctaccccgggtgtagcttaggctgatgagtctgggcaccccccaccggtgacggtggcccaggctgcgttggcggcctacccatggctaacgccatgggacgctagttgtgaacaaggtgtgaagagcctattgagctactcaagagtcctccggcccctgaatgcggctaatcccaaccacggagcaatcgctcacgatccagtgagtaggttgtcgtaatgcgcaagttcgtggcggaaccgactactttgggtgtccgtgtttcccttttacttatactggctgcttatggtgacaatttacagattgttaccatatagctattggattggccatccagtattgtgttacatatattaaaatacttttctacaagcatcaacaacactgtgtttggaccacaataatcactacaa

SEQ ID NO: 20328 - DNA, 685 bp, synthetic construct
  source 1..685: mol_type = other DNA
tatcacggtacctttgtgtgcctgttttatccaccctcccctaaatgtaacttagaaacataatccaaacggtcattaggtagctcagtacaccaactgggcccagaccaagcacttctgttaccccggaccgagtatcaataggctgctcgcgcggctgaaggagaaaacgttcgttatccggccaattacttcgagaaacccagtatcactatgaaagttgcgcagcgtttcgttccgcacaaccccagtgtagatcaggtcgatgagtcaccgcgttccccacgggcgaccgtggcggtggctgcgttggcggcctgcccatggggcaacctatgggacgcttcaatactgacatggtgtgaagagtctattgagctaattggtagtcctccggcccctgaatgcggctaatcctaactgcggagcagatgctcacaaaccagtgggtggtctgtcgtaatgggtaactctgcagcggaaccgactactttgggtgtccgtgtttccttttatttttacactggctgcttatggtgacaattgagagattgttaccatatagctattggattggccatccggtgactaacagagcaattgtttacctatttattggttttgtaccgttagattacaaagttctaaggactctgaatcttattataacactcaatacagtaaa

SEQ ID NO: 20329 - DNA, 689 bp, synthetic construct
  source 1..689: mol_type = other DNA
gccttggggttgttcccactccaagggcccacgtggcggctagtactctggtacttcggtacctttgtacgcctgttttatctcccttcccaatgtaatttagaagctttcaaatcaaggctcaataggtggggcgcaaaccagcgctctcatgagcaagcactcctgtctccccggtgtggttgtataaactgttcccacggttgaaaacaacctatccgttatccgctatagtacttcgagaaacctagtatcacctttggattgttgacgcgttgcgctcagcacactaacccgtgtgtagcttgggtcgatgagtctggacataccccactggtgacagtggtccaggctgcgttggcggcctactcatggtgaaaaccatgagacgctagacatgaacaaggtgtgaagagtctattgagctactatagagtcctccggcccctgaatgcggctaatcctaaccatggagcaagtgctcacaggccagtgagttgcttgtcgtaatgcgcaagtccgtggcggaaccgactactttgggtgtccgtgtttcactttttacttttatgactgcttatggtgacaatttgatattgttaccatttagctgtcaaattaattgcaaaagatcctaagtcttacttaccaatttgcattttgataaccttgatttgaaaattttaata

SEQ ID NO: 20330 - DNA, 681 bp, synthetic construct
  source 1..681: mol_type = other DNA
gcggtacctttgtgcgcctgttttatattcccaccccccaatcgcaacttagaagcagtacttcacgaccaacagtgggcgtgacacaccagccacgtctcggtcaagcacctctgtctccccggactgagtatcaataagctgctcacgcggctgagggagaaaacgtccgttacccggccaattacttcgagaaacctagtaccaccacgaaagttgcgcagcgtttcgatccgcacaaccccagtgtagatcaggtcgatgagtcaccgcgttccccacgggcgaccgtggcggtggctgcgttggcggcctgcccatgggaaaacccatgggacgcttcaatactgacatggtgtgaagagtctattgagctaattggtagtcctccggcccctgaatgcggctaatcctaactgcggagcagattcccgcatgccagcgggtggtctgtcgtaacgggcaactctgcagcggaaccgactactttgggtgtccgtgtttccttttattcctatattggctgcttatggtgacaattgagagattgttaccatatagctattggattggccatccggtgacaagcagagcaattatctaccaatttattggttttgtaccattgaatttcaacgcattcaaaactcttaactttattttgactcttaatacagcaaa

SEQ ID NO: 20331 - DNA, 693 bp, synthetic construct
  source 1..693: mol_type = other DNA
cagccttggggttgttcccactccaagggcccacgtggcggctagtactctggtacttcggtacctttgtacgcctgttttatctcccttcccaatgtaatttagaagctcttaaatcaaggctcaataggtggggcgcaaaccagcactctcatgagcaagcactcctgtctccccggtgtggttgtataaactgttcccacggttgaaaacaacctatccgttatccgctatagtacttcgagaaacctagtatcacctttggattgttgacgcgttgcgctcagcacactaacccgtgtgtagcttgggtcgatgagtctggacataccccactggcgacagtggtccaggctgcgttggcggcctactcatggtgaaaaccatgagacgctagacatgaacaaggtgtgaagagtctattgagctactatagagtcctccggcccctgaatgcggctaatcctaaccatggagcaagtgctcacaggccagtgagttgcttgtcgtaatgcgcaagtccgtggcggaaccgactactttgggtgtccgtgtttcactttttacttttatgactgcttatggtgacaatttgatattgttaccatttagcttgtcaaattaattgcaaaagatcctaaatcttacttaccaacttgcattttgacaaccttgatttgaaaatttttaata

SEQ ID NO: 20332 - DNA, 678 bp, synthetic construct
  source 1..678: mol_type = other DNA
gggcccacgtggcggctagtactctggtacttcggtacctttgtacgcctgttttatctcccttcccaatgtaatttagaagcttttaaatcaaggctcaataggtggggcgcaaaccagcgctctcatgagcaagcactcctgtctccccggtgtggttgtataaactgttcccacggttgaaaacaacctatccgttatccgctatagtacttcgagaaacctagtatcacctttggattgttgacgcgttgcgctcagcacactaacccgtgtgtagcttgggtcgatgagtctggacataccccactggcgacagtggtccaggctgcgttggcggcctactcatggtgaaaaccatgagacgctagacatgaacaaggtgtgaagagtctattgagctactatagagtcctccggcccctgaatgcggctaatcctaaccatggagcaagtgctcacaggccagtgagttgcttgtcgtaatgcgcaagtccgtggcggaaccgactactttgggtgtccgtgtttcactttttacttttatgactgcttatggtgacaatttgatattgttaccatttagctggtcgaaataatcacataaaactttaaatcctatctaataattcacatttggatagtttcatttcgaggactttaaacctacttacaaag

SEQ ID NO: 20333 - DNA, 687 bp, synthetic construct
  source 1..687: mol_type = other DNA
gccttggggttgttcccactccaagggcccacgtggcggctagtactctggtacttcggtacctttgtacgcctgttttatctcccttcccaatgtaatttagaagctcttaaatcaaggctcaataggtggggcgcaaaccagcgctctcatgagcaagcactcctgtctccccggtgtggttgtataaactgttcccacggttgaaaacaacctatccgttatccgctatagtacttcgagaaacctagtatcacctttggattgttgacgcgttgcgctcagcacactaacccgtgtgtagcttgggtcgatgagtctggacataccccactggcgacagtggtccaggctgcgttggcggcctactcatggtgaaaaccatgagacgctagacatgaacaaggtgtgaagagtctattgagctactatagagtcctccggcccctgaatgcggctaatcctaaccatggagcaagtgctcacaggccagtgagttgcttgtcgtaatgcgtaagtccgtggcggaaccgactactttgggtgtccgtgtttcactttttacttttatgactgcttatggtgacaatttgatattgttaccatttagcttgtcaaattaattgcaaaagatcctaaatcttacttaacttgcattttgacaactttgatttgaaaattttaata

SEQ ID NO: 20334 - DNA, 698 bp, synthetic construct
  source 1..698: mol_type = other DNA
ttaaaacagccttggggttgttcccactccaagggcccacgtggcggctagtactctggtacttcggtacctttgtacgcctgttttatctcccttcccaatgtaacttagaagttcttaaatcaatgctcaataggtggggcgcaaaccagcgctctcatgagcaagcactcctgtctccccggtgaggttgtataaactgttcccacggttgaaaacaacctatccgttatccgctatagtacttcgagaaacctagtaccacctttggattgttgacgcgttgcgctcagcacactaacccgtgtgtagcttgggtcgatgagtctggacatacctcactggcgacagtggtccaggctgcgttggcggcctactcatggtgaaaaccatgagacgctagacatgaacaaggtgtgaagagtctattgagctactatagagtcctccggcccctgaatgcggctaatcctaaccatggagcaagtgctcacaggccagtgagttgcttgtcgtaatgcgcaagtccgtggcggaaccgactactttgggtgtccgtgtttcactttttacttttatgactgcttatggtgacaatttgatattgttaccatttagcttgtcaaatcaattgcaaaagatcttaaatcttatttatcaatttgcatcttgataactttgatttgaaaattttaaca

SEQ ID NO: 20335 - DNA, 691 bp, synthetic construct
  source 1..691: mol_type = other DNA
gccttggggttgttcccactccaagggcccacgtggcggctagtactctggtacttcggtacctttgtacgcctgttttatctcccttcccaatgtaatttagaagctcttaaatcaaggctcaataggtggggcgcaaaccagcgctctcatgagcaagcactcctgtctccccggtgtggttgtataaactgttcccacggttgaaaacaacctatccgttatccgctatagtacttcgagaaacctagtatcacctttggattgttgacgcgttgcgctcagcacactaacccgtgtgtagcttgggtcgatgagtctggacataccccactggcgacagtggtccaggctgcgttggcggcctactcatggtgaaaaccatgagacgctagacatgaacaaggtgtgaagagtctattgagctactatagagtcctccggcccctgaatgcggctaatcctaaccatggagcaagtgctcacaggccagtgagttgcttgtcgtaatgcgcaagtccgtggcggaaccgactactttgggtgtccgtgtttcactttttacttttatgactgcttatggtgacaatttgatattgttaccatttagcttgtcaaattaattgcaaaagatcctaaatcttacttaccaacttgcattttgacaaccttgatttgaagatttttaata

SEQ ID NO: 20336 - DNA, 687 bp, synthetic construct
  source 1..687: mol_type = other DNA
tggggttgttcccactccaagggcccacgtggcggctagtactctggtacttcggtacctttgtacgcctgttttatctcccttcccaatgcaatttagaagctcttaaatcaaggctcaataggtggggcgcaaaccagcgctctcatgagcaagcactcctgtctccccggtgtggttgtataaactgttcccacggttgaaaacaacctatccgttatccgctatagtacttcgagaaacctagtatcacctttggattgttgacgcgttgcgctcagcacactaacccgtgtgtagcttgggtcgatgagtctggacataccccactggcgacagtggtccaggctgcgttggcggcctactcatggtgaaaaccatgagacgctagacatgaacaaggtgtgaagagtctattgagctactatagagtcctccggcccctgaatgcggctaatcctaaccatggagcaagtgctcacaggccagtgagttgcttgtcgtaatgcgcaagtccgtggcggaaccgactactttgggtgtccgtgtttcactttttacttttatgactgcttatggtgacaatttgatattgttaccatttagcttgtcaaatcaattgcaaaagatcctaaatcttacttaccaacttgcattttgataaccttgatttgaaaatttttaata

SEQ ID NO: 20337 - DNA, 689 bp, synthetic construct
  source 1..689: mol_type = other DNA
gccttggggttgttcccactccaagggcccacgtggcggctagtactctggtacttcggtacctttgtacgcctgttttatctcccttcccaatgtaatttagaagcttttaaatcaaggctcaataggtggggcgcaaaccagcgctctcatgagcaagcactcctgtctccccggtgtggttgtataaactgttcccacggttgaaaacaacctatccgttatccgctatagtacttcgagaaacctagtatcacctttggattgttgacgcgttgcgctcagcacactaacccgtgtgtagcttgggtcgatgagtctggacataccccactggcgacagtggtccaggctgcgttggcggcctactcatggtgaaaaccatgagacgctagacatgaacaaggtgtgaagagtctattgagctactatagagtcctccggcccctgaatgcggctaatcctaaccatggagcaagtgctcacaggccagtgagttgcttgtcgtaatgcgcaagtccgtggcggaaccgactactttgggtgtccgtgtttcactttttacttttatgactgcttatggtgacaatttgatattgttaccatttagctgtcaaattaattgcaaaaggtcctaggtcttacttaccaatttgcattttgataaccttgatttgaaaattttaata

SEQ ID NO: 20338 - DNA, 651 bp, synthetic construct
  source 1..651: mol_type = other DNA
ccccgtaacttagaagcataaaaccaagttcagtaggaaggggtgcaaaccagtacctctatgaacaagcacttctgtttccccggtgacattgcatagactgctcacgcggttgaaagcgatcgatccgttatccgctcgtgtacttcgagaagcctagtatcgccttggaatcttcgatgcgttgcgctcagcacccgaccccggggtgtagcttaggctgatgagtctggacgttcctcaccggtgacggtggtccaggctgcgttggcggcctacctatggctaacgccataggacgctagatgtgaacaaggtgtgaagagcctattgagctacacgagagtcctccggcccctgaatgcggctaatcctaaccacggagcaagcggtcacaaaccagtggctggcttgtcgtaacgcgcaagtctgtggcggaaccgactactttgggtgtccgtgtttcctgttatttttatcatggctgcttatggtgacaatctgtgattgttatcataaagcgatttggattggccatccggtgagtgttgtatcgaatatttgactgtttgacagaaccactgtgttagattcacttcatatttaagtaatcaatcaaaaacagtacgaagataaaacaatagtactgca

SEQ ID NO: 20339 - DNA, 651 bp, synthetic construct
  source 1..651: mol_type = other DNA
ccccgtaacttagaagcataaaaccaagttcagtaggaaggggtgcaaaccagtacctctatgaacaagcacttctgtttccccggtgacattgcatagactgctcacgcggttgaaagcgatcgatccgttatccgctcgtgtacttcgagaagcctagtatcgccttggaatcttcgatgcgttgcgctcagcacccgaccccggggtgtagcttaggctgatgagtctggacgttcctcaccggtgacggtggtccaggctgcgttggcggcctacctatggctaacgccataggacgctagatgtgaacaaggtgtgaagagcctattgagctacacgagagtcctccggcccctgaatgcggctaatcctaaccacggagcaagcggtcacaaaccagtggctggcttgtcgtaacgcgcaagtctgtggcggaaccgactactttgggtgtccgtgtttcctgttatttttatcatggctgcttatggtgacaatctgtgattgttatcataaagcgatttggattggccatccggtgagtgttgtatcgaatacttgactgtttgacagaactactgtgttagactcacttcatatttaactaatcaatcaaaaacagtacgaagataaaacaacaatactgca

SEQ ID NO: 20340 - DNA, 651 bp, synthetic construct
  source 1..651: mol_type = other DNA
ccccgtaacttagaagcaaaaaaccaagttcagtaggaaggggtgcaaaccagtacctctatgaacaagcacttctgtttccccggtgacattgcatagactgctcacgcggttgaaagcgatcgatccgttatccgctcgtgtacttcgagaagcctagtatcgccttggaatcttcgatgcgttgcgctcagcacccgaccccggggtgtagcttaggctgatgagtctggacgctcctcaccggcgacggtggtccaggctgcgttggcggcctacctatggctaacgccataggacgctagatgtgaacaaggtgtgaagagcctattgagctacgcgagagtcctccggcccctgaatgcggctaatcctaaccacggagcaagcggtcacaaaccagtggctagcatgtcgtaatgcgcaagtctgtggcggaaccgactactttgggtgtccgtgtttcctgttatttttatcatggctgcttatggtgacaatctgtgattgttatcataaagcgatttggattggccatccggtgagtgttgtgtcgaatatttgactgtttaatagaaccactgtgttagattcacttcacatttgactaatcaatcaaaaacagtacgaagataaaacaacaatactgca

SEQ ID NO: 20341 - DNA, 651 bp, synthetic construct
  source 1..651: mol_type = other DNA
ccccgtaacttagaagcataaaaccaagttcagtaggaaggggtgcaaaccagtacctctatgaacaagcacttctgtttccccggtgacattgcatagactgctcacgcggttgaaagcgatcgatccgttatccgctcgtgtacttcgagaagcctagtatcgccttggaatcttcgatgcgttgcgctcagcacccgaccccggggtgtagcttaggctgatgagtctggacgttcctcaccggtgacggtggtccaggctgcgttggcggcctacctatggctaacgccataggacgctagatgtgaacaaggtgtgaagagcctattgagctacacgagagtcctccggcccctgaatgcggctaatcctaaccatggagcaagcggtcacaaaccagtggctggcttgtcgtaacgcgcaagtctgtggcggaaccgactactttgggtgtccgtgtttcctgttatttttatcatggctgcttatggtgacaatctgtgattgttatcataaagcgatttggattggccatccggtgagtgttgtatcgaatacttgactgtttgacagaactactgtgttagactcacttcatatttaactaatcaatcaaaaacagtacgaagataaaacaacaatactgca

SEQ ID NO: 20342 - DNA, 712 bp, synthetic construct
  source 1..712: mol_type = other DNA
cagggcccactgggcgccagcacactggtatcaaggtacctttgtgcgcctgttttgcttcccttttcccagaggtaacttagaagcaatactccacgaccaatagcaggcgtggcacaccagccatgtctcggtcaagcacttctgtgaccccggactgagtatcaataaactgctcacgcggtcgaaggagaaaacgtccgttacccggctagctacttcgagaaacctagtaacgccatgaaaattgcgaggtgtttcgctcagcacatccccagtgtagatcaggtcgatgagtcaccgcattccccacaggtaactgtggcggtggctgcgttggcggcctgcccatggggtaactcatgggacgcttcaatacggacatggtgtgaagagtctattgagctagttagtattcctccggcccctgaatgcggctaatcctaactgtggagcatgcgcccccattccagagggtagcatgtcgtaacgggtaactccgcagcggaaccgactactttgggtgtccgtgtttccttttattttatcattggctgcttatggtgacaattgaaagattgttaccatatagctattggattggccatccggtgacgaacagagctataatttaccaatttgtgggatttgttcctataagtttgaaagtcttaaagacccttaatttaatattactactcaatagtgcaag

SEQ ID NO: 20343 - DNA, 678 bp, synthetic construct
  source 1..678: mol_type = other DNA
gttcccactccaagggcccacgtggcggctagtactctggtacttcggtacctttgtacgcctgttttatctcccttcccaatgtaatttagaagcttttaaatcaaggctcaataggtggggcgcaaaccagcgctctcatgagcaagcactcctgtctccccggtgtggttgtataaactgttcccacggttgaaaacaacctatccgttatccgctatagtacttcgagaaacctagtatcacctttggattgttgacgcgttgcgctcagcacactaacccgtgtgtagcttgggtcgatgagtctggacatgccccactggcgacagtggtccaggctgcgttggcggcctactcatggtgaaaaccatgagacgctagacatgaacaaggtgtgaagagtctattgagctactatagagtcctccggcccctgaatgcggctaatcctaaccatggagcaagtgctcacaggccagtgagttgcttgtcgtaatgcgcaagtccgtggcggaaccgactactttgggtgtccgtgtttcactttttacttttatgactgcttatggtgacaatttgatattgttaccatttagctgtcaaattaattgcaaaagatcctaagtcttacttaccaatttgcattttgataaccttgatttgaaaattttaata

SEQ ID NO: 20344 - DNA, 678 bp, synthetic construct
  source 1..678: mol_type = other DNA
gggcccacgtggcggctagtactctggtatttcggtacctttgtacgcctgttttatctccctccccaatgtaacttagaagctttcaaatcaaagctcaataggtggagcgcaagccagcgcttccgtgagcaagtacttctgtttccccggtgcggttgtatagactgtccccacggttgaaaacaacctatccgttatccgctatagtacttcgagaaacctagtatcacctttggattgttgatgcgttgcgctcaacacactaacccgtgtgtagcttgggtcgatgagtctggacataccccactggtgacagtggtccaggctgcgttggcggcctactcatggtgaaaaccatgagacgctagacatgaacaaggtgtgaagagtctattgagctactatagagtcctccggcccctgaatgcggctaatcttaaccatggagcaagtgctcacaaaccagtgagttgcttgtcgtaatgcgcaagtccgtggcggaaccgactactttgggtgtccgtgtttcactttttacttttatgactgcttatggtgacaatttaatattgttaccattcagctagtcgaaataatcgcataaaactttaaatcctatctaacagttcacatttggatagttttattttaaggactttaaacctacctagaaag

SEQ ID NO: 20345 - DNA, 662 bp, synthetic construct
  source 1..662: mol_type = other DNA
ctgttttatatacccttacccaacgtaatatagaagcaaaacaacaaggtcaatagagagcccagtgagccaactgggtcgagaccaagcacttctgtttccccggaccgagtatcaataggctgcttacgcggctgaaggagaaaacgttcgttacccggctaactacttcgaaaaacctagtaacgccatggaagttgcgaaccgtttcgctcggcacttccccagtgtagatcaggtcgatgagtcaccgcattccccacgggcgaccgtggcggtggctgcgttggcggcctgcctatggggcaacccataggacgcttcaatatggacatggtgtgaagagtctattgagctagttagtagtcctccggcccctgaatgcggctaatcctaactgcggagcacatgcccccaacccaggaggtggtgtgtcgtaatgggtaactctgcagcggaaccgactactttgggtgtccgtgtttccttttatctcagtattggctgcttatggtgacaattgaaagattgttaccatatagctattggattggccatccggtgactaacagagcaattgtatacctattcattggttacgttccattaaatctcaaggaattaacgactctcaattacattttgctcttaaattctgcaaa

SEQ ID NO: 20346 - DNA, 647 bp, synthetic construct; identical to SEQ ID NO: 781
  source 1..647: mol_type = other DNA

SEQ ID NO: 20347 - DNA, 675 bp, synthetic construct
  source 1..675: mol_type = other DNA
ccactccaagggcccacgtggcggctagtactctggtacttcggtacctttgtacgcctgttttatctcccttcccaatgtaatttagaagttcttaaatcaatgctcaatagggggggcgcaaaccagcgctctcatgagcaagcactcctgtctccccggtgaggttgtataaactgttcccacggttgaaaacaacctatccgttatccgctatagtacttcgagaaacctagtaccacctttggattgttgacgcgttgcgctcagcacactaacccgtgtgtagcttgggtcgatgagtctggacatacctcactggcgacagtggtccaggctgcgttggcggcctactcatggtgaaagccatgagacgctagacatgaacaaggtgtgaagagtctattgagctactatagagtcctccggcccctgaatgcggctaatcctaaccatggagcaagtgctcacaggccagtgagttgcttgtcgtaatgcgcaagtccgtggcggaaccgactactttgggtgtccgtgtttcactttttacttttatgactgcttatggtgacaatttgatattgttaccatttagcttgtcaaatcaattgcaaaagatcctaactcttatttatcaacttgcatcttgataactttaatttgaaaattttaaca

SEQ ID NO: 20348 - DNA, 675 bp, synthetic construct
  source 1..675: mol_type = other DNA
ccactccaagggcccacgtggcggctagtactctggtacttcggtacctttgtacgcctgttttatctcccttcccaatgtaatttagaagttcttaaatcaatgctcaataggtggggcgcaaaccagcgctcttatgagcaagcactcctgtctccccggtgaggttgtataaactgttcccacggttgaaaacgacctatccgttatccgctatagtacttcgagaaacctagtaccacctttggattgttgacgcgttgcgctcagcacactaacccgtgtgtagcttgggtcgatgagtctggacatacctcactggcgacagtggtccaggctgcgttggcggcctactcatggtgaaagccatgagacgctagacatgaacaaggtgtgaagagtctattgagctactatagagtcctccggcccctgaatgcggctaatcctaaccatggagcaagtgctcacaagccagtgagttgcttgtcgtaatgcgcaagtccgtggcggaaccgactactttgggtgtccgtgtttcactttttacttttatgactgcttatggtgacaatttgatattgttaccatttagcttgtcaaatcaattgcaaaagatcctaactcttatttgtcaacttgcatcttgataactttaatttgaaaattttaaca

SEQ ID NO: 20349 - DNA, 689 bp, synthetic construct
  source 1..689: mol_type = other DNA
ccttggggttgttcccactccaagggcccacgtggcggctagtactctggtacttcggtacctttgtacgcctgttttatctccccccccaatgtaatttagaagctcttaaatcaaggctcaataggtggggcgcaaaccagcgctctcatgagcaagcactcctgtctccccggtgcggttgtataaactgttcccacggttgaaaacgacctatccgttatccgctatagtacttcgagaaacctagtatcacctttggattgttgacgcgttgcgctcagcacactaacccgtgtgtagcttgggtcgatgagtctggacataccccactggcgacagtggtccaggctgcgttggcggcctactcatggtgaaaaccatgagacgctagacatgaacaaggtgtgaagagtctattgagctactatagagtcctccggcccctgaatgcggctaatcctaaccatggagcaagtgcccacagaccagtgagttgcttgtcgtaatgcgcaagtccgtggcggaaccgactactttgggtgtccgtgtttcactttttacttttatgactgcttatggtgacaatttgatattgttaccatttagcttgtcaaattgattacaaaagatcctaaatcttgcttaccaatttgcattttggcaaccctgatttgaaaattttaata

SEQ ID NO: 20350 - DNA, 688 bp, synthetic construct
  source 1..688: mol_type = other DNA
ttggggttgttcccactccaagggcccacgtggcggctagtactctggtacttcggtacctttgtacgcctgttttatctcccttcccaatgtaatttagaagctcttaaatcaaggctcaataggtggggcgcaaaccagcgctctcatgagcaagcactcctgtctccccggtgtggttgtataaactgttcccacggttgaaaacaacctatccgttatccgctatagtacttcgagaaacctagtatcacctttggattgttgacgcgttgcgctcagcacactaacccgtgtgtagcttgggtcgatgagtctggacataccccactggcgacagtggtccaggctgcgttggcggcctactcatggtgaaaaccatgagacgctagacatgaacaaggtgtgaagagtctattgagctactatagagtcctccggcccctgaatgcggctaatcctaaccatggagcaagtgctcacaggccagtgagttgcttgtcgtaatgcgcaagtccgtggcggaaccgactactttgggtgtccgtgtttcactttttacttttatgactgcttatggtgacaatttgatattgttaccatttagcttgtcaaattaattacaaaagatcctaaatcttacttaccaacttgcattttgacaaccttgatttgaaaatttttaata

SEQ ID NO: 20351 - DNA, 676 bp, synthetic construct
  source 1..676: mol_type = other DNA
cccactccaagggcccacgtggcggctagtactctggtacttcggtacctttgtacgcctgttttatcccccttcccaatgtaatttagaagctcttaaattaaggctcaataggtggggcgcaaaccagcgctctcatgagcaagcactcctgtctccccggtgtggttgtataaactgtttccacggttgaaaacaacctatccgttatccgctatagtacttcgagaaacctagtatcacctttggattgttgacgcgttgcgctcagcacactaacccgtgtgtagcttgggtcgatgagtctggacataccccactggcgacagtggtccaggctgcgttggcggcctactcatggtgaaaaccatgagacgctagacatgaacaaggtgtgaagagtctattgagctactatagagtcctccggcccctgaatgcggctaatcctaaccatggagcaagtgctcacaggccagtgagttgcttgtcgtaatgcgcaagtccgtggcggaaccgactactttgggtgtccgtgtttcactttttacttttatgactgcttatggtgacaatttgatattgttaccatttagcttgtcaaatcaattgcaaaagatcctaaatcttacttaccaacttgtattttgacaaccttgatttgaaaattttaata

SEQ ID NO: 20352 - DNA, 709 bp, synthetic construct
  source 1..709: mol_type = other DNA
ggcccacagggcgctagcacactggtatcacggtacctttgtgcgcctgttttatgcatccttccccaaaagtaacttagaagcacaacttaagcgaccaatagaggctcagcactccagctgggttccggtcaagcacttctgttaccccggaccgagtatcaataggctgctagtgcggctgaaggagaaaacgttcgttacccggccaattacttcgagaaacccagtatcaccatgaaagttgcgcagtgtttcgctccacacaaccccagtgtagatcaggtcgatgagtcaccgcaacccccacgggcgaccgtggcggtggctgcgctggcggcctgcccatggggcaacccatgggacgcttcaatactgacatggtgtgaagagtctattgagctaattggtattcctccggcccctgaatgcggctaatcctaactgcggagcagacgctcgcataccagcgggtagtttgtcgtaacgggtaactctgcagcggaaccgactactttgggtgtccgtgtttccttttatttttatattggctgcttatggtgacaattgaaagattgttgccatatagctattggattggccatccggtgacaaatagagcgattatctactcatttgttgggttcattccattgaattacaaggaattaaacacccttaattttattctactgcttaattcaacaaa

SEQ ID NO: 20353 - DNA, 635 bp, synthetic construct; identical to SEQ ID NO: 66
  source 1..635: mol_type = other DNA

SEQ ID NO: 20354 - DNA, 710 bp, synthetic construct
  source 1..710: mol_type = other DNA
ttaaaacagccttggggttgttcccaccccaaaggcccacgtggcggctagtactctggtacttcggtacctttgtacgcctgttttatctcccttcccaatgtaatttagaagcttttaaatcaaggctcaataggtggggcgcaaaccagcgctctcatgagcaagcactcctgtctccccggtgtggttgtataaactgttcccacggttgaaaacaacctatccgttatccgctatagtacttcgagaaacctagtatcacctttggattgttgacgcgttgcgctcagcacactaacccgtgtgtagcttgggtcgatgagtctggacataccccactggcgacagtggtccaggctgcgttggcggcctactcatggtgaaaaccatgagacgctagacatgaacaaggtgtgaagagtctattgagctactatagagtcctccggcccctgaatgcggctaatcctaaccatggagcaagtgctcacaggccagtgagttgcttgtcgtaatgcgcaagtccgtggcggaaccgactactttgggtgtccgtgtttcattttttacttttatgactgcttatggtgacaatttgatattgttaccatttagctagtcgaaataatcacataaaactttaaatcctatctaataattcacatttggatagtttcatttcgaggactttaaacctacttacaaag

SEQ ID NO: 20355 - DNA, 684 bp, synthetic construct
  source 1..684: mol_type = other DNA
gggttgttcccactccaagggcccacgtggcggctagtactctggtacttcggtacctttgtacgcctgttttacctcccttcccaatgtaacttagaagttcttaaatcaatgctcaataggtggggcgcaaaccagcgttctcatgagcaagcactcctgtctccccggtgaggttgtataaactgttcccacggttgaaaacgacctatccgttatccgctatagtacttcgagaaacctagtaccacctttggattgttgacgcgttgcgctcagcacactaacccgtgtgtagcttgggtcgatgagtctggacatacctcactggcgacagtggtccaggctgcgttggcggcctactcatggcgaaagccatgagacgctagacatgaacaaggtgtgaagagtctattgagctactatagagtcctccggcccctgaatgcggctaatcctaaccatggagcaagtgctcacaggccagtgagttgcttgtcgtaatgcgcaagtccgtggcggaaccgactactttgggtgtccgtgtttcactttttacttttatgactgcttatggtgacaatttgatattgttaccatttagcttgtcaaatcaattgcaaaagatcctaaatcttatttatcaacttgcatcttgataactttaatttgaaaattttaaca

SEQ ID NO: 20356 - DNA, 673 bp, synthetic construct
  source 1..673: mol_type = other DNA
accccaagggcccacgtggcggctagtactctggtacttcggtacctttgtacgcctgttttatctcccttcccaatgtaacttagaagttcttaaattaatgctcaataggtggggcgcaaaccagcgctctcatgagcaagcactcctgtctccccggtgaggttgtataaactgttcccacggttgaaaacaacctatccgttatccgctatagtacttcgagaaacctagtaccacctttggattgttgacgcgttgcgctcagcacactaacccgtgtgtagcttgggtcgatgagtctggacatacctcactggcgacagtggtccaggctgcgttggcggcctactcatggtgaaagccatgagacgctagacatgaacaaggtgtgaagagtctattgagctactatagagtcctccggcccctgaatgcggctaatcctaaccatggagcaagtgctcacaggccagtgagttgcttgtcgtaatgcgcaagtccgtggcggaaccgactactttgggtgtccgtgtttcactttttacttttatgactgcttatggtgacaatttgatattgttaccatttagcttgtcaaatcaattgcaaaagatcctaaatcttatttatcaacttgcatcttgataactttaatttgaaaattttaaca

SEQ ID NO: 20357 - DNA, 673 bp, synthetic construct
  source 1..673: mol_type = other DNA
accccaagggcccacgtggcggctagtactctggtacttcggtacctttgtacgcctgttttatctcccttcccaatgtaacttagaagttcttaaatcaatgctcaataggtggggcgcaaaccagcgttctcatgagcaagcactcctgtctccccggtgaggttgtataaactgttcccacggttgaaaacgacctatccgttatccgctatagtacttcgagaaacctagtaccatctttggattgttgacgcgttgcgctcagcacactaacccgtgtgtagcttgggtcgatgagtctggacatacctcactggcgacagtggtccaggctgcgttggcggcctactcatggcgaaagccatgagacgctagacatgaacaaggtgtgaagagtctattgagctactatagagtcctccggcccctgaatgcggctaatcctaaccatggagcaagtgctcacaggccagtgagttgcttgtcgtaatgcgcaagtccgtggcggaaccgactactttgggtgtccgtgtttcactttttacttttatgactgcttatggtgacaatttgatattgttaccatttagcttgtcaaatcaattgcaaaagatcctaaatcttatttatcaacttgcatcttgataactttaatttgaaaattttaaca

SEQ ID NO: 20358 - DNA, 743 bp, synthetic construct
  source 1..743: mol_type = other DNA
ttaaaacagggctgtgggttgttcccacccacagggcccactgggcgccagcacactggtatcacggtacctttgtgcgcctgttttattcaccccccccttgagtaacgtagaagtacaattcaaacggtcaatagacagctcagtatgccaactgggcccagaccaagcacttctgtttccccggaccgagtatcaataagctgctcacgtggctgaaggagaaaacgttcgttacccggccaattacttcgagaaacccagtaccaccatggaggttgcgcagtgtttcgctccgcacaatcccagtgtagatcaggtcgatgagtcaccgcattccccacgggcgaccgtggcggtggctgcgctggcggcctgcccatggggtgacccatgggacgcttcaatatcgacatggtgcgaagagtctattgagctaattggtagtcctccggcccctgaatgcggctaatcctaactgcggagcagatacccacatgccagtgggcagtctgtcgtaacgggcaactctgcagcggaaccgactactttgggtgtccgtgtttctctttattctatatttggctgcttatggtgacaattgagagattgttgccatatagctattggattggccatccggtgacaaacagagcaattgtttatctatttgtcggctttgtgcctctaaaccttaaagcaattaagacccttaattttattttagtactcaacacagtaca

SEQ ID NO: 20359 - DNA, 684 bp, synthetic construct
  source 1..684: mol_type = other DNA
ggggttgttcccactccaagggcccacgtggcggctagtactctggtacttcggtacctttgtacgcctgttttatctcccttcccaatgtaatttagaagcttttaaatcaaggctcaataggtggggcgcaaaccagcgctctcatgagcaagcactcctgtctccccggtgtggttgtataaactgttcccacggttgaaaacaacctatccgttatccgctatagtacttcgagaaacctagtatcacctttggattgttgacgcgttgcgttcaacacactaacccgtgtgtagcttgggtcgatgagtctggacataccccactggcgacagtggtccaggctgcgttggcggcctactcatggtgaaaaccatgagacgctagacatgaacaaggtgtgaagagtctattgagctactatagagtcctccggcccctgaatgcggctaatcctaaccatggagcaagtgctcacaggccagtgagttgcttgtcgtaatgcgcaagtccgtggcggaaccgactactttgggtgtccgtgtttcactttttacttttatgactgcttatggtgacaatttgatattgttaccatttagctgtcaaattaattgcaaaagatcctaagtcttacttaccaatttgcattttgataaccttgatttgaaaattttaata

SEQ ID NO: 20360 - DNA, 684 bp, synthetic construct
  source 1..684: mol_type = other DNA
ggggttgttcccactccaagggcccacgtggcggctagtactctggtacttcggtacctttgtacgcctgttttatctcccttcccaatgtaatttagaagcttttaaatcaaagctcaataggtggggcgcaaaccagcgctctcatgagcaagcactcctgtctccccggtgtggttgtataaactgttcccacggttgaaaataacctatccgttatccgctatagtacttcgagaaacctagtatcacctttggattgttgacgcgttgcgctcagcacactaacccgtgtgtagcttgggtcgatgagtctggacataccccactggcgacagtggtccaggctgcgttggcggcctactcatggtgaaaaccatgagacgctagacatgaacaaggtgtgaagagtctattgagctactatagagtcctccggcccctgaatgcggctaatcctaaccatggagcaagtgctcacaggccagtgagttgcttgtcgtaatgcgcaagtccgtggcggaaccgactactttgggtgtccgtgtttcactttttacttttatgactgcttatggtgacaatttgatattgttaccatttagctgtcaaattaattgcaaaagatcctaagtcttacttaccaatttgcattttgataaccttgatttgaaaattttaata

SEQ ID NO: 20361 - DNA, 672 bp, synthetic construct
  source 1..672: mol_type = other DNA
accccaaggcccacgtggcggctagtactctggtacttcggtacctttgtacgcctgttttatctcccttcccaatgtaacttagaagttcttaaatcaatgctcaataggtggggcgcaaaccagcgctctcatgagcaagcactcctgtctccccggtgaggttgtataaactgttcccacggttgaaaacaacctatccgttatccgctatagtacttcgagaaacctagtaccacctttggattgttgacgcgttgcgctcagcacactaacccgtgtgtagcttgggtcgatgagtctggacatacctcactggcgacagtggtccaggctgcgttggcggcctactcatggtgagaaccatgagacgctagacatgaacaaggtgtgaagagtctattgagctactatagagtcctccggcccctgaatgcggctaatcctaaccatggagcaagtgctcacaggccagtgagttgcttgtcgtaatgcgcaagtccgtggcggaaccgactactttgggtgtccgtgtttcactttttacttttacgactgcttatggtgacaatttgatattgttaccatttagcttgtcaaatcaattgcaaaagatcctaaatcttatttatcaatttgcatcttgataactttaatttgaaaattttaaca

SEQ ID NO: 20362 - DNA, 723 bp, synthetic construct
  source 1..723: mol_type = other DNA
tcccaccccagaggcccacgtggcggccagtataccggtattacggtacccttgtacgcctgttttatactcccttccccgcaacttagaagttaaacaaaccaagttcaatagaagggggtacaaaccagtaccaccacgaacaagcacttctgtttccccggtgacgtcatataggttgtaaccacggccaaaagtgattgatccgttatccgctcttgtacttcgagaagcccagtaccatcttgggatcttcgatgcgttgcgctcagcactcgaacccggagtgtagcttaggccgatgagtctggacattccccaccggtgacggtggtccaggctgcgttggcggcctacctgtggcccaagccacaggacgctagatgtgaacaaggtgtgaagagcctattgagctacaagggaatcctccggcccctgaatgcggctaatcctaactacggagcagacggtcacaaaccagtgaatggtctgtcgtaatgcgcaagtctgtagcggaaccgactactttgggtgtccgtgtttccttttatctttttaatggctgcttatggtgacaatcctagattgttatcataaagcgatttggattggccatccagtgatatttgaaaccattactgtattgcctgttaaggctattttaaagacttaataaatacaacttcattcaactcatctacaccaaccaataactatctcata

SEQ ID NO: 20363 - DNA, 711 bp, synthetic construct
  source 1..711: mol_type = other DNA
agggcccactgggcgccagcactctggtatcacggtacctttgtgcgcctgttttaaaaccctctccccaatttgaaacttagaagcaatacacctcgatcaatagtaggcatgacacgccagccatgtcttgatcaagcacttctgtttccccggactgagtatcaataaactgcttgcgcggtcgaaggagaaaacgtccgttacccgactaactacttcgagaaacccagtaacaccatggaaattgcggagtgtttcactcagcacattcccagtgtagatcaggtcgatgagtcaccgcattccccacgggtgaccgtggcggtggctgcgctggcggcctgcccatggggcaacccatgggacgcttcaatatggacatggtgtgaagagtctattgagctagttagtagtcctccggcccctgaatgcggctaatcctaactgcggagcacgtgcctccattccagggggtggcgtgtcgtaacgggcaactctgcagcggaaccgactactttgggtgtccgtgtttcttttaattttatactggctgcttatggtgacaattgaaagattgttgccatatagctattggattggccatccggtatccaacagagcaattgtgtacctttttgttggatttgtaccacttaccagaacaagttttcatacactgtgttacattattagactaaacacagaaaa

SEQ ID NO: 20364 - DNA, 595 bp, synthetic construct
  source 1..595: mol_type = other DNA
gtactaccacgaacaagcacttctgttaccccggtgagattgcataggccgtccccacggctaaaagcgattgatccgttatccgctcttgtacttcgagaagcctagtaagaccttgggatcctcgatgcgttgcgctcaacactcaaccccagagtgtagcttgggctgatgagtctggacattcctcaccggtgacggtggtccaggctgcgttggcggcctacctgtggcccaaagccacaggacgctagttgtgaacaaggtgtgaagagcctattgagctacaagagagtcctccggcccctgaatgcggctaatcccaaccacggagcaggcgattgcaacccagcaactagcctgtcgtaacgcgcaagtctgtggcggaaccgactactttgggtgtccgtgtttccttttattacataatggctgcttatggtgacaatcacagattgttgtcataaagcgaattggattggccatccggtgagaattaaaacaattatttacttatttgttggatttgttcctatacacacccaaacaccttgcttgattgaagtaattctgttgataagacaacactattaca

SEQ ID NO: 20365 - DNA, 687 bp, synthetic construct
  source 1..687: mol_type = other DNA
ttggggttgttcccactccaagggcccacgtggcggctagtactctggtacttgggtacctttgtacgcctgttttatctcccttcccaatgtaatttagaagctcttaaatcaaggctcaataggtggggcgcaaaccagcgctctcatgagcaagtactcctgtctccccggtgtggttgtataaactgttcccacggttgaaaacaacctatccgttatccgctatagtacttcgagaaacctagtatcacctttggattgttgacgcgttgcgctcagcacactaacccgtgtgtagcttgggtcgatgagtctggacacaccccactggcgacagtggtccaggctgcgttggcggcctactcatggtgaaaaccatgagacgctagacatgaacaaggtgtgaagagtctattgagctactatagagtcctccggcccctgaatgcggctaatcctaaccatggagcaagtgctcacaggccagtgagttgcttgtcgtaatgcgcaagtccgtggcggaaccgactactttgggtgtccgtgtttcactttttacttttatgactgcttatggtgacaatttgatattgttaccatttagcttgtcaaattaattgcaaaagatcctaaatctcactcaccaactttcattttgacaaccttgatttgaaaattttaata

SEQ ID NO: 20366 - DNA, 704 bp, synthetic construct
  source 1..704: mol_type = other DNA
actgggcgctagcacactggtatcacggtacctttgtgcgcctgttttattcaccctgaccccaaagcaacgtagaagcatgccaccaaaggtcaataggcgatccagtactccaactgggttatgaccaagcacttctgttaccccggactgagtaccaataagctgctcacgcggctgaaggggaaagcgttcgtcacccgaccaattacttcgagaaacctagtaccaccatgaaagttgcgcagcgtttcgctcagcacaaccccagtgtagatcaggctgatgagtcaccgcattccccacgggcgaccgtggcggtggctgcgttggcggcctgcccatggggcaacccatgggacgcttcaatacagacatggtgtgaagagtctattgagctaattggtggtcctccggcccctgaatgcggctaatcctaactgcggagcagatacccacgcaccagtgggcagtctgtcgtaatgggtaactctgcagcggaaccgactactttgggtgtccgtgtttccttttattttatactggctgcttatggtgacaattgatagattgttaccatatagctattggattggccatccagtgacaagcagagctatcatctacctgtttgttggttttgttccattgaattttaaggttctaaaaactattgattttatcctagcactcaatacagcaaa

SEQ ID NO: 20367 - DNA, 670 bp, synthetic construct
  source 1..670: mol_type = other DNA
tccaagggcccacgtggcggctagtactctggtacttcggtacctttgtacgcctgttttatctcccttcccaatgtaatttagaagcttttaaatcaaggctcaataggtggggcgcaaaccagcgctctcatgagcaagcactcctgtctccccggtgtggttgtataaactgttcccacggttgaaaacaacctatccgttatccgctatagtacttcgagaaacctagtatcacctttggattgttgacgcgttgcgctcagcacactaacccgtgtgtagcttgggtcgatgagtctggacataccccactggcgacagtggtccaggctgcgttggcggcctactcatggtgaaaaccatgagacgctagacatgaacaaggtgtgaagagtctattgagctactatagagtcctccggcccctgaatgcggctaatcctaaccatggagcaagtgctcacaggccagtgagttgcttgtcgtaatgcgcaagtccgtggcggaaccgactactttgggtgtccgtgtttcactttttacttttatgactgcttatggtgacaatttgatattgttaccatttagctgtcaaattaattgcaaaagatcttaagtcttacttaccaatttgcattttgataaccttgatttgaaaattttaata

SEQ ID NO: 20368 - DNA, 697 bp, synthetic construct
  source 1..697: mol_type = other DNA
taaaacagctttggggttgttcccactccaagggcccacgtggcggctagtactctggtacttcggtacctttgtacgcctgttttatctcccttcccaatgtaatttagaagctcttaaatcaaggctcaataggtggggcgcaaaccagcgctctcatgagcaagcacttctgtctccccggtgtggttgtataaactgttcccacggttgaaaacaacctatccgttatccgctatagtacttcgagaaacctagtatcacctttggattgttgacgcgttgcgctcagcacactaacccgtgtgtagcttgggtcgatgagtctggacataccccactggcgacagtggtccaggctgcgttggcggcctactcatggtgaaaaccatgagacgctagacatgaacaaggtgtgaagagtctattgagctactatagagtcctccggcccctgaatgcggctaatcctaaccatggagcaagtgctcacaggccagtgagttgcttgtcgtaatgcgcaagtccgtggcggaaccgactactttgggtgtccgtgtttcactttttacttttatgactgcttatggtgacaatttgatattgttaccatttagcttgtcaaattaattgcaaaagatcctaaatcttacttaccaacttgcattttgacaatcttgatttgaaaattttaata

SEQ ID NO: 20369 - DNA, 684 bp, synthetic construct
  source 1..684: mol_type = other DNA
gtcggtgtcccactccaacagaccacgtggcggctagtactctggtacttcggtacctttgtacgcctgttttatctcccttcccaatgtaatttagaagctcttaaatcaaggctcaataggtggggcgcaaaccagcgctctcatgagcaagcactcctgtctccccggtgtggttgcataaactgttcccacggttgaaaacaacctatccgttatccgctatagtacttcgagaaacctagtatcacctttggattgttgacgcgttgcgctcagcacactaacccgtgtgtagcttgggtcgatgagtctggacataccccactggcgacagtggtccaggctgcgttggcggcctactcatggtgaaaaccatgagacgctagacatgaacaaggtgtgaagagtctattgagctactatagagtcctccggcccctgaatgcggctaatcctaaccatggagcaagtgctcacaggccagtgagttgcttgtcgtaatgcgcaagtccgtggcggaaccgactactttgggtgtccgtgtttcactttttacttttatgactgcttatggtgacaatttgatattgttaccatttagcttgtcaaattaattgcaaaagatcctaaatcttacttaccaacttgcattttaataaccttgatttgaaaattttaata

SEQ ID NO: 20370 - DNA, 666 bp, synthetic construct
  source 1..666: mol_type = other DNA
ggctagtactctggtatttcggtacctttgtacgcctgttttatctccctccccaatgtaacttagaagctttcaaatcaaagctcaataggtggagcgcaaaccagcgcttccgtgagcaagcactcctgtttccccggtgcggctgtatagactgttcccacggttgaaaacagcctatccgttatccgctatagtacttcgagaaacctagtatcacctttggattgttgatgcgttgcgctcagcacactaacccgtgtgtagcttgggtcgatgagtctggacacaccccactggtgacagtggtccaggctgcgttggcggcctactcatggtgaaaaccatgagacgctagacatgaacaaggtgtgaagagtctattgagctactatagagtcctccggcccctgaatgcggctaatcttaaccatggagcaagtgctcacaaaccagtgagttgcttgtcgtaatgcgtaagtccgtggcggaaccgactactttgggtgtccgtgtttcactttttacttttatgactgcttatggtgacaatttgatattgttgccatttagctagtcaaattaatcacataaaaactttgaatcctatctaacaattcacatttggatagcttcattttgaggattttaaacctatttacaaag

SEQ ID NO: 20371 - DNA, 678 bp, synthetic construct
  source 1..678: mol_type = other DNA
gggcccacgtggcggctagtactctggtatttcggtacctttgtacgcctgttttatctccctccccaatgtaacttagaagctttcaaatcaaagctcaataggtggagcgcaaaccagcgcttccgtgagcaagtactcctgtttccccggtgcggttgtatagactgttcccacggttgaaaacaacctatccgttatccgctatagtacttcgagaaacctagtatcacctttggattgttgatgcgttgcgctcaacacactaacccgtgtgtagcttgggtcgatgagtctggacataccccactggtgacagtggtccaggctgcgttggcggcctactcatggtgaaaaccatgagacgctagacatgaacaaggtgtgaagagtctattgagctactatagagtcctccggcccctgaatgcggctaatcttaaccatggagcaagtgctcacaagccagtgagttgcttgtcgtaatgcgcaagtccgtggcggaaccgactactttgggtgtccgtgtttcactttttacttttatgactgcttatggtgacaatttaatattgttaccattcagctagtcgaaataatcgcataaaactttaaatcctatctaacaattcacatttggatagtttcattttgaggactttaaacctgcttacaaag

SEQ ID NO: 20372 - DNA, 670 bp, synthetic construct
  source 1..670: mol_type = other DNA
tccaagggcccacgtggcggctagtactctggtacttcggtacctttgtacgcctgttttatctcccttcccaatgtaatttagaagcttttaaatcaaggctcaataggtggggcgcaaaccagcgctctcatgagcaagcactcctgtctccccggtgtggttgtataaactgttcccacggttgaaaacaacctatccgttatccgctatagtacttcgagaaacctagtatcacctttggattgttgacgcgttgcgctcagcacactaacccgtgtgtagcttgggtcgatgagtctggacataccccactggcgacagtggtccaggctgcgttggcggcctactcatggtgaaaaccatgagacgctagacatgaacaaggtgtgaagagtctattgagctactatagagtcctccggcccctgaatgcggctaatcctaaccatggagcaagtgctcacaggccagtgagttgcttgtcgtaatgcgcaagtccgtggcggaaccgactactttgggtgtccgtgtttcactttttacttttatgactgcttatggtgacaatttgatattgttaccatttagctgtcaaattaattgcaaaagatcctaagtcttacttaccaatttgcattttgataaccttgatttgaaaattttaata

SEQ ID NO: 20373 - DNA, 731 bp, synthetic construct
  source 1..731: mol_type = other DNA
ttgtgggttgcacccacccacagggcccactgggcgctagcacactggtattacggtacctttgtgcgcctgttttatacacccttacccaacgtaatatagaagcaaagcaacaaggtcaatagagagcccagtgagccaactgggtcaagaccaagcacttctgtttccccggaccgagtatcaataggctgcttacgcggctgaaggagaaaacgttcgttacccggctaactacttcaaaaaacctagtaacgccatggaagttgcgaaccgtttcactcggcacttccccagtgtagatcaggtcgatgagtcaccgcattccccacgggtaaccgtggcggtggctgcgttggcggcctgcctatggggcaacccataggacgcttcaatatggacatggtgtgaagagtctattgagctagttagtagtcctccggcccctgaatgcggctaatcctaactgcggagcacatgcccccaacccaggaggtggtgtgtcgtaatgggtaactctgcagcggaaccgactactttgggtgtccgtgtttccttttatcccaatgttggctgcttatggtgacaattgaaagattgttaccatatagctattggattggccacccggtgactaacagagcaattgtatacctattcattggttacgttccattaaatctcaaggaattaacgactctcaattacattttgctcttgaattctgcaaa

SEQ ID NO: 20374 - DNA, 657 bp, synthetic construct
  source 1..657: mol_type = other DNA
cacaccctccccaaagatgtaacttagaagcactttccaagtggtcattaggcagctcagcacaccagctgagtccagaccaagcacttctgttaccccggaccgagtatcaataggctgcttgcgcggctgaaagagaaaacgttcgttacccggccaattacttcgagaaacctagtaccaccatgaaagttgcgcggcgtttcgttccgcacaaccccagtgtagatcaggtcgatgagtcaccgcgttcctcacgggcgaccgtggcggtggctgcgctggcggcctgcccatgggacaacccatgggacgcttcaatgctgacatggtgtgaagagtctattgagctaattggtagtcctccggcccctgaatgcggctaatcctaactgcggagcagatacccacaaaccagtgggcagtctgtcgtaacgggtaactctgcagcggaaccgactactttgggtgtccgtgtttccttttattcatacattggctgcttatggtgacaattgagagattgttaccatatagctattggattggccatccggtgtctaacagagcaattgtatacctatttataggttttataccattgaattacaaagtcttagagactctgaatcttattataacacttaacacagcaaa

SEQ ID NO: 20375 - DNA, 784 bp, synthetic construct
  source 1..784: mol_type = other DNA
cacccaagggcccaacgggcgccagtacactggtacgccagtaccctggtattacggtaccattgtacgccagtacctttgtacgcctatttgtacccctcccccatgtaaccttagaagcttaaatatacaatgaccaataggagtccaacacccagttggattgcggtcaagcacttctgtctccccggacctagtagtgataggctgtacccacggccgaagatgaacccgtccgttatccggccagctacttcgagaagcctagtagcatcaaagatctgtcttggcgtttcgctcagcgcattccccccgcgtagatcgggctgatgggtctccgcattccccacgggcgaccgtggcggaggccgcgtggcggcccgcctatggcgaaagccataggacgccatttcagtgacagggtgtgaagagcctattgagctagttggtagtcctccggcccctgaatgcggctaatcctaaccactgagcgtccaccaacaaaccagttgggagggcgtcgtaacgggtaactcggtggcggaaccgactactttgggtgtccgtgtttcctgttgatcctatattggctgcttatggtgacaacgataagttgttatcataaagcttttgggttggccacctggaaaaaattatcagtgtttgatattgttcggctctcacgcctaccaacaaaacaagctctatatttattaatttcattttatccattggaggatattaccgaattccatctacaacttttgctcactttatcagcaaa

SEQ ID NO: 20376 - DNA, 684 bp, synthetic construct
  source 1..684: mol_type = other DNA
tattgcggtacctttgtgcgcctgttttatggcccccccccagttggaacttagaagtgaagcctctcgaccaatagtgggcgtggcacaccagccacgtcttggtcaagcacatctgtttccccggactgagtatcaataaactgctcgcgcggttgaaggagaaaacgttcgttacccggctaactacttcgggaaacccagtagtatcatggaaattgcgaggcgtttcgctcagcactccccccgtgtagatcaggtcgatgagtcactgcaccccccacgggtgaccgtggcagtggctgcgttggcggcctgcctatggggtgacccataggacgcttcaaaatggacatggtgcgaagagtctactgagctagttagtagtcctccggcccctgaatgcggctaatcctaaccgcggagcaagtgtccacaaaccagtgggttgcttgtcgtaatgggtaactctgcggcggaaccgactactttgggtgtccgtgtttccttttatcttttattatggctgcttatggtgacaattgagagattgttaccatatagctattggattggccatccggtgaacaacagagcgatcatttacctctttgttggtttcgttccattgagtcccaaagtttttacgacactcaaatttattctcctacttaacaaagcaaa

SEQ ID NO: 20377 - DNA, 677 bp, synthetic construct
  source 1..677: mol_type = other DNA
ggcccacgtggcggctagtactctggtacttcggtacctttgtacgcctgttttatctccctccccaatgtaacttagaagctttcaaatcaaagctcaataggtggaacgcaagccagcgcttccgtgagcaagcactcctgtttccccggtgcggttgtatagactgttcccacggttgaaaacaacctatccgttatccgctatagtacttcgagaaacctagtatcacctttggattgttgatgcgttgcgctcagcacactaacccgtgtgtagcttgggtcgatgagtctggacataccccactggtgacagtggtccaggctgcgttggcggcctactcatggtgaaaaccatgagacgctaaacatgaacaaggtgtgaagagtctattgagctactatagagtcctccggcccctgaatgcggctaatcttaaccatggagcaagtgctcacaaaccagtgagttgcttgtcgtaatgcgcaagtccgtggcggaaccgactactttgggtgtccgtgtttcactttttacttttatgactgcttatggtgacaatttaatattgttaccatttagctagtcatattaatcacataaaactttaaattctatctaataattcacatttggatagcttcattttgaggactttaaacctatttacaaaa

SEQ ID NO: 20378 - DNA, 710 bp, synthetic construct
  source 1..710: mol_type = other DNA
ttaaaacagccttggggttgttcccaccccaagggcccacgtggcggctagtactctggtatttcggtacctttgtacgcctgttttatatccctccccaatgtaatttagaagctttcaaatcaaagctcaataggtggagcgcaagccagcgcttccgtgagcaagcacttctgtttccccggtgcggttgtatagactgttcccacggttgaaaacgacctatccgttatccgctatagtacttcgagaaacctagtatcacctttggattgttgatgcgttgcgctcaacacactaacccgtgtgtagcttgggtcgatgagtctggacgtaccccactggtgacagtggtccaggctgcgttggcggcctactcatggtgaaaaccatgagacgctagacatgaacaaggtgtgaagagtctattgagctactatagagtcctccggcccctgaatgcggctaatcttaaccatggagcaagtgctcacaaaccagtgagttgcttgtcgtaatgcgcaagtccgtggcggaaccgactactttgggtgtccgtgtttcactttttacttttatgactgcttatggtgacaatttaatattgttaccattcagctagtcgaaataatcacataaaactttaaatcctatctaataattcacatttggatagtttcatttcgaggactttaaacctacttacaaag

SEQ ID NO: 20379 - DNA, 623 bp, synthetic construct
  source 1..623: mol_type = other DNA
aaaagttcaataggagggggtacaaaccagtaccaccacgaacaagcacttctgtctccccggtgacattgcatagactgtccccacggttgaaagcaattgatccgttacccgctcttgtacttcgagaagcctagtaccatcttggaatcatcgatgcgttgcgctccacactcagtcccagagtgtagcttaggctgatgagtctggacattcctcaccggcgacggtggtccaggctgcgttggcggcctacctgtggcccaaagccacaggacgctagatgtgaacaaggtgtgaagagcctattgagctataagagagtcctccggcccctgaatgcggctaatcccaaccacggatcaagggtgcacgaaccagtgtataccttgtcgtaacgcgcaagtccgtggcggaaccgactactttgggtgaccgtgtttccttttattatctcaatggctgcttatggtgacaatcattgattgttatcataaagcgaattggactggccatccggtgaaagtgaaacatattgtttgcctcctcgttgggtctacttcaaccaacctttacttacaatcttaccactacagttttgctggttagaagtgtgtttcacg

SEQ ID NO: 20380 - DNA, 688 bp, synthetic construct
  source 1..688: mol_type = other DNA
ttatattacggtacccttgtgcgcctgttttatctaccccctccccaatgtaacgtagaagcacaaatcaagtggtcaatagatggcccagtatgccaactgggtttagaccaagcacttctgttaccccggactgagtatcaataagctgctcacgcggctgaaggagaaaacgttcgttacccggccagctacttcgagaagcctagtaccaccatgaaggatgcgcagtgtttcgttcagcacaaccccagtgtagatcaggtcgatgagtcaccgcaatccccacgggcgaccgtggcggtggctgcgctggcggcctgcccatggggttacccatgggacgcttcaattccgacatggtgcgaagagtctattgagctagttggtagtcctccggcccctgaatgcggctaatcccaactgcggagcaagcacccacaaaccagtgggctgtttgtcgtaatgggcaactctgcagcggaaccgactactttgggtgtccgtgtttccttttattcctacactggctgcatatggtgacaattgaaagattgttgccatatagctattggattggccatccggtgacaaacagagctattatctacttgtttgtcggctttgtaccgttgaattttaaagttgtaaaaaccctaaccttcatcttaacactcaacacagcaaa

SEQ ID NO: 20381 - DNA, 633 bp, synthetic construct
  source 1..633: mol_type = other DNA
cacccacagggcccactgggcgctagtacactggtatcacggtacctttgtgcgcctgtttaacccaccttccccaaacgtaacttagaagcacaactcaaatgatcattagacggctcagtatgccaactgggtctcgatcaagcacttctgttaccccggactgagtaccaataggctgctcacgcggctgaaggggaaaccgttcgttacccgaccaactacttcgagaaacctagtaccaccatgaaagttgcgcagcgtttcgctccgcacaaccccagtgtagatcaggccgatgagtcaccgcaaaccccacgggcgaccgtggcggtggctgcgctggcggcctgcccatgggacaactcatgggacgctacaatactgacatggtgtgaagagtctattgagctagttggtagtcctccggcccctgaatgcggctaatcctaactgtggagcagatacccacgcaccagtgggcagtctgtcgtaatgggcaactccgcagcggaaccgactactttgggtgtccgtgtttcttttattcctacgctggctacatatggtgacgatttgtaccataaagccttaaccgctcctcaacaccgtcataacacttaacacgctgag

SEQ ID NO: 20382 - DNA, 666 bp, synthetic construct
  source 1..666: mol_type = other DNA
ggcccatgtggcggctagtactctggtacttcggtacctttgtacgcctgttttatctcccttcccaatgtaatttagaagctcttaaatcaaggctcaataggtggggcgcaaaccagcgctctcatgagcaagcactcctgtctccccggtgtggttgtataaactgttcccacggttgaaaacaacctatccgttatccgctatagtacttcgagaaacctagtatcacctttggattgttgacgcgttgcgctcagcacactaacccgtgtgtagcttgggtcgatgagtctggacataccccactggcgacagtggtccaggctgcgttggcggcctactcatggtgaaaaccatgagacgctagacatgaacaaggtgtgaagagtctattgagctactatagagtcctccggcccctgaatgcggctaatcctaaccatggagcaagtgctcacaggccagtgagttgcttgtcgtaatgcgcaagtccgtggcggaaccgactactttgggtgtccgtgtttcactttttacttttatgactgcttatggtgacaatttgatattgttaccatttagcttgtcaaattaattgcaaaagatcctaaatcttacttaccaacttgtattttgacaaccttgatttgaaaatttttaata

SEQ ID NO: 20383 - DNA, 791 bp, synthetic construct
  source 1..791: mol_type = other DNA
tcccacccacagggcccactgggcgctagtacactggtatgccagtactctggtattacggtaccactgtacgccagtacctttgtacgcctgttttatatccctttcccaaacgtaaccttagaagtttaagtaaacaaagaccaataggagtccaacatccagttggattgcggtcaagcacttctgtttccccggacctagtagtgataggctgtacccacggccgaagatgaacccgtccgttatccggccagctacttcgagaagcctagtagcatcaaagatctgtcttggcgtttcgctcagcgcgttccccccgcgtagatcgggtcgatgggtctccgcatcccccacgggcgaccgtggcggaggccgcgtggcggcccgcctatggcgaaagccataggacgccatttcagtgacagggtgtgaagagcctattgagctagttggtagtcctccggcccctgaatgcggctaatcctaaccacggagcgtccaccagcaaaccagctgggagggcgtcgtaacgggtaactctgtggcggaaccgactactttgggtgtccgtgtttccttttgatcctattgtggctgcttatggtgacaactaacagttgttatcataaagcttttggattggccatccggaaagagttaacagtttgttcgctcattgctttgtcaaagtttcctttgagaaaagcaatctatttgttagtttcattttataaactagaggatatttcaagtgcccatttgaacttgttaattcaactacatcaaac

SEQ ID NO: 20384 - DNA, 637 bp, synthetic construct; identical to SEQ ID NO: 71
  source 1..637: mol_type = other DNA

SEQ ID NO: 20385 - DNA, 633 bp, synthetic construct
  source 1..633: mol_type = other DNA
cacccacagggcccactgggcgctagtacactggtatcacggtacctttgtgcgcctgtttaacccaccttccccaaatgtaacttagaagcacaactcaaatgatcattagacggctcagtatgccaactgggtctcgatcaagcacttctgttaccccggactgagtaccaataggctgctcacgcggctgaaggggaaaccgttcgttacccgaccaactacttcgagaaacctagtaccaccatgaaagttgcgcagcgtttcgctccgcacaaccccagtgtagatcaggccgatgagtcaccgcaaacctcacgggcgaccgtggcggtggctgcgctggcggcctgcccatgggacaactcatgggacgctacaatactgacatggtgtgaagagtctattgagctagttggtagtcctccggcccctgaatgcggctaatcctaactgtggagcagatacccacgcaccagtgggcagtctgtcgtaatgggcaactccgcagcggaaccgactactttgggtgtccgtgtttcttttattcctgcgctagctacatatggtgacgatttgtaccataaagccttaaccgctcctcaacaccgtcataacacttaacacgctgag

SEQ ID NO: 20386 - DNA, 660 bp, synthetic construct
  source 1..660: mol_type = other DNA
gtactctggtacttcggtacctttgtacgcctgttttatctccctccccaatccacctattgagctttgatttgaaagctcaataggtggagtgcaagccagcgcttccgtgagcaagtacttctgtttccccggtgcggttgtatagactgttcccacggttgaaaacaacctatccgttatccgctatagtacttcgagaaacctagtatcacctttggattgttgatgcgttgcgctcaacacactaacccgtgtgtagcttgggtcgatgagtctggacataccccactggtgacagtggtccaggctgcgttggcggcctactcatggtgaaaaccatgagacgctaaacatgaacaaggtgtgaagagtctattgagctactatagagtcctccggcccctgaatgcggctaatcttaaccatggagcaagtgctcacaaaccagtgagttgcttgtcgtaatgcgcaagtccgtggcggaaccgactactttgggtgtccgtgtttcactttttacttttatgactgcttatggtgacaatttaatattgttaccattcagctagtcgaaataatcgcataaaactttaaatcctatctaacagttcacatttggatagtttcattttgaggactttaaacctacttataaag

SEQ ID NO: 20387 - DNA, 675 bp, synthetic construct
  source 1..675: mol_type = other DNA
ccactccaagggcccacgtggcggctagtactctggtacttcggtacctttgtacgcctgttttatctcccttcccaatgtaacttagaagttcttaaatcaatgctcaataggtggggcgcaaaccagcgctctcatgagcaagcactcctgtctccccggtgaggttgtataaactgttcccacggttgaaaacaacctatccgttatccgctatagtacttcgagaaacctagtaccacctttggattgttgacgcgttgcgctcagcacactaacccgtgtgtagcttgggtcgatgagtctggacatacctcactggcgacagtggtccaggctgcgttggcggcctactcatggtgaaagccatgagacgctagacatgaacaaggtgtgaagagtctattgagctactatagagtcctccggcccctgaatgcggctaatcctaaccatggagcaagtgctcacaggccagtgagttgcttgtcgtaatgcgcaagtccgtggcggaaccgactactttgggtgtccgtgtttcactttttacttttatgactgcttatggtgacaatttgatattgttaccatttagcttgtcaaatcaattgcaaaagatcctaaatcttatttatcaacttgcatcttgataactttaatttgaaaattttaaca

SEQ ID NO: 20388 - DNA, 672 bp, synthetic construct
  source 1..672: mol_type = other DNA
accccaaggcccacgtggcggctagtactctggtacttcggtacctttgtacgcctgttttatctcccttcccaatgtaacttagaagttcttaaatcaatgctcaataggtggggcgcaaaccagcgctttcatgagcaagcactcctgtctccccggtgaggttgtataaactgttcccacggttgaaaacaacctatccgttatccgctatagtacttcgagaaacctagtaccacctttggattgttgacgcgttgcgctcagcacactaacccgtgtgtagcttgggtcgatgagtctggacatacctcactggcgacagtggtccaggctgcgttggcggcctactcatggtgaaagccatgagacgctagacatgaacaaggtgtgaagagtctattgagctactatagagtcctccggcccctgaatgcggctaatcctaaccatggagcaagtgctcacaggccagtgagttgcttgtcgtaatgcgcaagtccgtggcggaaccgactactttgggtgtccgtgtttcactttttacttttatgactgcttatggtgacaatttgatattgttgccatttagcttgtcaaatcaattgcaaaagatcctaaatcttatttatcaacttgcatcttgataactttaatttgaaaattttaaca

SEQ ID NO: 20389 - DNA, 791 bp, synthetic construct
  source 1..791: mol_type = other DNA
gttcccacccacagggcccactgggcgccagtacactggtatgctttacctcggtattgcggtaccgttgtatacagtacctttgtacgcctgttttaaatcccctccccaaatgtaaccttagaagtttaagtaaactcagaccaataggagtccaacacccagttggattacggtcaagcacttctgtctccccggacctagtagtgataggctgtacccacggccgaagatgaacccgtccgttatccggccagctacttcgagaagcctagtagcatcaaaaatctgtcttggcgtttcgctcagcgcgttccccccgcgtagatcgggctgatgggtctccgcattccccacgggcgaccgtggcggaggccgcgtggcggcccgcctatggcgaaagccataggacgccatttcagtgacagggtgtgaagagcctattgagctagttggtagtcctccggcccctgaatgcggctaatcctaaccacggagcgtccgccaacaatccagttggtagggcgtcgtaacgggtaactctgtggcggaaccgactactttgggtgtccgtgtttccttttgatcctattttggctgcttatggtgacaacgataagttgttatcataaagcttttgggttggccacctggaaaaagatatcagtgtttgatattgttcggctctcacgcctaccaacaaaacaagctctatatttattaatttcattttatccattggaggatattaccgaattccatctacaacttttgctcactttatcagcaaa

SEQ ID NO: 20390 - DNA, 663 bp, synthetic construct
  source 1..663: mol_type = other DNA
ccccacgtggcggctagtactctggtacttcggtacctttgtacgcctgttttatctcccttcccaatgtaatttagaagcttttaaatcaaagctcaataggtggggcgcaaaccagcgctctcatgagcaagcactcctgtctccccggtgtggttgtataaactgttcccacggttgaaaacaacctatccgttatccgctatagtacttcgagaaacctagtatcacctttggattgttgacgcgttgcgctcagcacactaacccgtgtgtagcttgggtcgatgagtctggacataccccactggcgacagtggtccaggctgcgttggcggcctactcatggtgaaaaccatgagacgctagacatgaacaaggtgtgaagagtctattgagctactatagagtcctccggcccctgaatgcggctaatcctaaccatggagcaagtgctcacaggccagtgagttgcttgtcgtaatgcgcaagtccgtggcggaaccgactactttgggtgtccgtgtttcactttttacttttatgactgcttatggtgacaatttgatattgttaccatttagctgtcaaattaattgcaaaagatcctaagtcttacttaccaatttgcattttgataaccttgatttgaaaattttaata

SEQ ID NO: 20391 - DNA, 665 bp, synthetic construct
  source 1..665: mol_type = other DNA
gggcccacgtggcggctagtactctggtacttcggtacctttgtacgcctgttttatctcccttcccaatgtaatttagaagcttttaaatcaaggctcaataggtggggcgcaaaccagcgctctcatgagcaagcactcctgtctccccggtgtggttgtataaactgttcccacggttgaaaacaacctatccgttatccgctatagtacttcgagaaacctagtatcacctttggattgttgacgcgttgcgctcagcacactaacccgtgtgtagcttgggtcgatgagtctggacataccccactggcgacagtggtccaggctgcgttggcggcctactcatggtgaaaaccatgagacgctagacatgaacaaggtgtgaagagtctattgagctactatagagtcctccggcccctgaatgcggctaatcctaaccatggagcaagtgctcacaggccagtgagttgcttgtcgtaatgcgcaagtccgtggcggaaccgactactttgggtgtccgtgtttcactttttacttttatgactgcttatggtgacaatttgatattgttaccatttagctgtcaaattaattgcaaaagatcctaagtcttacttaccaatttgcattttgataaccttgatttgaaaattttaata

SEQ ID NO: 20392 - DNA, 609 bp, synthetic construct
  source 1..609: mol_type = other DNA
gggggtacaaaccagcaccaccacgaacaagcacttctgtttccccggtgatgttgcataaactgtacccacggtcgaaagcgactgatccgttatccgctcttgtacttcgagaagcctagtatcatcttggaatctccgatgcgttgcgttcagcactctaccccgagtgtagcttaggccgatgagtctggacattcctcaccggcgacggtggtccaggctgcgttggcggcctacctgtggcccaaagccacaggacgctagtagtgaacaaggtgtgaagagcctattgagctacaagtgattcctccggcccctgaatgcggctaatcccaaccacagagcaagtgctcacactccagtgagtagcttgtcgtaacgggtaactctgtggcggaaccgactactttgggtgtccgtgtttccttttattctcattatggctgcttatggtgacaatcatagattgttatcataaagcgatttggattggccatccggtgaaagttaaatacattatttatctttttgttggatttactccgattaatttctttacatacaaacttattactgcaaccatattaattagaaacatatatcaca

SEQ ID NO: 20393 - DNA, 670 bp, synthetic construct
  source 1..670: mol_type = other DNA
ccaagggcccacgtggcggctagtactctggtacttcggtacctttgtacgcctgttttatctccccccccaatgtaatttagaagctcttaaatcaaggctcaataggtggggcgcaaaccagcgctctcatgagcaagcactcctgtctccccggtgcggttgtataaactgttcccacggttgaaaacgacctatccgttatccgctatagtacttcgagaaacctagtatcacctttggattgttgacgcgttgcgctcagcacactaacccgtgtgtagcttgggtcgatgagtctggacataccccactggcgacagtggtccaggctgcgttggcggcctactcatggtgaaaaccatgagacgctagacatgaacaaggtgtgaagagtctattgagctactatagagtcctccggcccctgaatgcggctaatcctaaccatggagcaagtgcccacagaccagtgagttgcttgtcgtaatgcgcaagtccgtggcggaaccgactactttgggtgtccgtgtttcactttttacttttatgactgcttatggtgacaatttgatattgttaccatttagcttgtcaaattgattacaaaagatcctaaatcttgcttaccaatttgcattttggcaaccctgatttgaaaattttaata

SEQ ID NO: 20394 - DNA, 700 bp, synthetic construct
  source 1..700: mol_type = other DNA
ttaaacagctctggggttgttcccactccaagggcccacgtggcggctagtactctggtacttcggtacctttgtacgcctgttttatctcccttcccaatgcaatttagaagctctcaaatcaaggctcaataggtggggcgcaaaccagcgctctcatgagcaagcactcctgtctccccggtgtggttgtataaactgttcccacggttgaaaacaacctatccgttatccgctatagtacttcgagaaacctagtatcacctttggattgttgacgcgttgcgctcagcacactaacccgtgtgtagcttgggtcgatgagtctggacataccccactggcgacagtggtccaggctgcgttggcggcctactcatggtgaaaaccatgagacgctagacatgaacaaggtgtgaagagtctattgagctactatagagtcctccggcccctgaatgcggctaatcctaaccatggagcaagtgctcacaggccagtgagttgcttgtcgtaatgcgcaagtccgtggcggaaccgactactttgggtgtccgtgtttcactttttacttttatgactgcttatggtgacaatttgatattgttaccatttagcttgtcaaattaattacaaaagatcccaaatcttacttaccaacttgcattttgacaaccttggtttgaaaattttaataata

SEQ ID NO: 20395 - DNA, 640 bp, synthetic construct
  source 1..640: mol_type = other DNA
acgtaatatagaagcaaaacaacaaggtcaatagagagcccagtgagccaactgggtcgagaccaagcacttctgtttccccggaccgagtatcaataggctgcctacgcggctgaaggagaaaacgttcgttacccggctaactacttcgaaaaacctagtaacgccatggaagttgcgaaacgtttcgctcggcacttccccagtgtagatcaggtcgatgagtcaccgcattccccacgggcgaccgtggcggtggctgcgttggcggcctgcctatggggcaacccataggacgcttcaatatggacatggtgtgaagagtctattgagctagttagttgtcctccggcccctgaatgcggctaatcctaactgcggagcacatgcccccaacccaggaggtggtgtgtcgtaatgggtaactctgcagcggaaccgactactttgggtgtccgtgtttccttttatcccaatattggctgcttatggtgacaattgaaagattgttaccatatagctattggattggccatccggtgactaacagagctattgtatacctattcattgggtacgttccattaaatcttaaggaattaacgactctcaattacattttgctcttaaattctgcaaa

SEQ ID NO: 20396 - DNA, 685 bp, synthetic construct
  source 1..685: mol_type = other DNA
caccccaagggcccacgtggcggctagtactctggtatttcggtacctttgtacgcctgttttatctcccttcccaatgtaacttagaagttttcaaatcgaagctcagtaggtggggcgcaaaccagcgctttcatgagcaagcacttctgtttccccggtgcggttgtatagactgtttccacggttgaaaacaacttatccgttatccgctatagtacttcgagaaacctagtatcacctttggattgttgatgcgttgcgctcagcacactaacccgtgtgtagcttgggctgatgagtctggacgtaccccactggtgacagtggtccaggctgcgttggcggcctactcatggtgaaaaccatgagacgctagacatgaacaaggtgtgaagagtctattgagctactatagagtcctccggcccctgaatgcggctaatcttaaccatggagcaagtgctcacaagccagtgagttgcttgtcgtaacgcgcaagtccgtggcggaaccgactactttgggtgtccgtgtttcactttttacctttatgactgcttatggtgacaatttaatattgttaccatttagcttgtcggattaatcgcgtgaaatcctaaatcttgttcaccaatttgcattcggatagcttcatttgaaaattctaaactcattcacaaag

SEQ ID NO: 20397 - DNA, 678 bp, synthetic construct
  source 1..678: mol_type = other DNA
tcccactccaagggcccacgtggcggctagtactctggtacttcggtacctttgtacgcctgttttatctcccttcccaatgtaacttagaagttcttaaatcaatgctcaataggtggggcgcaaaccagcgctctcatgagcaagcactcctgtctccccggtgaggttgtataaactgttcccacggttgaaaacaacctatccgttatccgctatagtacttcgagaaacctagtaccacctttggattgttgacgcgttgcgctcagcacactaacccgtgtgtagcttgggtcgatgagtctggacatacctcactggcgacagtggtccaggctgcgttggcggcctactcatggtgaaagccatgagacgctagacatgaacaaggtgtgaagagtctattgagctactatagagtcctccggcccctgaatgcggctaatcctaaccatggagcaagtgctcacaggccagtgagttgcttgtcgtaatgcgcaagtccgtggcggaaccgactactttgggtgtccgtgtttcacttttttacttttatgactgcttatggtgacaatttgatattgttaccatttagcttgtcaaatcaattgcaaaagatcctaaatcttatttatcaacttgcatcttgataactttaatttgaaaattttaaca

SEQ ID NO: 20398 - DNA, 676 bp, synthetic construct
  source 1..676: mol_type = other DNA
tcccactccaagggcccacgtggcggctagtactctggtacttcggtacctttgtacgcctgttttatctcccttcccaatgtaacttagaagctcttaaatcaaggctcaataggtggagtgcaaaccagcactcttatgagcaagtactcctgtttccccggtgcggttatataaactgttcccacggttgaaaataacctatccgttatccgctatagtacttcgagaaacctagtatcacctttggattgttgacgcgttgcgctcagcacactaacccgtgtgtagcttgggtcgatgagtctggacataccccactggcgacagtggtccaggctgcgttggcggcctactcatggtgaaaaccatgagacgctagacatgaacaaggtgtgaagagtctattgagctactatagagtcctccggcccctgaatgcggctaatcctaaccatggagcaagtgctcacagaccagtgagttgcttgtcgtaatgcgcaagtccgtggcggaaccgactactttgggtgtccgtgtttcactttttacccttatgactgcttatggtgacaatttgatattgttaccatttagcttgtcaaatcaattgcgaaagatcctaaatcttatttatcaacttgcattttgataactctaatttgaagatttgata

SEQ ID NO: 20399 - DNA, 676 bp, synthetic construct
  source 1..676: mol_type = other DNA
tcccactccaagggcccacgtggcggctagtactctggtacttcggtacctttgtacgcctgttttatctcccttcccaacgtaacttagaagctcttaaatcaaggctcaataggtggagtgcaaaccagcactcttatgagcaagtactcctgtttccccggtgcggttatataaactgttcccacggttgaaagtaacctatccgttatccgctatagtacttcgagaaacctagtatcacctttggattgttgacgcgttgcgctcagcacactaacccgtgtgtagcttgggtcgatgagtctggacataccccactggcgacagtggtccaggctgcgttggcggcctactcatggtgaaaaccatgagacgctagacatgaacaaggtgtgaagagtctattgagctactatagagtcctccggcccctgaatgcggctaatcctaaccatggagcaagtgctcacagaccagtgagttgcttgtcgtaatgcgcaagtccgtggcggaaccgactactttgggtgtccgtgtttcactttttacccttatgactgcttatggtgacaatttgatattgttaccatttagcttgtcaaatcaattgcgaaagatcctaaatcttatttatcaacttgcattttgataactctaatttgaagatttaata

SEQ ID NO: 20400 - DNA, 678 bp, synthetic construct
  source 1..678: mol_type = other DNA
tcccactccaagggcccacgtggcggctagtactctggtacttcggtacctttgtacgcctgttttatctcccttcccaatgtaacttagaagttcttaaatcaatgctcaataggtggggcgcaaaccagcgctctcatgagcaagcactcctgtctccccggtgaggttgtataaactgttcccacggttgaaaacaacctatccgttatccgctatagtacttcgagaaacctagtaccacctttggattgttgacgcgttgcgctcagcacactaacccgtgtgtagcttgggtcgatgagtctggacatacctcactggcgacagtggtccaggctgcgttggcggcctactcatggtgaaagccatgagacgctagacatgaacaaggtgtgaagagtctattgagctactatagagtcctccggcccctgaatgcggctaatcctaaccatggagcaagtgctcacaggccagtgagttgcttgtcgtaatgcgcaagtccgtggcggaaccgactactttgggtgtccgtgtttcactttttacttttatgactgcttatggtgacaatttgatattgttaccatttagcttgtcaaatcaattgcaaaagatcctaattcttatttatcaacttgcatctcgataactctaatttgaaaatttttaaca

SEQ ID NO: 20401 - DNA, 676 bp, synthetic construct
  source 1..676: mol_type = other DNA
tcccactccaagggcccacgtggcggctagtactctggtacttcggtacctttgtacgcctgttttatctcccttcccaacgtaacttagaagctcttaaatcaaggctcaataggtggagtgcaaaccagcactcttacgagcaagtactcctgtttccccggtgcggttatataaactgttcccacggttgaaagtaacctatccgttatccgctatagtacttcgagaaacctagtatcacctttggattgttgacgcgttgcgctcagcacactaacccgtgtgtagcttgggtcgatgagtctggacataccccactggcgacagtggtccaggctgcgttggcggcctactcatggtgaaaaccatgagacgctagacatgaacaaggtgtgaagagtctattgagctactatagagtcctccggcccctgaatgcggctaatcctaaccatggagcaagtgctcacagaccagtgagttgcttgtcgtaatgcgcaagtccgtggcggaaccgactactttgggtgtccgtgtttcactttttacccttatgactgcttatggtgacaatttgatattgttaccatttagcttgtcaaatcaattgcgaaagatcctaaatcttatttatcaacttgcattttgataactctaatttgaagatttaata

SEQ ID NO: 20402 - DNA, 676 bp, synthetic construct
  source 1..676: mol_type = other DNA
tcccactccaagggcccacgtggcggctagtactctggcacttcggtacctttgtacgcctgttttatctcccttcccaacgtaacttagaagctcttaaatcaaggctcaataggtggagtgcaaaccagcactcttatgagcaagtactcctgtttccccggtgcggttatataaactgttcccacggttgaaagtaacctatccgttatccgctatagtacttcgagaaacctagtatcacctttggattgttgacgcgttgcgctcagcacactaacccgtgtgtagcttgggtcgatgagtctggacataccccactggcgacagtggtccaggctgcgttggcggcctactcatggtgaaaaccatgagacgctagacatgaacaaggtgtgaagagtctattgagctactatagagtcctccggcccctgaatgcggctaatcctaaccatggagcaagtgctcacagaccagtgagttgcttgtcgtaatgcgcaagtccgtggcggaaccgactactttgggtgtccgtgtttcactttttacccttatgactgcttatggtgacaatttgatattgttaccatttagcttgtcaaatcaattgcgaaagatcctaaatcttatttatcaacttgcattttgataactctaatttgaagatttaata

SEQ ID NO: 20403 - DNA, 678 bp, synthetic construct
  source 1..678: mol_type = other DNA
tcccactccaggggcccacgtggcggctagtactctggtacttcggtacctttgtacgcctgtttttatctcccttcccaatgtaacttagaagtttttaaatcaatgctcaataggtggggcgcaaaccagcgctctcatgagcaagcactcctgtctccccggtgaggttgtataaactgttcccacggttgaaaacaacctatccgttatccgctatagtacttcgagaaacctagtaccacctttggattgttgacgcgttgcgctcagcacactaacccgtgtgtagcttgggtcgatgagtctggacataccccactggcgacagtggtccaggctgcgttggcggcctactcatggtgaaagccatgagacgctagacatgaacaaggtgtgaagagtctattgagctactatagagtcctccggcccctgaatgcggctaatcctaaccatggagcaagtgctcacaggccagtgagttacttgtcgtaatgcgcaagtccgtggcggaaccgactactttgggtgtccgtgtttcactttttacttttatgactgcttatggtgacaatttgatattgttaccatttagcttgtcaaatcaattgcaaaagatcctaaatcttatttatcaacttgcatcttgataactttaatttgaaaattttaaca

SEQ ID NO: 20404 - DNA, 699 bp, synthetic construct
  source 1..699: mol_type = other DNA
ttaaaacaagctctggggttgttcccactccaagggcccacgtggcggctagtactctggtacttcggtacctttgtacgcctgttttatctcccttcccaatgtaatttagaagctcttaaatcaaggctcaataggtggggcgcaaaccagcgctctcatgagcaagcactcctgtctccccggtgtggttgcataaactgttcccacggttgaaaacaacctatccgttatccgctatagtacttcgagaaacctagtatcacctttggattgttgacgcgttgcgctcagcacactaacccgtgtgtagcttgggtcgatgagtctggacataccccactggcgacagtggtccaggctgcgttggcggcctactcatggtgaaaaccatgagacgctagacatgaacaaggtgtgaagagtctattgagctactatagagtcctccggcccctgaatgcggctaatcctaaccatggagcaagtgctcacaggccagtgagttgcttgtcgtaatgcgcaagtccgtggcggaaccgactactttgggtgtccgtgtttcactttttacttttatgactgcttatggtgacaatttgatattgttaccatttagcttgtcaaattaattgcaaaagatcctaaatcttacttaccaacttgcattttgataaccttgatttgaaaattttaata

SEQ ID NO: 20405 - DNA, 699 bp, synthetic construct
  source 1..699: mol_type = other DNA
ttaaaacaagctctggggttgttcccactccaagggcccacgtggcggctagtactctggtacttcggtacctttgtacgcctgttttatctcccttcccaatgtaatttagaagctcttaaatcaaggctcaataggtggggcgcaaaccagcgctctcatgagcaagcactcctgtctccccggtgtggttgtataaactgttcccacggttgaaaacaacctatccgttatccgctatagtacttcgagaaacctagtatcacctttggattgttgacgcgttgcgctcagcacactaacccgtgtgtagcttgggtcgatgagtctggacataccccactggcgacagtggtccaggctgcgttggcggcctactcatggtgaaaaccatgagacgctagacatgaacaaggtgtgaagagtctattgagctactatagagtcctccggcccctgaatgcggctaatcctaaccatggagcaagtgctcacaggccagtgagttgcttgtcgtaatgcgcaagtccgtggcggaaccgactactttgggtgtccgtgtttcactttttacttttatgactgcttatggtgacaatttgatattgttaccatttagcttgtcaaattaattacaaaagatcctaaatcttacttactaacttgcattttgataaccttgatttgaaaattttaata

SEQ ID NO: 20406 - DNA, 699 bp, synthetic construct
  source 1..699: mol_type = other DNA
ttaaaacaggctctggggttgttcccactccaagggcccacgtggcggctagtactctggtacttcggtacctttgtacgcctgttttatctcccttcccaatgtaacttagaagctcttaaatcaaggctcaataggtggggcgcaaaccagcgctctcatgagcaagcactcctgtttccccggtgtggttgtataaactgttcccacggttgaaaacaacctatccgttatccgctatagtacttcgagaaacctagtatcacctttggattgttgacgcgttgcgctcggcacactaacccgtgtgtagcttgggtcgatgagtctggacgtaccccactggtgacagtggtccaggctgcgttggcggcctactcatggtgaaaaccatgagacgctagacatgaacaaggtgtgaagagtctattgagctactatagagtcctccggcccctgaatgcggctaatcctaaccatggagcaagtgctcacaggccagtgagttgcttgtcgtaacgcgcaagtccgtggcggaaccgactactttgggtgtccgtgtttcactttttacttttatgactgcttatggtgacaatttgatattgttaccatttagcttgtcaaattaattacaaaagatcctaagtctcatataccaacttgcattttgataactttgatttgtaaattttaata

SEQ ID NO: 20407 - DNA, 685 bp, synthetic construct
  source 1..685: mol_type = other DNA
caccccaagggcccacgtggcggctagtactctggtatttcggtacctttgtacgcctgttttatctcccttcccaatgtaacttagaagttttcaaatcgaagctcagtaggtggggcgcaaaccagcgctttcatgagcaagcacttctgtttccccggtgcggttgtatagactgtttccacggttgaaaacaacttatccgttatccgctatagtacttcgagaaacctagtatcacctttggattgttgatgcgttgcgctcagcacactaacccgtgtgtagcttgggctgatgagtctggacgtaccccactggtgacagtggtccaggctgcgttggcggcctactcatggtgaaaaccatgagacgctagacatgaacaaggtgtgaagagtctattgagctactatagagtcctccggcccctgaatgcggctaatcttaaccatggagcaagtgctcacaagccagtgagttgcttgtcgtaacgcgcaagtccgtggcggaaccgactactttgggtgtccgtgtttcactttttacctttatgactgcttatggtgacaatttaatattgttaccatttagcttgtcagattaatcgcgtaaaatcctaaatcttgtttatcaatttgtatttggatagcttcatttgaaaattctaaactcattcataaag

SEQ ID NO: 20408 - DNA, 685 bp, synthetic construct
  source 1..685: mol_type = other DNA
caccccaagggcccacgtggcggctagtactctggtatttcggtacctttgtacgcctgttttatctcccttcccaatgtaacttagaagttttcaaatcgaagctcagtaggtggggcgcaaaccagcgctttcatgagcaagcacttctgtttccccggtgcggttgtatagactgtttccacggttgaaaacaacttatccgttatccgctatagtacttcgagaaacctagtatcacctttggattgttgatgcgttgcgctcagcacactaacccgtgtgtagcttgggctgatgagtctggacgtaccccactggtgacagtggtccaggctgcgttggcggcctactcatggtgaaaaccatgagacgctagacatgaacaaggtgtgaagagtctattgagctactatagagtcctccggcccctgaatgcggctaatcttaaccatggagcaagtgctcacaagccagtgagttgcttgtcgtaacgcgcaagtccgtggcggaaccgactactttgggtgtccgtgtttcactttttacctttatgactgcttatggtgacaatttaatattgttaccatttagcttgtcagattaatcgcgtgaaatcctaaatcttgtttatcaatttgtatttggatagcttcatttgaaaattctaaactcattcataaag

SEQ ID NO: 20409 - DNA, 661 bp, synthetic construct
  source 1..661: mol_type = other DNA
tagtactctggtatttcggtacctttgtacgcctgttttatctcccttcccaatgtaacttagaagttttcaaatcgaagctcagtaggtggggcgcaaaccagcgctttcatgagcaagcacttctgtttccccggtgcggttgtatagactgtttccacggttgaaaacaacttatccgttatccgctatagtacttcgagaaacctagtatcacctttggattgttgatgcgttgcgctcagcacactaacccgtgtgtagcttgggctgatgagtctggacgtgccccactggtgacagtggtccaggctgcgttggcggcctactcatggtgaaaaccatgagacgctagacatgaacaaggtgtgaagagtctattgagctactatagagtcctccggcccctgaatgcggctaatcttaaccatggagcaagtgctcacaagccagtgagttgcttgtcgtaacgcgcaagtccgtggcggaaccgactactttgggtgtccgtgtttcactttttacctttatgactgcttatggtgacaatttaatattgttaccatttagcttgtcagattaatcgcgtgaaatcctaaatcttgttcaccaatttgcattcggatagcttcatttgaaaattctaaactcattcataaag

SEQ ID NO: 20410 - DNA, 665 bp, synthetic construct
  source 1..665: mol_type = other DNA
gcctgttttactcaccctaccccattgtaacctagaagccaatcaaatatggtcattaggtggcccagtgcgccaactgggtctcgaccaagcacttctgttgccccggactgagtatcaataggctgctcacgcggctgaaggagaaaacgttcgttacccggccaattacttcgagaaacttagtaccaccatgaaggttgcgcagcgtttcgctccgcacaaccccagtgtagatcaggtcgatgagtcaccgcgttccccacgggcgaccgtggcggtggctgcgtcggcggcctgcccatgggtcaacccatgggacgcttcaatactgacatggtgcgaagagtctattgagctaattggtagtcctccggcccctgaatgcggctaatcctaactgcggagcagatgcccaagctccagtgggtagtctgtcgtaacgggtaactctgcagcggaaccgactactttgggtgtccgtgtttccttttattcttacattggctgcttatggtgacaattgagagattgttgccatatagctattggattggccatccggtgacgaatagagcaattgtgtatctttttgttggattcataccactagataatacaaacttcaaaaccctgtgttacatcattaggttaaacacagcaag

SEQ ID NO: 20411 - DNA, 656 bp, synthetic construct
  source 1..656: mol_type = other DNA
ggcggctagtactctggtacttcggtacctttgtacgcctgttttatctcccttcccaatgtaacttagaagttcttaaatcaatgctcaatagggggggcgcaaaccagcgctctcatgagcaagcactcctgtctccccggtgaggttgtataaactgttcccacggttgaaaacaacctatccgttatccgctatagtacttcgagaaacctagtaccacctttggattgttgacgcgttgcgctcagcacactaacccgtgtgtagcttgggtcgatgagtctggacatacctcactggcgacagtggtccaggctgcgttggcggcctactcatggtgaaagccatgagacgctagacatgaacaaggtgtgaagagtctattgagctactatagagtactccggcccctgaatgcggctaatcctaaccatggagcaagtgctcacaggccagtgagttgcttgtcgtaatgcgcaagtccgtggcggaaccgactactttgggtgtccgtgtttcactttttacttttatgactgcttatggtgacaatttgatattgttaccatttagcttgtcaaatcaattgcaaaagatcctaaatcttatttatcaacttgcatcttgataactttaatttgaaaattttaaca

SEQ ID NO: 20412 - DNA, 677 bp, synthetic construct
  source 1..677: mol_type = other DNA
tcccactccaagggcccatgtggcggctagtactctggtacttcggtacctttgtacgcctgttttatctcccttcccaatgtaacttagaagctcttaaatcaaggctcaataggtggagcgcaaaccagcgctctcatgagcaagcactcctgtctccccggtgtggttgtataaactgttcccacggttgaaaacaacctatccgttatccgctatagtacttcgagaaacctagtatcacctttggattgttgacgcgttgcgctcagcacactaacccgtgtgtagcttgggtcgatgagtctggacataccccactggcgacagtggtccaggctgcgttggcggcctactcatggtgaaaaccatgagacgctagacatgaacaaggtgtgaagagtctattgagctactatagagtcctccggcccctgaatgcggctaatcctaaccatggagcaagtgctcacaggccagtgagttgcttgtcgtaatgcgcaagtccgtggcggaaccgactactttgggtgtccgtgtttcactttttacctttatgactgcttatggtgacaatttgatattgttaccatttagcttgtcaaatcaattgcaaaaggtcctaaatcttatttatcaacttgcattttgataactttaatttgaagattttaata

SEQ ID NO: 20413 - DNA, 677 bp, synthetic construct
  source 1..677: mol_type = other DNA
tcccactccaagggcccacgtggcggctagtactctggtacttcggtacctttgtacgcctgttttatctcccttcccaatgtaacttagaagctcttaaatcaaggctcaataggtggagcgcaaaccagcgctctcatgagcaagcactcctgtctccccggtgtggttgtataaactgttcccacggttgaaaacaacctatccgttatccgctatagtacttcgagaaacctagtatcacctttggattgttgacgcgttgcgctcagcacactaacccgtgtgtagcttgggtcgatgagtctggacataccccactggcgacagtggtccaggctgcgttggcggcctactcatggtgaaaaccatgagacgctagacatgaacaaggtgtgaagagtctattgagctactatagagtcctccggcccctgaatgcggctaatcctaaccatggagcaagtgctcacaggccagtgagttgcttgtcgtaatgcgcaagtccgtggcggaaccgactactttgggtgtccgtgtttcactttttacctttatgactgcttatggtgacaatttgatattgttaccatttagcttgtcaaatcaattgcaaaaggtcctaaatcttatttatcaacttgcattttgataactttaatttgaagattttaata

SEQ ID NO: 20414 - DNA, 675 bp, synthetic construct
  source 1..675: mol_type = other DNA
ccactccaagggcccacgtggcggctagtactctggtacttcggtacctttgtacgcctgttttatctcccttcccaatgtaacttagaagttcttaaatcaatgctcaataggtggggcgcaaaccagcgttctcatgagcaagcactcctgtctccccggtgaggttgtataaactgttcccacggttgaaaacgacctatccgttatccgctatagtacttcgagaaacctagtaccacctttggattgttgacgcgttgcgctcagcacactaacccgtgtgtagcttgggtcgatgagtctggacatacctcactggcgacagtggtccaggctgcgttggcggcctactcatggcgaaagccatgagacgctagacatgaacaaggtgtgaagagtctattgagctactatagagtcctccggcccctgaatgcggctaatcctaaccatggagcaagtgctcacaggccagtgagttgcttgtcgtaatgcgcaagtccgtggcggaaccgactactttgggtgtccgtgtttcactttttacttttatgactgcttatggtgacaatttgatattgttaccatttagcttgtcaaatcaattgcaaaagaacctaaatcttatttatcaacttgcatcttgataactttaatttgaaaattttaaca

SEQ ID NO: 20415 - DNA, 675 bp, synthetic construct
  source 1..675: mol_type = other DNA
ccactccaagggcccacgtggcggctagtactctggtacttcggtacctttgtacgcctgttttatctcccttcccaatgtaacttagaagttcttaaatcaatgctcaataggtggagcgcaaaccagcgctctcatgagcaagcactcctgtctccccggtgaggttgtataaactgttcccacggttgaaaacaacctatccgttatccactatagtacttcgagaaacctagtaccacctttggattgttgacgcgttgcgctcagcacactaacccgtgtgtagcttgggtcgatgagtctggacatacctcactggcgacagtggtccaggctgcgttggcggcctactcatggtgaaaaccatgagacgctagacatgaacaaggtgtgaagagtctattgagctactatagagtcctccggcccctgaatgcggctaatcctaaccatggagcaagtgctcacaggccagtgagttgcttgtcgtaatgcgcaagtccgtggcggaaccgactactttgggtgtccgtgtttcactttttacttttatgactgcttatggtgacaacttgatattgttaccatttagcttgtcaaatcaattgcaaaagatcctaaatcttatttatcaatttgcatcttgataactttaatttgaaaattttaaca

SEQ ID NO: 20416 - DNA, 677 bp, synthetic construct
  source 1..677: mol_type = other DNA
tcccactccaagggcccacgtggcggctagtactctggtacttcggtacctttgtacgcctgttttatctcccttcccaatgtaacttagaagttcttaaatcaatgctcaataggtggggcgcaaaccagcgctctcatgagcaagcactcctgtctccccggtgaggttgtataaactgttcccacggttgaaaacaacctatccgttatccgctatagtacttcgagaaacctagtaccacctttggattgttgacgcgttgcgctcagcacactaacccgtgtgtagcttgggtcgatgagtctggacatacctcactggcgacagtggtccaggctgcgttggcggcctactcatggtgaaagccatgagacgctagacatgaacaaggtgtgaagagtctattgagctactatagagtcctccggcccctgaatgcggctaatcctaaccatggagcaagtgctcacaggccagtgagttgcttgtcgtaatgcgcaagtccgtggcggaaccgactactttgggtgtccgtgtttcactttttacttttatgactgcttatggtgacaatttgatattgttaccatttagcttgtcaaatcaattgcaaaagatcctaactcttatttatcaacttgcatcttgataactttaatttgaaaattttaaca

SEQ ID NO: 20417 - DNA, 677 bp, synthetic construct
  source 1..677: mol_type = other DNA
tcccactccaagggcccacgtggcggctagtactctggtacttcggtacctttgtacgcctgttttatctcccttcccaatgtaacttagaagttcttaaatcaatgctcaataggtggggcgcaaaccagcgctctcatgagcaagcactcctgtctccccggtgaggttgtataaactgttcccacggttgaaaacaacctatccgttatccgctatagtacttcgagaaacctagtaccacctttggattgttgacgcgttgcgctcagcacactaacccgtgtgtagcttgggtcgatgagtctggacatacctcactggcgacagtggtccaggctgcgttggcggcctactcatggtgaaagccatgagacgctagacatgaacaaggtgtgaagagtctattgagctactatagagtcctccggcccctgaatgcggctaatcctaaccatggagcaagtgctcacaggccagtgagttgcttgtcgtaatgcgcaagtccgtggcggaaccgactactttgggtgtccgtgtttcactttttacttttatgactgcttatggtgacaatttgatattgttaccatttagcttgtcaaatcaattgcaaaagatcctaactcttatttatcaacttgcatctcgataactctaatttgaaaattttaaca

SEQ ID NO: 20418 - DNA, 677 bp, synthetic construct
  source 1..677: mol_type = other DNA
tcccactccaagggcccacgtggcggctagtactctggtacttcggtacctttgtacgcctgttttatctcccttcccaatgtaacttagaagttcttaaatcaatgctcaataggtggggcgcaaaccagcgctctcatgagcaagcactcctgtctccccggtgaggttgtataaactgttcccacggttgaaaacaacctatccgttatccgctatagtacttcgagaaacctagtaccacctttggattgttgatgcgttgcgctcagcacactaacccgtgtgtagcttgggtcgatgagtctggacatacctcactggcgacagtggtccaggctgcgttggcggcctactcatggtgaaagccatgagacgctagacatgaacaaggtgtgaagagtctattgagctactatagagtcctccggcccctgaatgcggctaatcctaaccatggagcaagtgctcacaggccagtgagttgcttgtcgtaatgcgcaagtccgtggcggaaccgactactttgggtgtccgtgtttcactttttacttttatgactgcttatggtgacaatttgatattgttaccatttagcttgtcaaatcaattgcaaaagatcctaaatcttatttatcaacttgcatcttgataactttaatttgaaaattttaaca

SEQ ID NO: 20419 - DNA, 677 bp, synthetic construct
  source 1..677: mol_type = other DNA
tcccactccaagggcccacgtggcggctagtactctggtacttcggtacctttgtacgcctgttttatctcccttcccaatgtaacttagaagttcttaaatcaatgctcaataggtggggcgcaaaccagcgctctcatgagcaagcactcctgtctccccggtgaggttgtataaactgttcccacggttgaaaacaacctatccgttatccgctatagtacttcgagaaacctagtaccacctttggattgttgacgcgttgcgctcagcacactaacccgtgtgtagcttgggtcgatgagtctggacatacctcactggcgacagtggtccaggctgcgttggcggcctactcatggtgaaagccatgagacgctagacatgaacaaggtgtgaagagtctattgagctactatagagtcctccggcccctgaatgcggctaatcctaaccatggagcaagtgctcacaggccagtgagttgcttgtcgtaatgcgcaagtccgtggcggaaccgactactttgggtgtccgtgtttcactttttacttttatgactgcttatggtgacaatttgatattgttaccatttagcttgtcaaatcaattgcaaaagatcctaaatcttatttatcaacttgcatcttgataactttaatttgaaaattttaaca

SEQ ID NO: 20420 - DNA, 677 bp, synthetic construct
  source 1..677: mol_type = other DNA
tcccactccaagggcccacgtggcggctagtactctggtacttcggtacctttgtacgcctgttttatctcccttcccaatgtaacttagaagttcttaaatcaatgctcaataggtggggcgcaaaccagcgctctcatgagcaagcactcctgtctccccggtgaggttgtataaactgttcccacggttgaaaacaacctatccgttatccgctatagtacttcgagaaacctagtaccacctttggattgttgacgcgttgcgctcagcacactaacccgtgtgtagcttgggtcgatgagtctggacatacctcactggcgacagtggtccaggctgcgttggcggcctactcatggtgaaagccatgagacgctagacatgaacaaggtgtgaagagtctattgagctactatagagtcctccggcccctgaatgcggctaatcctaaccatggagcaagtgctcacaggccagtgagttgcttgtcgtaatgcgcaagtccgtggcggaaccgactactttgggtgtccgtgtttcactttttacttttatgactgcttatggtgacaatttgatattgttaccatttagcttgtcaaatcaattgcaaaagatcctaaattttacttatcaacttgcatcttgataactttaatttgaaaattttaaca

SEQ ID NO: 20421 - DNA, 677 bp, synthetic construct
  source 1..677: mol_type = other DNA
tcccactccaagggcccacgtggcggctagtactctggtacttcggtacctttgtacgcctgttttatctcccttcccaatgtaacttagaagttcttaaatcaatgctcaataggtggggcgcaaaccagcgctctcatgagcaagcactcctgtctccccggtgaggttgtataaactgttcccacggttgaaaacaacctatccgttatccgctatagtacttcgagaaacctagtaccacctttggattgttgacgcgttgcgctcagcacactaacccgtgtgtagcttgggtcgatgagtctggacatacctcactggcgacagtggtccaggctgcgttggcggcctactcatggtgaaagccatgagacgctagacatgaacaaggtgtgaagagtctattgagctactatagagtcctccggcccctgaatgcggctaatcctaaccatggagcaagtgctcacaggccagtgagttgcttgtcgtaatgcgcaagtccgtggcggaaccgactactttgggtgtccgtgtttcactttttacttttatgactgcttatggtgacaatttgatattgttaccatttagctcgtcaaatcaattgcaaaagatcctaaatctcatttatcaacttgcatcttgataactttaatttgaaaattttaaca

SEQ ID NO: 20422 - DNA, 677 bp, synthetic construct
  source 1..677: mol_type = other DNA
tcccactccaagggcccacgtggcggctagtactctggtacttcggtacctttgtacgcctgttttatctcccttcccaatgtaacttagaagttcttaaatcaatgctcaataggtggggcgcaaaccagcgctctcatgagcaagcactcctgtctccccggtgaggttgtataaactgttcccacggttgaaaacaacctatccgttatccgctatagtacttcgagaaacctagtaccacctttggattgttgacgcgttgcgctcagcacactaacccgtgtgtagcttgggtcgatgagtctggacatacctcactggcgacagtggtccaggctgcgttggcggcctactcatggtgaaagccatgagacgctagacatgaacaaggtgtgaagagtctattgagctactatagagtcctccggcccctgaatgcggctaatcctaaccatggagcaagtgctcacaagccagtgagttgcttgtcgtaatgcgcaagtccgtggcggaaccgactactttgggtgtccgtgtttcactttttacttttatgactgcttatggtgacaatttgatattgttaccatttagcttgtcaaatcaattgcaaaagatcctaaatcttatttatcaacttgcatcttgataactttaatttgaaaattttaaca

SEQ ID NO: 20423 - DNA, 677 bp, synthetic construct
  source 1..677: mol_type = other DNA
tcccactccaagggcccacgtggcggctagtactctggtacttcggtacctttgtacgcctgttttatctcccttcccaatgtaacttagaagttcttaaatcaatgctcaataggtggggcgcaaaccagcgctctcatgagcaagcactcctgtctccccggtgaggttgtataaactgttcccacggttgaaaacaacctatccgttatccgctatagtacttcgagaaacctagtaccacctttggattgttgacgcgttgcgctcagcacactaacccgtgtgtagcttgggtcgatgagtctggacatacctcactggcgacagtggtccaggctgcgttggcggcctactcatggtgaaaaccatgagacgctaaacatgaacaaggtgtgaagagtctattgagctactatagagtcctccggcccctgaatgcggctaatcctaaccatggagcaagtgctcacaggccagtgagttgcttgtcgtaatgcgcaagtccgtggcggaaccgactactttgggtgtccgtgtttcactttttacttttatgactgcttatggtgacaatttgatattgttaccatttagcttgtcaaatcaattgcaaaagatcctaaaccttatttatcaatttgcatcttgataactttaatttgaaaattttaaca

SEQ ID NO: 20424 - DNA, 677 bp, synthetic construct
  source 1..677: mol_type = other DNA
tcccactccaagggcccacgtggcggctagtactctggtacttcggtacctttgtacgcctgttttatctcccttcccaatgtaacttagaagttcttaaatcaatgctcaataggtggggcgcaaaccagcgctctcatgagcaagcactcctgtctccccggtgaggttgtataaactgttcccacggttgaaaacaacctatccgttatccgctatagtacttcgagaaacctagtaccacctttggattgttgacgcgttgcgctcagcacactaacccgtgtgtagcttgggtcgatgagtctggacatacctcactggcgacagtggtccaggctgcgttggcggcctactcatggtgaaaaccatgagacgctagacatgaacaaggtgtgaagagtctattgagctactatagagtcctccggcccctgaatgcggctaatcctaaccatggagcaagtgctcacaggccagtgggttgcttgtcgtaatgcgcaagtccgtggcggaaccgactactttgggtgtccgtgtttcactttttacttttatgactgcttatggtgacaatttgatattgttaccatttagcttgtcaaatcaattgcaaaagatcctaaatcttatttatcaatttgcatcttgataactttaatttgaaaattttaaca

SEQ ID NO: 20425 - DNA, 677 bp, synthetic construct
  source 1..677: mol_type = other DNA
tcccactccaagggcccacgtggcggctagtactctggtacttcggtacctttgtacgcctgttttatctcccttcccaatgtaacttagaagttcttaaatcaatgctcaataggtggggcgcaaaccagcgctctcatgagcaagcactcctgtctccccggtgaggttgtataaactgttcccacggttgaaaacaacctatccgttatccgctatagtacttcgagaaacctagtaccacctttggattgttgacgcgttgcgctcagcacactaacccgtgtgtagcttgggtcgatgagtctggacatacctcactggtgacagtggtccaggctgcgttggcggcctactcatggtgaaagccatgagacgctagacatgaacaaggtgtgaagagtctattgagctactatagagtcctccggcccctgaatgcggctaatcctaaccatggagcaagtgctcacaggccagtgagttgcttgtcgtaatgcgcaagtccgtggcggaaccgactactttgggtgtccgtgtttcactttttacttttatgactgcttatggtgacaatttgatattgttaccatttagcttgtcaaatcaattgcaaaagatcctaaatcttatttatcaacttgcatcttgataactttaatttgaaaattttaaca

SEQ ID NO: 20426 - DNA, 677 bp, synthetic construct
  source 1..677: mol_type = other DNA
tcccactccaagggcccacgtggcggctagtactctggtgcttcggtacctttgtacgcctgttttatctcccttcccaatgtaacttagaagttcttaaatcaatgctcaataggtggggcgcaaaccagcgctctcatgagcaagcactcctgtctccccggtgaggttgtataaactgttcccacggttgaaaacaacctatccgttatccgctatagtacttcgagaaacctagtaccacctttggattgttgacgcgttgcgctcagcacactaacccgtgtgtagcttgggtcgatgagtctggacatacctcactggcgacagtggtccaggctgcgttggcggcctactcatggtgaaagccatgagacgctagacatgaacaaggtgtgaagagtctattgagctactatagagtcctccggcccctgaatgcggctaatcctaaccatggagcaagtgctcacaggccagtgagttgcttgtcgtaatgcgcaagtccgtggcggaaccgactactttgggtgtccgtgtttcactttttacttttatgactgcttatggtgacaatttgatattgttaccatttagcttgtcaaatcaattgcaaaagatcctaaatcttatttatcaacttgcatcttgataactttaatttgaaaattttaaca

SEQ ID NO: 20427 - DNA, 677 bp, synthetic construct
  source 1..677: mol_type = other DNA
tcccactccaagggcccacgtggcggctagtactctggtacttcggtacctttgtacgcctgttttatctcccttcccaatgtaacttagaagttcttaaatcaatgctcaataggtggggcgcaaaccagcgctctcatgagcaagcactcctgtcttcccggtgaggttgtataaactgttcccacggttgaaaacaacctatccgttatccgctatagtacttcgagaaacctagtaccacctttggattgttgacgcgttgcgctcagcacactaacccgtgtgtagcttgggtcgatgagtctggacatacctcactggcgacagtggtccaggctgcgttggcggcctactcatggtgaaaaccatgagacgctagacatgaacaaggtgtgaagagtctattgagctactatagagtcctccggcccctgaatgcggctaatcctaaccatggagcaagtgctcacaggccagtgagttgcttgtcgtaatgcgcaagtccgtggcggaaccgactactttgggtgtccgtgtttcactttttacttttatgactgcttatggtgacaatttgatattgttaccatttagcttgtcaaatcaattacaaaagatcctaaatcttatttatcaatttgcatcttgataactttaatttgaaaatttcaaca

SEQ ID NO: 20428 - DNA, 677 bp, synthetic construct
  source 1..677: mol_type = other DNA
tcccactccaagggcccacgtggcggctagtactctggtacttcggtacccttgtacgcctgttttatctcccttcccaatgtaacttagaagttcttaaatcaatgctcaataggtggggcgcaaaccagcgctctcatgagcaagcactcctgtctccccggtgaggttgtataaactgtccccacggttgaaaacaacctatccgttatccgctatagtacttcgagaaacctagtaccacctttggattgttgacgcgttgcgctcagcacactaacccgtgtgtagcttgggtcgatgagtctggacatacctcactggcgacagtggtccaggctgcgttggcggcctactcatggtgaaaaccatgagacgctagacatgaacaaggtgtgaagagtctattgagctactatagagtcctccggcccctgaatgcggctaatcctaaccatggagcaagtgctcacaggccagtgagttgcttgtcgtaatgcgcaagtccgtggcggaaccgactactttgggtgtccgtgtttcactttttacttttatgactgcttatggtgacaatttgatattgttaccatttagcttgtcaaatcaattgctaaagatcctaaatcttatttatcaatttgcatcctgataactttaatttgaaaatttcaaca

SEQ ID NO: 20429 - DNA, 677 bp, synthetic construct
  source 1..677: mol_type = other DNA
tcccactccaagggcccacgtggcggctagtactctggtacttcggtacctttgtacgcctgttttgtctcccttcccaatgtaacttagaagttcttaaatcaatgctcaataggtggggcgcaaaccagcgctctcatgagcaagcactcctgtctccccggtgaggttgtataaactgttcccacggttgaagacaacctatccgttatccgctatagtacttcgagaaacctagtaccacctttggattgttgacgcgttgcgctcagcacactaacccgtgtgtagcttgggtcgatgagtctggacatacctcactggcgacagtggtccaggctgcgttggcggcctactcatggtgaaaaccatgagacgctagacatgaacaaggtgtgaagagtctattgagctactatagagtcctccggcccctgaatgcggctaatcctaaccatggagcaagtgctcacaggccagtgagttgcttgtcgtaatgcgcaagtccgtggcggaaccgactactttgggtgtccgtgtttcactttttacttttatgactgcttatggtgacaatttgatattgttaccatttagcttgtcaaatcaattacaaaagatcctaaatcttatttatcaatttgcatcttgataactttaatttgaaaatttcaaca

SEQ ID NO: 20430 - DNA, 677 bp, synthetic construct
  source 1..677: mol_type = other DNA
tcccactccaagggcccacgtggcggctagtactctggtacttcggtacctttgtacgcctgttttatctcccttcccaatgtaacttagaagttcttaaatcaatgctcagtaggtggggcgcaaaccagcgctctcatgagcaagcactcctgtctccccggtgaggttgtataaactgttcccacggttgaaaacaacctatccgttatccgctatagtacttcgagaaacctagtaccacctttggattgttgacgcgttgcgctcagcacactaacccgtgtgtagcttgggtcgatgagtctggacatacctcactggcgacagtggtccaggctgcgttggcggcctactcatggtgaaagccatgagacgctagacatgaacaaggtgtgaagagtctattgagctactatagagtcctccggcccctgaatgcggctaatcctaaccatggagcaagtgctcacaggccagtgagttgcttgtcgtaatgcgcaagtccgtggcggaaccgactactttgggtgtccgtgtttcactttttacttttatgactgcttatggtgacaatctgatattgttaccatttagcttgtcaaatcaattgcaaaagatcctaaatcttatttatcaacctgcatcttgataactttaatttgaaaattttaaca

SEQ ID NO: 20431 - DNA, 677 bp, synthetic construct
  source 1..677: mol_type = other DNA
tcccactccaagggcccacgtggcggctagtactctggtacttcggtacctttgtacgcctgttttatctcccttcccaatgtaacttagaagttcttaaatcaatgctcaataggtggggcgcaaaccagcgctctcatgagcaagcactcctgtctccccggtgaggttgtataaactgttcccacggttgaaaacaacctatccgttatccgctatagtacttcgagaaacctagtatcacctttggattgttgacgcgttgcgctcagcacactaacccgtgtgtagcttgggccgatgagtctggacatacctcactggcgacagtggtccaggctgcgttggcggcctactcatggtgaaaaccatgagacgctagacatgaacaaggtgtgaagagtctattgagctactatagagtcctccggcccctgaatgcggctaatcctaaccatggagcaagtactcacaggccagtgagttgcttgtcgtaatgcgcaagtccgtggcggaaccgactactttgggtgtccgtgtttcactttttacttttatgactgcttatggtgacaatttgatattgttaccatttagcttgtcaaatcaattgcaaaagatcctaaatcttacttatcaatttgcatcttgataactttaatttgaaaattttaaca

SEQ ID NO: 20432 - DNA, 677 bp, synthetic construct
  source 1..677: mol_type = other DNA
tcccactccaagggcccacgtggcggctagtactctggtacttcggtacctttgtacgcctgttttatctcccttcccaatgtaacttagaagttcttaaatcaatgctcaataggtggagcgcaaaccagcgctctcatgagcaagcactcctgtctccccggtgaggttgtataaactgttcccacggttgaaaacaacctatccgttatccgctatagtacttcgagaaacctagtaccacctttggattgttgacgcgttgcgctcagcacactaacccgtgtgtagcttgggtcgatgagtctggacatacctcactggcgacagtggtccaggctgcgttggcggcctactcatggtgaaaaccatgagacgctagacatgaacaaggtgtgaagagtctattgagctactatagagtcctccggcccctgaatgcggctaatcctaaccatggagcaagtgctcacaggccagtgagttgcttgtcgtaatgcgcaagtccgtggcggaaccgactactttgggtgtccgtgtttcactttttacttttatgactgcttatggtgacaatttgatattgttaccatttagcttgtcaaatcaattgcaaaagatcctaaaccttatttatcaatttgcatcttgataactttaatttgaaaattttaaca

SEQ ID NO: 20433 - DNA, 677 bp, synthetic construct
  source 1..677: mol_type = other DNA
tcccactccaagggcccacgtggcggctagtactctggtacttcggtacctttgtacgcctgttttatctcccttcccaatgtaacttagaagttcttaaatcaatgctcaataggtggggcgcaaaccagcgctctcatgagcaagcactcctgtctccccggtgaggttgtataaactgttcccacggttgaaaacaacctatccgttatccgctatagtacttcgagaaacctagtaccacctttggattgttgacgcgttgcgctcagcacactaacccgtgtgtagcttgggtcgatgagtctggacatacctcactggcgacagtggtccaggctgcgttggcggcctactcatggtgaaagccatgagacgctagacatgaacaaggtgtgaagagtctattgagctactatagagtcctccggcccctgaatgcggctaatcctaaccatggagcaagtgctcacaggccagtgagttgcttgtcgtaatgcgcaagtccgtggcggaaccgactactttgggtgtccgtgtttcactttttacttttatgactgcttatggtgacaatttgatattgttaccatttagcttgtcaaatcaattgcaaaagatcctaaatctcatttatcaacttgcatcttgataactttaatttgaaaattttaaca

SEQ ID NO: 20434 - DNA, 677 bp, synthetic construct
  source 1..677: mol_type = other DNA
tcccactccaagggcccacgtggcggctagtactctggtacttcggtacctttgtacgcctgttttatctcccttcccaatgtaacttagaagttcttaaatcaatgctcaataggtggggcgcaaaccagcgctctcatgagcaagcactcctgtctccccggtgaggttgtataaactgttcccacggttgaaaacaacctatccgttatccgctatagtacttcgagaaacccagtaccacctttggattgttgacgcgttgcgctcagcacactaacccgtgtgtagcttgggtcgatgagtctggacatacctcactggcgacagtggtccaggctgcgttggcggcctactcatggtgaaagccatgagacgctagacatgaacaaggtgtgaagagtctattgagctactatagagtcctccggcccctgaatgcggctaatcctaaccatggagcaagtgctcacaggccagtgagttgcttgtcgtaatgcgcaagtccgtggcggaaccgactactttgggtgtccgtgtttcactttttacttttatgactgcttatggtgacaatttgatattgttaccatttagcttgtcaaatcaattgcaaaagatcctaaatcttatttatcaacttgcatcttgataactttaatttgaaaattttaaca

SEQ ID NO: 20435 - DNA, 677 bp, synthetic construct
  source 1..677: mol_type = other DNA
tcccactccaagggcccacgtggcggctagtactctggtacttcggtacctttgtacgcctgttttatctcccttcccaatgtaacttagaagttcttaaatcaatgctcaataggtggggcgcaaaccagcgttctcatgagcaagcactcctgtctccccggtgaggttgtataaactgttcccacggttgaaaacgacctatccgttatccgctatagtacttcgagaaacctagtaccacctttggattgttgacgcgttgcgctcagcacactaacccgtgtgtagcttgggtcgatgagtctggacatacctcactggcgacagtggtccaggctgcgttggcggcctactcatggcgaaagccatgagacgctaaacatgaacaaggtgtgaagagtctattgagctactatagagtcctccggcccctgaatgcggctaatcctaaccatggagcaagtgctcacaggccagtgagttgcttgtcgtaatgcgcaagtccgtggcggaaccgactactttgggtgtccgtgtttcactttttacttttatgactgcttatggtgacaatttgatattgttaccatttagcttgtcaaatcaattgcaaaagatcctaaatcttatttatcaacttgcatcttgataactttaatttgaaaattttaaca

SEQ ID NO: 20436 - DNA, 677 bp, synthetic construct
  source 1..677: mol_type = other DNA
tcccactccaagggcccacgtggcggctagtactctggtacttcggtacctttgtacgcctgttttatctcccttcccaatgtaacttagaagttcttaaatcaatgctcaataggtggggcgcaaaccagcgctctcatgagcaagcactcctgtctccccggtgaggttgtataaactgttcccacggttgaaaacaacctatccgttatccgctatagtacttcgagaaacctagtaccacctttggattgttgacgcgttgcgctcagcacactaacccgtgtgtagcttgggtcgatgagtctggacatacctcactggcgacagtggtccaggctgcgttggcggcctactcatggtgaaagccatgagacgctagacatgaacaaggtgtgaagagtctattgagctactatagagtcctccggcccctgaatgcggctaatcctaaccatggagcaagtgctcacaggccagtgagttgcttgtcgtaatgcgcaagtccgtggcggaaccgactactttgggtgtccgtgtttcactttttacttttatgactgcttatggtgacaatttgatattgttaccatttagcttgtcaaatcaattgcaaaagatcctaactcttatttatcaacttgcatcttgataattttaatttgaaaattttaaca

SEQ ID NO: 20437 - DNA, 677 bp, synthetic construct
  source 1..677: mol_type = other DNA
tcccactccaagggcccacgtggcggctagtactctggtacttcggtacctttgtacgcctgttttatctcccttcccaatgtaacttagaagttcttaaatcaatgctcaataggtggggcgcaaaccagcgctctcatgagcaagcactcctgtctccccggtgaggttgtataaactgttcccacggttgaaaacaacctatccgttatccgctatagtacttcgagaaacctagtaccacctttggattgttgacgcgttgcgctcagcacactaacccgtgtgtagcttgggtcgatgagtctggacataccccactggcgacagtggtccaggctgcgttggcggcctactcatggcgaaagtcatgagacgctagacatgaacaaggtgtgaagagtctattgagctactatagagtcctccggcccctgaatgcggctaatcctaaccatggagcaagtgctcacaggccagtgagttacttgtcgtaatgcgcaagtccgtggcggaaccgactactttgggtgtccgtgtttcactttttacttttatgactgcttatggtgacaatttgatattgttaccatttagcttgtcaagtcaattgcaaaagatcctaaatcttatttgtcaacttgcatcttgataactttaatttgaaaattttaaca

SEQ ID NO: 20438 - DNA, 677 bp, synthetic construct
  source 1..677: mol_type = other DNA
tcccactccaagggcccacgtggcggctagtactctggtacttcggtacctttgtacgcctgttttatctcccttcccaatgtaacttagaagttcttaaatcaatgctcaataggtggggcgcaaaccagcgctctcatgagcaagcactcctgtctccccggtgaggttgtataaactgctcccacggttgaaaacaacctatccgttatccgctatagtacttcgagaaacctagtaccacctttggattgttgacgcgttgcgctcagcacactaacccgtgtgtagcttgggtcgatgagtctggacatacctcactggcgacagtggtccaggctgcgttggcggcctactcatggtgaaagccatgagacgctagacatgaacaaggtgtgaagagtctattgagctactatagagtcctccggcccctgaatgcggctaatcctaaccatggagcaagtgctcacaggccagtgagttgcttgtcgtaatgcgcaagtccgtggcggaaccgactactttgggtgtccgtgtttcactttttacttttatgactgcttatggtgacaatttgatattgttaccatttagcttgtcaaatcaattgcaaaagatcctaaatcttatttatcaacttgcatcttgataactttaatttgaaaattttaaca

SEQ ID NO: 20439 - DNA, 677 bp, synthetic construct
  source 1..677: mol_type = other DNA
tcccactccaagggcccacgtggcggctagtactctggtacttcggtacctttgtacgcctgttttatctcccttcccaatgtaacttagaagttcttaaatcaatgctcaataggtggggcgcaaaccagcgctcttatgagcaagcactcctgtctccccggtgaggttgtataaactgttcccacggttgaaaacaacctatccgttatccgctatagtacttcgagaaacctagtatcacctttggattgttgacgcgttgcgctcagcacactaacccgtgtgtagcttgggtcgatgagtctggacatacctcactggcgacagtggtccaggctgcgttggcggcctactcatggtgaaaaccatgagacgctagacatgaacaaggtgtgaagagtctattgagctactatagagtcctccggcccctgaatgcggctaatcctaaccatggagcaagtgctcacaggccagtgggttgcttgtcgtaatgcgcaagtccgtggcggaaccgactactttgggtgtccgtgtttcactttttacttttatgactgcttatggtgacaatttgatattgttaccatttagcttgtcaaatcaattgcaaaagatcctaaatcttacttatcaatttgcatcttgataactttaatttgaaaactttaaca

SEQ ID NO: 20440 - DNA, 677 bp, synthetic construct
  source 1..677: mol_type = other DNA
tcccactccaagggcccacgtggcggctagtactctggtacttcggtacctttgtacgcctgttttatctcccttcccaatgtaacttagaagttcttaaatcaatgctcaataggtggggcgcaaaccagcgctctcatgagcaagcactcctgtctccccggtgaggttgtataaactgttcccacggttgaaaacaaccaatccgttatccgctatagtacttcgagaaacctagtaccacctttggattgttgacgcgttgcgctcagcacactaacccgtgtgtagcttgggtcgatgagtctggacatacctcactggcgacagtggtccaggctgcgttggcggcctactcatggtgaaaaccatgagacgctagacatgaacaaggtgtgaagagtctattgagctactatagagtcctccggcccctgaatgcggctaatcctaaccatggagcaagtgctcacaggccagtgagttgcttgtcgtaatgcgcaagtccgtggcggaaccgactactttgggtgtccgtgtttcactttttacttttatgactgcttatggtgacaatttgatattgttaccatttagcttgtcaaatcaattgcaaaagatcctacatcttatttatcaatttgcatcttgataactttaatttgaaaattttaaca

SEQ ID NO: 20441 - DNA, 677 bp, synthetic construct
  source 1..677: mol_type = other DNA
tcccactccaagggcccacgtggcggctagtactctggtacttcggtacctttgtacgcctgttttatctcccttcccaatgtaacttagaagtttttaaattaatgctcaataggtggggcacaaaccagtgctctcatgagcaagcactcctgtctccccggtgaggttgtataaactgttcccacggttgaaaacaacctatccgttatccgctatagtacttcgagaaacctagtaccacctttggattgttgacgcgttgcgctcagcacactaacccgtgtgtagcttgggtcgatgagtctggacatacctcactggcgacagtggtccaggctgcgttggcggcctactcatggtgaaagccatgagacgctagacatgaacaaggtgtgaagagtctattgagctactatagagtcctccggcccctgaatgcggctaatcctaaccatggagcaagtgctcacaggccagtgagttgcttgtcgtaatgcgcaagtccgtggcggaaccgactactttgggtgtccgtgtttcactttttacttttatgactgcttatggtgacaatttgatattgttaccatttagcttgtcaaatcaattgcaaaagatcctaaatcttatttatcaacttgcatcttgataactttaatttgaaaattttaaca

SEQ ID NO: 20442 - DNA, 677 bp, synthetic construct
  source 1..677: mol_type = other DNA
tcccactccaagggcccacgtggcggctagtactctggtacttcggtacctttgtacgcctgttttatctcccttcccaatgtaacttagaagttcttaaatcaatgctcaataggtggggcgcaaaccagcgctttcatgagcaagcactcctgtctccccggtgaggttgtataaactgttcccacggttgaaaacaacctatccgttatccgctatagtacttcgagaaacctagtaccacctttggattgttgacgcgttgcgctcagcacactaacccgtgtgtagcttgggtcgatgagtctggacatacctcactggcgacagtggtccaggctgcgttggcggcctactcatggtgaaagccatgagacgctagacatgaacaaggtgtgaagagtctattgagctactatagagtcctccggcccctgaatgcggctaatcctaaccatggagcaagtgctcacaggccagtgagttgcttgtcgtaatgcgcaagtccgtggcggaaccgactactttgggtgtccgtgtttcactttttacttttatgactgcttatggtgacaatttgatattgttaccatttagcttgtcaaatcaattgcaaaagatcctaaatcttatttatcaacttgcatcttgataactttaatttgaaaattttaaca

SEQ ID NO: 20443 - DNA, 677 bp, synthetic construct
  source 1..677: mol_type = other DNA
tcccactccaagggcccacgtggcggctagtactctggtacttcggtacctttgtacgcctgttttatctcccttcccaatgtaacttagaagttcttaaatcaatgctcaataggtggggcgcaaaccagcgctctcatgagcaagcactcctgtctccccggtgaggttgtataaactgttcccacggttgaaaacaacctatccgttatccgctatagtacttcgagaaacctagtaccacctttggattgttgacgcgttgcgctcagcacactaacccgtgtgtagcttgggtcgatgagtctggacatacctcactggcgacagtggtccaggctgcgttggcggcctactcatggcgaaagccatgagacgctagacatgaacaaggtgtgaagagtctattgagctactatagagtcctccggcccctgaatgcggctaatcctaaccacggagcaagtgctcacagaccagtgagttgcttgtcgtaatgcgcaagtccgtggcggaaccgactactttgggtgtccgtgtttcactttttacttttatgactgcttatggtgacaatttgatattgttaccatttagcttgtcaaatcgattgcaaaagatcctaaatcttatttatcaacttgcatcttgataactttaatttgaagattttaaca

SEQ ID NO: 20444 - DNA, 677 bp, synthetic construct
  source 1..677: mol_type = other DNA
tcccactccaagggcccacgtggcggctagtactctggtacttcggtacctttgtacgcctgttttatctcccttcccaatgtaacttagaagttcttaaatcaatgctcaataggtggggcgcaaaccagcgctctcatgagcaagcactcctgtctccccggtgaggttgtacaaactgttcccacggttgaaaacaacctatccgttatccgctatagtacttcgagaaacctagtaccacctttggattgttgacgcgttgcgctcagcacactaacccgtgtgtagcttgggtcgatgagtctggacatacctcactggcgacagtggtccaggctgcgttggcggcctactcatggtgaaagccatgagacgctagacatgaacaaggtgtgaagagtctattgagctactatagagtcctccggcccctgaatgcggctaatcctaaccatggagcaagtgctcacaggccagtgagttgcttgtcgtaatgcgcaagtccgtggcggaaccgactactttgggtgtccgtgtttcactttttacttttatgactgcttatggtgacaatttgatattgttaccatttagcttgtcaaatcaattgcaaaagatcctaaatcttatttatcaacttgcatcttgataactttaatttgaaaattttaaca

SEQ ID NO: 20445 - DNA, 677 bp, synthetic construct
  source 1..677: mol_type = other DNA
tcccactccaagggcccacgtggcggctagtactctggtacttcggtacctttgtacgcctgttttatctcccttcccaatgtaacttagaagttcttaaattaatgctcaataggtggggcgcaaaccagcgctctcatgagcaagcactcctgtctccccggtgaggttgtataaactgttcccacggttgaaaacaacctatccgttatccgctatagtacttcgagaaacctagtaccacctttggattgttgacgcgttgcgctcagcacactaacccgtgtgtagcttgggtcgatgagtctggacatacctcactggcgacagtggtccaggctgcgttggcggcctactcatggtgaaagccatgagacgctagacatgaacaaggtgtgaagagtctattgagctactatagagtcctccggcccctgaatgcggctaatcctaaccatggagcaagtgctcacaggccagtgagttgcttgtcgtaatgcgcaagtccgtggcggaaccgactactttgggtgtccgtgtttcactttttacttttatgactgcttatggtgacaatttgatattgttaccatttagcttgtcaaatcaattgcaaaagatcctaaatcttatttatcaacttgcatcttgataattttaatttgaaaactttaaca

SEQ ID NO: 20446 - DNA, 677 bp, synthetic construct
  source 1..677: mol_type = other DNA
tcccactccaagggcccacgtggcggctagtactctggtacttcggtacctttgtacgcctgttttatctcccttcccgatgtaacttagaagttcttaaatcaatgctcaataggtggggcgcaaaccagcgctctcatgagcaagcactcctgtctccccggtgaggttgtataaactgttcccacggttgaaaacaacctatccgttatccgctatagtacttcgagaaacctagtaccacctttggattgttgacgcgttgcgctcagcacactaacccgtgtgtagcttgggtcgatgagtctggacatacctcactggcgacagtggtccaggctgcgttggcggcctactcatggtgaaagccatgagacgctagacatgaacaaggtgtgaagagtctattgagctactatagagtcctccggcccctgaatgcggctaatcctaaccatggagcaagtgctcacaggccagtgagttgcttgtcgtaatgcgcaagtccgtggcggaaccgactactttgggtgtccgtgtttcactttttacttttatgactgcttatggtgacaatttgatattgttaccatttagcttgtcaaatcaattgcaaaagatcctaaatcttatttatcaacttgcatcttgataactttaatttgaaaattttaaca

SEQ ID NO: 20447 - DNA, 677 bp, synthetic construct
  source 1..677: mol_type = other DNA
tcccactccaagggcccacgtggcggctagtactctggtacttcggtacctttgtacgcctgttttatctcccttcccaatgtaacttagaagttcttaaatcaatgctcaataggtggggcgcaaaccagcgctctcatgagcaagcactcctgtctccccggtgaagttgtataaactgttcccacggttgaaaacaacctatccgttatccgctatagtacttcgagaaacctagtaccacctttggattgttgacgcgttgcgctcagcacactaacccgtgtgtagcttgggtcgatgagtctggacatacctcactggcgacagtggtccaggctgcgttggcggcctactcatggtgaaagccatgagacgctagacatgaacaaggtgtgaagagtctattgagctactatagagtcctccggcccctgaatgcggctaatcctaaccatggagcaagtgctcacaggccagtgagttgcttgtcgtaatgcgcaagtccgtggcggaaccgactactttgggtgtccgtgtttcactttttacttttatgactgcttatggtgacaatttgatattgttaccatttagcttgtcaaatcaattgcaaaagatcctaaatcttatttatcaacttgcatcttgataactttaatttgaaaattttaaca

SEQ ID NO: 20448 - DNA, 677 bp, synthetic construct
  source 1..677: mol_type = other DNA
tcccactccaagggcccacgtggcggctagtactctggtacttcggtacctttgtacgcctgttttatctcccttcccaatgtaacttagaagttcttaaatcaatgctcaataggtggggcgcaaaccagcgctctcatgagcaagcactcctgtctccccggtgaggttgtataaactgttcccacggttgaaaacaacctatccgttatccgctatagtacttcgagaaacctagtaccacctttggattgttgacgcgttgcgctcagcacactaacccgtgtgtagcttgggtcgatgagtctggacatacctcactggcgacagtggtccaggctgcgttggcggcctactcatggtgaaagccatgagacgctagacatgaacaaggtgtgaagagtctattgagctactatagagtcctccggcccctgaatgcggctaatcctaaccatggagcaagtgctcacaggccagtgagttgcttgtcgtaatgcgcaagtccgtggcggaaccgactactttgggtgtccgtgtttcactttttacttttatgactgcttatggtgacaatttgatattgttaccatttagcttgtcaaatcaattgcaaaagatcctaaatcttgtttatcaacttgcatcttgataactttaatttgaaaattttaaca

SEQ ID NO: 20449 - DNA, 677 bp, synthetic construct
  source 1..677: mol_type = other DNA
tcccactccaagggcccacgtggcggctagtactctggtacttcggtacctttgtacgcctgttttatctcccttcccaatgtaacttagaagttcttaaatcaatgctcaataggtggggcgcaaaccagcgctctcatgagcaagcactcctgtctccccggtgaggttgtataaactgttcctacggttgaaaacaacctatccgttatccgctatagtacttcgagaaacctagtaccacctttggattgttgacgcgttgcgctcagcacactaacccgtgtgtagcttgggtcgatgagtctggacatacctcactggcgacagtggtccaggctgcgttggcggcctactcatggtgaaagccatgagacgctagacatgaacaaggtgtgaagagtctattgagctactatagagtcctccggcccctgaatgcggctaatcctaaccatggagcaagtgctcacaggccagtgagttgcttgtcgtaatgcgcaagtccgtggcggaaccgactactttgggtgtccgtgtttcactttttacttttatgactgcttatggtgacaatttgatattgttaccatttagcttgtcaaatcaattgcaaaagatcctaaatcttatttatcaacttgcatcttgataactttaatttgaaaattttaaca

SEQ ID NO: 20450 - DNA, 677 bp, synthetic construct
  source 1..677: mol_type = other DNA
tcccactccaagggcccacgtggcggctagtactctggtacttcggtacctttgtacgcctgttttatctcccttcccaatgcaacttagaagttcttaaatcaatgctcaataggtggggcgcaaaccagcgctctcacgagcaagcactcctgtctccccggtgaggttgtataaactgttcccacggttgaaaacaacctatccgttatccgctatagtacttcgagaaacctagtaccacctttggattgttgacgcgttgcgctcagcacactaacccgtgtgtagcttgggtcgatgagtctggacatacctcactggcgacagtggtccaggctgcgttggcggcctactcatggtgaaagccatgagacgctagacatgaacaaggtgtgaagagtctattgagctactatagagtcctccggcccctgaatgcggctaatcctaaccatggagcaagtgctcacaggccagtgagttgcttgtcgtaatgcgcaagtccgtggcggaaccgactactttgggtgtccgtgtttcactttttacttttatgactgcttatggtgacaatttgatattgttaccatttagcttgtcaaatcaattacaaaagatcctaaatcttatttatcaacttgcatcttgataactttaatttgaaaattttaaca

SEQ ID NO: 20451 - DNA, 677 bp, synthetic construct
  source 1..677: mol_type = other DNA
tcccactccaagggcccacgtggcggctagtactctggtacttcggtacctttgtacgcctgttttatctcccttcccaatgtaacttagaagttcttaaatcaatgctcaataggtggggcgcgaaccagcgctctcatgagcaagcactcctgtctccccggtgaggttgtataaactgttcccacggttgaaaacaacctatccgttatccgctatagtacttcgagaaacctagtaccacctttggattgttgacgcgttgcgctcagcacactaacccgtgtgtagcttgggtcgatgagtctggacatacctcactggcgacagtggtccaggctgcgttggcggcctactcatggtgaaagccatgagacgctagacatgaacaaggtgtgaagagtctattgagctactatagagtcctccggctcctgaatgcggctaatcctaaccatggagcaagtgctcacaggccagtgagttgcttgtcgtaatgcgcaagtccgtggcggaaccgactactttggatgtccgtgtttcactttttacttttatgactgcttatggtgacaatttgatattgttaccatttagcttgtcaaatcaattgcaaaagatcctaaatcttatttatcaacttgcatcttgataactttaatttgaaaattttaaca

SEQ ID NO: 20452 - DNA, 677 bp, synthetic construct
  source 1..677: mol_type = other DNA
tcccactccaagggcccacgtggcggctagtactctggtacttcggtacctttgtacgcctgttttatctcccttcccaatgtaacttagaagttcttaaatcaatgctcaataggtggggcgcaaaccagcgctctcatgagcaagcactcctgtctccccggtgaggttgtataaactgttcccacggttgaaaacaaccaatccgttatccgctatagtacttcgagaaacctagtaccacctttggattgttgacgcgttgcgctcagcacactaacccgtgtgtagcttgggtcgatgagtctggacatacctcactggcgacagtggtccaggctgcgttggcggcctactcatggtgaaaaccatgagacgctagacatgaacaaggtgtgaagagtctattgagctactatagagtcctccggcccctgaatgcggctaatcctaaccatggagcaagtgctcacaggccagtgagttgcttgtcgtaatgcgcaagtccgtggcggaaccgactactttgggtgtccgtgtttcactttttacttttatgactgcttatggtgacaatttgatattgttaccatttagcttgtcaaatcaattgcaaaagatcctaaatcttatttgtcaatttgcatcttgataactttaatttgaaaattttaaca

SEQ ID NO: 20453 - DNA, 677 bp, synthetic construct
  source 1..677: mol_type = other DNA
tcccactccaagggcccacgtggcggctagtactctggtacttcggtacctttgtacgcctgttttatctcccttcccaatgtaacttagaagttcttaaatcaatgctcaataggtggggcgcaaaccagcgctctcatgagcaagcactcctgtctccccggtgaggttgtataaactgttcccacggttgaaaacaacctatccgttatccgctatagtacttcgagaaacctagtaccacctttggattgttgacgcgttgcgctcagcacactaacccgtgtgtagcttgggtcgatgagtctggacatacctcactggcgacagtggtccaggctgcgttggcggcctactcatggtgaaagccatgagacgctagacatgaacaaggtgtgaagagtctattgagctactatagagtcctccggcccctgaatgcggctaatcctaaccatggagcaagtgctcacaggccagtgagttgcttgtcgtaatgcgcaagtccgtggcggaaccgactactttgggtgtccgtgtttcactttttacttttatgactgcttatggtgacaatttgatattgttaccatttagcttgtcaaatcaattgcaaaagatcctaaatcttatttatcaacttgcatcttaataactttaatttgaaaattttaaca

SEQ ID NO: 20454 - DNA, 677 bp, synthetic construct
  source 1..677: mol_type = other DNA
tcccactccaagggcccacgtggcggctagtactctggtacttcggtacctttgtacgcctgttttatctcccttcccaatgtaacttagaagttcttaaatcaatgctcaataggtggggcgcaaaccagcgctctcatgagcaagcactcctgtctccccggtgaggttgtataaactgttcccacggttgaaaacaacctatccgttatccgctatagtacttcgagaaacctagtaccacctttggattgttgacgcgttgcgctcagcacactaacccgtgtgtagcttgggtcgatgagtctggacatacctcactggcgacagtggtccaggctgcgttggcggcctactcatggtaaaagccatgagacgctagacatgaacaaggtgtgaagagtctattgagctactatagagtcctccggcccctgaatgcggctaatcctaaccatggagcaagtgctcacaagccagtgagttgcttgtcgtaatgcgcaagtccgtggcggaaccgactactttgggtgtccgtgtttcactttttacttttatgactgcttatggtgacaatttgatattgttaccatttagcttgtcaaatcaattgcaaaagatcctaaatcttatttatcaacttgcatcttgataactctaatttgaaaattttaaca

SEQ ID NO: 20455 - DNA, 677 bp, synthetic construct
  source 1..677: mol_type = other DNA
tcccactccaagggcccacgtggcggctagtactctggtacttcggtacctttgtacgcctgttttatctcccttcccaatgtaacttagaagttcttaaatcaatgctcaataggtggggcgcaaaccagcgctctcatgagcaagcacttctgtctccccggtgaggttgtataaactgttcccacggttgaaaacaacctatccgttatccgctatagtacttcgagaaacctagtaccacctttggattgttgacgcgttgcgctcagcacactaacccgtgtgtagcttgggtcgatgagtctggacatacctcactggcgacagtggtccaggctgcgttggcggcctactcatggtgaaagccatgagacgctagacatgaacaaggtgtgaagagtctattgagctactatagagtcctccggcccctgaatgcggctaatcctaaccatggagcaagtgctcacaggccagtgagttacttgtcgtaatgcgcaagtccgtggcggaaccgactactttgggtgtccgtgtttcactttttacttttatgactgcttatggtgacaatttgatattgttaccatttagcttgtcaaatcaattgcaaaagatcctaaatcttatttgtcaacttgcatcttgataactttaatttgaaaattttaaca

SEQ ID NO: 20456 - DNA, 677 bp, synthetic construct
  source 1..677: mol_type = other DNA
tcccactccaagggcccacgtggcggctagtactctggtactttggtacctttgtacgcctgttttatctcccttcccaatgtaacttagaagttcttaaatcaatgctcaataggtggggcgcaaaccagcgctctcatgagcaagcactcctgtctccccggtgaggttgtataaactgttcccacggttgaaaacaacctatccgttatccgctatagtacttcgagaaacctagtaccacctttggattgttgacgcgttgcgctcagcacactaacccgtgtgtagcttgggtcgatgagtctggacatacctcactggcgacagtggtccaggctgcgttggcggcctactcatggtgaaagccatgagacgctagacatgaacaaggtgtgaagagtctattgagctactatagagtcctccggcccctgaatgcggctaatcctaaccatggagcaagtgctcacaggccagtgagttgcttgtcgtaatgcgcaagtccgtggcggaaccgactactttgggtgtccgtgtttcactttttacttttatgactgcttatggtgacaatttgatattgttaccatttagcttgtcaaatcaattgcaaaagatcctaaatcttatttatcaacttgcatcttgataactttaatttgaaaattttaaca

SEQ ID NO: 20457 - DNA, 677 bp, synthetic construct
  source 1..677: mol_type = other DNA
tcccactccaagggcccacgtggcggctagtactctggtacttcggtacctttgtacgcctgttttatctcccttcccaatgtaacttagaagttcttaaatcaatgctcaataggtggggcgcaaaccagcgctctcatgagcaagcactcctgtctccccggtgaggttgtataaactgttcccacggttgaaaacaacctatccgttatccgctatagtacttcgagaaacctagtaccacctttggattgttgacgcgttgcgctcagcacactaacccgtgtgtagcttgggtcgatgagtctggacatacctcactggcgacagtggtccaggctgcgttggcggcctactcatggtgaaagccatgagacgctagacatgaacaaggtgtgaagagtctattgagctactatagagtcctccggcccctgaatgcggctaatcctaaccatggagcaagtgctcacaggccagtgagttgcttgtcgtaatgcgcaagtccgtggcggaaccgactactttgggtgtccgtgtttcactttttacttttatgactgcttatggtgacaattcaatattgttaccatttagcttgtcaaatcaattgcaaaagatcctaactcttatttatcaacttgcatcttgataactttaatttgaaaattttaaca

SEQ ID NO: 20458 - DNA, 677 bp, synthetic construct
  source 1..677: mol_type = other DNA
tcccactccaagggcccacgtggcggctagtactctggtacttcggtacctttgtacgcctgttttatctcccttcccaatgtaacttagaagttcttaaatcaatgctcaataggtggggcgcaaaccagcgctctcatgagcaagcactcctgtctccccggtgaggttgtataaactgttcccacggttgaaaacaacctatccgttatccgctatagtacttcgagaaacctagtaccacctttggattgttgacgcgttgcgctcagcacactaacccgtgtgtagcttgggtcgatgagtctggacatacctcactggcgacagtggtccaggctgcgttggcggcctactcatggtgaaagccatgagacgctagacatgaacaaggtgtgaagagtctattgagctactatagagtcctccggcccctgaatgcggctaatcctaaccatggagcaagtgctcacaggccagtgagttgcttgtcgtaatgcgcaagtccgtggcggaaccgactactttgggtgtccgtgtttcactttttacttttatgactgcttatggtgacaatttgatattgttaccatttagcttgtcagatcaattgcaaaagatcctaaatcttatttatcaacttgcatcttgataactttaattcgaaaattttaaca

SEQ ID NO: 20459 - DNA, 677 bp, synthetic construct
  source 1..677: mol_type = other DNA
tcccactccaagggcccacgtggcggctagtactctggtacttcggtacctttgtacgcctgttttatctcccttcccaatgtaacttagaagttcttaaatcaatgctcaataggtggggcgcaaaccagcgctctcatgagcaagcactcctgtctccccggtgaggttgtataaactgttcccacggttgaaaacaacctatccgttatccgctatagtacttcgagaaacctagtaccacctttggattgttgacgcgttgcgctcagcacactaacccgtgtgtagcttgggtcgatgagtctggacatacctcactggcgacagtggtccaggctgcgttggcggcctactcatggtgaaagccatgagacgctagacatgaacaaggtgtgaagagtctattgagctactatagagtcctccggcccctgaatgcggctaatcctaaccatggagcaagtgctcacaggccagtgagttgcttgtcgtaatgcgcaagtccgtgacggaaccgactactttgggtgtccgtgtttcactttttacttttatgactgcttatggtgacaatttgatattgttaccatttagcttgtcaaatcaattgcaaaagatcctaaatcttatttatcaacttgcatcttgataactttaatttgaaaattttaaca

SEQ ID NO: 20460 - DNA, 677 bp, synthetic construct
  source 1..677: mol_type = other DNA
tcccactccaagggcccacgtggcggctagtactctggtacttcggtacctttgtacgcctgttttatctcccttcccaatgtaacttagaagttcttaaatcaatgctcaataggtggggcgcaaaccagcgctctcatgagcaagcactcctgtctccccggtgaggttgtataaactgttcccacggttgaaaacaacctatccgttatccgctatagtacttcgagaaacctagtaccacctttggattgttgacgcgttgcgctcagcacactaacccgtgtgtagcttgggtcgatgagtctggacatacctcactggcgacagtggtccaggctgcgttggcggcctactcatggtgaaagccatgagacgctagacatgaacaaggtgtgaagagtctattgagctactatagagtcctccggcccctgaatgcggctaatcctaaccatggagcaagtgttcacaggccagtgagttgcttgtcgtaatgcgcaagtccgtggcggaaccgactactttgggtgtccgtgtttcactttttacttttatgactgcttatggtgacaatttgatattgttaccatttagcttgtcaaatcaattgcaaaagatcctaaatcttatttatcaacttgcatcttgataactttaatttgaaaattttaaca

SEQ ID NO: 20461 - DNA, 677 bp, synthetic construct
  source 1..677: mol_type = other DNA
tcccactccaagggcccacgtggcggctagtactctggtacttcggtacctttgtacgcctgttttatctcccttcccaatgtaacttagaagttcttaaatcaatgctcaataggtggggcgcaagccagcgctctcatgagcaagcactcctgtctccccggtgaggttgtataaactgttcccacggttgaaaacaacctatccgttatccgctatagtacttcgagaaacctagtatcacctttggattgttgacgcgttgcgctcagcacactaacccgtgtgtagcttgggtcgatgagtctggacatacctcactggcgacagtggtccaggctgcgttggcggcctactcatggtgaaaaccatgagacgctagacatgaacaaggtgtgaagagtctattgagctactatagagtcctccggcccctgaatgcggctaatcctaaccatggagcaagtgctcacaggccagtgagttgcttgtcgtaatgcgcaagtccgtggcggaaccgactactttgggtgtccgtgtttcactttttacttttatgactgcttatggtgacaatttgatattgttaccatttagcttgtcaaatcaattgcaaaagatcctaaatcttatttatcaatttgcatcttgataactttaatttgaaaattttaaca

SEQ ID NO: 20462 - DNA, 677 bp, synthetic construct
  source 1..677: mol_type = other DNA
tcccactccaagggcccacgtggcggctagtactctggtacttcggtacctttgtacgcctgttttatctcccttcccaatgtaacttagaagttcttaaatcaaagctcaataggtggggcgcaaaccagcgctctcatgagcaagcactcctgtctccccggtgaggttgtataaactgttcccacggttgaaaacaacctatccgttatccgctatagtacttcgagaaacctagtaccacctttggattgttgatgcgttgcgctcagcacactaacccgtgtgtagcttgggtcgatgagtctggacatacctcactggcgacagtggtccaggctgcgttggcggcctactcatggtgaaagccatgagacgctagacatgaacaaggtgtgaagagtctattgagctactatagagtcctccggcccctgaatgcggctaatcctaaccatggagcaagtgctcacaggccagtgagttgcttgtcgtaatgcgcaagtccgtggcggaaccgactactttgggtgtccgtgtttcactttttacttttatgactgcttatggtgacaatttgatattgttaccatttagcttgtcaaatcaattgcaaaagatcctaaatcttatttatcaacttgcatcttgataactttaatttgaaaattttaaca

SEQ ID NO: 20463 - DNA, 677 bp, synthetic construct
  source 1..677: mol_type = other DNA
tcccactccaagggcccacgtggcggctagtactctggtacttcggtacctttgtacgcctgttttatctcccttcccaatgtaacttagaagtttttaaatcaatgctcaataggtggggcacaaaccagtgctctcatgagcaagcactcctgtctccccggtgaggttgtataaactgttcccacggttgaaaacaacctatccgttatccgctatagtacttcgagaaacctagtaccacctttggattgttgacgcgttgcgctcagcacactaacccgtgtgtagcttgggtcgatgagtctggacatacctcactggcgacagtggtccaggctgcgttggcggcctactcatggtgaaagccatgagacgctagacatgaacaaggtgtgaagagtctattgagctactatagagtcctccggcccctgaatgcggctaatcctaaccatggagcaagtgctcacaggccagtgagttacttgtcgtaatgcgcaagtccgtggcggaaccgactactttgggtgtccgtgtttcactttttacttttatgactgcttatggtgacaatttgatattgttaccatttagcttgtcaaatcaattgcaaaagatcctaaatcttatttatcaacttgcatcttgacaactttaatttgaaaattttaaca

SEQ ID NO: 20464 - DNA, 677 bp, synthetic construct
  source 1..677: mol_type = other DNA
tcccactccaagggcccacgtggcggctagtactctggtacttcggtacctttgtacgcctgttttatctcccttcccaatgtaacttagaagttcttaaatcaatgctcaataggtggggcgcaaaccagcgctctcatgagcaagcactcctgtctccccggtgaggttgtataaactgttcccacggttgaaaacaacctatccgttatccgctatagtacttcgagaaacctagtaccacctttggattgttgacgcgttgcgctcagcacactaacccgtgtgtagcttgggtcgatgagtctggacatacctcactggcgacagtggtccaggctgcgttggcggcctactcatggtgaaagccatgagacgctagacatgaacaaggtgtgaagagtctattgagctactatagagtcctccggcccctgaatgcggctaatcctaaccatggagcaagtgctcacaggccagtgagttgcttgtcgtaatgcgcaagtccgtggcggaaccgactactttgggtgtccgtgtttcactttttacttttatgactgcttatggtgacaatttgatattgttaccatttagcttgtcaaatcaattgcaaaagatcctaaatcttatttatcaactcgcatcttgataaatttaatttgaaaattttaaca

SEQ ID NO: 20465 - DNA, 677 bp, synthetic construct
  source 1..677: mol_type = other DNA
tcccactccaagggcccacgtggcggctagtactctggtacttcggtacctttgtacgcctgttttatctcccttcccaatgtaacttagaagttcttaaatcaatgctcaataggtggggcgcaaaccagcgctctcatgagcaagcactcctgtctccccggtgaggttgtataaactgttcccacggttgaaaacaacctatccgttatccgctatagtacttcgagaaacctagtaccacctttggattgttgatgcgttgcgctcagcacactaacccgtgtgtagcttgggtcgatgagtctggacatacctcactggcgacagtggtccaggctgcgttggcggcctactcatggtgaaagccatgagacgctagacatgaacaaggtgtgaagagtctattgagctactatagagtcctccggctcctgaatgcggctaatcctaaccatggagcaagtgctcacaggccagtgagttgcttgtcgtaatgcgcaagtccgtggcggaaccgactactttggatgtccgtgtttcactttttacttttatgactgcttatggtgacaatttgatattgttaccatttagcttgtcaaatcaattgcaaaagatcctaaatcttatttatcaacttgcatcttgataactttaatttgaaaattttaaca

SEQ ID NO: 20466 - DNA, 677 bp, synthetic construct
  source 1..677: mol_type = other DNA
tcccactccaagggcccacgtggcggctagtactctggtacttcggtacctttgtgcgcctgttttatctcccttcccaatgtaacttagaagttcttaaatcaatgctcaataggtggggcgcaaaccagcgctctcatgagcaagcactcctgtctccccggtgaggttgtataaactgttcccacggttgaaaacaacctatccgttatccgctatagtacttcgagaaacctagtaccacctttggattgttgacgcgttgcgctcagcacactaacccgtgtgtagcttgggtcgatgagtctggacatacctcactggcgacagtggtccaggctgcgttggcggcctactcatggtgaaagccatgagacgctagacatgaacaaggtgtgaagagtctattgagctactatagagtcctccggcccctgaatgcggctaatcctaaccatggagcaagtgctcacaggccagtgagttgcttgtcgtaatgcgcaagtccgtggcggaaccgactactttgggtgtccgtgtttcactttttacttttatgactgcttatggtgacaatttgatattgttaccatttagcttgtcaaatcaattgcaaaagatcctaaatcttatttatcaacttgcatcttgataactttaatttgaaaatcttaaca

SEQ ID NO: 20467 - DNA, 677 bp, synthetic construct
  source 1..677: mol_type = other DNA
tcccactccaagggcccacgtggcggctagtactctggtactttggtacctttgtacgcctgttttatctcccttcccaatgtaacttagaagttcttaaatcaatgctcaataggtggggcgcaaaccagcgctctcatgagcaagcactcctgtctccccggtgaggttgtataaactgttcccacggttgaaaacaacctatccgttatccgctatagtacttcgagaaacctagtaccacctttggattgttgacgcgttgcgctcagcacactaacccgtgtgtagcttgggtcgatgagtctggacatacctcactggcgacagtggtccaggctgcgttggcggcctactcatggtgaaagccatgagacgctagacatgaacaaggtgtgaagagtctattgagctactatagagtcctccggcccctgaatgcggctaatcctaaccatggagcaagtgctcacaggccagtgagttgcttgtcgtaatgcgcaagtccgtggcggaaccgactactttgggtgtccgtgtttcactttttacttttatgactgcttatggtgacaatttgatattgttaccatttagcttgtcaaatcaattgcaaaagatcctaaatcttatttgtcaacttgcatcttaataactttaatttgaaaattttaaca

SEQ ID NO: 20468 - DNA, 677 bp, synthetic construct
  source 1..677: mol_type = other DNA
tcccactccaagggcccacgtggcggctagtactctggtacttcggtacctttgtacgcctgttttatctcccttcccaatgtaacttagaagttcttaaatcaatgctcaataggtggggcgcaaaccagcgctctcatgagcaagcactcctgtctccccggtgaggttgtataaactgttcccacggttgaaaacaacctatccgttatccgctatagtacttcgagaaacctagtaccacctttggattgttgacgcgttgcgctcagcacactaacccgtgtgtagcttgggtcgatgagtctggacatacctcactggcgacagtggtccaggctgcgttggcggcctactcatggcgaaagccatgagacgctagacatgaacaaggtgtgaagagtctattgagctactatagagtcctccggcccctgaatgcggctaatcctaaccatggagcaagtgctcacaggccagtgagttacttgtcgtaatgcgcaagtccgtggcggaaccgactactttgggtgtccgtgtttcactttttacttttatgactgcttatggtgacaatttgatattgttaccatttagcttgtcaaatcaattgcaaaagatcctaaatcttatttgtcaacttgcatcttgataactttaatttgaaaattttaaca

SEQ ID NO: 20469 - DNA, 677 bp, synthetic construct
  source 1..677: mol_type = other DNA
tcccactccaagggcccacgtggcggctagtactctggtacttcggtacctttgtacgcctgttttatctccctccccaatgtaacttagaagttcttaaatcaatgctcaataggtggggcgcaaaccagcgttctcatgagcaagcactcctgtctccccggtgaggttgtataaactgttcccacggttgaaaacaacctatccgttatccgctatagtacttcgagaaacctagtaccacctttggattgttgacgcgttgcgctcagcacactaacccgtgtgtagcttgggtcgatgagtctggacatacctcactggcgacagtggtccaggctgcgttggcggcctactcatggtgaaagccatgagacgctagacatgaacaaggtgtgaagagtctattgagctactatagagtcctccggcccctgaatgcggctaatcctaaccatggagcaagtgctcacaggccagtgagttgcttgtcgtaatgcgcaagtccgtggcggaaccgactactttgggtgtccgtgtttcactttttacttttatgactgcttatggtgacaatttgatattgttaccatttagcttgtcaaaccaattgtaaaagatcctaactcttatttatcaacttgcatctcgataactctaatttgaaaattttaaca

SEQ ID NO: 20470 - DNA, 677 bp, synthetic construct
  source 1..677: mol_type = other DNA
tcccactccaagggcccacgtggcggctagtactctggtacttcggtacctttgtacgcctgttttatctcccttcccaatgtaacttagaagttcttaaatcaatgctcaataggtggggcgcaaaccagcgctctcatgagcaagcactcctgtctccccggtgaggttgtataaactgttcccacggttgaaaacaacctatccgttatccgctatagtacttcgagaaacctagtaccacctttggattgttgacgcgttgcgctcagcacactaacccgtgtgtagcttgggtcgatgagtctggatatacctcactggcgacagtggtccaggctgcgttggcggcctactcatggtgaaagccatgagacgctagacatgaacaaggtgtgaagagtctattgagctactatagagtcctccggcccctgaatgcggctaatcctaaccatggagcaagtgctcacaggccagtgagttgcttgtcgtaatgcgcaagtccgtggcggaaccgactactttgggtgtccgtgtttcactttttacttttatgactgcttatggtgacaatttgatattgttaccatttagcttgtcaaatcaattgcaaaagaccctaaatcttatttatcaacttgcatcttgataactttaatttgaaaattttaaca

SEQ ID NO: 20471 - DNA, 677 bp, synthetic construct
  source 1..677: mol_type = other DNA
tcccactccaagggcccacgtggcggctagtactctggtacttcggtacctttgtacgcctgttttatctcccttcccaatgtaacttagaagttcttaaatcaatgctcaataggtggggcgcaaaccagcgttctcatgagcaagcactcctgtctccccggtgaggttgtataaactgttcccacggttgaaaacgacctatccgttatccgctatagtacttcgagaaacctagtaccacctttggattgttgacgcgttgcgctcagcacactaacccgtgtgtagcttgggtcgatgagtctggacacacctcactggcgacagtggtccaggctgcgttggcggcctactcatggcgaaagccatgagacgctagacatgaacaaggtgtgaagagtctattgagctactatagagtcctccggcccctgaatgcggctaatcctaaccatggagcaagtgctcacaggccagtgagttgcttgtcgtaatgcgcaagtccgtggcggaaccgactactttgggtgtccgtgtttcactttttacttttatgactgcttatggtgacaatttgatattgttaccatttagcttgtcaaatcaattgcaaaagatcctaaatcttatttatcaacttgcatcttgataactttaatttgaaaattttaaca

SEQ ID NO: 20472 - DNA, 677 bp, synthetic construct
  source 1..677: mol_type = other DNA
tcccactccaagggcccacgtggcggctagtactctggtacttcggtacctttgtacgcctgttttatctcccttcccaatgtaacttagaagttcttaaatcaatgctcaataggtggggcgcaaaccagcgctctcatgagcaagcactcctgtctccccggtgaggttgtataaactgttcccacggttgaaaacaacctatccgttatccgctatagtacttcgagaaacctagtaccacctttggattgttgacgcgttgcgctcagcacactaacccgtgtgtagcttgggtcgatgagtctggacataccccactggcaacagtggtccaggctgcgttggcggcctactcatggtgaaagccatgagacgctagacatgaacaaggtgtgaagagtctattgagctactatagagtcctccggcccctgaatgcggctaatcctaaccatggagcaagtgctcacaggccagtgagttgcttgtcgtaatgcgcaagtccgtggcggaaccgactactttgggtgtccgtgtttcactttttacttttatgactgcttatggtgacaatttgatattgttaccatttagcttgtcaaatcaattgcaaaagatcctaaatcttatttatcaacttgcatcttgataactttaatttgaaaattttaaca

SEQ ID NO: 20473 - DNA, 677 bp, synthetic construct
  source 1..677: mol_type = other DNA
tcccactccaagggcccacgtggcggctagtactctggtacttcggcacctttgtacgcctgttttatctcccttcccaatgtaacttagaagttcttaaatcaatgctcaataggtggggcgcaaaccagcgttctcatgagcaagcactcctgtctccccggtgaggttgtataaactgttcccacggttgaaaacgacctatccgttatccgctatagtacttcgagaaacctagtaccacctttggattgttgacgcgttgcgctcagcacactaacccgtgtgtagcttgggtcgatgagtctggacatacctcactggcgacagtggtccaggctgcgttggcggcctactcatggcgaaagccatgagacgctagacatgaacaaggtgtgaagagtctattgagctactatagagtcctccggcccctgaatgcggctaatcctaaccatggagcaagtgctcacaggccagtgagttgcttgtcgtaatgcgcaagtctgtggcggaaccgactactttgggtgtccgtgtttcactttttacttttatgactgcttatggtgacaatttgatattgttaccatttagcttgtcaaatcaattgcaaaagatcctaaatcttatttatcaacttgcatcttgataactttaatttgaaaattttaaca

SEQ ID NO: 20474 - DNA, 677 bp, synthetic construct
  source 1..677: mol_type = other DNA
tcccactccaagggcccacgtggcggctagtactctggtacttcggtacctttgtacgcctgttttatctcccttcccaatgtaacttagaagttcttaaatcaatgctcaataggtggggcgcaaaccagcgctctcatgagcaagcactcctgtctccccggtgaggttgtataaactgttcccacggttgaaaacaacctatccgttatccgctatagtacttcgagaaacctagtaccacctttggattgttgacgcgttgcgctcagcacactaacccgtgtgtagcttgggtcgatgagtctggacataccccactggcgacagtggtccaggctgcgttggcggcctactcatggtgaaagccatgagacgctagacatgaacaaggtgtgaagagtctattgagctactatagagtcctccggcccctgaatgcggctaatcctaaccatggagcaagtgctcacaggccagtgagttgcttgtcgtaatgcgcaagtccgtggcggaaccgactactttgggtgtccgtgtttcactttttacttttatgactgcttatggtgacaatttgatattgttaccatttagcttgtcaaatcaattgcaaaagatcctaaatcttatttatcaacttgcatcttgataactttaatttgaaaattttaaca

SEQ ID NO: 20475 - DNA, 677 bp, synthetic construct
  source 1..677: mol_type = other DNA
tcccactccaagggcccacgtggcggctagtactctggtacttcggtacctttgtacgcctgttttatctcccttcccaatgtaacttagaagttcttaaatcaatgctcaataggtggggcgcaaaccagcgctctcatgagcaagcactcctgtctccccggtgaggttgtataaactgttcccacggttgaaaacaacttatccgttatccgctatagtacttcgagaaacctagtaccacctttggattgttgacgcgttgcgctcagcacactaacccgtgtgtagcttgggtcgatgagtctggacatacctcactggcgacagtggtccaggctgcgttggcggcctactcatggtgaaagccatgagacgctagacatgaacaaggtgtgaagagtctattgagctactatagagtcctccggcccctgaatgcggctaatcctaaccatggagcaagtgctcacaggccagtgagttgcttgtcgtaatgcgcaagtccgtggcggaaccgactactttgggtgtccgtgtttcactttttacttttatgactgcttatggtgacaatttgatattgttaccatttagcttgtcaaatcaattgcaaaagatcctaaatcttatttatcaacttgcatcttgataactttaatttgaaaattttaaca

SEQ ID NO: 20476 - DNA, 677 bp, synthetic construct
  source 1..677: mol_type = other DNA
tcccactccaagggcccacgtggcggctagtactctggtacttcggtacctttgtacgcctgttttatctcccttcccaatgtaacttagaagttcttaaatcaatgctcaataggtggggcgcaaaccagcgctctcatgagcaagcactcctgtctccccggtgaggttgtataaactgttcccacggttgaaaacaacctatccgttatccgctatagtacttcgagaaacctagtaccacctttggattgttgacgcgttgcgctcagcacactaacccgtgtgtagcttgggtcgatgagtctggacatacctcactggcgacagtggtccaggctgcgttggcggcctactcatggtgaaagccatgagacgctagacatgaacaaggtgtgaagagtctattgagctactatagagtcctccggcccctgaatgcggctaatcctaaccatggagcaagtgctcacaggccagtgagttgcttgtcgtaatgcgcaagtccgtggcggaaccgactactttgggtgtccgtgtttcactttttacttttatgactgcttatggtgacaatttgatattgttaccatttagcttgtcaaatcaattgcaaaagatcctaaatcttatttgtcaacttgcatcttgataactttaatttgaaaattttaaca

SEQ ID NO: 20477 - DNA, 677 bp, synthetic construct
  source 1..677: mol_type = other DNA
tcccactccaagggcccacgtggcggctagtactctggtacttcggtacctttgtacgcctgttttatctcccttcccaatgtaacttagaagttcttaaatcaatgctcaataggtggggcgcaaaccagcgctctcatgagcaagcactcctgtctccccggtgaggttgtataaactgttcccacggttgaaaacaacctatccgttatccgctatagtacttcgagaaacctagtaccacctttggattgttgacgcgttgcgctcagcacactaacccgtgtgtagcttgggtcgatgagtctggacatacctcactggcgacagtggtccaggctgcgttggcggcctactcatggtgaaagccatgagacgctagacatgaacaaggtgtgaagagtctattgagctactatagagtcctccggcccctgaatgcggctaatcctaaccatggagcgagtgctcacaggccagtgagttgcttgtcgtaatgcgcaagtccgtggcggaaccgactactttgggtgtccgtgtttcactttttacttttatgactgcttatggtgacaatttgatattgttaccatttagcttgtcaaatcaattgcaaaagatcctaaatcttatttatcaacttgcaccttgataactttaatttgaaaattttaaca

SEQ ID NO: 20478 - DNA, 677 bp, synthetic construct
  source 1..677: mol_type = other DNA
tcccactccaagggcccacgtggcggctagtactctggtacttcggtacctttgtacgcctgttttatctcccttcccaatgtaacttagaagttcttaaatcaatgctcaataggtggggcgcaaaccagcgctctcatgagcaagcactcctgtctccccggtgaggttgtataaactgttcccacggttgaaaacaacctatccgttatccgctatagtacttcgagaaacctagtaccacctttggattgttgacgcgttgcgctcagcacactaacccgtgtgtagcttgggtcgatgagtctggacatacctcactggcgacagtggtccaggctgcgttggcggcctactcatggtgaaagccatgagacgctagacatgaacaaggtgtgaagagtctattgagctactatagagtcctccggcccctgaatgcggctaatcctaaccatggagcaagtgctcacaggccagtgagttgcttgtcgtaatgcgcaagtccgtggcggaaccgactactttgggtgtccgtgtttcactttttacttttatgactgcttatggtgacaatttgatattgttaccatttagcttgtcaaatcaattgcaaaagatcctaaatcttatttatcaacttgcatcttgataactttaattcgaaaattttaaca

SEQ ID NO: 20479 - DNA, 677 bp, synthetic construct
  source 1..677: mol_type = other DNA
tcccactccaagggcccacgtggcggctagtactctggtacttcggtacctttgtacgcctgttttatctcccttcccaatgtaacttagaagttcttaaatcaatgctcaataggtggggcgcaaaccagcgctctcatgagcaagcactcctgtctccccggtgaggttgtataaactgttcccacggttgaaaacaacctatccgttatccgctatagtacttcgagaaacctagtaccacctttggattgttgacgcgttgcgctcagcacactaacccgtgtgtagcttgggtcgatgagtctggacatacctcactggcgacagtggtccaggctgcgttggcggcctactcatggtgaaaaccatgagacgctagacatgaacaaggtgtgaagagtctattgagctactatagagtcctccggcccctgaatgcggctaatcctaaccatggagcaagtgctcacaggccagtgagttgcttgtcgtaatgcgcaagtccgtggcggaaccgactactttgggtgtccgtgtttcactttttacttttatgactgcttatggtgacaatttgatattgttaccatttagcttgtcaaatcaattacaaaagatcctaaatcttatttatcaatttgcatcttgataattttaatttgaaaatttcaaca

SEQ ID NO: 20480 - DNA, 677 bp, synthetic construct
  source 1..677: mol_type = other DNA
tcccactccaagggcccacgtggcggctagtactctggtacttcggtacctttgtacgcctgttttatctcccttcccaatgtaacttagaagttcttaaaccaatgctcaataggtggggcgcaaaccagcgctctcatgagcaagcactcctgtctccccggtgaggttgtataaactgttcccacggttgaaaacaacctatccgttatccgctatagtacttcgagaaacctagtaccacctttggattgttgacgcgttgcgctcagcacactaacccgtgtgtagcttgggtcgatgagtctggacatacctcactggcgacagtggtccaggctgcgttggcggcctactcatggtgaaagccatgagacgctagacatgaacaaggtgtgaagagtctattgagctactatagagtcctccggcccctgaatgcggctaatcctaaccatggagcaagtgctcacaggccagtgagttgcttgtcgtaatgcgcaagtccgtggcggaaccgactactttgggtgtccgtgtttcactttttacttttatgactgcttatggtgacaatttgatattgttaccatttagcttgtcaaatcaattgcaaaagatcctaactcttatttatcaacttgcatcttgataactttaatttgaaaattttaaca

SEQ ID NO: 20481 - DNA, 677 bp, synthetic construct
  source 1..677: mol_type = other DNA
tcccactccaagggcccacgtggcggctagtactctggtacttcggtacctttgtacgcctgttttatctcccctcccaatgtaacttagaagttcttaaatcaatgctcaataggtggggcgcaaaccagcgctctcatgagcaagcactcctgtctccccggtgaggttgtataaactgttcccacggttgaaaacaacctatccgttatccgctatagtacttcgagaaacctagtaccacctttggattgttgacgcgttgcgctcagcacactaacccgtgtgtagcttgggtcgatgagtctggacatacctcactggcgacagtggttcaggctgcgttggcggcctactcatggtgaaagccatgagacgctagacatgaacaaggtgtgaagagtctattgagctactatagagtcctccggcccctgaatgcggctaatcctaaccatggagcaagtgctcacaggccagtgagttgcttgtcgtaatgcgcaagtccgtggcggaaccgactactttgggtgtccgtgtttcactttttacttttatgactgcttatggtgacaatttgatattgttaccatttagcttgtcaaatcaattgcaaaagatcctaaatcttatttatcaacttgcatcttgataactttaatttgaaaattttaaca

SEQ ID NO: 20482 - DNA, 677 bp, synthetic construct
  source 1..677: mol_type = other DNA
tcccactccaagggcccacgtggcggctagtactctggtacttcggtacctttgtacgcctgttttatctcccttcccaatgtaacttagaagttcttaaatcaacgctcaataggtggggcgcaaaccagcgctctcatgagcaagcactcctgtctccccggtgaggttgtataaactgttcccacggttgaaaacaacctatccgttatccgctatagtacttcgagaaacctagtatcacctttggattgttgacgcgttgcgctcagcacactaacccgtgtgtagcttgggtcgatgagtctggacatacctcactggcgacagtggtccaggctgcgttggcggcctactcatggtgaaaaccatgagacgctagacatgaacaaggtgtgaagagtctattgagctactatagagtcctccggcccctgaatgcggctaatcctaaccatggagcaagtgctcacaggccagtgagttgcttgtcgtaatgcgcaagtccgtggcggaaccgactactttgggtgtccgtgtttcactttttactttcatgactgcttatggtgacaatttgatattgttaccatttagcttgtcaaatcaattgcaaaagatcctaaatcttacttatcaatttgcttcttgataactttaatttgaaaattttaaca

SEQ ID NO: 20483 - DNA, 677 bp, synthetic construct
  source 1..677: mol_type = other DNA
tcccactccaagggcccacgtggcggctagtactctggtacttcggtacctttgtacgcctgttttatctcccttcccaatgtaacttagaagttctcaaatcaatgctcaataggtggggcgcaaaccagcgctctcatgagcaagcactcctgtctccccggtgaggttgtataaactgttcccacggttgaaaacaacctatccgttatccgctatagtacttcgagaaacctagtaccacctttggattgttgacgcgttgcgctcagcacactaacccgtgtgtagcttgggtcgatgagtctggacatacctcactggcgacagtggtccaggctgcgttggcggcctactcatggtgaaaaccatgagacgctagacatgaacaaggtgtgaagagtctattgagctactatagagtcctccggcccctgaatgcggctaatcctaaccatggagcaagtgctcacaggccagtgagttgcttgtcgtaatgcgcaagtccgtggcggaaccgactactttgggtgtccgtgtttcactttttacttttatgactgcttatggtgacaatttgatattgttaccatttagcttgtcaaatcaattgcaaaagatcctaaatcttatttatcaatttgcatcttgataactttaatttgaaaattttaaca

SEQ ID NO: 20484 - DNA, 677 bp, synthetic construct
  source 1..677: mol_type = other DNA
tcccactccaagggcccacgtggcggctagtactctggtacttcggtacctttgtacgcctgttttatctcccttcccaatgtaacttagaagttcttaaatcaatgctcaataggtggggcgcaaaccagcgctctcatgagcaagcactcctgtctccccggtgaggttgtataaactgttcccacggttgaaaacaacctatccgttatccgctatagtacttcgagaaacctagtaccacctttggattgttgacgcgttgcgctcagcacactaacccgtgtgtagcttgggtcgatgagtctggacatacctcactggcgacagtggtccaggctgcgttggcggcctactcatggtgaaagccatgagacgctagacatgaacaaggtgtgaagagtctattgagctactatagagtcctccggcccctgaatgcggctaatcctaaccatggagcaagtgctcacaggccagtgagttgcttgtcgtaatgcgcaagtccgtggcggaaccgactactttgggtgtccgtgtttcactttttacttttatgactgcttatggtgacaattttatattgttaccatttagcttgtcaaatcaattgcaaaagatcctaactcttatttatcaacttgcatctcgataactctaatttgaaaattttaaca

SEQ ID NO: 20485 - DNA, 656 bp, synthetic construct
  source 1..656: mol_type = other DNA
ggcggctagtactctggtacttcggtacctttgtacgcctgttttatctcccttcccaatgtaacttagaagttcttaaatcaatgctcaatagggggggcgcaagccagcgctctcatgagcaagcactcctgtctccccggtgaggttgtataaactgttcccacggttgaaaacaacctatccgttatccgctatagtacttcgagaaacctagtaccacctttggattgttgacgcgttgcgctcagcacactaacccgtgtgtagcttgggtcgatgagtctggacatacctcactggcgacagtggtccaggctgcgttggcggcctactcatggtgaaagccatgagacgctagacatgaacaaggtgtgaagagtctattgagctactatagagtcctccggcccctgaatgcggctaatcctaaccgtggagcaagtgctcacaggccagtgagttgcttgtcgtaatgcgcaagtccgtggcggaaccgactactttgggtgtccgtgtttcactttttacttttatgactgcttatggtgacaatttgatattgttaccatttagcttgtcaaatcaattgcaaaagatcctaaatcttatttatcaacctgcatcttgataactttaatttgaaaattttaaca

SEQ ID NO: 20486 - DNA, 655 bp, synthetic construct
  source 1..655: mol_type = other DNA
acaccctcccccgagtgcaacttagaagatatccacacacggtcaataggcggctcagtatgccaactgagtcatgatcaagcacttctgttcccccggactgagtatcaataagctgcttacgtggctgaaggagaaaacgttcgttatccggccaattacttcgagaagcttagtaccaccatggaggttgcgcagtgtttcgttccgcacaaccccagtgtagatcaggtcgatgagtcaccgcactcctcacgggcgaccgtggcggtggctgcgctggcggcctgcccatggggcaacccatgggacgcttcaatactgacatggtgcgaagagcctattgagctaattggtagtcctccggcccctgaatgcggctaatcctaactgcggagcagacacccacaagccagtgggcagtctgtcgtaatgggtaactctgcagcggaaccgactactttgggtgtccgtgtttccttttattcctatattggctgcttatggtgacaattgagagattgttaccatatagctattggattggccgtccagtgacaaacagagcgattatctatctatttgttggcttcgtaccattaaaccttagagtcctaaagaccctcaatttgattatacaatttaactctgcgaa

SEQ ID NO: 20487 - DNA, 677 bp, synthetic construct
  source 1..677: mol_type = other DNA
tcccactccaagggcccacgtggcggctagtactctggtacttcggtacctttgtacgcctgttttatctcccttcccaatgtaacttagaagttcttaaatcaatgctcaataggtggggcgcaaaccagcgttctcatgagcaagcactcctgtctccccggtgaggttgtataaactgttcccacggttgaaaacgacctatccgttatccgctatagtacttcgagaaacctagtaccacctttggattgttgacgcgttgcgctcagcacactaacccgtgtgtagcttgggtcgatgagtctggacatacctcactggcgacagtggtccaggctgcgttggcggcctactcatggcgaaagccatgagacgctagacatgaacaaggtgtgaagagtctattgagctactatagagtcctccggcccctgaatgcggctaatcctaaccatggagcaagtgctcacaggccagtgagttgcttgtcgtaatgcgcaagtccgtggcggaaccgactactttgggtgtccgtgtttcactttttacttttatgactgcttatggtgacaatttgatattgttaccatttagcttgtcaaatcaattgcagaagatcctaaatcttatttatcaacttgcatcttgataactttaatttgaaaattttaaca

SEQ ID NO: 20488 - DNA, 678 bp, synthetic construct
  source 1..678: mol_type = other DNA
tcccactccaagggcccacgtggcggctagtactctggtacttcggtacctttgtacgcctgttttatctcccttcccaacgtaacttagaagctcttaaatcaaggctcaataggtggagtgcaaaccagcactcttatgagcaagtactcctgtttccccggtgcggttatataaactgttcccacggttgaaagtaacctatccgttatccgctatagtacttcgagaaacctagtatcacctttggattgttgacgcgttgcgctcagcacactaacccgtgtgtagcttgggtcgatgagtctggacataccccactggcgacagtggtccaggctgcgttggcggcctactcatggtgaaaaccatgagacgctagacatgaacaaggtgtgaagagtctattgagctactatagagtcctccggcccctgaatgcggctaatcctaaccatggagcaagtgctcacagaccagtgagttgcttgtcgtaatgcgcaagtccgtggcggaaccgactactttgggtgtccgtgtttcacttttttacccttatgactgcttatggtgacaatttgatattgttaccatttagcttgtcaaatcaattgcgaaagatcctatcaacttgcattttgataactcttttgaaaactctaatttgaagattcaata

SEQ ID NO: 20489 - DNA, 685 bp, synthetic construct
  source 1..685: mol_type = other DNA
caccccaagggcccacgtggcggctagtactctggtatttcggtacctttgtacgcctgttttatctcccttcccaatgtaacttagaagttttcaaatcgaagctcagtaggtggggcgcaaaccagcgctttcatgagcaagcacttctgtttccccggtgcggttgtatagactgtttccacggttgaaaacaacttatccgttatccgctatagtacttcgagaaacctagtatcacctttggattgttgatgcgttgcgctcagcacactaacccgtgtgtagcttgggctgatgagtctggacgtaccccactggtgacagtggttcaggctgcgttggcggcctactcatggtgaaaaccatgagacgctagacatgaacaaggtgtgaagagtctattgagctactatagagtcctccggcccctgaatgcggctaatcttaaccatggagcaagtgctcacaagccagtgagttgcttgtcgtaacgcgcaagtccgtggcggaaccgactactttgggtgtccgtgtttcactttttacctttatgactgcttatggtgacaatttaatattgttaccatttagcttgtcagattaatcgcgtgaaatcctaaatcttgtttaccaatttgtattcggatagcttcatttgaaaattctaaactcattcataaag

SEQ ID NO: 20490 - DNA, 685 bp, synthetic construct
  source 1..685: mol_type = other DNA
caccccaagggcccacgtggcggctagtactctggtatttcggtacctttgtacgcctgttttatctcccttcccaatgtaacttagaagttttcaaatcgaagctcagtaggtggggcgcaaaccagcgctttcatgagcaagcacttctgtttccccggtgcggttgtatagactgtttccacggttgaaaacaacttatccgttatccgctatagtacttcgagaaacctagtatcacctttggattgttgatgcgttgcgctcagcacactaacccgtgtgtagcttgggctgatgagtctggacgtaccccactggtgacagtggtccaggctgcgttggcggcctactcatggtgaaaaccatgagacgctagacatgaacaaggtgtgaagagtctattgagctactatagagtcctccggcccctgaatgcggctaatcttaaccatggagcaagtgctcacaagccagtgagttgcttgtcgtaacgcgcaagtccgtggcggaaccgactactttgggtgtccgtgtttcactttttacctttatgactgcttatggtgacaatttaatattgttaccatttagcttgtcagattaatcgcgtgaaatcctaaatcttgttcaccaatttacattcggatagcttcatttgaaaattctaaactcattcataaaa

SEQ ID NO: 20491 - DNA, 685 bp, synthetic construct
  source 1..685: mol_type = other DNA
caccccaagggcccacgtggcggctagtactctggtatttcggtacctttgtacgcctgttttatctcccttcccaatgtaacttagaagttttcaaatcgaagctcagtaggtggggcgcaaaccagcgctttcatgagcaagcacttctgtttccccggtgcggttgtatagactgtttccacggttgaaaacaacttatccgttatccgctatagtacttcgagaaacctagtatcacctttggattgttgatgcgttgcgctcagcacactaacccgtgtgtagcttgggctgatgagtctggacgtaccccactggtgacagtggtccaggctgcgttggcggcctactcatggtgaaaaccatgagacgctagacatgaacaaggtgtgaagagtctattgagctactatagagtcctccggcccctgaatgcggctaatcttaaccatggagcaagtgctcacaagccagtgagttgcttgtcgtaacgcgcaagtccgtggcggaaccgactactttgggtgtccgtgtttcactttttacctttatgactgcttatggtgacaatttaatattgttaccatttagcttgtcagattaatcgcgtgaaatcctaaatcttgttcaccaatttgcattcggatagcttcacttgaaaattctaaactcattcataaag

SEQ ID NO: 20492 - DNA, 685 bp, synthetic construct
  source 1..685: mol_type = other DNA
caccccaggggcccacgtggcggctagtactctggtatttcggtacctttgtacgcctgttttatctcccttcccaatgtaacttagaagttttcaaatcgaagctcagtaggtggggcgcaaaccagcgctttcatgagcaagcacttctgtttccccggtgcggttgtatagactgtttccacggttgaaaacaacttatccgttatccgctatagtacttcgagaaacctagtatcacctttggattgttgatgcgttgcgctcagcacactaacccgtgtgtagcttgggctgatgagtctggacgtaccccactggtgacagtggtccaggctgcgttggcggcctactcatggtgaaaaccatgagacgctagacatgaacaaggtgtgaagagtctattgagctactatagagtcctccggcccctgaatgcggctaatcttaaccatggagcaagtgctcacaagccagtgagttgcttgtcgtaacgcgcaagtccgtggcggaaccgactactttgggtgtccgtgtttcactttttacctttatgactgcttatggtgacaatttaatattgttaccatttagcttgtcagattaatcgcgtgaaatcttaaatcttgttcaccaatttgtattcggatagcttcatttgaaaattctaaactcattcataaag

SEQ ID NO: 20493 - DNA, 685 bp, synthetic construct
  source 1..685: mol_type = other DNA
caccccaagggcccacgtggcggctagtactctggtatttcggtacctttgtacgcctgttttatctcccttcccaatgtaacttagaagttttcaaatcgaagctcagtaggtggggcgcaaaccagcgctttcatgagcaagcacttctgtttccccggtgcggttgtataaactgtttccacggttgaaaacaacttatccgttatccgctatagtacttcgagaaacctagtatcacctttggattgttgatgcgttgcgctcagcacactaacccgtgtgtagcttgggctgatgagtctggacgtaccccactggtgacagtggtccaggctgcgttggcggcctactcatggtgaaaaccatgagacgctagacatgaacaaggtgtgaagagtctattgagctactatagagtcctccggcccctgaatgcggctaatcttaaccatggagcaagtgctcacaagccagtgagttgcttgtcgtaacgcgcaagtccgtggcggaaccgactactttgggtgtccgtgtttcactttttacctttatgactgcttatggtgacaatttaatattgttaccatttagcttgtcagatttattgcgtgaaatcctaaatcttgttcaccaatttgtattcggatagcttcatttgaaaattctaaactcactcataaag

SEQ ID NO: 20494 - DNA, 685 bp, synthetic construct
  source 1..685: mol_type = other DNA
caccccaagggcccacgtggcggctagtactctggtatttcggtacctttgtacgcctgttttatctcccttcccaatgtaacttagaagttttcaaatcgaagctcaataggtggagcgcaaaccagcgctttcatgagcaagcacttctgtctccccggtgcggttgtatagactgtttccacggttgaaaacaacttatccgttatccgctatagtacttcgagaaacctagtatcacctttggattgttgatgcgttgcgctcaacacactaacccgtgtgtagcttgggtcgatgagtctggacgtaccccactggtgacagtggtccaggctgcgttggcggcctactcatggtgaaaaccatgagacgctagacatgaacaaggtgtgaagagtctattgagctactatagagtcctccggcccctgaatgcggctaatcttaaccatggagcaagtgctcacaagccagtgagttgcttgtcgtaacgcgcaagtccgtggcggaaccgactactttgggtgtccgtgtttcactttttacttttatgactgcttatggtgacaatttaatattgttaccatttagcttgtcagattaatcacgtgaaatcctaaatcttatttatcaatttgtatttggatagcttcatttgaaaattctaaactcatttataaag

SEQ ID NO: 20495 - DNA, 685 bp, synthetic construct
  source 1..685: mol_type = other DNA
caccccaagggcccacgtggcggctagtactctggtatttcggtacctttgtacgcctgttttatctcccttcccaatgtaacttagaagttttcaaatcgaagctcagtaggtggggcgcaaaccagcgctttcatgagcaagcacttctgtttccccggtgcggttgtatagactgtttccacggttgaaaacaacttatccgttatccgctatagtacttcgagaaacctagtatcacctttggattgttgatgcgttgcgctcagcacactaacccgtgtgtagcttgggctgatgagtctggacgtaccccactggtgacagtggtccaggctgcgttggcggcctactcatggtgaaaaccatgagacgctagacatgaacaaggtgtgaagagtctattgagctactatagagtcctccggcccctgaatgcggctaatcttaaccatggagcaagtgctcacaagccagtgagttgcttgtcgtaacgcgcaagtccgtggcggaaccgactactttgggtgtccgtgtttcactttttacctttatgactgcttatggtgacaatttaatattgttaccatttagcttgtcagattaatcgcgtgaaatcctaaatcttgttcaccaatttacattcggatagcttcatttgaaaattctaaactcattcataaag

SEQ ID NO: 20496 - DNA, 685 bp, synthetic construct
  source 1..685: mol_type = other DNA
caccccaagggcccacgtggcggctagtactctggtatttcggtacctttgtacgcctgttttatctcccttcctaatgtaacttagaagttttcaaatcgaagctcagtaggtggggcgcaaaccagcgctttcatgagcaagcacttctgtttccccggtgcggttgtatagactgttcccacggttgaaaacaacttatccgttatccgctatagtacttcgagaaacctagtatcacctttggattgttgatgcgttgcgctcagcacactaacccgtgtgtagcttgggctgatgagtctggacgtaccccactggtgacagtggtccaggctgcgttggcggcctactcatggtgaaaaccatgagacgctagacatgaacaaggtgtgaagagtctattgagctactatagagtcctccggcccctgaatgcggctaatcttaaccatggagcaagtgctcacaagccagtgagttgcttgtcgtaacgcgcaagtccgtggcggaaccgactactttgggtgtccgtgtttcactttttacctttatgactgcttatggtgacaatttaatattgttaccatttagcttgtcagattaatcgcgtgaaatcctaaatcttgttcaccaatttgcattcggatagcttcatttgaaaattctaaactcattcataaag

SEQ ID NO: 20497 - DNA, 685 bp, synthetic construct
  source 1..685: mol_type = other DNA
caccccaagggcccacgtggcggctagtactctggtatttcggtacctttgtacgcctgttttatctcccttcccaatgtaacttagaagttttcaaatcgaagctcagtaggtggggcgcaaaccagcgctttcatgagcaagcacttctgtttccccggtgcggttgtatagactgtttccacggttgaaaacaacttatccgttatccgctatagtacttcgagaaacctagtatcacctttggattgttgatgcgttgcgctcagcacactaacccgtgtgtagcttgggctgatgagtctggacgtaccccactggtgacagtggtccaggctgcgttggcggcctactcatggtgaaaaccatgagacgctagacatgaacaaggtgtgaagagtctattgagctactatagagtcctccggcccctgaatgcggctaatcttaaccatggagcaagtgctcacaagccagtgagttgcttgtcgtaacgcgcaagtccgtggcggaaccgactactttgggtgtccgtgtttcactttttacctttatgactgcttatggtgacaatttaatattgttaccatttagcttgtcagattaatcgcgtgaaatcctaaatcttgttcaccaatttgcattcggatagcttcatttgaaaattctaaactcattcataaag

SEQ ID NO: 20498 - DNA, 685 bp, synthetic construct
  source 1..685: mol_type = other DNA
caccccaagggcccacgtggcggctagtactctggtatttcggtacctttgtacgcctgttttatctcccttcccaacgtaacttagaagttttcaaatcgaagctcagtaggtggggcgcaaaccagcgctttcatgagcaagcacttctgtttccccggtgcggttgtatagactgtttacacggttgaaaacaacttatccgttatccgctatagtacttcgagaaacctagtatcacctttggattgttgatgcgttgcgctcagcacactaacccgtgtgtagcttgggctgatgagtctggatgtaccccactggtgacagtggtccaggctgcgttggcggcctactcatggtgaaaaccatgagacgctagacatgaacaaggtgtgaagagtctattgagctactatagagtcctccggcccctgaatgcggctaatcttaaccatggagcaagtgctcacaagccagtgagttgcttgtcgtaacgcgcaagtccgtggcggaaccgactactttgggtgtccgtgtttcactttttacctttatgactgcttatggtgacaatttaatattgttaccatttagcttgtcagatcaatcgcgtgaaatcctaaatcttgttcaccaatttgcattcagatagcttcatttgaaaattctaagctcattcataaag

SEQ ID NO: 20499 - DNA, 685 bp, synthetic construct
  source 1..685: mol_type = other DNA
caccccaagggcccacgtggcggctagtactctggtatttcggtacctttgtacgcctgttttatctcccttcccaatgtaacttagaagttttcaaatcgaagctcagtaggtggggcgcaaaccagcgctttcatgagcaagcacttctgtttccccggtgcggttgtatagactgtttccacggttgaaaacaacttatccgttatccgctatagtacttcgagaaacctagtatcacctttggattgttgatgcgttgcgctcagcacactaacccgtgtgtagcttgggctgatgagtctggacgtaccccactggtgacagtggtccaggctgcgttggcggcctactcatggtgaaaaccatgagacgctagacatgaacaaggtgtgaagagtctattgagctactatagagtcctccggcccctgaatgcggctaatcttaaccatggagcaagtgctcacaagccagtgagttgcttgtcgtaacgcgcaagtccgtggcagaaccgactactttgggtgtccgtgtttcactttttacctttatgactgcttatggtgacaatttaatattgttaccatttagcttgtcagattaatcgcgtgaaatcctaaatcttgttcaccaatttgtattcggatagcttcacttgaaaattctaaactcattcataaag

SEQ ID NO: 20500 - DNA, 685 bp, synthetic construct
  source 1..685: mol_type = other DNA
caccccaagggcccacgtggcggctagtactctggtatttcggtacctttgtacgcctgttttatctcccttcccaatgtaacttagaagttttcaaatcgaagctcagtaggtggggcgcaaaccagcgctttcatgagcaagcacttctgtttccccggtgcggttgtatagactgtttccacggttgaaaacaacttatccgttatccgctatagtacttcgagaaacctagtatcacctttggattgttgatgcgttgcgctcagcacactaacccgtgtgtagcttgggctgatgagtctggacgtaccccactggtgacagtggtccaggctgcgttggcggcctactcatggtgaaaaccatgagacgctagacatgaacaaggtgtgaagagtctattgagctactatagagtcctccggcccctgaatgcggctaatcttaaccatggagcaagtgctcacaagccagtgagttgcttgtcgtaacgcgcaagtccgtggcggaaccgactactttgggtgtccgtgtttcactttttacctttatgactgcttatggtgacaatttaatattgttaccatttagcttgtcagattaatcgcgtgaaatcctgaatcttgttcaccaatttgcattcggatagcttcatttgaaaattctaaactcattcataaag

SEQ ID NO: 20501 - DNA, 685 bp, synthetic construct
  source 1..685: mol_type = other DNA
caccccaagggcccacgtggcggctagtactctggtatttcggtacctttgtacgcctgttttatctcccttcccaatgtaacttagaagttttcaaatcgaagctcagtaggtggggcgcaaaccagcgctttcatgagcaagcacttctgtttccccggtgcggttgtatagactgtttccacggttgaaaacaacttatccgttatccgctatagtacttcgagaaacctagtatcacctttggattgttgatgcgttgcgctcagcacactaacccgtgtgtagcttgggctgatgagtctggacttaccccactggtgacagtggtccaggctgcgttggcggcctactcatggtgaaaaccatgagacgctagacatgaacaaggtgtgaagagtctattgagctactatagagtcctccggcccctgaatgcggctaatcttaaccatggagcaagtgctcacaagccagtgagttgcttgtcgtaacgcgcaagtccgtggcggaaccgactactttgggtgtccgtgtttcactttttacctttatgactgcttatggtgacaatttaatattgttaccatttagcttgtcagattaatcgcgtgaaatcctaaatcttgtttatcaatttgtatttggatagcttcatttgaaaattctaaactcattcataaag

SEQ ID NO: 20502 - DNA, 696 bp, synthetic construct
  source 1..696: mol_type = other DNA
cagcacactggtatcaaggtacctttgtgcgcctgttttgcttcccttttccccagaggcaacttagaagcaatactccacgaccaatagcaggcgtggcacaccagccatgtctcggtcaagcacttctgtgaccccggactgagtatcaataaactgctcacgcagtcgaaggagaaaacgtccgttacccggctagctacttcgagaaacctagtaacgccatgaaaattgcgaggtgtttcgctcagcacatccccagtgtagatcaggtcgatgagtcaccgcattccccacaggtaactgtggcggtggctgcgttggcggcctgcccatggggtaactcatgggacgcttcaatacggacatggtgtgaagagtctattgagctagttagtattcctccggcccctgaatgcggctaatcctaactgtggagcatgcgcccccattccagagggtagcatgtcgtaacgggtaactccgcagcggaaccgactactttgggtgtccgtgtttccttttattttatcattggctgcttatggtgacaattggaagattgttaccatatagctattggattggccatccggtgacgaacagagctataatttaccaatttgtgggatttgttcctataagtttgaaagtcttaaagacccttaatttaatattactactcaatagtgcaag

SEQ ID NO: 20503 - DNA, 667 bp, synthetic construct
  source 1..667: mol_type = other DNA
aagggcccacgtggcggctagtactctggtacttcggtacctttgtacgcctgttttatctcccttcccaatgtaatttagaagcttttaaatcaaggctcaataggtggggcgcaaaccagcgctctcatgagcaagcactcctgtctccccggtgtggttgtataaactgttcccacggttgaaaacaatctatccgttatccgctatagtacttcgagaaacctagtatcacctttggattgttgacgcgttgcgctcagcacactaacccgtgtgtagcttgggtcgatgagtctggacttaccccactggcgacagtggtccaggctgcgttggcggcctactcatggtgaaaaccatgagacgctagacatgaacaaggtgtgaagagtctattgagctactatagagtcctccggcccctgaatgcggctaatcctaaccatggagcaagtgctcacaggccagtgagttgcttgtcgtaatgcgcaagtccgtggcggaaccgactactttgggtgtccgtgtttcactttttacttttatgactgcttatggtgacaatttgatattgttaccatttagctgtcaaattaattgcaaaagatcctaagtcttacttaccaatttgcattttgataaccttgatttgaaaattttaata

SEQ ID NO: 20504 - DNA, 675 bp, synthetic construct
  source 1..675: mol_type = other DNA
tcccactccaggggcccacgtggcggctagtactctggtacttcggtacctttgtacgcctgttttatctcccttcccaatgtaacttagaagttcttaaatcaatgctcaataggtggggcgcaaaccagcgctctcatgagcaagtactcctgtctccccggtgaggttgtataaactgttcccacggttgaaaacaacctatccgttatccgctatagtacttcgagaaacctagtaccacctttggattgttgacgcgttgcgctcagcacactaacccgtgtgtagcttgggtcgatgagtctggacgtacctcactggcgacagtggtccaggctgcgttggcggcctactcatggtgaaagccatgagacgctagacatgaacaaggtgtgaagagtctattgagctactatagagtcctccggcccctgaatgcggctaatcctaaccatggagcaagtgctcacaggccagtgagttgcttgtcgtaatgcgcaagtccgtggcggaaccgactactttgggtgtccgtgtttcactttttacttttatgactgcttatggtgacaatttgatattgttaccatttagcttgtcaaatcaattgcaaaagatcctaaatcttatttatcaacttgcatcttgataacttatttgaaaattttaaca

SEQ ID NO: 20505 - DNA, 656 bp, synthetic construct
  source 1..656: mol_type = other DNA
gcggctagtactctggtatttcggtacctttgtacgcctgttttatctcccttcccaatgtaatttagaagctcttaaatcaaggctcaataggtggggcgcaaaccagcgctctcatgagcaagcactcctgtctccccggtgtggttgtataaactgttcccacggttgaaaacaacctatccgttatccgctatagtacttcgagaaacctagtatcacctttggattgttgacgcgttgcgctcagcacactaacccgtgtgtagcttgggtcgatgagtctggacataccccactggcgacagtggtccaggctgcgttggcggcctactcatggtgaaaaccatgagacgctagacatgaacaaggtgtgaagagtctattgagctactatagagtcctccggcccctgaatgcggctaatcctaaccatggagcaagtgctcacaggccagtgagttgcttgtcgtaatgcgcaagtccgtggcggaaccgactactttgggtgtccgtgtttcactttttacttttatgactgcttatggtgacaatttgatattgttaccatttagcttgtcaaattaattgcaaaagatcctaaatcttatttatcaacttgcattttgacaaccttgatttgaaaatttttaata

SEQ ID NO: 20506 - DNA, 666 bp, synthetic construct
  source 1..666: mol_type = other DNA
gggcccacgtggcggctagtactctggtatttcggtacctttgtacgcctgttttatatccctccccaatgtaatttagaagctttcaaatcaaagctcaataggtggagcgcaagccagcgcttccgtgagcaagcacttctgtttccccggtgcggttgtatagactgttcccacggttgaaaacgacctatccgttatccgctatagtacttcgagaaacctagtatcacctttggattgttgatgcgttgcgctcaacacactaacccgtgtgtagcttgggtcgatgagtctggacgtaccccactggtgacagtggtccaggctgcgttggcggcctactcatggtgaaaaccatgagacgctagacatgaacaaggtgtgaagagtctattgagctactatagagtcctccggcccctgaatgcggctaatcttaaccatggagcaagtgctcacaaaccagtgagttgcttgtcgtaatgcgcaagtccgtggcggaaccgactactttgggtgtccgtgtttcactttttacttttatgactgcttatggtgacaatttaatattgttaccattcagctagtcaaattaattgcaaaagatcctaagtcttacttaccaatttgcattttgataaccttgatttgaaaattttaata

SEQ ID NO: 20507 - DNA, 669 bp, synthetic construct
  source 1..669: mol_type = other DNA
ccaagggcccacgtggcggctagtactctggtacttcggtacctttgtacgcctgttttatctcccttcccaatgtaacttagaagctcttaaatcaaggctcaataggtggagcgcaaaccagcgctcttatgagcaagtacttctgtttccccggtgcggttatataaactgttcccacggttgaaaataacctatccgttatccgctatagtacttcgagaaacctagtatcacctttggattgttgacgcgttgcgctcagcacactaacccgtgtgtagcttgggtcgatgagtctggacataccccactggcgacagtggtccaggctgcgttggcggcctactcatggtgaaaaccatgagacgctagacatgaacaaggtgtgaagagtctattgagctactatagagtcctccggcccctgaatgcggctaatcctaaccatggagcaagtgctcacagaccagtgagttgcttgtcgtaatgcgcaagtccgtggcggaaccgactactttgggtgaccgtgtttcactttttacccttatgactgcttatggtgacaatttgatattgttgccatttagcttgtcaaatcaattgcaaaagatcctaaatcttatttatcaacttgcattttgataactttaatttgaagatttaata

SEQ ID NO: 20508 - DNA, 676 bp, synthetic construct
  source 1..676: mol_type = other DNA
tcccactccaagggcccacgtggcggctagtactctggtacttcggtacctttgtacgcctgttttatctcccttcccaatgtaacttagaagctcttaaatcaaggctcaataggtggagcgcaaaccagcgctcttatgagcaagtacttctgtttccccggtgcggttatataaactgttcccacggttgaaaataacctatccgttatccgctatagtacttcgagaaacctagtatcacctttggattgttgacgcgttgcgctcagcacactaacccgtgtgtagcttgggtcgatgagtctggacataccccactggcgacagtggtccaggctgcgttggcggcctactcatggtgaaaaccatgagacgctagacatgaacaaggtgtgaagagtctattgagctactatagagtcctccggcccctgaatgcggctaatcctaaccatggagcaagtgctcacagaccagtgagttgcttgtcgtaatgcgcaagtccgtggcggaaccgactactttgggtgaccgtgtttcactttttacccttatgactgcttatggtgacaatttgatattgttgccatttagcttgtcaaatcaattgcaaaagatcctaaatcttatttatcaacttgcattttgataactttaatttgaagatttaata

SEQ ID NO: 20509 - DNA, 695 bp, synthetic construct
  source 1..695: mol_type = other DNA
ttaaacacacggtctgggtgtccactccaagagccacgtgacggctagtactctggtacttcggtacctttgtacgccggttttatctcccttcccaatgtaatttagaagctcttaaatcaaggctcaataggtggggcgcaaaccagcgctctcatgagcaagcactcctgtctccccggtgtggttgcataaactgttcccacggttgaaaacaacctatccgttatccgctatagtacttcgagaaacctagtatcacctttggattgttgacgcgttgcgctcagcacactaacccgtgtgtagcttgggtcgatgagtctggacataccccactggcgacagtggtccaggctgcgttggcggcctactcatggtgaaaaccatgagacgctagacatgaacaaggtgtgaagagtctattgagctactatagagtcctccggcccctgaatgcggctaatcctaaccatggagcaagtgctcacaggccagtgagttgcttgtcgtaatgcgcaagtccgtggcggaaccgactactttgggtgtccgtgtttcactttttacttttatgactgcttatggtgacaatttgatattgttaccatttagcttgtcaaattaattgcaaaagatcctaaatcttacttaccaacttgcattttgataaccttgatttgaaaattttaata

SEQ ID NO: 20510 - DNA, 665 bp, synthetic construct
  source 1..665: mol_type = other DNA
gggcccacgtggcggctagtactctggtacttcggtacctttgtacgcctgttttatctcccttcccaatgtaatttagaagcttttaaatcaaggctcaataggtggggcgcaaaccagcgctctcatgagcaagcactcctgtctccccggtgtggttgtataaactgttcccacggttgaaaacaacctatccgttatccgctatagtacttcgagaaacctagtatcacctttggattgttgacgcgttgcgctcagcacactaacccgtgtgtagcttgggtcgatgagtctggacataccccactggcgacagtggtccaggctgcgttggcggcctactcatggtgaaaaccatgggacgctagacatgaacaaggtgtgaagagtctattgagctactatagagtcctccggcccctgaatgcggctaatcctaaccatggagcaagtgctcacaggccagtgagttgcttgtcgtaatgcgcaagtccgtggcggaaccgactactttgggtgtccgtgtttcactttttacttttatgactgcttatggtgacaatttgatattgttaccatttagctgtcaaattaattgcaaaagatcctaagtcttacttaccaatttgcattttgataaccttgatttgaaaattttaata

SEQ ID NO: 20511 - DNA, 653 bp, synthetic construct
  source 1..653: mol_type = other DNA
ggctagtactctggtacttcggtacctttgtacgcctgttttatctcccttcccaatgtaacttagaagttcttaaattaatgctcaataggtggggcgcaaaccagcgctctcatgagcaagcactcctgtctccccggtgaggttgtataaactgttcccacggttgaaagcaacctatccgttatccgctatagtacttcgagaaacctagtaccaccttcggattgttgacgcgttgcgctcagcacactaacccgtgtgtagcttgggtcgatgagtctggacatacctcactggcgacagtggtccaggctgcgttggcggcctactcatggtgaaagccatgagacgctagacatgaacaaggtgtgaagagtctattgagctactatagagtcctccggcccctgaatgcggctaatcctaaccatggagcaagtgctcacaggccagtgagttgcttgtcgtaatgcgcaagtccgtggcggaaccgactactttgggtgtccgtgtttcactttttacttttatgactgcttatggtgacaatttgatattgttaccatttagcttgtcaaatcaattgcaaaagatcctaaatcttatttatcaacttgcatcttgataactttaatttgaaaattttaaca

SEQ ID NO: 20512 - DNA, 654 bp, synthetic construct
  source 1..654: mol_type = other DNA
gcggctagtactctggtacttcggtacctttgtacgcctgttttatctcccttcccaatgtaatttagaagcttttaaatcaaggctcaataggtggggcgcaaaccagcgctctcatgagcaagcactcctgtctccccggtgtggttgtataaactgttcccacggttgaaaacaacctatccgttatccgctatagtacttcgagaaacctagtatcacctttggattgttgatgcgttgcgctcagcacactaacccgtgtgtagcttgggtcgatgagtctggacataccccactggcgacagtggtccaggctgcgttggcggcctactcatggtgaaaaccatgagacgctagacatgaacaaggtgtgaagagtctattgagctactatagagtcctccggcccctgaatgcggctaatcctaaccatggagcaagtgctcgcaggccagtgagttgcttgtcgtaatgcgcaagtccgtggcggaaccgactactttgggtgtccgtgtttcactttttacttttatgactgcttatggtgacaatttgatattgttaccatttagctgtcaaattaattgcaaaagatcctaagtcttacttaccaatttgcattttgataaccttgatttgaaaattttaata

SEQ ID NO: 20513 - DNA, 732 bp, synthetic construct
  source 1..732: mol_type = other DNA
tgtttgcgaacgagtttaggattttaaaacagccttggggttgttcccaccccaagggcccacgtggcggctagtactctggtatctcggtacctttgtacgcctgttttatctcccttcccaacgcaacttagaagttttcaaatcgaggctcaataggtgaagcgcaaaccagcgctttcatgagcaagcacttctgtctccccggtgcagttgtatagactgtttccacggttgaaaacaacttatccgttatccgctatagtacttcgagaaacctagtatcacctttggattgttgatgcgttgcgctcagcacactaacccgtgtgtagcttgggtcgatgagtctggacgtaccccactggtgacagtggtccaggctgcgttggcggcctactcatggtgaaaaccatgagacgctaaacatgaacaaggtgtgaagagtctattgagctactatagagtcctccggcccctgaatgcggctaatcttaaccatggagcaagtgctcacaagccagtgagttgcttgtcgtaatgcgcaagtccgtggcggaaccgactactttgggtgtccgtgtttcactttttacttttatgactgcttatggtgacaatttaatattgttaccatttagcttgtcagatcaatcacgtgaaatcccaaatctcatttaataatctgtatttggataacttcatttgaaaatcctaaactcgttcgcaaac

SEQ ID NO: 20514 - DNA, 653 bp, synthetic construct
  source 1..653: mol_type = other DNA
ggctagtactctggtacttcggtacctttgtacgcctgttttatctcccttcccaatgtaacttagaagttcttaaaccaatgctcaataggtggggcgcaaaccagcgctctcatgagcaagcactcctgtctccccggtgaggttgtataaactgttcccacggttgaaaacaacctatccgttatccgctatagtacttcgagaaacctagtaccacctttggattgttgacgcgttgcgctcagcacactaacccgtgtgtagcttgggtcgatgagtctggacatacctcactggcgacagtggtccaggctgcgttggcggcctactcatggtgaaagccatgagacgctagacatgaacaaggtgtgaagagtctattgagctactatagagtcctccggcccctgaatgcggctaatcctaaccatggagcaagtgctcacaggccagtgagttgcttgtcgtaatgcgcaagtccgtggcggaaccgactactttgggtgtccgtgtttcactttttacttttatgactgcttatggtgacaatttgatattgttaccatttagcttgtcaaatcaattgcaaaagatcctaactcttatttatcaacttgcatcttgataactttaatttgaaaattttaaca

SEQ ID NO: 20515 - DNA, 652 bp, synthetic construct
  source 1..652: mol_type = other DNA
ggctagtactctggtacttcggtacctttgtacgcctgttttatctcccttcccaatgtaatttagaagcttttaaatcaaggctcaataggtggggcgcaaaccagcgctctcatgagcaagcactcctgtctccccggtgtggttgtataaactgttcccacggttgaaaacaacctatccgttatccgctatagtacttcgagaaacctagtatcacctttggattgttgacgcgttgcgctcagcacactaacccgtgtgtagcttgggtcgatgagtctggacataccccactggcgacagtggtccaggctgcgttggcggcctactcatggtgaaaaccatgagacgctagacatgaacaaggtgtgaagagtctattgagctactatagagtcctccggcccctgaatgcggctaatcctaaccatggagcaagtgctcacaggccagtgagttgcttgtcgtaatgcgcaagtccgtggcggaaccgactactttgggtgtccgtgtttcactttttacttttatgactgcttatggtgacaatttgatattgttaccatttagctgtcaaattaattgcaaaagatcctaagtcttacttaccaatttgcattttgataaccttgatttgaaaactttaata

SEQ ID NO: 20516 - DNA, 675 bp, synthetic construct
  source 1..675: mol_type = other DNA
cactccaagggcccacgtggcggctagtactctggtacttcggtacctttgtacgcctgttttatctcccttcccaatgtaacttagaagttcttaaatcaatgctcaataggtggggcgcaaaccagcgctctcatgagcaagcactcctgtctccccggtgaggttgtataaactgttcccacggttgaaaacaacctatccgttatccgctatagtacttcgagaaacctagtaccacctttggattgttgacgcgttgcgctcagcacactaacccgtgtgtagcttgggtcgatgagtctggacatacctcactggcgacagtggtccaggctgcgttggcggcctactcatggtgaaagccatgagacgctagacatgaacaaggtgtgaagagtctattgagctactatagagtcctccggcccctgaatgcggctaatcctaaccatggagcaagtgctcacaggccagtgagttgcttgtcgtaatgcgcaagtccgtggcggaaccgactactttgggtgtccgtgtttcatttttttacttttatgactgcttatggtgacaatttgatattgttaccatttagcttgtcaaatcaattgcaaaagatcctaactcttatttatcaacttgcatcttgataactttaatttgaaaattttaaca

SEQ ID NO: 20517 - DNA, 710 bp, synthetic construct
  source 1..710: mol_type = other DNA
ttaaaacagccttggggttgttcccaccccaagggcccacgtggcggctagtactctggtatttcggtacctttgtacgcctgttttatatccctccccaatgtaatttagacgctttcaaatcaaagctcaataggtggagcgcaagccagcgcttccgtgagcaagcacttctgtttccccggtgcggttgtatagactgttcccacggttgaaaacgacctatccgttatccgctatagtacttcgagaaacctagtatcacctttggattgttgatgcgttgcgctcaacacactaacccgtgtgtagcttgggtcgatgagtctggacgtaccccactggtgacagtggtccaggctgcgttggcggcctactcatggtgaaaaccatgagacgctagacatgaacaaggtgtgaagagtctattgagctactatagagtcctccggcccctgaatgcggctaatcttaaccatggagcaagtgctcacaaaccagtgagttgcttgtcgtaatgcgcaagtccgtggcggaaccgactactttgggtgtccgtgtttcactttttacttttatgactgcttatggtgacaatttaatattgttaccattcagctagtcgaaataatcacataaaactttaaatcctatctaataattcacatttggatagtttcatttcgaggactttaaacctacttacaaag

SEQ ID NO: 20518 - DNA, 596 bp, synthetic construct; identical to SEQ ID NO: 644
  source 1..596: mol_type = other DNA

SEQ ID NO: 20519 - DNA, 674 bp, synthetic construct
  source 1..674: mol_type = other DNA
cactccaagggcccacgtggcggctagtactctggtacttcggtacctttgtacgcctgttttatctcccttcccaatgtaacttagaagttcttaaatcaatgctcaataggtggggcgcaaaccagcgctctcatgagcaagcactcctgtttccccggtgaggttgtataaactgttcccacggttgaaaacaacctatccgttatccgctatagtacttcgagaaacctagtaccacctttggattgttgacgcgttgcgctcagcacactaacccgtgtgtagcttgggtcgatgagtctggacatacctcactggcgacagtggtccaggctgcgttggcggcctactcatggtgaaagccatgagacgctagacatgaacaaggtgtgaagagtctattgagctactatagagtcctccggcccctgaatgcggctaatcctaaccatggagcaagtgctcacaggccagtgagttgcttgtcgtaatgcgcaagtccgtggcggaaccgactactttgggtgtccgtgtttcactttttacttttatgactgcttatggtgacaatttgatattgttaccatttagcttgtcaaatcaatcgcaaaagatcctaaatcttatttatcaacttgcatcttgataactttaattcgaaaattttaaca

SEQ ID NO: 20520 - DNA, 674 bp, synthetic construct
  source 1..674: mol_type = other DNA
cactccaagggcccacgtggcggctagtactctggtacttcggtacctttgtacgcctgttttatctcccttcccaatgtaacttagaagttcttaaatcaatgctcaataggtggggcgcaaaccagcgctctcatgagcaagcactcctgtctccccggtgaggttgtataaactgttcccacggttgaaaacaacctatccgttatccgctatagtacttcgagaaacctagtaccacctttggattgttgacgcgttgcgctcagcacactaacccgtgtgtagcttgggtcgatgagtctggacatacctcactggcgacagtggtccaggctgcgttggcggcctactcatggtgaaagccatgagacgctagacatgaacaaggtgtgaagagtctattgagctactatagagtcctccggcccctgaatgcggctaatcctaaccatggagcaagtgctcacaggccagtgagttgcttgtcgtaatgcgcaagtccgtggcggaaccgactactttgggtgtccgtgtttcactttttacttttatgactgcttatggtgacaatttgatattgttaccatttagcttgtcaaatcaattgcaaaagatcctaaatcttatttatcaacttgcatcttgataactttaatttgaaaattttaaca

SEQ ID NO: 20521 - DNA, 674 bp, synthetic construct
  source 1..674: mol_type = other DNA
cactccaagggcccacgtggcggctagtactctggtacttcggtacctttgtacgcctgttttatctcccttcccaatgtaacttagaagttcttaaatcaatgctcaataggtggggcgcaaaccagcgctctcatgagcaagcactcctgtctccccggtgaggttgtataaactgttcccacggttgaaaacaacctatccgttatccgctatagtacttcgagaaacctagtaccacctttggattgttgacgcgttgcgctcagcacactaacccgtgtgtagcttgggtcgatgagtctggacatacctcactggcgacagtggtccaggctgcgttggcggcctactcatggtgaaagccatgagacgctagacatgaacaaggtgtgaagagtctattgagctactatagagtcctccggcccctgaatgcggctaatcctaaccatggagcaagtgctcacaggccagtgagttgcttgtcgtaatgcgcaagtccgtggcggaaccgactactttgggtgtccgtgtttcactttttactcttatgactgcttatggtgacaatttgatattgttaccatttagcttgtcaaatcaattgcaaaagatcctaactcttatttatcaacttgtatcttgataactttaatttgaaaattttaaca

SEQ ID NO: 20522 - DNA, 674 bp, synthetic construct
  source 1..674: mol_type = other DNA
cactccaagggcccacgtggcggctagtactctggtacttcggtacctttgtacgcctgttttatctcccttcccaatgtaacttagaagttcttaaatcaatgctcaataggtggggcgcaaaccagcgctctcatgagcaagcactcctgtctccccggtgaggttgtataaactgttcccacggttgaaaacaacctatccgttatccgctatagtacttcgagaaacctagtaccacctttggattgttgacgcgttgcgctcagcacactaacccgtgtgtagcttgggtcgatgagtctggacatacctcactggcgacagtggtccaggctgcgttggcggcctactcatggtgaaagccatgagacgctagacatgaacaaggtgtgaagagtctattgagctactatagagtcctccggcccctgaatgcggctaatcctaaccatggagcaagtgctcacaggccagtgagttgcttgtcgtaatgcgcaagtccgtggcggaaccgactactttgggtgtccgtgtttcactttttacttttatgactgcttatggtgacaatttgatattgttaccatttagcttgtcaaatcaattgcaaaagatcctaactcttatttatcaacttgcatcttgataactttaatttgaaaattttaaca

SEQ ID NO: 20523 - DNA, 674 bp, synthetic construct
  source 1..674: mol_type = other DNA
cactccaagggcccacgtggcggctagtactctggtacttcggtacctttgtacgcctgttttatctcccttcccaatgtaacttagaagttcttaaatcaatgctcaatagctggggcgcaaaccagcgctctcatgagcaagcactcctgtctccccggtgaggttgtataaactgttcccacggttgaaaacaacctatccgttatccgctatagtacttcgagaaacctagtaccacctttggattgttgacgcgttgcgctcagcacactaacccgtgtgtagcttgggtcgatgagtctggacatacctcactggcgacagtggtccaggctgcgttggcggcctactcatggtgaaagccatgagacgctagacatgaacaaggtgtgaagagtctattgagctactatagagtcctccggcccctgaatgcggctaatcctaaccatggagcaagtgctcacaagccagtgagttacttgtcgtaacgcgcaagtccgtggcggaaccgactactttgggtgtccgtgtttcactttttacttttatgactgcttatggtgacaatttgatattgttaccatttagcttgtcaaatcaattgcaaaagatcctaaatcttatttatcaacttgcatcttgataactttaatttgaaaattttaaca

SEQ ID NO: 20524 - DNA, 674 bp, synthetic construct
  source 1..674: mol_type = other DNA
cactccaagggcccacgtggcggctagtactctggtacttcggtacctttgtacgcctgttttatctcccttcccaatgtaacttagaagttcttaaatcaatgctcaataggtggggcgcaaaccagcgctctcatgagcaagcactcctgtctccccggtgaggttgtataaactgttcccacggttgaaaacaacctatccgttatccgctatagtacttcgagaaacctagtaccacctttggattgttgacgcgttgcgctcagcacactaacccgtgtgtagcttgggtcgatgagtctggacatacctcactggcgacagtggtccaggctgcgttggcggcctactcatggcgaaagccatgagacgctagacatgaacaaggtgtgaagagtctattgagctactatagagtcctccggcccctgaatgcggctaatcctaaccatggagcaagtgctcacaggccagtgagttacttgtcgtaatgcgcaagtccgtggcggaaccgactactttgggtgtccgtgtttcactttttacttttatgactgcttatggtgacaatttgatattgttaccatttagcttgtcaaatcaattgcaaaagatcctaaatcttatttgtcaacttgcatcttgataactttaatttgaaaattttaaca

SEQ ID NO: 20525 - DNA, 674 bp, synthetic construct
  source 1..674: mol_type = other DNA
cactccaagggcccacgtggcggctagtactctggtacttcggtacctttgtacgcctgttttatctcccttcccaatgtaacttagaagttcttaaatcaatgctcaataggtggggcgcaaaccagcgctctcatgagcaagcactcctgtctccccggtgaggttgtataaactgttcccacggttgaaaacaacctatccgttatccgctatagtacttcgagaaacctagtaccacctttggattgttgacgcgttgcgctcagcacactaacccgtgtgtagcttgggtcgatgagtctggacatacctcactggcgacagtggtccaggctgcgttggcggcctactcatggtgaaagccatgagacgctagacatgaacaaggtgtgaagagtctattgagctactatagagtcctccggcccctgaatgcggctaatcctaaccatggagcaagtgctcacaggccagtgagttgcttgtcgtaatgcgcaagtccgtggcggaaccgactactttgggtgtccgtgtttcactttttacttttatgactgcttatggtgacaatttgatattgttaccatttagcttgtcaaatcaattgcaaaagatcctaactcttatttatcaacttgcatctcgataactctaatttgaaaattttaaca

SEQ ID NO: 20526 - DNA, 674 bp, synthetic construct
  source 1..674: mol_type = other DNA
cactccaagggcccacgtggcggctagtactctggtacttcggtacctttgtacgcctgttttatctcccttcccaatgtaacttagaagttcttaaatcaatgctcaataggtggggcgcaaaccagcgctctcatgagcaagcactcctgtctccccggtgaggttgtataaactgttcccacggttgaaaacaacctatccgttatccgctatagtacttcgagaaacctagtaccacctttggattgttgacgcgttgcgctcagcacactaacccgtgtgtagcttgggtcgatgagtctggacatacctcactggcgacagtggtccaggctgcgttggcggcctactcatggtgaaaaccatgagacgctagacatgaacaaggtgtgaagagtctattgagctactatagagtcctccggcccctgaatgcggctaatcctaaccatggagcaagtgctcacaggccagtgagttgcttgtcgtaatgcgcaagtccgtggcggaaccgactactttgggtgtccgtgtttcactttttacttttgtgactgcttatggtgacaatttgatattgttaccatttagcttgtcaaatcaattacaaaagatcctaaatcttattcatcaatttgcatcttgataattttaatttgaaaatttcaaca

SEQ ID NO: 20527 - DNA, 674 bp, synthetic construct
  source 1..674: mol_type = other DNA
cactccaagggcccacgtggcggctagtactctggtacttcggtacctttgtacgcctgttttatctcccttcccaatgtaacttagaagttcttaaatcaatgctcaacaggtggggcgcaaaccagcgctctcatgagcaagcactcctgtctccccggtgaggttgtataaactgttcccacggttgaaaacaacctatccgttatccgctatagtacttcgagaaacctagtaccacctttggattgttgacgcgttgcgctcagcacactaacccgtgtgtagcttgggtcgatgagtctggacatacctcactggcgacagtggtccaggctgcgttggcggcctactcatggtgaaagccatgagacgctagacatgaacaaggtgtgaagagtctattgagctactatagagtcctccggcccctgaatgcggctaatcctaaccatggagcaagtgctcacaggccagtgagttgcttgtcgtaatgcgcaagtccgtggcggaaccgactactttgggtgtccgtgtttcactttttacttttatgactgcttatggtgacaatttgatattgttaccatttagcttgtcaaatcaattgcaaaagatcctaaatcttatttatcaacttgcatcttgataactttaatttgaaaattttaaca

SEQ ID NO: 20528 - DNA, 674 bp, synthetic construct
  source 1..674: mol_type = other DNA
cactccaagggcccacgtggcggctagtactctggtacttcggtacctttgtacgcctgttttatctcccttcccaatgtaacttagaagttcttaaatcaatgctcaataggtggggcgcaaaccagcgctctcatgagcaagcactcctgtctccccggtgaggttgtataaactgttcccacggttgaaaacaacctatccgttatccgctatagtacttcgagaaacctagtaccacctttggattgttgacgcgttgcgctcagcacactaacccgtgtgtagcttgggtcgatgagtctggacatacctcactggcgacagtggtccaggctgcgttggcggcctactcatggtgaaagccatgagacgctagacatgaacaaggtgtgaagagtctattgagctactatagagtcctccggcccctgaatgcggctaatcctaaccatggagcaagtgctcacaggccagtgagttgcttgtcgtaatgcgcaagtccgtggcggaaccgactactttgggtgtccgtgtttcactttttacttttatgactgcttatggtgacaatttgatattgttaccatttagcttgtcaaatcaattgcaaaagatcctaaatcttatttatcaacttgcatcttgataactttaacttgaaaattttaaca

SEQ ID NO: 20529 - DNA, 674 bp, synthetic construct
  source 1..674: mol_type = other DNA
cactccaagggcccacgtggcggctagtactctggtacttcggtacctttgtacgcctgttttatctcccttcccaatgtaacttagaagttcttaaatcaatgctcaataggtggggcgcaaaccagcgctctcatgagcaagcactcctgtctccccggtgaggttgtataaactgttcccacggttgaaaacaacctatccgttatccgctatagtacttcgagaaacctagtaccacctttggattgttgacgcgttgcgctcagcacactaacccgtgtgtagcttgggtcgatgagtctggacataccccactggcgacagtggtccaggctgcgttggcggcctactcatggtgaaagccatgagacgctagacatgaacaaggtgtgaagagtctattgagctactatagagtcctccggcccctgaatgcggctaatcctaaccatggagcaagtgctcacaggccagtgagttgcttgtcgtaatgcgcaagtccgtggcggaaccgactactttgggtgtccgtgtttcactttttgcttttatgactgcttatggtgacaatttgatattgttaccatttagcttgtcaaatcaattgcaaaagatcctaaatcttatttatcaacttgcatcttgataactttaatttgaaaattttaaca

SEQ ID NO: 20530 - DNA, 674 bp, synthetic construct
  source 1..674: mol_type = other DNA
cactccaagggcccacgtggcggctagtactctggtacttcggtacctttgtacgcctgttttatctcccttcccaatgtaacttagaagttcttaaatcaatgctcaataggtggggcgcaaaccagcgctctcatgagcaagcactcctgtctccccggtgaggttgtataaactgttcccacggttgaaaacaacctatccgttatccgctatagtacttcgagaaacctagtaccacctttggattgttgacgcgttgcgctcagcacactaacccgtgtgtagcttgggtcgatgagtctggacatacctcactggcgacagtggtccaggctgcgttggcggcctactcatggtgaaagccatgagacgctagacatgaacaaggtgtgaagagtctattgagctactatagagtcctccggcccctgaatgcggctaatcctaaccatggagcaagtgctcacaggccagtgagttgcttgtcgtaatgcgcaagtccgtggcggaaccgactactttgggtgtccgtgtttcactttttacttttatgactgcttatggtgacaatttgatattgttaccatttagcttgtcaaatcaattacaaaagattctaactcttatttatcaacttgcatctcgataactctaatttgaaaattttaaca

SEQ ID NO: 20531 - DNA, 674 bp, synthetic construct
  source 1..674: mol_type = other DNA
cactccaagggcccacgtggcggctagtactctggtacttcggtacctttgtacgcctgttttatctcccttcccaatgtaacttagaagttcttaaatcaatgctcaataggtggggcgcaaaccagcgctctcatgagcaagcactcctgtctccccggtgaggttgtataaactgttcccacggttgaaaacaacctatccgttatccgctatagtacttcgagaaacctagtaccacctttggattgttgacgcgttgcgctcagcacactaacccgtgtgtagcttgggtcgatgagtctggacacacctcactggcgacagtggtccaggctgcgttggcggcctactcatggtgaaagccatgagacgctagacatgaacaaggtgtgaagagtctattgagctactatagagtcctccggcccctgaatgcggctaatcctaaccatggagcaagtgctcacaggccagtgagttgcttgtcgtaatgcgcaagtccgtggcggaaccgactactttgggtgtccgtgtttcactttttacttttatgactgcttatggtgacaatttgatattgttaccatttagcttgtcaaatcaattgcaaaagatcctaaatcttatttgtcaacttgcatcttgataactttaatttgaaaattttaaca

SEQ ID NO: 20532 - DNA, 674 bp, synthetic construct
  source 1..674: mol_type = other DNA
cactccaagggcccacgtggcggctagtactctggtacttcggtacctttgtacgcctgttttatctcccttcccaatgtaacttagaagttcttaaatcaatgctcaataggtggggcgcaaaccagcgctctcatgagcaagcactcctgtctccccggtgaggttgtataaactgttcccacggttgaaaacaaccaatccgttatccgctatagtacttcgagaaacctagtaccacctttggattgttgacgcgttgcgctcagcacactaacccgtgtgtagcttgggtcgatgagtctggacatacctcactggcgacagtggtccaggctgcgttggcggcctactcatggtgaaaaccatgagacgctagacatgaacaaggtgtgaagagtctattgagctactatagagtcctccggcccctgaatgcggctaatcctaaccatggagcaagtgctcacaggccagtgagttgcttgtcgtaatgcgcaagtccgtggcggaaccgactactttgggtgtccgtgtttcactttttacttttatgactgcttatggtgacaatttgatattgttaccatttagcttgtcaaatcaattgcaaaagatcctaaatcttatttatcaatttgcatcttgataactttaatttgaaaattttaaca

SEQ ID NO: 20533 - DNA, 674 bp, synthetic construct
  source 1..674: mol_type = other DNA
cactccaagggcccacgtggcggctagtactctggtacttcggtacctttgtacgcctgttttatctcccttcccaatgtaacttagaagttcttaaatcaatgctcaataggtggggcgcaaaccagcgctctcatgagcaagcactcctgtctccccggtgaggttgtataaactgttcccacggttgaaaacaacctatccgttatccgctatagtacttcgagaaacctagtaccacctttggattgttgacgcgttgcgctcagcacactaacccgtgtgtagcttgggtcgatgagtctggacatacctcactggcgacagtggtccaggctgcgttggcggcctactcatggtgaaagccatgagacgctagacatgaacaaggtgtgaagagtctattgagctactatagagtcctccggcccctgaatgcggctaatcctaactatggagcaagtgctcacaggccagtgagttgcttgtcgtaatgcgcaagtccgtagcggaaccgactactttgggtgtccgtgtttcactttttacttttatgactgcttatggtgacaatttgatattgttaccatttagcttgtcaaatcaattgcaaaagatcctaaatcttatttatcaacttgcatcttgataactttaatttgaaaattttaaca

SEQ ID NO: 20534 - DNA, 674 bp, synthetic construct
  source 1..674: mol_type = other DNA
cactccaagggcccacgtggcggctagtactctggtacttcggtacctttgtacgcctgttttatctcccttcccaatgtaacttagaagttcttaaatcaatgctcaataggtggggcgcaaaccagcgctctcatgagcaagcactcctgtctccccggtgaggttgtataaactgttcccacggttgaaaacaacctatccgttatccgctatagtacttcgagaaacctagtaccacctttggattgttgacgcgttgcgctcagcacactaacccgtgtgtagcttgggtcgatgagtctggacatacctcactggtgacagtggtccaggctgcgttggcggcctactcatggtgaaagccatgagacgctagacatgaacaaggtgtgaagagtctattgagctactatagagtcctccggcccctgaatgcggctaatcctaaccatggagcaagtgctcacaggccagtgagttgcttgtcgtaatgcgcaagtccgtggcggaaccgactactttgggtgtccgtgtttcactttttacttttatgactgcttatggtgacaatttgatattgttaccatttagcttgtcaaatcaattgcaaaagatcctaaatcttatttatcaacttgcatcttgataactttaatttgaaaattttaaca

SEQ ID NO: 20535 - DNA, 674 bp, synthetic construct
  source 1..674: mol_type = other DNA
cactccaagggcccacgtggcggctagtactctggtacttcggtacctttgtacgcctgttttatctcccttcccaatgtaacttagaagttcttaaatcaatgctcaataggtggggcgcaaaccagcgctctcatgagcaagcactcctgtctccccggtgaggttgtataaactgttcccacggttgaaaacaacctatccgttatccgctatagtacttcgagaaacctagtaccacctttggattgttgacgcgttgcgctcagcacactaacccgtgtgtagcttgggtcgatgagtctggacatacctcactggcgacagtggtccaggctgcgttggcggcctactcatggtgaaaaccatgagacgctagacatgaacaaggtgtgaagagtctattgagctactatagagtcctccggcccctgaatgcggctaatcctaaccatggagcaagtgctcacaggccagtgagttgcttgtcgtaatgcgcaagtccgtggcggaaccgactactttgggtgtccgtgtttcactttttacttttatgactgcttatggtgacaatttgatattgttaccatttagcttgtcaaatcaattacaaaagatcctaaatcttattcatcaatttgcatcttgataatttcaatttgaaaatttcaaca

SEQ ID NO: 20536 - DNA, 674 bp, synthetic construct
  source 1..674: mol_type = other DNA
cactccaagggcccacgtggcggctagtactctggtacttcggtacctttgtacgcctgttttatctcccttcccaatgtaacttagaagttcttaaatcaatgctcaataggtggggcgcaaaccagcgctctcatgagcaagcactcctgtctccccggtgaggttgtataaactgttcccacggttgaaaacaacctatccgttatccgctatagtacttcgagaaacctagtaccacctttggattgttgacgcgttgcgctcagcacactaacccgtgtgtagcttgggtcgatgagtctggacatacctcactggcgacagtggtccaggctgcgttggcggcctactcatggtgaaaaccatgagacgctagacatgaacaaggtgtgaagagtctattgagctactatagagtcctccggcccctgaatgcggctaatcctaaccatggagcaagtgctcacaggccagtgagttgcttgtcgtaatgcgcaagtccgtggcggaaccgactactttgggtgtccgtgtttcactttttacttttatgactgcttatggtgacaatttgatattgttaccatttagcttgtcaaatcaattacaaaagatcctaaatcttattcatcaatttgcatcttgataattttaatttgaaaatttcaaca

SEQ ID NO: 20537 - DNA, 674 bp, synthetic construct
  source 1..674: mol_type = other DNA
cactccaagggcccacgtggcggctagtactctggtacttcggtacctttgtacgcctgttttatctcccttcccaatgtaacttagaagttcttaaatcaatgctcaataggtggggcgcaaaccagcgctctcatgagcaagcactcctgtctccccggtgaggttgtataaactgttcccacggttgaaaacaacctatccgttatccgctatagtacttcgagaaacctattaccacctttggattgttgacgcgttgcgctcagcacactaacccgtgtgtagcttgggtcgatgagtctggacatacctcactggcgacagtggtccaggctgcgttggcggcctactcatggtgaaagccatgagacgctagacatgaacaaggtgtgaagagtctattgagctactatagagtcctccggcccctgaatgcggctaatcctaaccatggagcaagtgctcacaggccagtgagttgcttgtcgtaatgcgcaagtccgtggcggaaccgactactttgggtgtccgtgtttcactttttacttttatgactgcttatggtgacaatttgatattgttaccatttagcttgtcaaatcaattgcaaaagatcctaactcttatttatcaacttgcatctcgataactctaatttgaaaattttaaca

SEQ ID NO: 20538 - DNA, 674 bp, synthetic construct
  source 1..674: mol_type = other DNA
cactccaagggcccacgtggcggctagtactctggtacttcggtacctttgtacgcctgttttatctcccttcccaatgtaacttagaagttcttaaatcaatgctcaataggtggggcgcaaaccagcgctctcatgagcaagcactcctgtctccccggtgaggttgtataaactgttcccacggttgaaagcaacctatccgttatccgctatagtacttcgagaaacctagtaccacctttggattgttgacgcgttgcgctcagcacactaacccgtgtgtagcttgggtcgatgagtctggacatacctcactggcgacagtggtccaggctgcgttggcggcctactcatggtgaaagccatgagacgctagacatgaacaaggtgtgaagagtctattgagctactatagagtcctccggcccctgaatgcggctaatcctaaccatggagcaagtgctcacaggccagtgagttgcttgtcgtaatgcgcaagcccgtggcggaaccgactactttgggtgtccgtgtttcactttttacttttatgactgcttatggtgacaatttgatattgttaccatttagcttgtcaaatcaattgcaagagatcctaaatcttatttatcaacttgcatcttgataactttaatttgaaaattttaaca

SEQ ID NO: 20539 - DNA, 674 bp, synthetic construct
  source 1..674: mol_type = other DNA
cactccaagggcccacgtggcggctagtactctggtacttcggtacctttgtacgcctgttttatctcccttcccaatgtaacttagaagttcttaaatcaatgctcaataggtggggcgcaaaccagcgctctcatgagcaagcactcctgtctccccggtgaggttgtataaactgttcccacggttgaaaacaacctatccgttatccgctatagtacttcgagaaacctagtaccacctttggattgttgacgcgttgcgctcagcacactaacccgtgtgtagcttgggtcgatgagtctggacatacctcactggcgacagtggtccaggctgcgttggcggcctactcatggtgaaaaccatgagacgctagacatgaacaaggtgtgaagagtctattgagctactatagagtcctccggcccctgaatgcggctaatcctaaccatggagcaagtgctcacaggccagtgagttgcttgtcgtaatgcgcaagtccgtggcggaaccgactactttgggtgtccgtgtttcactttttacttttatgactgcttatggtgacaatttgatattgttaccatttagcttgtcaaatcaattacaaaagatcctaaatcttatttatcaatttgcatcttgataactttaatttgaaaatttcaaca

SEQ ID NO: 20540 - DNA, 674 bp, synthetic construct
  source 1..674: mol_type = other DNA
cactccaagggcccacgtggcggctagtactctggtacttcggtacctttgtacgcctgttttatctcccttcccaatgtaacttagaagttcttaaatcaatgctcaataggtggggcgcaaaccagcgctctcatgagcaagcactcctgtctccccggtgaggttgtataaactgttcccacggttgaaaacaacctatccgttatccgctatagtacttcgagaaacctagtaccacctttggattgttgacgcgttgcgctcagcacactaacccgtgtgtagcttgggtcgatgagtctggacatacctcactggcgacagtggtccaggctgcgttggcggcctactcatggtgaaagccatgagacgctagacatgaacaaggtgtgaagagtctattgagctactatagagtcctccggcccctgaatgcggctaatcctaaccatggagcaagtgctcacaggccagtgagttgcttgtcgtaatgcgcaagtccgtggcggaaccgactactttgggtgtccgtgtttcactttttacttttatgactgcttatggtgacaatttgatattgttaccatttagcttgtcaaatcaaccgcaaaagatcctaaatcttatttatcaacttgcatcttgataactttaattcgaaaattttaaca

SEQ ID NO: 20541 - DNA, 674 bp, synthetic construct
  source 1..674: mol_type = other DNA
cactccaagggcccacgtggcggctagtactctggtacttcggtacctttgtacgcctgttttatctcccttcccaatgtaacttagaagttcttaaattaatgctcaataggtggggcgcaaaccagcgctctcatgagcaagcactcctgtctccccggtgaggttgtataaactgttcccacggttgaaaacaacctatccgttatccgctatagtacttcgagaaacctagtaccacctttggattgttgacgcgttgcgctcagcacactaacccgtgtgtagcttgggtcgatgagtctggacatacctcactggcgacagtggtccaggctgcgttggcggcctactcatggtgaaagccatgagacgctagacatgaacaaggtgtgaagagtctattgagctactatagagtcctccggcccctgaatgcggctaatcctaaccatggagcaagtgctcacaggccagtgagttgcttgtcgtaatgcgcaagtccgtggcggaaccgactactttgggtgtccgtgtttcactttttacttttatgactgcttatggtgacaatttgatattgttaccatttagcttgtcaaatcaattgcaaaagatcctaaatcttatttatcaacttgcatcttgataactttaatttgaaaattttaaca

SEQ ID NO: 20542 - DNA, 674 bp, synthetic construct
  source 1..674: mol_type = other DNA
cactccaagggcccacgtggcggctagtactctggtgcttcggtacctttgtacgcctgttttatctcccttcccaatgtaacttagaagttcttaaatcaatgctcaataggtggggcgcaaaccagcgctctcatgagcaagcactcctgtctccccggtgaggttgtataaactgttcccacggttgaaaacaacctatccgttatccgctatagtacttcgagaaacctagtaccacctttggattgttgacgcgttgcgctcagcacactaacccgtgtgtagcttgggtcgatgagtctggacatacctcactggcgacagtggtccaggctgcgttggcggcctactcatggtgaaagccatgagacgctagacatgaacaaggtgtgaagagtctattgagctactatagagtcctccggcccctgaatgcggctaatcctaaccatggagcaagtgctcacaggccagtgagttgcttgtcgtaatgcgcaagtccgtggcggaaccgactactttgggtgtccgtgtttcactttttacttttatgactgcttatggtgacaatttgatattgttaccatttagcttgtcaaatcaattgcaaaagatcctaaatcttatttatcaacttgcatcttgataactttaatttgaaaattttaaca

SEQ ID NO: 20543 - DNA, 674 bp, synthetic construct
  source 1..674: mol_type = other DNA
cactccaagggcccacgtggcggctagtactctggtacttcggtacctttgtacgcctgttttatctcccttcccaatgtaacttagaagttcttaaatcaatgctcaataggtggggcgcaaaccagcgctctcatgagcaagcactcctgtctccccggtgaggttgtataaactgttcccacggttgaaaacaacctatccgttaaccgctatagtacttcgagaaacctagtaccacctttggattgttgacgcgttgcgctcagcacactaacccgtgtgtagcttgggtcgatgagtctggacacacctcactggcgacagtggtccaggctgcgttggcggcctactcatggtgaaagccatgagacgctagacatgaacaaggtgtgaagagtctattgagctactatagagtcctccggcccctgaatgcggctaatcctaaccatggagcaagtgctcacaggccagtgagttgcttgtcgtaatgcgcaagtccgtggcggaaccgactactttgggtgtccgtgtttcactttttacttttatgactgcttatggtgacaatttgatattgttaccatttagcttgtcaaatcaattgcaaaagatcctaaatcttatttgtcaacttgcatcttgataactttaatttgaaaattttaaca

SEQ ID NO: 20544 - DNA, 674 bp, synthetic construct
  source 1..674: mol_type = other DNA
cactccaagggcccacgtggcggctagtactctggtacttcggtacctttgtacgcctgttttatctcccttcccaatgtaacttagaagttcttaaatcaatgctcaataggtggggcgcaaaccagcgctctcatgagcgagcactcctgtctccccggtgaggttgtataaactgttcccacggttgaaaacaacctatccgttatccgctatagtacttcgagaaacctagtaccacctttggattgttgacgcgttgcgctcagcacactaacccgtgtgtagcttgggtcgatgagtctggacatacctcactggcgacagtggtccaggctgcgttggcggcctactcatggtgaaagccatgagacgctagacatgaacaaggtgtgaagagtctattgagctactatagagtcctccggcccctgaatgcggctaatcctaaccatggagcaagtgctcacaggccagtgagttgcttgtcgtaatgcgcaagtccgtggcggaaccgactactttgggtgtccgtgtttcactttttacttttatgactgcttatggtgacaatttgatattgttaccatttagcttgtcaaatcaattgcaaaagatcctaaatcttatttatcaacttgcatcttgataactttaatttgaaaattttaaca

SEQ ID NO: 20545 - DNA, 674 bp, synthetic construct
  source 1..674: mol_type = other DNA
cactccaagggcccacgtggcggctagtactctggtactttggtacctttgtacgcctgttttatctcccttcccaatgtaacttagaagttcttaaatcaatgctcaataggtggggcgcaaaccagcgctctcatgagcaagcactcctgtctccccggtgaggttgtataaactgttcccacggttgaaaacaacctatccgttatccgctatagtacttcgagaaacctagtaccacctttggattgttgacgcgttgcgctcagcacactaacccgtgtgtagcttgggtcgatgagtctggacatacctcactggcgacagtggtccaggctgcgttggcggcctactcatggtgaaagccatgagacgctagacatgaacaaggtgtgaagagtctattgagctactatagagtcctccggcccctgaatgcggctaatcctaaccatggagcaagtgctcacaggccagtgagttgcttgtcgtaatgcgcaagtccgtggcggaaccgactactttgggtgtccgtgtttcactttttacttttatgactgcttatggtgacaatttgatattgttaccatttagcttgtcaaatcaattgcaaaagatcctaactcttatttatcaacttgcatcttgataactttaatttgaaaattttaaca

SEQ ID NO: 20546 - DNA, 674 bp, synthetic construct
  source 1..674: mol_type = other DNA
cactccaagggcccacgtggcggctagtactctggtacttcggtacctttgtacgcctgttttatctcccttcccaatgtaacttagaagttcttaaatcaatgctcaataggtggggcgcaaaccagcgctctcatgagcaagcactcctgtctccccggtgaggttgtataaactgttcccacggttgaaaacaacctatccgttatccgctatagtacttcgagaaacctagtaccacctttggattgttgacgcgttgcgctcagcacactaacccgtgtgtagcttgggtcgatgagtctggacatacctcactggcgacagtggtccaggctgcgttggcggcctactcatggtgaaagccatgagacgctagacatgaacaaggtgtgaagagtctattgagctactatagagtcctccggcccctgaatgcggctaatcctaaccatggagcaagtgctcacaggccagtgagttgcttgtcgtaatgcgcaagtccgtggcggaaccgactactttgggtgtccgtgtttcactttttacttttatgactgcttatggtgacaatttgatattgttaccatttagcttgtcaaatcaattgcaaaagatcctaaatcttatttatcaacttgcatcttgataactttaattcgaaaattttaaca

SEQ ID NO: 20547 - DNA, 674 bp, synthetic construct
  source 1..674: mol_type = other DNA
cactccaagggcccacgtggcggctagtactctggtacttcggtacctttgtacgcctgttttatctcccttcccaatgtaacttagaagttcttaaatcaatgctcaataggtggggcgcaaaccagcgctctcatgagcaagcactcctgtttccccggtgaggttgtataaactgttcccacggttgaaaacaacctatccgttatccgctatagtacttcgagaaacctagtaccacctttggattgttgacgcgttgcgctcagcacactaacccgtgtgtagcttgggtcgatgagtctggacatacctcactggcgacagtggtccaggctgcgttggcggcctactcatggtgaaaaccatgagacgctagacatgaacaaggtgtgaagagtctattgagctactatagagtcctccggcccctgaatgcggctaatcctaaccatggagcaagtgctcacaggccagtgagttgcttgtcgtaatgcgcaagtccgtggcggaaccgactactttgggtgtccgtgtttcactttttacttttatgactgcttatggtgacaatttgatattgttaccatttagcttgtcaaatcaattgcaaaatatcctaaatcttatttatcaatttgcatcttgataactttaatttgaaaattttaaca

SEQ ID NO: 20548 - DNA, 674 bp, synthetic construct
  source 1..674: mol_type = other DNA
cactccaagggcccacgtggcggctagtactctggtacttcggcacctttgtacgcctgttttatctcccttcccaatgtaacttagaagttcttaaatcaatgctcaataggtggggcgcaaaccagcgttctcatgagcaagcactcctgtctccccggtgaggttgtataaactgttcccacggttgaaaacgacctatccgttatccgctatagtacttcgagaaacctagtaccacctttggattgttgatgcgttgcgctcagcacactaacccgtgtgtagcttgggtcgatgagtctggacatacctcactggcgacagtggtccaggctgcgttggcggcctactcatggcgaaagccatgagacgctagacatgaacaaggtgtgaagagtctattgagctactatagagtcctccggcccctgaatgcggctaatcctaaccatggagcaagtgctcacaggccagtgagttgcttgtcgtaatgcgcaagtctgtggcggaaccgactactttgggtgtccgtgtttcactttttacttttatgactgcttatggtgacaatttgatattgttaccatttagcttgtcaaatcaattgcaaaagatcctaaatcttatttatcaacttgcatcttgataactttaatttgaaaattttaaca

SEQ ID NO: 20549 - DNA, 674 bp, synthetic construct
  source 1..674: mol_type = other DNA
cactccaagggcccacgtggcggctagtactctggtacttcggtacctttgtacgcctgttttatctcccttcccaatgtaacttagaagttcttaaatcaatgctcaataggtggggcgcaaaccagcgctctcatgagcaagcactcctgtctccccggtgaggttgtataaactgttcccacggttgaaaacaacctatccgttatccgctatagtacttcgagaaacctagtaccacctttggattgttgacgcgttgcgctcagcacactaacccgtgtgtagcttgggtcgatgagtctggacatacctcactggcgacagtggtccaggctgcgttggcggcctactcatggtgaaagccatgagacgctagacatgaacaaggtgtgaagagtctattgagctactatagagtcctccggcccctgaatgcggctaatcctaaccatggagcaagtgctcacaggccagtgagttgcttgtcgtaatgcgcaagtccgtggcggaaccgactactttgggtgtccgtgtttcactttttacttttatgactgcttatggtgacaatttgatattgttaccatttagcttgtcaaatcaattgcaaaagatcttaactcttatttatcaacttgcatctcgataactctaatttgaaaattttaaca

SEQ ID NO: 20550 - DNA, 674 bp, synthetic construct
  source 1..674: mol_type = other DNA
cactccaagggcccacgtggcggctagtactctggtacttcggtacctttgtacgcctgttttatctcccttcccaatgtaacttagaagttcttaaatcaatgctcaataggtggagcgcaaaccagcgctctcatgagcaagcactcctgtctccccggtgaggttgtataaactgttcccacggttgaaaacaacctatccgttatccgctatagtacttcgagaaacctagtaccacctttggattgttgacgcgttgcgctcagcacactaacccgtgtgtagcttgggtcgatgagtctggacatacctcactggcgacagtggtccaggctgcgttggcggcctactcatggtgaaaaccatgagacgctagacatgaacaaggtgtgaagagtctattgagctactatagagtcctccggcccctgaatgcggctaatcctaaccatggagcaagtgctcacaggccagtgagttgcttgtcgtaatgcgcaagtccgtggcggaaccgactactttgggtgtccgtgtttcactttttacttttatgactgcttatggtgacaatttgatattgttaccatttagcttgtcaaatcaattgcaaaagatcctaaatcttatttatcaatttgcatcttgataactttaatttgaaaattttaaca

SEQ ID NO: 20551 - DNA, 674 bp, synthetic construct
  source 1..674: mol_type = other DNA
caccccaagggcccacgtggcggctagtactctggtatttcggtacctttgtacgcctgttttatctcccttcccaatgtaacttagaagctctcaaatcaaagctcaataggtggggcgcaaaccagcgctctcacgagcaagcactcctgtctccccggtgtggttgtataaactgtccccacggttgaaaacaacctatccgttatccgctatagtacttcgagaaacctagtatcacctttggattgttgatgcgttgcgctcagcacactaacccgtgtgtagcttgggtcgatgagtctggacataccccactggcgacagtggtccaggctgcgttggcggcctactcatggtgaaaaccatgagacgctagacatgaacaaggtgtgaagagtctattgagctactatagagtcctccggcccctgaatgcggctaatcttaaccatggagcaagtgctcacaagccagtgagttgcttgtcgtaatgcgcaagtccgtggcggaaccgactactttgggtgtccgtgtttcactttttacttttatgactgcttatggtgacaatttgatattgttaccatttagcttgtcaaatcaattacaaaagaccttaaatcttatttatcaacttgcattttgataactttaatttgaaaattttaata

SEQ ID NO: 20552 - DNA, 674 bp, synthetic construct
  source 1..674: mol_type = other DNA
cactccaagggcccacgtggcggctagtactctggtacttcggtacctttgtacgcctgttttatctcccttcccaatgtaacttagaagctcttaaatcaaggctcaataggtggggcgcaaaccagcgctctcatgagcaagcactcctgtctccccggtgtggttgtataaactgttcccacggttgaaaacaacctatccgttatccgctatagtacttcgagaaacctagtatcacctttggattgttgacgcgttgcgctcagcacactaacccgtgtgtagcttgggtcgatgagtctggacatacctcactggcgacagtggtccaggctgcgttggcggcctactcatggtgaaaaccatgagacgctagacatgaacaaggtgtgaagagtctattgagctactatagagtcctccggcccctgaatgcggctaatcctaaccatggagcaagtgctcacaggccagtgagttgcttgtcgtaatgcgcaagtccgtggcggaaccgactactttgggtgtccgtgtttcactttttacttttatgactgcttatggtgacaatttgatattgttaccatttagcttgtcaaatcaattgcaaaagatcctaaatcttatttatcaacttgcattttgataactttgatttgaaaattttaata

SEQ ID NO: 20553 - DNA, 674 bp, synthetic construct
  source 1..674: mol_type = other DNA
caccccaagggcccacgtggcggctagtactctggtatttcggtacctttgtacgcctgttttatctcccttcccaatgtaacttagaagctctcaaatcaaagctcaataggtggagcgcaaaccagcgctctcatgagcaagcactcctgtctccccggtgtggttgtataaactgttcccacggttgaaaacaacctatccgttatccgctatagtacttcgagaaacctagtatcacctttggattgttgatgcgttgcgctcagcacactaacccgtgtgtagcttgggtcgatgagtctggacataccccactggcgacagtggtccaggctgcgttggcggcctactcatggtgaaaaccatgagacgctaaacatgaacaaggtgtgaagagtctattgagctactatagagtcctccggcccctgaatgcggctaatcttaaccatggagcaagtgctcacaagccagtgagttgcttgtcgtaatgcgcaagtccgtggcggaaccgactactttgggtgtccgtgtttcactttttacttttatgactgcttatggtgacaatttgatattgttaccatttagcttgtcaaatcaattgcaaaagaccctaaatcttatttatcaacttgcattttgataacttcaatttgaaaattttaata

SEQ ID NO: 20554 - DNA, 674 bp, synthetic construct
  source 1..674: mol_type = other DNA
cactccaagggcccacgtggcggctagtactctggtacttcggtacctttgtacgcctgttttatctcccttcccaatgtaacttagaagttcttaaatcaatgctcaataggtggagcgcaaaccagcgctctcatgagcaagcactcctgtctccccggtgaggttgtataaactgttcccacggttgaaaacaacctatccgttatccgctatagtacttcgagaaacctagtaccacctttggattgttgacgcgttgcgctcagcacactaacccgtgtgtagcttgggtcgatgagtctggacatacctcactggcgacagtggtccaggctgcgttggcggcctactcatggtgaaaaccatgagacgctagacatgaacaaggtgtgaagagtctattgagctactatagagtcctccggcccctgaatgcggctaatcctaaccatggagcaagtgctcataggccagtgagttgcttgtcgtaatgcgcaagtccgtggcggaaccgactactttgggtgtccgtgtttcactttttacttttatgactgcttatggtgacaatttgatattgttaccatttagcttgtcaaatcaattgcaaaagatcctaaatcttatttatcaatttgcatcttgataactttaatttgaaaattctaaca

SEQ ID NO: 20555 - DNA, 674 bp, synthetic construct
  source 1..674: mol_type = other DNA
cactccaagggcccacgtggcggctagtactctggtacttcggtacctttgtacgcctgttttatctcccttcccaatgtaacttagaagttcttaaatcaatgctcaataggtggggcgcaaaccagtgctctcatgagcaagcactcctgtctccccggtgaggttgtataaactgttcccacggttgaaaataacctatccgttatccgctatagtacttcgagaaacctagtaccacctttggattgttgacgcgttgcgctcagcacactaacccgtgtgtagcttgggtcgatgagtctggacatacctcactggcgacagtggtccaggctgcgttggcggcctactcatggtgaaagccatgagacgctagacatgaacaaggtgtgaagagtctattgagctactatagagtcctccggcccctgaatgcggctaatcctaaccatggagcaagtgctcacaggccagtgagttgcttgtcgtaatgcgcaagtccgtggcggaaccgactactttgggtgtccgtgtttcactttttacttttatgactgcttatggtgacaatttgatattgttaccatttagcttgtcaaatcaattgcaaaagatcctaaatcttatttatcaacttgcatcttgataactttaatttgaaaattttaaca

SEQ ID NO: 20556 - DNA, 674 bp, synthetic construct
  source 1..674: mol_type = other DNA
cactccaagggcccacgtggcggctagtactctggtacttcggtacctttgtacgcctgttttatctcccttcccaatgtaacttagaagctcttaaatcaaggctcaataggtggggcgcaaaccagcgctctcatgagcaagcactcctgtctccccggtgtggttgtataaactgttcccacggttgaaaataacctatccgttatccgctatagtacttcgagaaacctagtatcacctttggattgttgacgcgttgcgctcagcacactaacccgtgtgtagcttaggtcgatgagtctggacatacctcactggcgacagtggtccaggctgcgttggcggcctactcatggtgaaaaccatgagacgctagacatgaacaaggtgtgaagagtctattgagctactatagagtcctccggcccctgaatgcggctaatcctaaccatggagcaagtgctcacaggccagtgagttgcttgtcgtaatgcgcaagtccgtggcggaaccgactactttgggtgtccgtgtttcactttttacttttatgactgcttatggtgacaatttgatattgttaccatttagcttgtcaaatcaattgcaaaagatcctaaatcttatttatcaacttgcattttgataactttgatttgaaaattttaata

SEQ ID NO: 20557 - DNA, 674 bp, synthetic construct
  source 1..674: mol_type = other DNA
cactccaagggcccacgtggcggctagtactctggtacttcggtacctttgtacgcctgttttatctcccttcccaatgtaacttagaagtttttaaatcaatgctcaataggtggggcgcaaaccagcactctcatgagcaagcactcctgtctccccggtgaggttgtataaactgttcccacggttgaaaacaacctatccgttatccgctatagtacttcgagaaacctagtaccacctttggattgttgacgcgttgcgctcagcacactaacccgtgtgtagcttgggtcgatgagtctggacatacctcactggcgacagtggtccaggctgcgttggcggcctactcatggtgaaagccatgagacgctagacatgaacaaggtgtgaagagtctattgagctactatagagtcctccggcccctgaatgcggctaatcctaaccatggagcaagtgctcacaggccagtgagttgcttgtcgtaatgcgcaagtccgtggcggaaccgactactttgggtgtccgtgtttcactttttacttttatgactgcttatggtgacaatttgatattgttaccatttagcttgtcaaatcaattgcaaaagatcctaaatcttatttatcaacttgcatcttgataactttaatttgaaaattttaaca

SEQ ID NO: 20558 - DNA, 674 bp, synthetic construct
  source 1..674: mol_type = other DNA
cactccaagggcccacgtggcggctagtactctggtacttcggtacctttgtacgcctgttttatctcccttcccaatgtaacttagaagctcttaaatcaatgctcaataggtggggcgcaaaccagcgctctcatgagcaagcactcctgtctccccggtgaggttgtataaactgttcccacggttgaaaacaacctatccgttatccgctatagtacttcgagaaacctagtaccacctttggattgttgacgcgttgcgctcagcacactaacccgtgtgtagcttgggtcgatgagtctggacatacctcactggcgacagtggtccaggctgcgttggcggcctactcatggtgaaaaccatgagacgctagacatgaacaaggtgtgaagagtctattgagctactatagagtcctccggcccctgaatgcggctaatcctaaccatggagcaagtgctcacagaccagtgagttgcttgtcgtaatgcgcaagtccgtggcggaaccgactactttgggtgtccgtgtttcactttttacttttatgactgcttatggtgacaatttgatattgttaccatttagcttgtcaaaccaattgcaaaagatcctaaatcttattcatcaacttgcatcttgataactttgatttgaaaattttaaca

SEQ ID NO: 20559 - DNA, 674 bp, synthetic construct
  source 1..674: mol_type = other DNA
cactccaagggcccacgtggcggctagtactctggtacttcggtacctttgtacgcctgttttatctcccttcccaatgtaacttagaagctcttaaatcaaggctcaataggtggggcgcaaaccagcgctctcatgagcaagcactcctgtctccccggtgtggttgtataaactgttcccacggttgaaaacaacctatccgttatccgctatagtacttcgagaaacctagtatcacctttggattgttgacgcgttgcgctcagcacactaacccgtgtgtagcttgggtcgatgagtctggacatacctcactggcgacagtggtccaggctgcgttggcggcctactcatggtgaaaaccatgagacgctagacatgaacaaggtgtgaagagtccattgagctactatagagtcctccggcccctgaatgcggctaatcctaaccatggagcaagtgctcacaggccagtgagttgcttgtcgtaatgcgcaagtccgtggcggaaccgactactttgggtgtccgtgtttcactttttacttttatgactgcttatggtgacaatttgatattgttaccatttagcttgtcaaatcaattgcaaaagatcctaaatcttatttatcaacttgcattttgataactttgatttgaaaattttaata

SEQ ID NO: 20560 - DNA, 674 bp, synthetic construct
  source 1..674: mol_type = other DNA
caccccaagggcccacgtggcggctagtactctggtatttcggtacctttgtacgcctgttttatctcccttcccaatgtaacttagaagttctcaaatcaaagctcgataggtggagcgcaaaccagcgctctcatgagcaagcactcctgtctccccggtgtggttgtataaactgttcccacggttgaaaacaacctatccgttatccgctatagtacttcgagaaacctagtatcacctttggattgttgatgcgttgcgctcagcacactaacccgtgtgtagcttgggtcgatgagtctggacataccccactggcgacagtggtccaggctgcgttggcggcctactcatggtgaaaaccatgagacgctaaacatgaacaaggtgtgaagagtctattgagctactatagagtcctccggcccctgaatgcggctaatcttaaccatggagcaagtgctcacaagccagtgagttgcttgtcgtaatgcgcaagtccgtggcggaaccgactactttgggtgtccgtgtttcactttttacttttatgactgcttatggtgacaatttgatattgttaccatttagcttgtcaaatcaattgcaaaagaccctaaatcttatttatcaacttgcattttgataacttcaatttgaaaattttaata

SEQ ID NO: 20561 - DNA, 674 bp, synthetic construct
  source 1..674: mol_type = other DNA
cactccaagggcccacgtggcggctagtactctggtacttcggtacctttgtacgcctgttttatctcccttcccaatgtaactcagaagttcttaaatcaatgctcaataggtggggcgcaaaccagcgctctcatgagcaagcactcctgtctccccggtgaggttgtataaactgttcccacggttgaaaacaacctatccgttatccgctatagtacttcgagaaacctagtaccacctttggattgttgacgcgttgcgctcagcacactaacccgtgtgtagcttgggtcgatgagtctggacatacctcactggcgacagtggtccaggctgcgttggcggcctactcatggtgaaagccatgagacgctagacatgaacaaggtgtgaagagtctattgagctactatagagtcctccggcccctgaatgcggctaatcctaaccatggagcaagtgctcacaggccagtgagttgcttgtcgtaatgcgcaagtccgtggcggaaccgactactttgggtgtccgtgtttcactttttacttttatgactgcttatggtgacaatttgatattgttgccatttagcttgtcaaatcgattgcaaaagatcctaaatcttatttatcaactcgcatcttgacaactttaatttgaaaattttaaca

SEQ ID NO: 20562 - DNA, 674 bp, synthetic construct
  source 1..674: mol_type = other DNA
cactccaagggcccacgtggcggctagtactctggtacttcggtacctttgtacgcctgttttatctcccttcccaatgtaatttagaagctcttaaatcaaggctcaataggtggggcgcaaaccagcgctctcatgagcaagcactcctgtctccccggtgtggttgtataaactgttcccacggttgaaaacaacctatccgttatccgctatagtacttcgagaaacctagtatcacctttggattgttgacgcgttgcgctcagcacactaacccgtgtgtagcttgggtcgatgagtctggacatacctcactggcgacagtggtccaggctgcgttggcggcctactcatggtgaaaaccatgagacgctagacatgaacaaggtgtgaagagtctattgagctactatagagtcctccggcccctgaatgcggctaatcctaaccatggagcaagtgctcacaggccagtgagttgcttgtcgtaatgcgcaagtccgtggcggaaccgactactttgggtgtccgtgtttcactttttacttttatgactgcttatggtgacaatttgatattgttaccatttagcttgtcaaatcaattgcaaaagatcctaaatcttatttatcaacttgcattttgataactttgatttaaaaattttaata

SEQ ID NO: 20563 - DNA, 674 bp, synthetic construct
  source 1..674: mol_type = other DNA
cactccaagggcccacgtggcggctagtactctggtacttcggtacctttgtacgcctgttttatctcccttcccaatgtaacttagaagttcttaaatcaatgctcaataggtggagcgcaaaccagcgctctcatgagcaagcactcctgtctccccggtgaggttgtataaactgttcccacggttgaaaacaacctatccgttatccgctatagtacttcgagaaacctagtaccacctttggattgttgacgcgttgcgctcagcacactaacccgtgtgtagcttgggtcgatgagtctggacatacctcactggcgacagtggtccaggctgcgttggcggcctactcatggtgaaaaccatgagacgctagacatgaacaaggtgtgaagagtctattgagctactatagagtcctccggcccctgaatgcggctaatcctaaccatggagcaagtgctcacaggccagtgagttgcttgtcgtaatgcgcaagtccgtggcggaaccgactactttgggtgtccgtgtttcactttttacttttatgactgcttatggtgacaatttgatattgttaccatttagcttgtcaaatcaattgcaaaagatcctaaatcttatttatcaacttgcatcttgataactttaatttgaaaattttaaca

SEQ ID NO: 20564 - DNA, 674 bp, synthetic construct
  source 1..674: mol_type = other DNA
cactccaagggcccacgtggcggctagtactctggtacttcggtacctttgtacgcctgttttatctcccttcccaatgtaacttagaagttcttaaatcaatgctcaataggtggagcgcaaaccagcgctctcatgagcaagcactcctgtctccccggtgaggttgtataaactgttcccacggttgaaaacaacctatccgttatccgctatagtacttcgagaaacctagtactacctttggattgttgatgcgttgcgctcagcacactaacccgtgtgtagcttgggtcgatgagtctggacatacctcactggcgacagtggtccaggctgcgttggcggcctactcatggtgaaaaccatgagacgctagacatgaacaaggtgtgaagagtctattgagctactatagagtcctccggcccctgaatgcggctaatcctaaccatggagcaagtgctcacaggccagtgagttgcttgtcgtaatgcgcaagtccgtggcggaaccgactactttgggtgtccgtgtttcactttttacttttatgactgcttatggtgacaatttgatattgttaccatttagcttgtcaaatcaattgcaaaagatcctaaatcttatttatcaatttgcatcttgacaactttaatttgaaaattttaaca

SEQ ID NO: 20565 - DNA, 674 bp, synthetic construct
  source 1..674: mol_type = other DNA
cactccaagggcccacgtggcggctagtactctggtacttcggtacctttgtacgcctgttttacctcccttcccaatgtaacttagaagttcttaaatcaatgctcaataggtggggcgcaaaccagcgctctcatgagcaagcactcctgtctccccggtgaggttgtataaactgttcccacggttgaaaacaacctatccgttatccgctatagtacttcgagaaacctagtaccacctttggattgttgacgcgttgcgctcagcacactaacccgtgtgtagcttgggtcgatgagtctggacatacctcactggcgacagtggtccaggctgcgttggcggcctactcatggtgaaagccatgagacgctagacatgaacaaggtgtgaagagtctattgagctactatagagtcctccggcccctgaatgcggctaatcctaaccatggagcaagtgctcacaggccagtgagttgcttgtcgtaatgcgcaagtccgtggcggaaccgactactttgggtgtccgtgtttcactttttacttttatgactgcttatggtgacaatttgatattgttaccatttagcttgtcaaatcaattgcaaaagatcctaactcttatttatcaacttgcatcttgataactttaatttgaaaattttaaca

SEQ ID NO: 20566 - DNA, 674 bp, synthetic construct
  source 1..674: mol_type = other DNA
cactccaagggcccacgtggcggctagtactctggtacttcggtacctttgtacgcctgttttatctcccttcccaatgtaacttagaagctcttaaatcaatgctcaataggtggggcgcaaaccagcgctctcatgagcaagcactcctgtctccccggtgaggttgtataaactgttcccacggttgaaaacaacctatccgttatccgctatagtacttcgagaaacctagtaccacctttggattgttgacgcgttgcgctcagcacactaacccgtgtgtagcttgggtcgatgagtctggacatacctcactggcgacagtggtccaggctgcgttggcggcctactcatggtgaaaaccatgagacgctagacatgaacaaggtgtgaagagtctattgagctactatagagtcctccggcccctgaatgcggctaatcctaaccatggagcaagtgctcacaggccagtgagttgcttgtcgtaatgcgcaagtccgtggcggaaccgactactttgggtgtccgtgtttcactttttacttttatgactgcttatggtgacaatttgatattgttaccatttagcttgtcaaatcaattgcaaaagatcctaaatcttatttatcaacttgcatcttgataactttgatttgaaaattttaaca

SEQ ID NO: 20567 - DNA, 674 bp, synthetic construct
  source 1..674: mol_type = other DNA
cactccaagggcccacgtggcggctagtactctggtacttcggtacctttgtacgcctgttttatctcccttcccaatgtaacttagaagctcttaaatcaatgctcaataggtggggcgcaaaccagcgctctcatgagcaagcactcctgtctccccggtgaggttgtataaactgttcccacggttgaaaacaacctatccgttatccgctatagtacttcgagaaacctagtaccacctttggattgttgacgcgttgcgctcagcacactaacccgtgtgtagcttgggtcgatgagtctggacatacctcactggcgacagtggtccaggctgcgttggcggcctactcatggtgaaaaccatgagacgctagacatgaacaaggtgtgaagagtctattgagctactatagagtcctccggcccctgaatgcggctaatcctaaccatggagcaagtgctcacagaccagtgagttgcttgtcgtaatgcgcaagtccgtggcggaaccgactactttgggtgtccgtgtttcactttttacttttatgactgcttatggtgacaatttgatattgttaccatttagcttgtcaaaccaattgcaaaagatcctaaatcttattcatcaatttgcatcttgataactttgatttgaaaattttaaca

SEQ ID NO: 20568 - DNA, 674 bp, synthetic construct
  source 1..674: mol_type = other DNA
cactccaagggcccacgtggcggctagtactctggtacttcggtacctttgtacgcctgttttatctcccttcccaatgtaacttagaagctcttaaatcaatgctcaataggtggggcgcaaaccagcgctctcatgagcaagcactcctgtctccccggtgaggttgtataaactgttcccacggttgaaaacaacctatccgttatccgctatagtacttcgagaaacctagtaccacctttggattgttgacgcgttgcgctcagcacactaacccgtgtgtagcttgggtcgatgagtctggacatacctcactggcgacagtggtccaggctgcgttggcggcctactcatggtgaaaaccatgagacgctagacatgaacaaggtgtgaagagtctattgagctactatagagtcctccggcccctgaatgcggctaatcctaaccatggagcaagtgctcacaggccagtgagttgcttgtcgtaatgcgcaagtccgtggcggaaccgactactttgggtgtccgtgtttcactttttacttttatgactgcttatggtgacaatttgatattgttaccatttagcttgtcaaaccaattgcaaaagatcctaaatcttattcatcaacttgcatcttgataactttgatttgaaaattttaaca

SEQ ID NO: 20569 - DNA, 674 bp, synthetic construct
  source 1..674: mol_type = other DNA
caccccaagggcccacgtggcggctagtactctggtatttcggtacctttgtacgcctgttttatctcccttcccaatgtaacttagaagctctcaaatcaaagctcaataggtggagcgcaaaccagcgctctcatgagcaagcactcctgtctccccggtgtggttgtataaactgttcccacggttgaaaacaacctatccgttatccgctatagtacttcgagaaacctagtatcacctttggattgttgatgcgttgcgctcagcacactaacccgtgtgtagcttgggtcgatgagtctggacataccccactggcgacagtggtccaggctgcgttggcggcctactcatggtgaaaaccatgagacgctaaacatgaacaaggtgtgaagagtctattgagctactatagagtcctccggcccctgaatgcggctaatcttaaccatggagcaagtgctcacaagccagtgagttgcttgtcgtaatgcgcaagtccgtggcggaaccgactactttgggtgtccgtgtttcactttttacttttatgactgcttatggtgacaatttgatattgttaccatttagcttgtcaaatcaattgcaaaagactctaaatcttatttatcaacttgcattttgataacttcaatttgaaaattttaata

SEQ ID NO: 20570 - DNA, 674 bp, synthetic construct
  source 1..674: mol_type = other DNA
caccccaagggcccacgtggcggctagtactctggtacttcggtacctttgtacgcctgttttatctcccttcccaatgtaacttagaagctcttaaatcaaagctcgataggtggagcgcaaaccagcgctctcatgagcaagcactcctgtctccccggtgcggttgtataaactgttcccacggttgaaaacaacctatccgttatccgctatagtacttcgagaaacctagtatcacctttggattgttgatgcgttgcgctcagcacactaacccgtgtgtagcttgggtcgatgagtctggacataccccactggcgacagtggtccaggctgcgttggcggcctactcatggtgaaaaccatgagacgctaaacatgaacaaggtgtgaagagtctattgagctactatagagtcctccggcccctgaatgcggctaatcttaaccatggagcaagtgctcacaagccagtgagttgcttgtcgtaatgcgcaagtccgtggcggaaccgactactttgggtgtccgtgtttcactttttacttttatgactgcttatggtgacaatttgatattgttaccatttagcttgtcaaatcaattacaaaagaccctaaatcttatttatcaacttgcattttgataacttcaattagaaaattttaata

SEQ ID NO: 20571 - DNA, 674 bp, synthetic construct
  source 1..674: mol_type = other DNA
cactccaagggcccacgtggcggctagtactctggtacttcggtacctttgtacgcctgttttatctcccttcccaatgtaacttagaagttcttaaatcaatgctcaataggtggggcgcaaaccagcgctctcatgagcaagcactcctgtctccccggtgaggttgtataaactgttcccacggttgaaaacaacctatccgttatccgctacagtacttcgagaaacctagtaccacctttggattgttgacgcgttgcgctcagcacactaacccgtgtgtagcttgggtcgatgagtctggacatacctcactggcgacagtggtccaggctgcgttggcggcctactcatggtgaaagccatgagacgctagacatgaacaaggtgtgaagagtctattgagctactatagagtcctccggcccctgaatgcggctaatcctaaccatggagcaagtgctcacaggccagtgagttgcttgtcgtaatgcgcaagtccgtggcggaaccgactactttgggtgtccgtgtttcactttttacttttatgactgcttatggtgacaatttgatattgttaccatttagcttgtcaaatcaattgcaaaagatcctaactcttatttatcaacttgcatcttgataactttaatttgaaaattttaaca

SEQ ID NO: 20572 - DNA, 674 bp, synthetic construct
  source 1..674: mol_type = other DNA
caccccaagggcccacgtggcggctagtactctggtacttcggtacctttgtacgcctgttttatctccctccccaatgtaacttagaagctcttaaattaaagctcgataggtggagcgcaaaccagcgctctcatgagcaagcactcctgtctccccggtgcggttgtataaactgttcccacggttgaaaacaacctatccgttatccgctatagtacttcgaaaaacctagtatcacctttggattgttgatgcgttgcgctcagcacactaacccgtgtgtagcttgggtcgatgagtctggacataccccactggcgacagtggtccaggctgcgttggcggcctactcatggtgaaaaccatgagacgctaaacatgaacaaggtgtgaagagtctattgagctactatagagtcctccggcccctgaatgcggctaatcttaaccatggagcaagtgctcacaagccagtgagttgcttgtcgtaatgcgcaagtccgtggcggaaccgactactttgggtgtccgtgtttcactttttacttttatgactgcttatggtgacaatttgatattgttaccatttagcttgtcaaatcaattgcaaaagaccctaaatcttatttatcaacttgcattttgataacttcaattagaaaattttaata

SEQ ID NO: 20573 - DNA, 674 bp, synthetic construct
  source 1..674: mol_type = other DNA
caccccaagggcccacgtggcggctagtactctggtatttcggtacctttgtacgcctgttttatctcccttcccaatgtaacttagaagttctcaaatcaaagctcgataggtggagcgcaaaccagcgctctcatgagcaagcactcctgtctccccggtgtggttgtataaactgttcccacggttgaaaacaacctatccgttatccgctatagtacttcgagaaacctagtatcacctttggattgttgatgcgttgcgctcagcacactaacccgtgtgtagcttgggtcgatgagtctggacataccccactggcgacagtggtccaggctgcgttggcggcctactcatggtgaaaaccatgagacgctaaacatgaacaaggtgtgaagagtctattgagctactatagagtcctccggcccctgaatgcggctaatcttaaccatggagcaagtgctcacaagccagtgagttgcttgtcgtaatgcgcaagtccgtggcggaaccgactactttgggtgtccgtgtttcactttttacttttatgactgcttatggtgacaatttgacattgttaccatttagcttgtcaaatcaattgcaaaagaccctaaatcttatttatcaacttgcattttgataacttcaatttgaaaattttaata

SEQ ID NO: 20574 - DNA, 674 bp, synthetic construct
  source 1..674: mol_type = other DNA
cactccaagggcccacgtggcggctagtactctggtacttcggtacctttgtacgcctgttttatctcccttcccaatgtaacttagaagctcttgaatcaaggctcaataggtggagcgcaaaccagcgctctcatgagcaagcactcctgtctccccggtgtggttgtataaactgtccccacggttgaaaacaacctatccgttatccgctatggtacttcgagaaacctagtatcacctttggattgttgacgcgttgcgctcagcacactaacccgtgtgtagcttgggtcgatgagtctggacataccccactggcgacagtggtccaggctgcgttggcggcctactcatggtgaaagccatgagacgctagacatgaacaaggtgtgaagagtctattgagctactatagagtcctccggcccctgaatgcggctaatcctaaccatggagcaagtgctcacaggccagtgagttgcttgtcgtaatgcgcaagtccgtggcggaaccgactactttgggtgtccgtgtttcactttttacccttatgactgcttatggtgacaatttaatattgttaccatttagcttgtcaaatcaattgcaaaagatcctaaatctcatttatcaacttgcatttggataactttaatttgaagattttaata

SEQ ID NO: 20575 - DNA, 674 bp, synthetic construct
  source 1..674: mol_type = other DNA
caccccaagggcccacgtggcggctagtactctggtatttcggtacctttgtacgcctgttttatctcccttcccaatgtaatttagaagctctcaaatcaaagctcaataggtggagcgcaaaccagcgctctcacgagcaagcactcctgtctccccggtgtggttgtataaactgtccccacggttgaaaacaacctatccgttatccgctatagtacttcgagaaacctagtatcacctttggattgttgatgcgttgcgctcagcacactaacccgtgtgtagcttgggtcgatgagtctggacataccccactggcgacagtggtccaggctgcgttggcggcctactcatggtgaaaaccatgagacgctagacatgaacaaggtgtgaagagtctattgagctactatagagtcctccggcccctgaatgcggctaatcttaaccatggagcaagtgctcacaagccagtgagttgcttgtcgtaatgcgcaagtccgtggcggaaccgactactttgggtgtccgtgtttcactttttacttttatgactgcttatggtgacaatttgatattgttaccatttagcttgtcaaatcaattacaaaagaccctaaatcttatttatcaacttgcattttgataactttaatttgaaaattttaata

SEQ ID NO: 20576 - DNA, 674 bp, synthetic construct
  source 1..674: mol_type = other DNA
cactccaagggcccacgtggcggctagtactctggtacttcggtacctttgtacgcctgttttatctcccttcccaatgcaacttagaagttcttaaatcaatgctcaataggtggggcgcaaaccagcgctctcatgagcaagcactcctgtctccccggtgaggttgtataaactgttcccacggttgaaaacaacctatccgttatccgctatagtacttcgagaaacctagtaccacctttggattgttgatgcgttgcgctcagcacactaacccgtgtgtagcttgggtcgatgagtctggacatacctcactggcgacagtggtccaggctgcgttggcggcctactcatggtgaaagccatgagacgctagacatgaacaaggtgtgaagagtctattgagctactatagagtcctccggcccctgaatgcggctaatcctaaccatggagcaagtgctcacaggccagtgagttgcttgtcgtaatgcgcaagtccgtggcggaaccgactactttgggtgtccgtgtttcactttttacttttatgactgcttatggtgacaatttgatattgttaccatttagcttgtcaaatcaattgcaaaagatcctaaatcttatttatcaacttgcatcttgataactttaatttgaaaattttaaca

SEQ ID NO: 20577 - DNA, 674 bp, synthetic construct
  source 1..674: mol_type = other DNA
cactccaagggcccacgtggcggctagtactctggtacttcggtacctttgtacgcctgttttatctcccttcccaatgtaacttagaagttcttaaatcaatgctcaataggtggagcgcaaaccagcgctctcatgagcaagcactcctgtctccccggtgaggttgtataaactgttcccacggttgaaaacaacctatccgttatccgctatagtacttcgagaaacctagtaccacctttggattgttgacgcgttgcgctcagcacactaacccgtgtgtagcttgggtcgatgagtctggacatacctcactggcgacagtggtccaggctgcgttggcggcctactcatggtgaaaaccatgagacgctagacatgaacaaggtgtgaagagtctattgagctactatagagtcctccggcccctgaatgcggctaatcctaaccatggagcaagtgctcacaggccagtgagttgcttgtcgtaatgcgcaagtccgtggcggaaccgactactttgggtgtccgtgtttcactttttacttttatgactgcttatggtgacaatttgatattgttaccatttagcttgtcaaatcaattgcaaaagatcctaaatcttatttatcaatttgcatcttgataacttcaatttgaaaattttaaca

SEQ ID NO: 20578 - DNA, 674 bp, synthetic construct
  source 1..674: mol_type = other DNA
cactccaagggcccacgtggcggctagtactctggtacttcggtacctttgtacgcctgttttatctcccttcccaatgtaacttagaagctcttaaatcaatgctcaataggtggggcgcaaaccagcgctctcatgagcaagcactcctgtctccccggtgaggttgtataaactgttcccacggttgaaaacaacctatccgttatccgctatagtacttcgagaaacctagtaccacctttggattgttgacgcgttgcgctcagcacactaacccgtgtgtagcttgggtcgatgagtctggacatacctcactggcgacagtggtccaggctgcgttggcggcctactcatggtgaaaaccatgagacgctagacatgaacaaggtgtgaagagtctattgagctactatagagtcctccggcccctgaatgcggctaatcctaaccatggagcaagtgctcacaggccagtgagttgcttgtcgtaatgcgcaagtccgtggcggaaccgactactttgggtgtccgtgtttcactttttacttttatgactgcttatggtgacaatttgatattgttaccatttagcttgtcaaatcaattgcaaaagatcctaaatcttatttatcaacttgcatcttgataacttcaatttgaaaattttaata

SEQ ID NO: 20579 - DNA, 674 bp, synthetic construct
  source 1..674: mol_type = other DNA
cactccaagggcccacgtggcggctagtactctggtacttcggtacctttgtacgcctgttttatctcccttcccaatgtaacttagaagttcttaaatcaatgctcaataggtggggcgcaaaccagcgctctcatgagcaagcactcctgtctccccggtgaggttgtataaactgttcccacggttgaaaacaacctatccgttatccgctatagtacttcgagaaacctagtaccacctttggattgttgacgcgttgcgctcagcacactaacccgtgtgtagcttgggtcgatgagtctggacatacctcactggcgacagtggtccaggctgcgttggcggcctactcatggtgaaaaccatgagacgctagacatgaacaaggtgtgaagagtctattgagctactatagagtcctccggcccctgaatgcggctaatcctaaccatggagcaagtgctcacaggccagtgagttgcttgtcgtaatgcgcaagtccgtggcggaaccgactactttgggtgtccgtgtttcactttttacttttatgactgcttatggtgacaatctgatattgttaccatttagcttgtcaaatcaattgcaaaagatcctaaatcttatttatcaacttgcatcttaacaactttaatttgaaaattttaaca

SEQ ID NO: 20580 - DNA, 674 bp, synthetic construct
  source 1..674: mol_type = other DNA
cactccaagggcccacgtggcggctagtactctggtacttcggtacctttgtacgcctgttttatctcccttcccaatgtaacttagaagttcttaaatcaatgctcaataggtggggcgcaaaccagcgttctcatgagcaagcactcctgtctccccggtgaggttgtataaactgttcccacggttgaaaacgacctatccgttatccgctatagtacttcgagaaacctagtaccacctttggattgttgacgcgttgcgctcagcacactaacccgtgtgtagcttgggtcgatgagtctggacatacctcactggcgacagtggtccaggctgcgttggcggcctactcatggcgaaagccatgagacgctagacatgaacaaggtgtgaagagtctattgagctactatagagtcctccggcccctgaatgcggctaatcctaaccatggagcaagtgctcacaggccagtgagttgcttgtcgtaatgcgcaagtccgtggcggaaccgactactttgggtgtccgtgtttcactttttacttttatgactgcttatggtgacaatttgatattgttaccatttagcttgtcaaatcaattgcaaaagatcctaaatcttatttatcaacttgcatcttgataactttaatttgaaaattttaaca

SEQ ID NO: 20581 - DNA, 674 bp, synthetic construct
  source 1..674: mol_type = other DNA
cactccaagggcccacgtggcggctagtactctggtacttcggtacctttgtacgcctgttttatctcccttcccaatgtaacttagaagttcttaaatcaatgctcaataggtggggcgcaaaccagcgctctcatgagcaagcactcctgtctccccggtgaggttgtataaactgttcccacggttgaaaacaacctatccgttatccgctatagtacttcgagaaacctagtaccacctttggattgttgacgcgttgcgctcagcacactaacccgtgtgtagcttgggtcgatgagtctggacatacctcactggcgacagtggtccaggctgcgttggcggcctactcatggtgaaagccatgagacgctagacatgaacaaggtgtgaagagtctattgagctactatagagtcctccggcccctgaatgcggctaatcctaaccatggagcaagtgctcacaggccagtgagttgcttgtcgtaatgcgcaagtccgtggcggaaccgactactttgggtgtccgtgtttcactttttacttttatgactgcttatggtgacaatttgatattgttaccatttagcttgtcaaatcaattgcaaaagatcctaaatcttatttatcaacttgaatcttgataactttaatttgaaaattttaaca

SEQ ID NO: 20582 - DNA, 674 bp, synthetic construct
  source 1..674: mol_type = other DNA
cactccaagggcccacgtggcggctagtactctggtacttcggtacctttgtacgcctgttttatctcccttcccaatgtaacttagaagttcttaaatcaatgctcaataggtggggcgcaaaccagcgctctcatgagcaagcactcctgtctccccggtgaggttgtataaactgttcccacggttgaaaacaacctatccgttatccgctatagtacttcgagaaacctagtaccacctttggattgttgatgcgttgcgctcagcacactaacccgtgtgtagcttgggtcgatgagtctggacatacctcactggcgacagtggtccaggctgcgttggcggcctactcatggtgaaagccatgagacgctagacatgaacaaggtgtgaagagtctattgagctactatagagtcctccggcccctgaatgcggctaatcctaaccatggagcaagtgctcacaggccagtgagttgcttgtcgtaatgcgcaagtccgtggcggaaccgactactttgggtgtccgtgtttcactttttacttttatgactgcttatggtgacaatttgatattgttaccatttagcttgtcaaatcaattgcaaaagatcctaaatcttatttatcaacttgcatcttgataactttaatttgaaaattttaaca

SEQ ID NO: 20583 - DNA, 674 bp, synthetic construct
  source 1..674: mol_type = other DNA
cactccaagggcccacgtggcggctagtactctggtacttcggtacctttgtacgcctgttttatctcccttcccaatgtaacttagaagttcttaaatcaatgctcaataggtggggcgcaaaccagcgctctcatgagcaagcactcctgtctccccggtgaggttgtataaactgttcccacggttgaaaacaacctatccgttatccgctatagtacttcgagaaacctagtaccacctttggattgttgacgcgttgcgctcagcacactaacccgtgtgtagcttgggtcgatgagtctggacatacctcactggcgacagtggtccaggctgcgttggcggcctactcatggtgaaagccatgagacgctagacatgaacaaggtgtgaagagtctattgagctactatagagtcctccggcccctgaatgcggctaatcctaaccatggagcaagtgctcacaggccagtgagttgcttgtcgtaatgcgcaagtccgtggcggaaccgactactttgggtgtccgtgtttcactttttacttttatgactgcttatggtgacaatttgatattgttaccatttagcttgtcaaatcaattgcaaaaggtcctaactcttatttatcaacttgcatcttgataactttaatctgaaaattttaaca

SEQ ID NO: 20584 - DNA, 674 bp, synthetic construct
  source 1..674: mol_type = other DNA
cactccaagggcccacgtggcggctagtactctggtacttcggtacctttgtacgcctgttttatctcccttcccaatgtaacttagaagttcttaaatcaatgctcaataggtggggcgcaaaccagcgctctcatgagcaagcactcctgtctccccggtgaggttgtataaactgttcccacggttgaaaacaacctatccgttatccgctatagtacttcgagaaacctagtaccacctttggattgttgacgcgttgcgctcagcacactaacccgtgtgtagcttgggtcgatgagtctggacatacctcactggcgacagtggtccaggctgcgttggcggcctactcatggtgaaagccatgagacgctagacatgaacaaggtgtgaagagtctattgagctactatagagtcctccggcccctgaatgcggctaatcctaaccatggagcaagtgctcacaggccagtgagttgcttgtcgtaatgcgcaagtccgtggcggaaccgactactttgggtgtccgtgtttcactttttacttttatgactgcttatggtgacaatttgatattgttaccatttagcttgtcaaatcgattgcaaaagatcctaaatcttatttatcaacttgcatcttgataactttaacttgaaaattttaaca

SEQ ID NO: 20585 - DNA, 674 bp, synthetic construct
  source 1..674: mol_type = other DNA
cactccaagggcccacgtggcggctagtactctggtacttcggtacctttgtacgcctgttttatctcccttcccaatgtaacttagaagttcttaaatcaatgctcaataggtggggcgcaaaccagcgctctcatgagcaagcactcctgtctccccggtgaggttgtataaactgttcccacggttgaaaacaacctatccgttatccgctatagtacttcgagaaacctagtatcacctttggattgttgacgcgttgcgctcagcacactaacccgtgtgtagcttgggtcgatgagtctggacatacctcactggcgacagtggtccaggctgcgttggcggcctactcatggtgaaaaccatgagacgctagacatgaacaaggtgtgaagagtctattgagctactatagagtcctccggcccctgaatgcggctaatcctaaccatggagcaagtgctcacaggccagtgagttgcttgtcgtaatgcgcaagtccgtggcggaaccgactactttgggtgtccgtgtttcactttttacttttatgactgcttatggtgacaatttgatattgttaccatttagcttgtcaaatcaattgcaaaagatcctaaatcttacttatcaatttgcatcttgataactttaatttgaaaattttaaca

SEQ ID NO: 20586 - DNA, 674 bp, synthetic construct
  source 1..674: mol_type = other DNA
cactccaagggcccacgtggcggctagtactctggtacttcggtacctttgtacgcctgttttatctcccttcccaatgtaacttagaagttcttaaatcaatgctcaataggtggggcgcaaaccagcgctctcatgagcaagcactcctgtctccccggtgaggttgtataaactgttcccacggttgaaaacaacctatccgttatccgctatagtacttcgagaaacctagtaccacctttggattgttgacgcgttgcgctcagcacactaacccgtgtgtagcttgggtcgatgagtctggacatacctcactggcgacagtggtccaggctgcgttggcggcctactcatggtgaaagccatgagacgctagacatgaacaaggtgtgaagagtctattgagctactatagagtcctccggcccctgaatgcggctaatcctaaccatggagcgagtgctcacaggccagtgagttgcttgtcgtaatgcgcaagtccgtggcggaaccgactactttgggtgtccgtgtttcactttttacttttatgactgcttatggtgacaatttgatattgttaccatttagcttgtcaaatcaattgcaaaagatcctaaatcttatttatcaacttgcatcttgataactttaatttgaaaattttaaca

SEQ ID NO: 20587 - DNA, 674 bp, synthetic construct
  source 1..674: mol_type = other DNA
cactccaagggcccacgtggcggctagtactctggtacttcggtacctttgtacgcctgttttatctcccttcccaatgtaacttagaagttcttaaatcaatgctcaataggtggggcgcaaaccagcgctctcatgagcaagcactcctgtctccccggtgaagttgtataaactgttcccacggttgaaaacaacctatccgttatccgctatagtacttcgagaaacctagtaccacctttggattgttgacgcgttgcgctcagcacactaacccgtgtgtagcttgggtcgatgagtctggacatacctcactggcgacagtggtccaggctgcgttggcggcctactcatggtgaaagccatgagacgctagacatgaacaaggtgtgaagagtctattgagctactatagagtcctccggcccctgaatgcggctaatcctaaccatggagcaagtgctcacaggccagtgagttgcttgtcgtaatgcgcaagtccgtggcggaaccgactactttgggtgtccgtgtttcactttttacttttatgactgcttatggtgacaatttgatattgttaccatttagcttgtcaaatcaattgcaaaagatcctaactcttatttatcaacttgcatctcgataactctgatttgaaaattttaaca

SEQ ID NO: 20588 - DNA, 674 bp, synthetic construct
  source 1..674: mol_type = other DNA
cactccaagggcccacgtggcggctagtactctggtacttcggtacctttgtacgcctgttttatctcccttcccaatgtaacttagaagttcttaaatcaatgctcaataggtggggcgcaaaccagcgctctcatgagcaagcactcctgtctccccggtgaggttgtataaactgttcccacggttgaaaacaacctatccgttatccgctatagtacttcgagaaacctagtaccacctttggattgttgacgcgttgcgctcagcacactaacccgtgtgtagcttgggtcgatgagtctggacatacctcactggcgacagtggtccaggctgcgttggcggcctactcatggtgaaagccatgagacgctagacatgaacaaggtgtgaagagtctattgagctactatagagtcctccggcccctgaatgcggctaatcctaaccatggagcaagtgctcacaggccagtgagttgcttgtcgtaatgcgcaagtccgtggcggaaccgactactttgggtgtccgtgtttcactttttacttttatgactgcttatggtgacaatttgatattgttaccatttagcttgtcaaatcaattgcaaaagatcctaaatcttatttatcaacttgcatcttgataactttgatttgaaaattttaaca

SEQ ID NO: 20589 - DNA, 674 bp, synthetic construct
  source 1..674: mol_type = other DNA
cactccaagggcccacgtggcggctagtactctggtacttcggtacctttgtacgcctgttttatctcccttcccaatgtaacttagaagttcttaaatcaatgctcaataggtggggcgcaaaccagcgctctcatgagcaagcactcctgtctccccggtgaggttgtataaactgttcccacggttgaaaacaacctatccgttatccgctatagtacttcgagaaacctagtaccacctttggattgttgacgcgttgcgctcagcacactaacccgtgtgtagcttgggtcgatgagtctggacatacctcactggcgacagtggtccaggctgcgttggcggcctactcatggtgaaagccatgagacgctagacatgaacaaggtgtgaagagtctattgagctactatagagtcctccggcccctgaatgcggctaatcctaaccatggagcaagtgctcacaggccagtgagttgcttgtcgtaatgcgcaagtccgtggcggaaccgactactttgggtgtccgtgtttcactttttacttttatgactgcttatggtgacaatttgatattgttaccatttagcttgtcaaatcaattgcaaaagatcctagatcttatttatcaacttgcatcttgataactttaatttgaaaattttaaca

SEQ ID NO: 20590 - DNA, 674 bp, synthetic construct
  source 1..674: mol_type = other DNA
cactccaagggcccacgtggcggctagtactctggtacttcggtacctttgtacgcctgttttatctcccttcccaatgtaacttagaagctcttaaatcaaggctcaataggtggagcgcaaaccagcgctctcatgagcaagcactcctgtctccccggtgtggttgtataaactgttcccacggttgaaaacaacctatccgttatccgctatggtacttcgagaaacctagtatcacctttggattgttgacgcgttgcgctcagcacactaacccgtgtgtagcttgggtcgatgagtctggacataccccactggcgacagtggtccaggctgcgttggcggcctactcatggtgaaagccatgagacgctagacatgaacaaggtgtgaagagtctattgagctactatagagtcctccggcccctgaatgcggctaatcctaaccatggagcaagtgctcacaggccagtgagttgcttgtcgtaatgcgcaagtccgtggcggaaccgactactttgggtgtccgtgtttcactttttacccttatgactgcttatggtgacaatttgatattgttaccatttagcttgtcaaatcaattgcaaaagatcttaaatctcatttatcaacttgcatcttgataactttaatttgaagattttaata

SEQ ID NO: 20591 - DNA, 674 bp, synthetic construct
  source 1..674: mol_type = other DNA
caccccaagggcccacgtggcggctagtactctggtatttcggtacctttgtacgcctgttttatctcccttcccaatgtaacttagaagctctcaaatcaaagctcaataggtggagcgcaaaccagcgctctcacgagcaagcactcctgtctccccggtgtggttgtataaactgtccccacggttgaaaacaacctatccgttatccgctatagtacttcgagaaacctagtatcacctttggattgttgatgcgttgcgctcagcacactaacccgtgtgtagcttgggtcgatgagtctggacataccccactggcgacagtggtccaggctgcgttggcggcctactcatggtgaaaaccatgagacgctagacatgaacagggtgtgaagagtctattgagctactatagagtcctccggcccctgaatgcggctaatcttaaccatggagcaagtgctcacaagccagtgagttgcttgtcgtaatgcgcaagtccgtggcggaaccgactactttgggtgtccgtgtttcactttttacttttatgactgcttatggtgacaatttgatattgttaccatttagcttgtcaaatcaattacaaaagaccctaaatcttatttatcaacttgcattttgataactttaatttgaaaattttgata

SEQ ID NO: 20592 - DNA, 666 bp, synthetic construct
  source 1..666: mol_type = other DNA
cgttcgcagtctctggtattgcggtaccttgtacgcctgttttatacccccttcccacgtaactttagaagcaattcacacagttcaatagagggggtacaaaccagtaccaccacgaacaagcacttctgtttccccggtgaagccgtatagactgtacccacggttgaaaatggcagatccgttatccgctcaagtacttcgagaagcctagtatcatcttggaatcttcgacgcgttgcgctcagcactctaccccgagtgtagcttaggctgatgagtctgggcataccccaccggcgacggtggcccaggctgcgttggcggcctacccatggctaacgccatgggacgctagatgtgaacaaggtgtgaagagcctattgagctacttgagagtcctccggcccctgaatgcggctaatcccaaccacggagcaagtgcttacaaaccagtaagtggcttgtcgtaacgcgcaagtctgtggcggaaccgactactttgggtgtccgtgtttccttttatttttattatggctgcttatggtgacaatctaagattgttatcatatagctattggattggccatccggtgacttgttgaattttgaacatttatttgtttctctgcaacacttgcctattaaatacatttacaaactaca

SEQ ID NO: 20593 - DNA, 673 bp, synthetic construct
  source 1..673: mol_type = other DNA
caccccaagggcccacgtggcggctagtactctggtacttcggtacctttgtacgcctgttttatctcccttcccaatgtaacttagaagttctcaaatcaaagctcgataggtggagcgcaaaccagcgctctcatgagcaagcactcctgtctccccggtgcggttgtataaactgttcccacggttgaaaacaacctatccgttatccgctatagtacttcgagaaacctagtatcacctttggattgttgatgcgttgcgctcagcacactaacccgtgtgtagcttgggtcgatgagtctggacataccccactggcgacagtggtccaggctgcgttggcggcctactcatggtgaaaaccatgagacgctaaacatgaacaaggtgtgaagagtctattgagctactatagagtcctccggcccctgaatgcggctaatcttaaccatggagcaagtgctcacaagccagtgggttgcttgtcgtaatgcgcaagtccgtggcggaaccgactactttgggtgtccgtgtttcactttttacttttatgactgcttatggtgacaatttgatattgttaccatttagcttgtcaaatcaattacaaaagacctaaatcttatttatcaacttgctttttgataacttcaatcagaaaatttcaata

SEQ ID NO: 20594 - DNA, 673 bp, synthetic construct
  source 1..673: mol_type = other DNA
caccccaagggcccacgtggcggctagtactctggtacttcggtacctttgtacgcctgttttatctcccttcccaatgtaacttagaagttctcaaatcaaagctcgataggtggagcgcaaaccagcgctctcatgagcaagcactcctgtctccccggtgcggttgtataaactgttcccacggttgaaaacaacctatccgttatccgctatagtacttcgagaaacctagtatcacctttggattgttgatgcgttgcgctcagcacactaacccgtgtgtagcttgggtcgatgagtctggacacaccccactggcgacagtggtccaggctgcgttggcggcctactcatggtgaaaaccatgagacgctaaacatgaacaaggtgtgaagagtctattgagctactatagagtcctccggcccctgaatgcggctaatcttaaccatggagcaagtgctcacaagccagtgggttgcttgtcgtaatgcgcaagtccgtggcggaaccgactactttgggtgtccgtgtttcactttttacttttatgactgcttatggtgacaatttgatattgttaccatttagcttgtcaaatcaattacaaaagacctaaatcttatttatcaacttgctttttgacaacttcaatcagaaaatttcaata

SEQ ID NO: 20595 - DNA, 673 bp, synthetic construct
  source 1..673: mol_type = other DNA
caccccaagggcccacgtggcggctagtactctggtacttcggtacctttgtacgcctgttttatctcccttcccaatgtaacttagaagttttcaaatcaaagctcgataggtggagcgcaaaccagcgctctcatgagcaagcactcctgtctccccggtgcggttgtataaactgttcccacggttgaaagcaacctatccgttatccgctatagtacttcgagaaacctagtatcacctttggattgttgatgtgttgcgctcagcacactaacccgtgtgtagcttgggtcgatgagtctggacgtaccccactggcgacagtggtccaggctgcgttggcggcctactcatggtgaaaaccatgagacgctaaacatgaacaaggtgtgaagagtctattgagctactatagagtcctccggcccctgaatgcggctaatcttaaccatggagcaagtgctcacaagccagtgggttgcttgtcgtaatgcgcaagtccatggcggaaccgactactttgggtgtccgtgtttcactttttacttttatgactgcttatggtgacaatttgatattgttaccatttagcttgtcaaatcaattacaaaagacctatatcttatttatcaacttgctttttgataacttcaatcagaaaatttcaata

SEQ ID NO: 20596 - DNA, 673 bp, synthetic construct
  source 1..673: mol_type = other DNA
caccccaagggcccacgtggcggctagtactctggtacttcggtacctttgtacgcctgttttatctcccttcccaatgtaacttagaagttctcaaatcaaagctcgataggtggagcgcaaaccagcgctctcatgagcaagcactcctgtctccccggtgcggttgtataaactgttcccacggttgaaaacaacctatccgttatccgctatagtacttcgagaaacctagtatcacctttggattgttgatgcgttgcgctcagcacactaacccgtgtgtagcttgggtcgatgagtctggacacaccccactggcgacagtggtccaggctgcgttggcggcctactcatggtgaaaaccatgagacgctaaacatgaacaaggtgtgaagagtctattgagctactatagagtcctccggcccctgaatgcggctaatcttaaccatggagcaagtgctcacaagccagtgggttgcttgtcgtaatgcgcaagtccgtggcggaaccgactactttgggtgtccgtgtttcactttttacttttatgactgcttatggtgacaatttgatattgttaccatttagcttgtcaaatcaattacaaaaggcctaaatcttatttatcaacttgctttttgataacttcaatcagaaaatttcaata

SEQ ID NO: 20597 - DNA, 673 bp, synthetic construct
  source 1..673: mol_type = other DNA
caccccaagggcccacgtggcggctagtactctggtacttcggtacctttgtacgcctgttttatctcccttcccaatgtaacttagaagttctcaaatcaaagctcgataggtggagcgcaaaccagcgctctcatgagcaagcactcctgtctccccggtgcggttgtataaactgttcccacggttgaaaacaacctatccgttatccgctatagtacttcgagaaacctagtatcacctttggattgttgatgcgttgcgctcagcacactaacccgtgtgtagcttgggttgatgagtctggacacaccccactggcgacagtggtccaggctgcgttggcggcctactcatggtgaaaaccatgagacgctaaacatgaacaaggtgtgaagagtctattgagctactatagagtcctccggcccctgaatgcggctaatcttaaccatggagcaagtgctcacaagccagtgggttgcttgtcgtaatgcgcaagtccgtggcggaaccgactactttgggtgtccgtgtttcactttttacttttatgactgcttatggtgacaatttgatattgttaccatttagcttgtcaaatcaattacaaaagacctaaatcttatttaccaacttgctttttgacaacttcaatcagaaaatttcaata

SEQ ID NO: 20598 - DNA, 673 bp, synthetic construct
  source 1..673: mol_type = other DNA
caccccaagggcccacgtggcggctagtactctggtacttcggtacctttgtacgcctgttttatctcccttcccaatgtaacttagaagttctcaaatcaaagctcgataggtggagcgcaaaccagcgctcttatgagcaagcactcctgtctccccggtgcggttgtataaactgttcccacggttgaaaacaacctatccgttatccgctatagtacttcgagaaacctagtatcacctttggattgttgatgcgttgcgctcagcacactaacccgtgtgtagcttgggtcgatgagtctggacataccccactggcgacagtggtccaggctgcgttggcggcctactcatggtgaaaaccatgagacgctaaacatgaacaaggtgtgaagagtctattgagctactatagagtcctccggcccctgaatgcggctaatcttaaccatggagcaagtgctcacaagccagtgggttgcttgtcgtaatgcgcaagtccgtggcggaaccgactactttgggtgtccgtgtttcactttttacttttgtgactgcttatggtgacaatttgatattgttaccatttagcttgtcaaatcaattacaaaagacctaaatcttatttatcaacttgctttttgataacttcaatcagaaaatttcaata

SEQ ID NO: 20599 - DNA, 673 bp, synthetic construct
  source 1..673: mol_type = other DNA
caccccaagggcccacgtggcggctagtactctggtacttcggtacctttgtacgcctgttttatctcccttcccaatgtaacttagaagttctcaaatcaaagctcgataggtggagcgcaaaccagcgctctcatgagcaagcactcctgtctccccggtgcggttgtataaactgttcccacggttgaaaacaacctatccgttatccgctatagtacttcgagaaacctagtatcacctttggattgttgatgcgttgcgctcagcacactaacccgtgtgtagcttgggttgatgagtctggacacaccccactggcgacagtggtccaggctgcgttggcggcctactcatggtgaaaaccatgagacgctaaacatgaacaaggtgtgaagagtctattgagctactatagagtcctccggcccctgaatgcggctaatcttaaccatggagcaagtgctcacaagccagtgggttgcttgtcgtaatgcgcaagtccgtggcggaaccgactactttgggtgtccgtgtttcactttttacttttatgactgcttatggtgacaatttgatattgttaccatttagcttgtcaaatcaattacaaaagacctaaatcttatttatcaacttgctttttgacaacttcaatcagaaaatttcaata

SEQ ID NO: 20600 - DNA, 673 bp, synthetic construct
  source 1..673: mol_type = other DNA
cactccaagggcccacgtggcggctagtactctggtacttcggtacctttgtacgcctgttttatctcccttcccaatgtaacttagaagttctcaaatcaaagctcgataggtggagcgcaaaccagcgctctcatgagcaagcactcctgtctccccggtgcggttgtataaactgttcccacggttgaaaacaacctatccgttatccgctatagtacttcgagaaacctagtatcacctttggattgttgatgcgttgcgctcagcacactaacccgtgtgtagcttgggtcgatgagtctggacataccccactggcgacagtggtccaggctgcgttggcggcctactcatggtgaaaaccatgagacgctaaacatgaacaaggtgtgaagagtctattgagctactatagagtcctccggcccctgaatgcggctaatcttaaccatggagcaagtgctcacaagccagtgggttgcttgtcgtaatgcgcaagtccgtggcggaaccgactactttgggtgtccgtgtttcacttttaacttttatgactgcttatggtgacaatttgatattgttaccatttagcttgtcaaatcaattacaaaagacctaaatcttatttatcaacttgctttttgataacttcaatcagaaaatttcaata

SEQ ID NO: 20601 - DNA, 673 bp, synthetic construct
  source 1..673: mol_type = other DNA
caccccaagggcccacgtggcggctagtactctggtacttcggtacctttgtacgcctgttttatctcccttcccaatgtaacttagaagttctcaaatcaaagctcgataggtggagcgcaaaccagcgttctcatgagcaagcactcctgtctccccggtgcggttgtataaactgttcccacggttgaaaacaacctatccgttatccgctatagtacttcgagaaacctagtatcacctttggattgttgatgcgttgcgctcagcacactaacccgtgtgtagcttgggtcgatgagtctggacacaccccactggcgacagtggtccaggctgcgttggcggcctactcatggtgaaaaccatgagacgctaaacatgaacaaggtgtgaagagtctattgagctactatagagtcctccggcccctgaatgcggctaatcttaaccatggagcaagtgctcacaagccagtgggttgcttgtcgtaatgcgcaagtccgtggcggaaccgactactttgggtgtccgtgtttcactttttacttttatgactgcttatggtgacaatttgatattgttaccatttagcttgtcaaatcaattacaaaagacctaaatcttatttatcaacttgctttttgacaacttcaatcagaaaatttcaata

SEQ ID NO: 20602 - DNA, 673 bp, synthetic construct
  source 1..673: mol_type = other DNA
caccccaagggcccacgtggcggctagtactctggtacttcggtacctttgtacgcctgttttatctcccttcccaatgtaacttagaagttctcaaatcaaagctcgataggtggagcgcaaaccagcgctctcatgagcaagcactcctgtctccccggtgcggttgtataaactgttcccacggttgaaaacaacctatccgttatccgctatggtacttcgagaaacctagtatcacctttggattgttgatgcgttgcgctcagcacactaacccgtgtgtagcttgggttgatgagtctggacacaccccactggcgacagtggtccaggctgcgttggcggcctactcatggtgaagaccatgagacgctaaacatgaacaaggtgtgaagagtctattgagctactatagagtcctccggcccctgaatgcggctaatcttaaccatggagcaagtgctcacaagccagtgggttgcttgtcgtaatgcgcaagtccgtggcggaaccgactactttgggtgtccgtgtttcactttttacttttatgactgcttatggtgacaatttgatattgttaccatttagcttgtcaaatcaattacaaaagacctaaatcttatttatcaacttgctttttgacaacttcaatcagaaaatttcaata

SEQ ID NO: 20603 - DNA, 673 bp, synthetic construct
  source 1..673: mol_type = other DNA
caccccaagggcccacgtggcggctagtactctggtacttcggtacctttgtacgcctgttttatctcccttcccaatgtaacttagaagttctcaaatcaaagctcgataggtggagcgcaaaccagcgctcttatgagcaagcactcctgtctccccggtgcggttgtataaactgttcccacggttgaaaacaacctatccgttatccgctatagtacttcgagaaacctagtatcacctttggattgttgatgcgttgcgctcagcacactaacccgtgtgtagcttgggtcgatgagtctggacataccccactggcgacagtggtccaggctgcgttggcggcctactcatggtgaaaaccatgagacgctaaacatgaacaaggtgtgaagagtctattgagctactatagagtcctccggcccctgaatgcggctaatcttaaccatggagcaagtgctcacaagccagtgggttgcttgtcgtaatgcgcaagtccgtggcggaaccgactactttgggtgtccgtgtttcactttttacttttatgactgcttatggtgacaatttgatattgttaccatttagcttgtcaaatcaattacaaaagacctaaatcttatttatcaacttgctttttgataacttcaatcagaaaatttcaata

SEQ ID NO: 20604 - DNA, 673 bp, synthetic construct
  source 1..673: mol_type = other DNA
cactccaagggcccacgtggcggctagtactctggtacttcggtacctttgtacgcctgttttatctcccttcccaatgtaacttagaagttctcaaatcaaagctcgataggtggagcgcaaaccagcgctctcatgagcaagcactcctgtctccccggtgcggttgtataaactgttcccacggttgaaaacaacctatccgttatccgctatagtacttcgagaaacctagtatcacctttggattgttgatgcgttgcgctcagcacactaacccgtgtgtagcttgggtcgatgagtctggacataccccactggcgacagtggtccaggctgcgttggcggcctactcatggtgaaaaccatgagacgctaaacatgaacaaggtgtgaagagtctattgagctactatagagtcctccggcccctgaatgcggctaatcttaaccatggagcaagtgctcacaagccagtgggttgcttgtcgtaatgcgcaagtccgtggcggaaccgactactttgggtgtccgtgtttcactttttacttttatgactgcttatggtgacaatttgatattgttaccatttagcttgtcaaatcaattacaaaagacctaaatcttatttatcaacttgctttttgataacttcaatcagaaaatttcaata

SEQ ID NO: 20605 - DNA, 673 bp, synthetic construct
  source 1..673: mol_type = other DNA
caccccaagggcccacgtggcggctagtactctggtacttcggtacctttgtacgcctgttttatctcccttcccaatgtaacttagaagttctcaaattaaagctcgataggtggagcgcaaaccagcgctcttatgagcaagcactcctgtctccccggtgcggttgtataaactgttcccacggttgaaaacaacctatccgttatccgctatagtacttcgagaaacctagtatcacctttggattgttgatgcgttgcgctcagcacactaacccgtgtgtagcttgggtcgatgagtctggacataccccactggcgacagtggtccaggctgcgttggcggcctactcatggtgaaaaccatgagacgctaaacatgaacaaggtgtgaagagtctattgagctactatagagtcctccggcccctgaatgcggctaatcttaaccatggagcaagtgctcacaagccagtgggttgcttgtcgtaatgcgcaagtccgtggcggaaccgactactttgggtgtccgtgtttcactttttacttttatgactgcttatggtgacaatttgatattgttaccatttagcttgtcaaatcaattacaaaagacctaaatcttatttatcaacttgctttttgataactttaatcagaaaatttcaata

SEQ ID NO: 20606 - DNA, 673 bp, synthetic construct
  source 1..673: mol_type = other DNA
caccccaagggcccacgtggcggctagtactctggtacttcggtacctttgtacgcctgttttatctcccttcccaatgtaacttagaagttctcaaatcaaagctcgataggtggagcgcaaaccagcgctctcatgagcaagcactcctgtctccccggtgcggttgtataaactgttcccacggttgaaaacaacctatccgttatccgctatagtacttcgagaaacctagtatcacctttggattgttgatgcgttgcgctcagcacactaacccgtgtgtagcttgggtcgatgagtctggacacaccccactggcgacagtggtccaggctgcgttggcggcctactcatggtgaaaaccatgagacgctaaacatgaacaaggtgtgaagagtctattgagctactatagagtcctccggcccctgaatgcggctaatcttaaccatggagcaagtgctcacaagccagtgggttgcttgtcgtaatgcgcaagtccgtggcggaaccgactactttgggtgtccgtgtttcactttttacttttatgactgcttatggtgacaatttgacattgttaccatttagcttgtcaaatcaattacaaaagacctaaatcttatttatcaacttgctttttgacaacttcaatcagaaaatttcaata

SEQ ID NO: 20607 - DNA, 673 bp, synthetic construct
  source 1..673: mol_type = other DNA
caccccaagggcccacgtggcggctagtactctggtacttcggtacctttgtacgcctgttttatctcccttcccaatgtaacttagaagttctcaaatcaaagctcgataggtggagcgcaaaccagcgctctcatgagcaagcactcctgtttccccggtgcggttgtataaactgttcccacggttgaaaacaacctatccgttatccgctatagtacttcgagaaacctagtatcacctttggattgttgatgcgttgcgctcagcacactaacccgtgtgtagcttgggtcgatgagtctggacacaccccactggcgacagtggtccaggctgcgttggcggcctactcatggtgaaaaccatgagacgctaaacatgaacaaggtgtgaagagtctattgagctactatagagtcctccggcccctgaatgcggctaatcttaaccatggagcaagtgctcacaagccagtgggttgcttgtcgtaatgcgcaagtccgtggcggaaccgactactttgggtgtccgtgtttcactttttacttttatgactgcttatggtgacaatttgatattgttaccatttagcttgtcaaatcaattacaaaaggcctaaatcttatttatcaacttgctttttgataacttcaatcagaaaatttcaata

SEQ ID NO: 20608 - DNA, 673 bp, synthetic construct
  source 1..673: mol_type = other DNA
caccccaagggcccacgtggcggctagtactctggtacttcggtacctttgtacgcctgttttatctcccttcccaatgtaacttagaagttctcaaatcaaagctcgataggtggagcgcaaaccagcgctctcatgagcaagcactcctgtctccccggtgcggttgtataaactgttcccacggttgaaaacaacctatccgttatccgctatagtacttcgagaaacctagtatcacctctggattgttgatgcgttgcgctcagcacactaacccgtgtgtagcttgggtcgatgagtctggacacaccccactggcgacagtggtccaggctgcgttggcggcctactcatggtgaaaaccatgagacgctaaacatgaacaaggtgtgaagagtctattgagctactatagagtcctccggcccctgaatgcggctaatcttaaccatggagcaagtgctcacaagccagtgggttgcttgtcgtaatgcgcaagtccgtggcggaaccgactactttgggtgtccgtgtttcactttttacttttatgactgcttatggtgacaatttgatattgttaccatttagcttgtcaagtcaattacaaaagacctaaatcttatttatcaacttgctttttgacaacttcaatcagaaaatttcaata

SEQ ID NO: 20609 - DNA, 673 bp, synthetic construct
  source 1..673: mol_type = other DNA
caccccaagggcccacgtggcggctagtactctggtacttcggtacctttgtacgcctgttttatctcccttcccaatgtaacttagaagttctcaaatcaaagctcgataggtggagcgcaaaccagcgctctcatgagcaagcactcctgtttccccggtgcggttgtataaactgttcccacggttgaaaacaacctatccgttatccgctatagtacttcgagaaacctagtatcacctttggattgttgatgcgttgcgctcagcacactaacccgtgtgtagcttgggtcgatgagtctggacacaccccactggcgacagtggtccaggctgcgttggcggcctactcatggtgaaaaccatgagacgctaaacatgaacaaggtgtgaagagtctattgagctactatagagtcctccggcccctgaatgcggctaatcttaaccatggagcaagtgctcacaagccagtgggttgcttgtcgtaatgcgcaagtccgtggcggaaccgactactttgggtgtccgtgtttcactttttacttttatgactgcttatggtgacaatttgatattgttaccatttagcttgtcaaatcaattacaaaagacctaaatcttatttatcaacttgctttttgataacttcaatcagaagatttcaata

SEQ ID NO: 20610 - DNA, 673 bp, synthetic construct
  source 1..673: mol_type = other DNA
caccccaagggcccacgtggcggctagtactctggtacttcggtacctttgtacgcctgttttatctcccttcccaatgtaacttagaagctctcaaattaaagctcgataggtggagcgcaaaccagcgctctcatgagcaagcactcctgtctccccggtgcggttgtataaactgttcccacggttgaaaacaacctatccgttatccgctatagtacttcgagaaacctagtatcacctttggattgttgatgcgttgcgctcagcacactaacccgtgtgtagcttgggtcgatgagtctggacacaccccactggcgacagtggtccaggctgcgttggcggcctactcatggtgaaaaccatgagacgctaaacatgaacaaggtgtgaagagtctattgagctactatagagtcctccggcccctgaatgcggctaatcttaaccatggagcaagtgctcacaagccagtgggttgcttgtcgtaatgcgcaagtccgtggcggaaccgactactttgggtgtccgtgtttcactttttacttttatgactgcttatggtgacaatttgatattgttaccatttagcttgtcaaatcaattacaaaagacctaaatcttatttatcaacttgctttttgataacttcaatcagaaaatttcaata

SEQ ID NO: 20611 - DNA, 673 bp, synthetic construct
  source 1..673: mol_type = other DNA
caccccaagggcccacgtggcggctagtactctggtacttcggtacctttgtacgcctgttttatctcccttcccaatgtaacttagaagttctcaaatcaaagctcgataggtggagcgcaaaccagcgctctcatgagcaagcactcctgtctccccggtgcggttgtataaactgttcccacggttgaaaacaacctatccgttatccgctatagtacttcgagaaacctagtaccacctttggattgttgatgcgttgcgctcagcacactaacccgtgtgtagcttgggtcgatgagtctggacacaccccactggcgacagtggtccaggctgcgttggcggcctactcatggtgaaaaccatgagacgctaaacatgaacaaggtgtgaagagtctattgagctactatagagtcctccggcccctgaatgcggctaatcttaaccatggagcaagtgctcacaagccagtgggttgcttgtcgtaatgcgcaagtccgtggcggaaccgactactttgggtgtccgtgtttcactttttacttttatgactgcttatggtgacaatttgatattgttaccatttagcttgtcaaatcaattacaaaagacctaaatcttatttatcaacttgctttttgataacttcaatcagaaaatttcaaca

SEQ ID NO: 20612 - DNA, 675 bp, synthetic construct
  source 1..675: mol_type = other DNA
cactccaagggcccacgtggcggctagtactctggtacttcggtacctttgtacgcctgttttatctcccttcccaatgtaacttagaagttcttaaatcaatgctcaataggtggggcgcaaaccagcgctctcatgagcaagcactcctgtctccccggtgaggttgtataaactgttcccacggttgaaaacaacctatccgttatccgctatagtacttcgagaaacctagtaccacctttggattgttgacgcgttgcgctcagcacactaacccgtgtgtagcttgggtcgatgagtctggacatacctcactggcgacagtggtccaggctgcgttggcggcctactcatggtgaaagccatgagacgctagacatgaacaaggtgtgaagagtctattgagctactatagagtcctccggcccctgaatgcggctaatcctaaccatggagcaagtgctcacaggccagtgagttgcttgtcgtaatgcgcaagtccgtggcggaaccgactactttgggtgtccgtgtttcacttttttacttttatgactgcttatggtgacaatttgatattgttaccatttagcttgtcaaaccaattgcaaaagatcctaaatcttatttatcaacttgcatcttgataactttaatttgaaaatttcaaca

SEQ ID NO: 20613 - DNA, 648 bp, synthetic construct
  source 1..648: mol_type = other DNA
gtactctggtacttcggtacctttgtacgcctgttttatctcccttcccaatgtaacttagaagttcttaaatcaatgctcaataggtggggcgcaaaccagcgctctcatgagcaagcactcctgtctccccggtgaggttgtataaactgttcccacggttgaaaacaacctatccgttatccgctatagtacttcgagaaacctagtaccacctttggattgttgacgcgttgcgctcagcacactaacccgtgtgtagcttgggtcgatgagtctggacatacctcactggcgacagtggtccaggctgcgttggcggcctactcatggtgaaagccatgggacgctagacatgaacaaggtgtgaagagtctattgagctactatagagtcctccggcccctgaatgcggctaatcctaaccatggagcaagtgctcacaggccagtgagttgcttgtcgtaatgcgcaagtccgtggcggaaccgactactttgggtgtccgtgtttcactttttacttttatgactgcttatggtgacaatttgatattgttaccatttagcttgtcaaatcaattgcaaaagatcctaaatcttatttatcaacttgcatcttgataactttaatttgaaaattttaaca

SEQ ID NO: 20614 - DNA, 672 bp, synthetic construct
  source 1..672: mol_type = other DNA
cactccaagggcccacgtggcggctagtactctggtacttcggtacctttgtacgcctgttttatctcccttcccaatgcaacttagaagttcttaaatcaatgctcaataggtggggcgcaaaccagcgctctcatgagcaagcactcctgtctccccggtgaggttgtataaactgttcccacggttgaaaacaacctatccgttatccgctatagtacttcgagaaacctagtaccacctttggattgttgatgcgttgcgctcagcacactaacccgtgtgtagcttgggtcgatgagtctggacataccccactggcgacagtggtccaggctgcgttggcggcctactcatggtgaaaaccatgagacgctaaacatgaacaaggtgtgaagagtctattgagctactatagagtcctccggcccctgaatgcggctaatcttaaccatggagcaagtgctcacaagccagtgggttgcttgtcgtaatgcgcaagtccgtggcggaaccgactactttgggtgtccgtgtttcactttttacttttatgactgcttatggtgacaatttgatattgttaccatttagcttgtcaaatcaattacaaaagacctaaatcttatttatcaacttgcttttgataacttcaatcagaaaatttcaata

SEQ ID NO: 20615 - DNA, 674 bp, synthetic construct
  source 1..674: mol_type = other DNA
cactccaagggcccacgtggcggctagtactctggtacttcggtacctttgtacgcctgttttatctcccttcccaatgtaacttagaagttcttaaatcaatgctcaataggtggggcgcaaaccagcgctctcatgagcaagcactcctgtctccccggtgaggttgtataaactgttcccacggttgaaaacaacctatccgttatccgctatagtacttcgagaaacctagtaccacctttggattgttgacgcgttgcgctcagcacactaacccgtgtgtagcttgggtcgatgagtctggacatacctcactggcgacagtggtccaggctgcgttggcggcctactcatggtgaaagccatgagacgctagacatgaacaaggtgtgaagagtctattgagctactatagagtcctccggcccctgaatgcggctaatcctaaccatggagcaagtgctcacaggccagtgagttgcttgtcgtaatgcgcaagtccgtggcggaaccgactactttgggtgtccgtgtttcgctttttacttttatgactgcttatggtgacaatttgatattgttaccatttagcttgtcaaatcaattgcaaaagatcctaaatcttatttgtcaacttgcatcttgataactttaatttgaaaattttaaca

SEQ ID NO: 20616 - DNA, 674 bp, synthetic construct
  source 1..674: mol_type = other DNA
cactccaagggcccacgtggcggctagtactctggtacttcggtacctttgtacgcctgttttatctcccttcccaatgtaacttagaagttcttaaatcaatgctcaataggtggggcgcaaaccagcgctctcatgagcaagcactcctgtctccccggtgaggttgtataaactgttcccacggttgaaaacaacctatccgttatccgctatagtacttcgagaaacctagtaccacctttggattgttgacgcgttgcgctcagcacactaacccgtgtgtagcttgggtcgatgagtctggacatacctcactggcgacagtggtccaggctgcgttggcggcctactcatggtgaaagccatgagacgctagacatgaacaaggtgtgaagagtctattgagctactatagagtcctccggcccctgaatgcggctaatcctaaccatggagcaagtgctcacaggccagtgagttgcttgtcgtaatgcgcaagtccgtggcggaaccgactactttgggtgtccgtgtttcactttttacttttatgactgcttatggtgacaatttgatattgttaccatttagcttgtcaaatcaattgcaaaagatcctaaatcttatttatcaacttacatcttgataactttaatttgaaaattttaaca

SEQ ID NO: 20617 - DNA, 674 bp, synthetic construct
  source 1..674: mol_type = other DNA
cactccaagggcccacgtggcggctagtactctggtacttcggtacctttgtacgcctgttttatctcccttcccaatgtaacttagaagttcttaaattaatgctcaataggtggggcgcaaaccagcgctctcatgagcaagcactcctgtctccccggtgaggttgtataaactgttcccacggttgaaaacaacctatccgttatccgctatagtacttcgagaaacctagtaccacctttggattgttgacgcgttgcgctcagcacactaacccgtgtgtagcttgggtcgatgagtctggacatacctcactggcgacagtggtccaggctgcgttggcggcctactcatggtgaaagccatgagacgctagacatgaacaaggtgtgaagagtctattgagctactatagagtcctccggcccctgaatgcggctaatcctaaccatggagcaagtgctcacaggccagtgagttgcttgtcgtaatgcgcaagtccgtggcggaaccgactactttgggtgtccgtgtttcactttttacttttatgactgcttatggtgacaatttgatattgttaccatttagcttgtcaaatcaattgcaaaagatcctaaatcttatttatcaacttgcatcttgataattttaatttgaaaactttaaca

SEQ ID NO: 20618 - DNA, 687 bp, synthetic construct; identical to SEQ ID NO: 825
  source 1..687: mol_type = other DNA

SEQ ID NO: 20619 - DNA, 571 bp, synthetic construct; identical to SEQ ID NO: 620
  source 1..571: mol_type = other DNA

SEQ ID NO: 20620 - DNA, 673 bp, synthetic construct
  source 1..673: mol_type = other DNA
cactccaagggcccacgtggcggctagtactctggtacttcggtacctttgtacgcctgttttatctcccttcccaacgtaacttagaagctcttaaatcaaggctcaataggtggagcgcaaaccagcgctcttatgagcaagtactcctgtctccccggtgcggttgtataaactgttcccacggttgaaaacaacctatccgttatccgctatagtacttcgagaaacctagtatcaccttcggattgttgacgcgttgcgctcagcacactaacccgtgtgtagcttgggtcgatgagtctggacataccccactggcgacagtggtccaggctgcgttggcggcctactcatggtgaaaaccatgagacgctagacatgaacaaggtgtgaagagtctattgagctactatagagtcctccggcccctgaatgcggctaatcctaaccatggagcaagtgctcacagaccagtgagttgcttgtcgtaatgcgcaagtccgtggcggaaccgactactttgggtgtccgtgtttcactttttacccttatgactgcttatggtgacaatttgatattgttaccatttagcttgtcaaatcaattgcaaaagatcctaaatcttatttatcaacttgcattttgataactttaatttgaagatttaata

SEQ ID NO: 20621 - DNA, 673 bp, synthetic construct
  source 1..673: mol_type = other DNA
cactccaagggcccacgtggcggctagtactctggtacttcggtacctttgtacgcctgttttatctcccttcccaatgtaacttagaagctcttaaatcaaggctcaataggtggagcgcaaaccagcgctcttatgagcaagtacttctgtttccccggtgcggttatataaactgttcccacggttgaaaataacctatccgttatccgctatagtacttcgagaaacctagtatcacctttggattgttgacgcgttgcgctcagcacactaacccgtgtgtagcttgggtcgatgagtctggacataccccactggcgacagtggtccaggctgcgttggcggcctactcatggtgaaaaccatgagacgctagacatgaacaaggtgtgaagagtctattgagctactatagagtcctccggcccctgaatgcggctaatcctaaccatggagcaagtgctcacagaccagtgagttgcttgtcgtaatgcgcaagtccgtggcggaaccgactactttgggtgaccgtgtttcactttttacccttatgactgcttatggtgacaatttgatattgttgccatttagcttgtcaaatcaattgcaaaagatcctaaatcttatttatcaacttgcattttgataactttaatttgaagatttaata

SEQ ID NO: 20622 - DNA, 673 bp, synthetic construct
  source 1..673: mol_type = other DNA
cactccaagggcccacgtggcggctagtactctggtgcttcggtacctttgtacgcctgttttatctcccttcccaatgtaacttagaagctcttaaatcaaggctcaataggtggagcgcaaaccagcgctcttatgagcaagtactcctgtttccccggtgcggttatataaactgttcccacggttgaaaataacctatccgttatccgctatagtacttcgagaaacctagtatcacctttggattgttgacgcgttgcgctcagcacactaacccgtgtgtagcttgggtcgatgagtctggacataccccactggcgacagtggtccaggctgcgttggcggcctactcatggtgaaaaccatgagacgctagacatgaacaaggtgtgaagagtctattgagctactatagagtcctccggcccctgaatgcggctaatcctaaccatggagcaagtgctcacagaccagtgagttgcttgtcgtaatgcgcaagtccgtggcggaaccgactactttgggtgtccgtgtttcactttttacccttatgactgcttatggtgacaatttgatattgttaccatttagcttgtcaaatcaattgcaaaagatcctaaatcttatctatcaacttgcattttgataactttaatttgaagatttaata

SEQ ID NO: 20623 - DNA, 673 bp, synthetic construct
  source 1..673: mol_type = other DNA
cactccaagggcccacgtggcggctagtactctggtacttcggtacctttgtacgcctgttttatctcccttcccaacgtaacttagaagctcttaaaccaaggctcaataggtggagcgcaaaccagcgctcttatgagcaagtactcctgtttccccggtgcggttatataaactgtccccacggttgaaaataacctatccgttatccgctatagtacttcgagaaacctagtatcacctttggattgttgacgcgttgcgctcagcacactaacccgtgtgtagcttgggtcgatgagtctggacataccccactggcgacagtggtccaggctgcgttggcggcctactcatggtgaaaaccatgagacgctagacatgaacaaggtgtgaagagtctattgagctactatagagtcctccggcccctgaatgcggctaatcctaaccatggagcaagtgctcacagaccagtgagttgcttgtcgtaatgcgcaagtccgtggcggaaccgactactttgggtgtccgtgtttcactttttacccttatgactgcttatggtgacaatttgatattgttaccatttagcttgtcaaatcaattgcaaaagatcctaaatcttatttatcaacttgcattttgataactttaatttaaagattcaata

SEQ ID NO: 20624 - DNA, 658 bp, synthetic construct
  source 1..658: mol_type = other DNA
cgtggcggctagtactctggtacttcggtacctttgtacgcctgttttatctcccttcccaatgtaatttagaagcttttaaatcaaagctcaataggtggggcgcaaaccagcgctctcatgagcaagcactcctgtctccccggtgtggttgtataaactgttcccacggttgaaaacaacctatccgttatccgctatagtacttcgagaaacctagtatcacctttggattgttgacgcgttgcgctcagcacactagcccgtgtgtagcttgggtcgatgagtctggacataccccactggcgacagtggtccaggctgcgttggcggcctactcatggtgaaaaccatgagacgctagacatgaacaaggtgtgaagagtctattgagctactatagagtcctccggcccctgaatgcggctaatcctaaccatggagcaagtgctcacaggccagtgagttgcttgtcgtaatgcgcaagtccgtggcggaaccgactactttgggtgtccgtgtttcactttttacttttatgactgcttatggtgacaatttgatattgttaccatttagctgtcaaattaattgcaaaagatcctaagtcttacttaccaatttgcattttgataaccttgatttgaaaattttaata

SEQ ID NO: 20625 - DNA, 476 bp, synthetic construct; identical to SEQ ID NO: 505
  source 1..476: mol_type = other DNA

SEQ ID NO: 20626 - DNA, 653 bp, synthetic construct
  source 1..653: mol_type = other DNA
ggctagtactctggtacttcggtacctttgtacgcctgttttatctcccttcccaatgtaatttagaagctcttaaatcaaggctcaataggtggggcgcaaaccagcgctctcatgagcaagcactcctgtctccccggtgtggttgtataaactgttcccacggttgaaaacaacctatccgttatccgctatagtacttcgagaaacctagtatcacctttggattgttgacgcgttgcgctcagcacactaacccgtgtgtagcttgggtcgatgagtctggacataccccactggcgacagtggtccaggctgcgttggcggcctactcatggtgaaaaccatgagacgctagacatgaacaaggtgtgaagagtctattgagctactatagagtcctccggcccctgaatgcggctaatcctaaccatggagcaagtgctcacaggccagtgagttgcttgtcgtaatgcgcaagtccgtggcggaaccgactactttgggtgtccgtgtttcactttttacttttatgactgcttatggtgacaatttgatattgttaccatttagcttgtcaaattaattgcaaaggatcctaaatcttacttaccaatttgcattttgacaatcttgatttgaaaattttaata

SEQ ID NO: 20627 - DNA, 650 bp, synthetic construct
  source 1..650: mol_type = other DNA
ctagtactctggtacttcggtacctttgtacgcctgttttatctcccttcccaatgtaatttagaagcttttaaatcaaggctcaataggtggggcgcaaaccagcgctctcatgagcaagcactcctgtctccccggtgtggttgtataaactgttcccacggttgaaaacaacctatccgttatccgctatagtacttcgagaaacctagtatcacctttggattgttgacgcgttgcgctcagcacactaacccgtgtgtagcttgggtcgatgagtctggacataccccactggcgacagtggtccaggctgcgttggcggcctactcatggtgaaaaccatgagacgctagacatgaacaaggtgtgaagagtctattgagctactatagagtcctccggcccctgaatgcggctaatcctaaccatggagcaagtgctcacaggccagtgagttgcttgtcgtaacgcgcaagtccgtggcggaaccgactactttgggtgtccgtgtttcactttttacttttatgactgcttatggtgacaatttgatattgttaccatttagctgtcaaattaattgcaaaagatcctaagtcttacttaccaatttgcattttgataaccttgatttgaaaactttaata

SEQ ID NO: 20628 - DNA, 644 bp, synthetic construct
  source 1..644: mol_type = other DNA
tctggtacttcggtacctttgtacgcctgttttatctcccttcccattgtaacttagaagttcttaaatcaaggctcaataggtggggcgcaaaccagcgctctcatgagcaagcactcctgtctccccggtgtggttgtataaactgttcccacggttgaaaacaacctatccgttatccgctatagtacttcgagaaacctagtatcacctttggattgttgacgcgttgcgctcagcacactaacccgtgtgtagcttgggtcgatgagtctggacgtaccccactggcgacagtggtccaggctgcgttggcggcctactcatggtgaaaaccatgagacgctagacatgaacaaggtgtgaagagtctattgagctactatagagtcctccggcccctgaatgcggctaatcctaaccatggagcaagtgctcacaagccagtgagttgcttgtcgtaatgcgcaagtctgtggcggaaccgactactttgggtgtccgtgtttcactttttacttttatgactgcttatggtgacaatttgatattgttaccatttagcttgtcaaattaattgcaaaagatcctaaatcttatttactaacttgcattttgataaccttgatttgagaattttaata

SEQ ID NO: 20629 - DNA, 644 bp, synthetic construct
  source 1..644: mol_type = other DNA
tctggtacttcggtacctttgtacgcctgttttatctcccttcccaatgtaatttagaagctcttaaatcaaggctcaataggtggggcgcaaaccagcgctctcatgagcaagcactcctgtctccccggtgtggttgtataaactgttcccacggttgaaaacaacctatccgttatccgctatagtacttcgagaaacctagtatcacctttggattgttgacgcgttgcgctcagcacactaacccgtgtgtagcttgggtcgatgagtctggacataccccactggcgacagtggtccaggctgcgttggcggcctactcatggtgaaaaccatgagacgctagacatgaacaaggtgtgaagagtctattgagctactatagagtcctccggcccctgaatgcggctaatcctaaccatggagcaagtgctcacaggccagtgagttgcttgtcgtaatgcgcaagtccgtggcggaaccgactactttgggtgtccgtgtttcactttttacttttatgactgcttatggtgacaatttgatattgttaccatttagcttgtcaaattaattgcaaaagatcctaaatcttacttaccaacttgcattttgataaccttgatttgaaaattttaata

SEQ ID NO: 20630 - DNA, 644 bp, synthetic construct
  source 1..644: mol_type = other DNA
tctggtacttcggtacctttgtacgcctgttttatctcccttcccattgtaacttagaagttcttaaatcaaggctcaataggtggggcgcaaaccagcgctctcatgagcaagcactcctgtctccccggtgtggttgtataaactgttcccacggttgaaaacaacctatccgttatccgctatagtacttcgagaaacctagtatcacctttggattgttgacgcgttgcgctcagcacactaacccgtgtgtagcttgggtcgatgagtctggacgtaccccactggcgacagtggtccaggctgcgttggcggcctactcatggtgaaaaccatgagacgctagacatgaacaaggtgtgaagagtctattgagctactatagagtcctccggcccctgaatgcggctaatcctaaccatggagcaagtgctcacaagccagtgagttgcttgtcgtaatgcgcaagtctgtggcggaaccgactactttgggtgtccgtgtttcactttttacttttatgactgcttatggtgacaatttgatattgttaccatttagcttgtcaaattaattgcaaaagatcctaaatcttatttaccaacttgcattttgataaccttgatttgaaaattttaata

SEQ ID NO: 20631 - DNA, 702 bp, synthetic construct
  source 1..702: mol_type = other DNA
tgggcgccagcacactggtattacggtacccttgtgcgcctgttttatctacccatcccatgtgtaactaagaagcacatcacaaacggtcaacaggcggctcagtaaaccaactgagtctcgaccaagcacttctgttaccccggactgagtatcaatagactgctaacgcggtcgaaggagaaaacgttcgttacccggccaactacttcgagaaacccagtaccaccatgaaggttgcgcggcgtttcgctccacacaaccccagtgtagatcaggtcgatgagtcaccgcgttccccacgggcgaccgtggcggtggctgcgttggcggcctgcccatggggcaacccatgggacgctacaatactgacatggtgcgaagagtctattgagctagttggtagtcctccggcccctgaatgcggctaatcctaactgcggagcggacacccacacaccagtgggcagtccgtcgtaacgggaaactctgcagcggaaccgactactttgggtgtccgtgtttccttttattctcatactggctgcttatggtgacaattgagaaattgttaccatatagctattggattggccatccggtgactaacagagctattgtctacttatttgttggttacgtaccactcaattttaaagtcttaaataccatcaattttatattatcacttaacacaacaaa

SEQ ID NO: 20632 - DNA, 572 bp, synthetic construct; identical to SEQ ID NO: 621
  source 1..572: mol_type = other DNA

SEQ ID NO: 20633 - DNA, 643 bp, synthetic construct; identical to SEQ ID NO: 775
  source 1..643: mol_type = other DNA

SEQ ID NO: 20634 - DNA, 648 bp, synthetic construct
  source 1..648: mol_type = other DNA
gtactctggtacttcggtacctttgtacgcctgttttatctcccttcccgatgtaatttagaagctcttaaatcaaggctcaataggtggggcgcaacccagcgctctcatgagcaagcacttctgtctccccggtgcggttgtataaactgttcccacggttgaaaacaacctatccgttatccgctatagtacttcgagaaacctagtatcacctttggattgttgacgcgttgcgctcagcacactaacccgtgtgtagcttgggtcgatgagtctggacataccccactggcgacagtggtccaggctgcgttggcggcctactcatggtgaaaaccatgagacgctagacatgaacaaggtgtgaagagtctattgagctactatagagtcctccggcccctgaatgcggctaatcctaaccatggagcaagtgctcacaagccagtgagttgcttgtcgtaatgcgcaagtccgtggcggaaccgactactttgggtgtccgtgtttcactttttacttttatgactgcttatggtgacaatttgatattgttaccatttagcttgtcaaattaattgcaaaagatcctaaatcttacttgccaacttgcattttgacaaccttgatttgaaaattttaata

SEQ ID NO: 20635 - DNA, 619 bp, synthetic construct; identical to SEQ ID NO: 716
  source 1..619: mol_type = other DNA

SEQ ID NO: 20636 - DNA, 642 bp, synthetic construct
  source 1..642: mol_type = other DNA
ctggtacttcggtacctttgtacgcctgttttatctcccttcccaatgtaatttagaagcttttaaatcaaggctcaataggtggggcgcaaaccagcgctctcatgagcaagcactcctgtctccccggtgtggttgtataaactgttcccacggttgaaaacaacctatccgttatccgctatagtacttcgagaaacctagtatcacctttggattgttgacgcgttgcgctcagcacactaacccgtgtgtagcttgggtcgatgagtctggacataccccactggcgacagtggtccaggctgcgttggcggcctactcatggtgaaaaccatgagacgctagacatgaacaaggtgtgaagagtctattgagctactatagagtcctccggcccctgaatgcggctaatcctaaccatggagcaagtgctcacaggccagtgagttgcttgtcgtaatgcgcaagtccgtggcggaaccgactactttgggtgtccgtgtttcactttttacttttatgactgcttatggtgacaatttgatattgttaccatttagctgtcaaattaattgcaaaagatcctaagtcttacttaccaatttgcattttgataaccttgatttgaaaattttaata

SEQ ID NO: 20637 - DNA, 673 bp, synthetic construct
  source 1..673: mol_type = other DNA
ctgtgtgcgcctgttttatccaccctaccctgtcgtaacttagaagttaatcaactatggtcactaggcggctcagtgtgccaactgagtctcgaccaagcacttctgttaccccggactgagtatcaataggctgctcacgcggctgaaggagaaaacgttcgttacccggccaattacttcgagaaacctagtaccaccatgaaggttgcgcagcgtttcgctccgcacaaccccagtgtagatcaggtcgatgagtcaccgcattccccacgggcgaccgtggcggtggctgcgttggcggcctgcccatggggcaacccatgggacgcttcaatactgacatggtgcgaagagtctattgagctaattggtagtcctccggcccctgaatgcggctaatcctaactgcggagcagacactcacaatccagtgagcagtctgtcgtaatgggcaactctgcagcggaaccgactactttgggtgtccgtgtttccttttattcttatactggctgcttatggtgacaattgaaagattgttaccatatagctattggattggccatccagtgactaatagagcgatcatttatttgtttgttggttttgtcccattaaactataaagttttgaacacacttaattttatcatactgcttaactcatcaaa

SEQ ID NO: 20638 - DNA, 578 bp, synthetic construct; identical to SEQ ID NO: 631
  source 1..578: mol_type = other DNA

SEQ ID NO: 20639 - DNA, 593 bp, synthetic construct
  source 1..593: mol_type = other DNA
ccagccacgtctcggtcaagcacttctgtctccccggactgagtatcaataagctgctcacgcggctgaaggagaaaacgtccgttatccggccaattacttcgagaaacctagtaccgccatgaaagttgcgcagcgtttcgatccgcacaaccccagtgtagatcaggtcgatgagtcaccgcgttccccacgggtgaccgtggcggtggctgcgttggcggcctgcccatgggagaacccatgggacgcttcaatactgacatggtgtgaagagtctattgagctaattggtagtcctccggcccctgaatgcggctaatcctaactgcggagcagattcccgcatgccagcgggtggtctgtcgtaacgggcaactctgcagcggaaccgactactttgggtgtccgtgtttccttttgttcctatattggctgcttatggtgacaattgagagattgttaccatatagctattggattggccatccggtgacaaacagagcaattatttaccaatttattggttttgtaccattgaattttaacgcattcaaaactcttaaccttatattggcccttaatacagcaaa

SEQ ID NO: 20640 - DNA, 674 bp, synthetic construct
  source 1..674: mol_type = other DNA
cctttgtgcgcctgttttgcttcccttttcccagaggtaacttagaagcaatactccacgaccaatagcaggcgtggcacaccagccatgtctcggtcaagcacttctgtgaccccggactgagtatcaataaactgctcacgcggtcgaaggagaaaacgtccgttacccggctagctacttcgagaaacctagtaacgccatgaaaattgcgaggtgtttcgctcagcacatccccagtgtagatcaggtcgatgagtcaccgcattccccacaggtaactgtggcggtggctgcgttggcggcctgcccatggggtaactcatgggacgcttcaatacggacatggtgtgaagagtctattgagctagttagtattcctccggcccctgaatgcggctaatcctaactgtggagcatgcgcccccattccagagggtagcatgtcgtaacgggtaactccgcagcggaaccgactactttgggtgtccgtgtttccttttattttatcattggctgcttatggtgacaattgaaagattgttaccatatagctattggattggccatccggtgacgaacagagctataatttaccaatttgtgggatttgttcctataagtttgaaagtcttaaagacccttaatttaatattactactcaatagtgcaag

SEQ ID NO: 20641 - DNA, 714 bp, synthetic construct; identical to SEQ ID NO: 877
  source 1..714: mol_type = other DNA

SEQ ID NO: 20642 - DNA, 708 bp, synthetic construct
  source 1..708: mol_type = other DNA
gcccactgggcgctagcacactggtatcacggtacctttgtgcgcctgtttttcctaccctttcccgaaagaaacttagaagctcaacttgtgtggtcaatagtaagctcagtacgccaactgagccacgaccaagcacttctgttaccccggactgagtatcaataagctgctcacgtggctgaaggagaaaacgttcgttatccgaccaattacttcgagaaacccagtaccaccatgaaagttgcgcggcgtttcgctccgcacaaccccagtgtagatcgggccgatgagtcaccgcgttccccacgggcgaccgtggcggtggctgcgttggcggcctgcccatggagcaatccatgggacgcttcaatactgacatggtgcgaagagtctattgagctaattggtagtcctccggcccctgaatgcggctaatcctaactgcggagcagatacccacaagccagtgggcagtctgtcgtaacgggcaacttcgcagcggaaccgactactttgggtgtccgtgtttccttttattttatactggctgcttatggtgacaattgagagattgttaccatatagctattggattggccatccggtgtccaacagagcgatcatttacttgtttgttggattcgtacccttgtactacaaaacactcgtaacgcttaaatacgttatagacctcaacacagcaaa

SEQ ID NO: 20643 - DNA, 677 bp, synthetic construct
  source 1..677: mol_type = other DNA
tcccactccaagggcccacgtggcggctagtactctggtacttcggtacctttgtacgcctgttttatctcccttcccaatgtaacttagaagttcttaaatcaatgctcaataggtggggcgcaaaccagcgctctcatgagcaagcactcctgtctccccggtgaggttgtataaactgttcccacggttgaaaacaacctatccgttatccgctatagtacttcgagaaacctagtaccacctttggattgttgacgcgttgcgctcagcacactaacccgtgtgtagcttgggtcgatgagtctggacatacctcactggcgacagtggtccaggctgcgttggcggcctactcatggtgaaagccatgagacgctagacatgaacaaggtgtgaagagtctattgagctactatagagtcctccggcccctgaatgcggctaatcctaaccatggagcaagtgctcacaggccagtgagttgcttgtcgtaatgcgcaagtccgtggcggaaccgactactttgggtgtccgtgtttcactttttacttttatgactgcttatggtgacaatttgatattgttaccatttagcttgtcaaatcaattgcaaaagatcctaaatcttatttatcaacttgcatcttgataactttaatttgaaaattctaaca

SEQ ID NO: 20644 - DNA, 730 bp, synthetic construct
  source 1..730: mol_type = other DNA
tgggttgtccccactcacagggcccactgggcgccagcacactggtatcaaggtacctttgtgcgcctgttttatagccccttccccgaatgtaacgtagaagctgaacccaagcggtcaacaggcggctcagaataccatctgggtcttgaccaagcacttctgttaccccggactgagtatcaataagctgctcacgcggctgaaggagaaaatgttcgttatccggccaattacttcgagaaacttagtaccaccatgaaggttgcgcagcgtttcgctccgcacaatcccagtgtagatcaggtcgatgagtcaccgcattcctcacgggcgaccgtggcggtggctgcgctggcggcctgctcatggggcaacccatgagacgcttcaatactgacatggtgcgaagagtcaattgagctagttggtagtcctccggcccctgaatgcggctaatcctaactgtggagcagatgcccacgtaccagtgggtagtctgtcgtaacgggcaactccgcagcggaaccgactactttgggtgtccgtgtttctctttattcttatattggctgcttatggtgacaattgagagattgttaccatatagctattggattggccatccggtgacgaatagagcgattgtatatctttttgttggattcgtaccattaaacaaaacaaattacaaaaccttgtgttacattattagattaaacacagcaaa

SEQ ID NO: 20645 - DNA, 661 bp, synthetic construct
  source 1..661: mol_type = other DNA
ccacgtggcggctagtactctggtacttcggtacctttgtacgcctgttttatctcccttcccaatgtaatttagaagcttttacatcaaggctcaataggtggggcgcaaaccagcgctctcatgagcaagcactcctgtctccccggtgtggttgtataaactgttcccacggttgaaaacaacctatccgttatccgctatagtacttcgagaaacctagtatcacctttggattgttgacgcgttgcgctcagcacactaacccgtgtgtagcttgggtcgatgagtctggacataccccactggcgacagtggtccaggctgcgttggcggcctactcatggtgaaaaccatgagacgctagacatgaacaaggtgtgaagagtctattgagctactatagagtcctccggcccctgaatgcggctaatcctaaccatggagcaagtgctcacaggccagtgagttgcttgtcgtaatgcgcaagtccgtggcggaaccgactactttgggtgtccgtgtttcactttttacttttatgactgcttatggtgacaatttgatattgttaccatttagctgtcaaattaattgcaaaagatcctaagtcttacttaccaatttgcattttgataaccttgatttgaaaattttaata

SEQ ID NO: 20646 - DNA, 691 bp, synthetic construct
  source 1..691: mol_type = other DNA
ggtattacggtacccttgtacgcctgttttatactcccctcccccgtaacttagaagacttcaaaatcaaagttcaataggagggggtacaaaccagtaccaccacgaacaagcacttctgtttccccggtgatgttgtatagactgtctccacggtcgaaaacgactgatccgttatccgctctagtacttcgagaagcccagtaccaccttggaatcttcgatgcgttgcgctcagcactcaatcccagagtgtagcttaggttgatgagtctggacgtccctcaccggcgacggtggtccaggctgcgttggcggcctacctgtggcccaaagccacaggacgctagttgtgaacaaggtgcgaagagcctattgagctactagagattcctccggcccctgaatgcggctaatcccaaccacggagcaggtactcacaacccagtgagcagcctgtcgtaacgcgcaagtctgtggcggaaccgactactttgggtgtccgtgtttccttttatttttatatggctgcttatggtgacaatcattgattgttatcataaagcgaattggattggccatccggtgaaagttagacttatcatttacttgtttgttggattcactcctttgactaaattcacccctgacatcatcttagttgtgatactgattaggagacttcatcata

SEQ ID NO: 20647 - DNA, 633 bp, synthetic construct
  source 1..633: mol_type = other DNA
ggtacctttgtacgcctgttttatctcccttcccaatgtaacttagaagttcttaaatcaatgctcaataggtggggcgcaaaccagcgctctcatgagcaagcactcctgtctccccggtgaggttgtataaactgttcccacggttgaaaacaacctatccgttatccgctatagtacttcgagaaacctagtaccacctttggattgtcgacgcgttgcgctcagcacactaacccgtgtgtagcttgggtcgatgagtctggacatacctcactggcgacagtggtccaggctgcgttggcggcctactcatggtgaaagccatgagacgctagacatgaacaaggtgtgaagagtctattgagctactatagagtcctccggcccctgaatgcggctaatcctaaccatggagcaagtgctcacaggccagtgagttgcttgtcgtaatgcgcaagtccgtggcggaaccgactactttgggtgtccgtgtttcactttttacttttatgactgcttatggtgacaattcaatattgttaccatttagcttgtcaaatcaattgcaaaagatcctaactcttatttatcaacttgcatcttgataactttaatttgaaaattttaaca

SEQ ID NO: 20648 - DNA, 676 bp, synthetic construct
  source 1..676: mol_type = other DNA
tcccactccaagggcccacgtggcggctagtactctggtacttcggtacctttgtacgcctgttttatctcccttcccaacgtaacttagaagctcttaaatcaaggctcaataggtggagtgcaaaccagcactcttatgagcaagtactcctgtttccccggtgcggttatataaactgttcccacggttgaaagtaacctatccgttatccgctatagtacttcgagaaacctagtatcacctttggattgttgacgcgttgcgctcagcacactaacccgtgtgtagcttgggtcgatgagtctggacataccccactggcgacagtggtccaggctgcgttggcggcctactcatggtgaaaaccatgagacgctagacatgaacaaggtgtgaagagtctattgagctactatagagtcctccggcccctgaatgcggctaatcctaaccatggagcaagtgctcacagaccagtgagttgcttgtcgtaatgcgcaagtccgtggcggaaccgactactttgggtgtccgtgtttcactttttacccttatgactgcttatggtgacaatttgatattgttaccatttagcttgtcaaatcaattgcgaaagatcctaaatcttatttgtcaacttgcattttgataactctaatttgaagatttaata

SEQ ID NO: 20649 - DNA, 673 bp, synthetic construct
  source 1..673: mol_type = other DNA
caccctaagggcccacgtggcggctagtactctggtacttcggtacctttgtacgcctgttttatctcccttcccaatgtaacttagaagttctcaaatcaaagctcgataggtggagcgcaaaccagcgctcttatgagcaagcactcctgtctccccggtgcggttgtataaactgttcccacggttgaaaacaacctatccgttatccgctatagtacttcgagaaacctagtatcacctttggattgttgatgcgttgcgctcagcacactaacccgtgtgtagcttgggtcgatgagtctggacataccccactggcgacagtggtccaggctgcgttggcggcctactcatggtgaaaaccatgagacgctaaacatgaacaaggtgtgaagagtctattgagctactatagagtcctccggcccctgaatgcggctaatcttaaccatggagcaagtgctcacaagccagtgggttgcttgtcgtaatgcgcaagtccgtggcggaaccgactactttgggtgtccgtgtttcactttttacttttatgactgcttatggtgacaatttgatattgttaccatttagcttgtcaaatcaattacaaaagacctaaatcttatttatcaacttgctttttgataacttcaatcagaaaatttcaata

SEQ ID NO: 20650 - DNA, 652 bp, synthetic construct
  source 1..652: mol_type = other DNA
gctagtactctggtacttcggtacctttgtacgcctgttttatctcccttcccaatgtaatttagaagctcttaaatcaaggctcaataggtggggcgcaaaccagcgctctcatgagcaagcactcctgtctccccggtgtggttgtataaactgttcccacggttgaaaacaacctatccgttatccgctatagtacttcgagaaacctagtatcacctttggattgttgacgcgttgcgctcagcacactaacccgtgtgtagcttgggtcgatgagtctggacataccccactggcgacagtggtccaggctgcgttggcggcctactcatggtgaaaaccatgagacgctagacatgaacaaggtgtgaagagtctattgagctactatagagtcctccggcccctgaatgcggctaatcctaaccatggagcaagtgctcacaggccagtgagttgcttgtcgtaatgcgcaagtccgtggcggaaccgactactttgggtgtccgtgtttcactttttacttttatgactgcttatggtgacaatttgatattgttaccatttagcttgtcaaattaattgcaaaagatcctaaatcttacttaccaacttgcattttgataaccttgatttgaaaattttaata

SEQ ID NO: 20651 - DNA, 720 bp, synthetic construct
  source 1..720: mol_type = other DNA
cgctagtaccttttcacgcctgttttataccccttccccaaatgtaactttagaagcataaataaacaaagaccaataggaatccaacatccagttggattgcggtcaagcacttctgtctccccggacctagtagtgataggctgtacccacggccgaagatgaacccgtccgttatccggccagctacttcgagaagcctagtaacatcaaagatctgtcttggcgtttcgctcagcgcgtttcccccgcgtagatcgggctgatgggtctccgcataccccacgggcgaccgtggcggaggccgcgtggcggcccgcctatggcgaaagccataggacgccatttcagtgacagggtgtgaagagcctattgagctagttggtagtcctccggcccctgaatgcggctaatcctaaccacggagcactcgccaacgaaccagttggtagggtgtcgtaacgggcaactctgtggcggaaccgactactttgggtgtccgtgtttccttttgatcctattttggctgcttatggtgacaacgataagttgttatcataaagcttttgggttggccacctggaaaaagttatcagtgtttgatattgttcggctttcacgcctgccaataaaacaagctttatatttattaatctcattctacccatttgaggatattactgaatttcatttgcaacttttgctcacactatcagcaaa

SEQ ID NO: 20652 - DNA, 698 bp, synthetic construct
  source 1..698: mol_type = other DNA
ttaaaacagccttggggttgttcccactccaagggcccacgtggcggctagtactctggtacttcggtacctttgtacgcctgttttatctcccttcccaatgtaacttagaagttcttaaatcaatgctcaataggtggggcgcaaaccagcgctctcatgagcaagcactcctgtctccccggtgaggttgtataaactgttcccacggttgaaaacaacctatccgttatccgctatagtacttcgagaaacctagtaccacctttggattgttgacgcgttgcgctcagcacactaacccgtgtgtagcttgggtcgatgagtctggacatacctcactggcgacagtggtccaggctgcgttggcggcctactcatggtgaaagccatgagacgctagacatgaacaaggtgtgaagagtctattgagctactatagagtcctccggcccctgaatgcggctaatcctaaccatggagcaagtgctcacaggccagtgagttgcttgtcgtaatgcgcaagtccgtggcggaaccgactactttgggtgtccgtgtttcactttttacttttatgactgcttatggtgacaattttatattgttaccatttagcttgtcaaatcaattgcaaaagatcctaactcttatttatcaacttgcatctcgataactctaatttgaaaattttaaca

SEQ ID NO: 20653 - DNA, 579 bp, synthetic construct; identical to SEQ ID NO: 633
  source 1..579: mol_type = other DNA

SEQ ID NO: 20654 - DNA, 636 bp, synthetic construct; identical to SEQ ID NO: 69
  source 1..636: mol_type = other DNA

SEQ ID NO: 20655 - DNA, 669 bp, synthetic construct
  source 1..669: mol_type = other DNA
cccagggccacgtggcggctagtactctggtacttcggtacctttgtacgcctgttttatctcccttcccaatgtaatttagaagctcttaaatcaaggctcaataggtggggcgcaaaccagcgctctcatgagcaagcactcctgtctccccggtgtggttgcataaactgttcccacggttgaaaacaacctatccgttatccgctatagtacttcgagaaacctagtatcacctttggattgttgacgcgttgcgctcagcacactaacccgtgtgtagcttgggtcgatgagtctggacataccccactggcgacagtggtccaggctgcgttggcggcctactcatggtgaaaaccatgagacgctagacatgaacaaggtgtgaagagtctattgagctactatagagtcctccggcccctgaatgcggctaatcctaaccatggagcaagtgctcacaggccagtgagttgcttgtcgtaatgcgcaagtccgtggcggaaccgactactttgggtgtccgtgtttcactttttacttttatgactgcttatggtgacaatttgatattgttaccatttagcttgtcaaattaattgcaaaagatcctaaatcttacttaccaacttgcattttgataaccttgatttgaaaattttaata

SEQ ID NO: 20656 - DNA, 713 bp, synthetic construct
  source 1..713: mol_type = other DNA
ttcccacctcaagggcccacgtggcggctagtactctggtatctcggtacctttgtacgcctgttttaattccctccccaacgtaacttagaagcttttaaaccaaagctcaataggtggagcgcaaaccagcgctcttatgagcaagcacttctgtctccccggtgtggttgtatagactgtccccacggttgaaaacaacttatccgttaaccgctatagtacttcgagaaacctagtattgccttcggagtgttgatgcgttgcgctcagcacactaacccgtgtgtagcttgggtcgatgagtctggacgtaccccactggcgacagtggtccaggctgcgttggcggcctactcatggtgaaaaccatgagacgctagacatgaacaaggtgtgaagagtctattgagctactatagagtcctccggcccctgaatgcggctaatcctaaccatggagcaagtgctcacaaaccagtgagttacttgtcgtaacgcgcaagtccgtggcggaaccgactactttgggtgtccgtgtttcactttttacttttatgactgctaatggtgacaatttaatattgttaccatttggcttgtcgaattgatcacataagatctatagttttgttcactgatttgctttgaaataatctcacctcaaaacctccagtacataacatttaaagagtttaaacttatttataaca

SEQ ID NO: 20657 - DNA, 702 bp, synthetic construct
  source 1..702: mol_type = other DNA
agccttggggttgttcccaccccaagggcccacgtggcggctagtactctggtatctcggtacctttgtacgcctgttttatctcccttcccaacgcaacttagaagttttcaaatcgaggctcaataggtgaagcgcaaaccagcgctttcatgagcaagcacttctgtctccccggtgcagttgtatagactgtttccacggttgaaaacaacttatccgttatccgctatagtacttcgagaaacctagtatcacctttggattgttgatgcgttgcgctcagcacactaacccgtgtgtagcttgggtcgatgagtctggacgtaccccactggtgacagtggtccaggctgcgttggcggcctactcatggtgaaaaccatgagacgctaaacatgaacaaggtgtgaagagtctattgagctactatagagtcctccggcccctgaatgcggctaatcttaaccatggagcaagtgctcacaagccagtgagttgcttgtcgtaatgcgcaagtccgtggcggaaccgactactttgggtgtccgtgtttcactttttacttttatgactgcttatggtgacaatttaatattgttaccatttagcttgtcagatcaatcacgtgaaatcccaaatctcatttaataacctgtatttggataacttcatttgaaaatcctaaactcgttcgcaaac

SEQ ID NO: 20658 - DNA, 666 bp, synthetic construct
  source 1..666: mol_type = other DNA
gggcccacgtggcggctagtactctggtacttcggtacctttgtacgcctgttttatctcccttcccaatgtaatttagaagctcttaaatcaaggctcaataggtggggcgcaaaccagcgctcttatgagcaagcactcctgtctccccggtgcggttgtataaactgttcccacggttgaaaacgacctatccgttatccgctatagtacttcgagaaacctagtatcacctttggattgttgacgcgttgcgctcagcacactaacccgtgtgtagcttgggtcgatgagtctggacataccccactggcgacagtggtccaggctgcgttggcggcctactcatggtgaaaaccatgggacgctagacatgaacaaggtgtgaagagtctattgagctactatagagtcctccggcccctgaatgcggctaatcctaaccatggagcaagtgctcacaggccagtgagttgcttgtcgtaacgcgcaagtccgtggcggaaccgactactttgggtgtccgtgtttcactttttacttttatgactgcttatggtgacaatttgatattgttaccatttagcttgtcaaattaattgcaaaacatcctaattcttacttaccaacttgcattttgataaccttggtttgaaaattttaata

SEQ ID NO: 20659 - DNA, 636 bp, synthetic construct
  source 1..636: mol_type = other DNA
ccgaagtacctttgtacgcctgttttatctcccttcccaatgtaatttagaagcttctaaatcaaggctcaataggtggggcgcaaaccagcgctctcatgagcaagcactcctgtctccccggtgtggttgtataaactgttcccacggttgaaaacaacctatccgttatccgctatagtacttcgagaaacctagtatcacctttggattgttgacgcgttgcgctcagcacactaacccgtgtgtagcttgggtcgatgagtctggacataccccactggcgacagtggtccaggctgcgttggcggcctactcatggtgaaaaccatgagacgctagacatgaacaaggtgtgaagagtctattgagctactatagagtcctccggcccctgaatgcggctaatcctaaccatggagcaagtgctcacaggccagtgagttgcttgtcgtaatgcgcaagtccgtggcggaaccgactactttgggtgtccgtgtttcactttttacttttatgactgcttatggtgacaatttgatattgttaccatttagctgtcaaattaattgcaaaagatcctaggtcttacttaccaatttgcattttgataaccttgatttgaaaattttaata

SEQ ID NO: 20660 - DNA, 646 bp, synthetic construct
  source 1..646: mol_type = other DNA
ggtacctttgtacgcctgttttatatcccctcccccatgtaaccttagaagcaattcaaacagttcaatagagggggtacaaaccagtaccaccacgaacaagcacttctgtttccccggtgaagccgtatagactgcacccacggttgaaaatggctgatccgttatccgcttaagtacttcgagaagcctagtatcaccttggaatcttcgacgcgttgcgctcagcactctaccccgagtgtagcttaggccgatgagtctgggcataccccaccggcgacggtggcccaggctgcgttggcggcctacccatggctaacgccatgggacgctagttgtgaacaaggtgtgaaaagcctattgagctacttaagagtcctccggcccctgaatgcggctaatcctaaccacggagcaagtgctcacaaaccagtgagtggcttgtcgtaacgcgcaagtctgtggcggaaccgactactttgggtgtccgtgtttccttttatttttatcatggctgcttatggtgacaatctaagattgttatcatatagcatttggattggccatccggtgatttcaaaagcgatacatttgtcctactaccttaccgtgtttatttattcattatatttacacaatcaca

SEQ ID NO: 20661 - DNA, 568 bp, synthetic construct
  source 1..568: mol_type = other DNA
gtttccccggtgaggccgcatagactgttcacacggttgaaagtgtccgatccgttatccgctcatgtacttcgagaagcctagtatcgctctggaatcttcgacgcgttgcgctcagcactcaaccccggagtgtagcttgggccgatgagtctggacagtccccactggcgacagtggtccaggctgcgctggcggcccacctgtggcccaaagccacgggacgctagttgtgaacagggtgtgaagagcctattgagctacatgagagtcctccggcccctgaatgcggctaattctaaccatggagcaggcagctgcaacccagcagccagcctgtcgtaacgcgcaagtccgtggcgaaaccgactactttgggtgtccgtgtttccttttattcttgaatggctgcttatggtgacaatcatagattgttatcataaagcgagttggattggccatccagtgtgaatcagattaattactcccttgtttgttggatccactcccgaaacgttttactccttaacttattgaaattgtttgaagacaggatttcagtgtcaca

SEQ ID NO: 20662 - DNA, 630 bp, synthetic construct
  source 1..630: mol_type = other DNA
ctgttttatatccctccccaatgtaatttagaagctttcaaatcaaagctcaataggtggagcgcaagccagcgcttccgtgagcaagcacttctgtttccccggtgcggttgtatagactgttcccacggttgaaaacgacctatccgttatccgctatagtacttcgagaaacctagtatcacctttggattgttgatgcgttgcgctcaacacactaacccgtgtgtagcttgggtcgatgagtctggacgtaccccactggtgacagtggtccaggctgcgttggcggcctactcatggtgaaaaccatgagacgctagacatgaacaaggtgtgaagagtctattgagctactatagagtcctccggcccctgaatgcggctaatcttaaccatggagcaagtgctcacaaaccagtgagttgcttgtcgtaatgcgcaagtccgtggcggaaccgactactttgggtgtccgtgtttcactttttacttttatgactgcttatggtgacaatttaatattgttaccattcagctagtcgaaataatcacataaaactttaaatcctatctaataattcacatttggatagtttcatttcgaggactttaaacctacttacaaag

SEQ ID NO: 20663 - DNA, 680 bp, synthetic construct
  source 1..680: mol_type = other DNA
aagggcccacgtggcggctagtactctggtacttcggtacctttgtacgcctgttttatctcccttcccaatgtaatttagaagcttttaaatcaaggctcaataggtggggcgcaaaccagcgctctcgtgagcaagcactcctgtctccccggtgtggttgtataaactgttcccacggttgaaaacaacctatccgttatccgctatagtacttcgagaaacctagtatcacctttggattgttgacgcgttgcgctcaacacactaacccgtgtgtagcttgggtcgatgagtctggacataccccactggcgacagtggtccaggctgcgttggcggcctactcatggtgaaaaccatgagacgctagacatgaacaaggtgtgaagagtctattgagctactatagagtcctccggcccctgaatgcggctaatcctaaccatggagcaagtgctcacaggccagtgagttgcttgtcgtaatgcgcaagtccgtggcggaaccgactactttgggtgtccgtgtttcactttttacttttatgactgcttatggtgacaatttgatattgttaccatttagctggtcgaaataatcacataaaactttaaatcctatctaataattcacatttggatagtttcatttcgaggactttaaacctacttacaaag

SEQ ID NO: 20664 - DNA, 567 bp, synthetic construct; identical to SEQ ID NO: 616
  source 1..567: mol_type = other DNA

SEQ ID NO: 20665 - DNA, 653 bp, synthetic construct
  source 1..653: mol_type = other DNA
ggctagtactctggtacttcggtacctttgtacgcctgttttatctcccttcccaatgtaacttagaagttcttaaatcaatgctcaataggtggggcgcaaaccagcgctctcatgagcaagcactcctgtctccccggtgaggttgtataaactgttcccacggttgaaaataacctatccgttatccgctatagtacttcgagaaacctagtaccacctttggattgttgacgcgttgcgctcagcacactaacccgtgtgtagcttgggtcgatgagtctggacatacctcactggcgacagtggtccaggctgcgttggcggcctactcatggtgaaagccatgagacgctagacatgaacaaggtgtgaagagtctattgagctactatagagtcctccggcccctgaatgcggctaatcctaaccatggagcaagtgctcacaggccagtgagttgcttgtcgtaatgcgcaagtccgtggcggaaccgactactttgggtgtccgtgtttcactttttacttttatgactgcttatggtgacaatttgatattgttaccatttagcttgtcaaatcaattgcaaaagatcctaaatcttatttatcaacttgcatcttgataactttaatttgaaaattttaaca

SEQ ID NO: 20666 - DNA, 677 bp, synthetic construct
  source 1..677: mol_type = other DNA
tcccactccaagggcccacgtggcggctagtactctggtacttcggtacctttgtacgcctgttttatctcccttcccaatgtaacttagaagttcttaaatcaatgctcaataggtggggcgcaaaccagcgttctcatgagcaagcactcctgtctccccggtgaggttgcataaactgttcccacggttgaaaacgacctatccgttatccgctatagtacttcgagaaacctagtaccacctttggattgttgacgcgttgcgctcagcacattaacccgtgtgtagcttgggtcgatgagtctggacatacctcactggcgacagtggtccaggctgcgttggcggcctactcatggcgaaagccatgagacgctagacatgaacaaggtgtgaagagtctattgagctactatagagtcctccggcccctgaatgcggctaatcctaaccatggagcaagtgctcacaggccagtgagttgcttgtcgtaatgtgcaagtccgtggcggaaccgactactttgggtgtccgtgtttcactttttacttttatgactgcttatggtgacaatttgatattgttaccatttagcttgtcaaatcaattgcaaaagatcctaaatcttatttatcaacttgcatcttgataactttaatttgaaaattttaaca

SEQ ID NO: 20667 - DNA, 687 bp, synthetic construct
  source 1..687: mol_type = other DNA
tctgggtgtccccactccaacgagcccacgtggcggctagtactctggtacttcggtacctttgtacgcctgttttatctcccttcccaatgtaatttagaagctcttaaatcaaggctcaataggtggggcgcaaaccagcgctctcatgagcaagcactcctgtctccccggtgtggttgtataaactgttcccacggttgaaaacaacctatccgttatccgctatagtacttcgagaaacctagtatcacctttggattgttgacgcgttgcgctcagcacactaacccgtgtgtagcttgggtcgatgagtctggacataccccactggcgacagtggtccaggctgcgttggcggcctactcatggtgaaaaccatgagacgctagacatgaacaaggtgtgaagagtctattgagctactatagagtcctccggcccctgaatgcggctaatcctaaccatggagcaagtgctcacaggccagtgagttgcttgtcgtaatgcgcaagtccgtggcggaaccgactactttgggtgtccgtgtttcactttttacttttatgactgcttatggtgacaatttgatattgttaccatttagcttgtcaaattaattgcaaaagatcctaaatcttacttaccaacttgcatcttgataaccttgatttgaaaattttaata

SEQ ID NO: 20668 - DNA, 618 bp, synthetic construct
  source 1..618: mol_type = other DNA
ctgttttatctcccttcccaatgtaatttagaagcttttaaatcaaggctcaataggtggggcgcaaaccagcgctctcatgagcaagcactcctgtctccccggtgtggttgtataaactgttcccacggttaaaaacaacctatccgttatccgctatagtacttcgagaaacctagtatcacctttggattgttgacgcgttgcgctcagcacactaacccgtgtgtagcttgggtcgatgagtctggacataccccactggcgacagtggtccaggctgcgttggcggcctactcatggtgaaaaccatgagacgctagacatgaacaaggtgtgaagagtctattgagctactatagagtcctccggcccctgaatgcggctaatcctaaccatggagcaagtgctcacaggccagtgagttgcttgtcgtaatgcgcaagtccgtggtggaaccgactactttgggtgtccgtgtttcacttttttacttttatgactgcttatggtgacaatttgatattgttaccatttagctgtcaaattgattgcaaaagatcctaagtcttacttaccaatttgcattttgataaccttgatttgaaaattttaata

SEQ ID NO: 20669 - DNA, 577 bp, synthetic construct
  source 1..577: mol_type = other DNA
caagcacttctgtatccccggactgagtatcagtaggctgctcgcgcggctgaaggagaaaacgttcgttacccggccacttacttcgagaaacctagtaacgccatgaaagttgcgcagcgtttcgatccgcacaaccccagtgtagatcaggtcgatgagtcaccgcgttccccacgggcgaccgtggcggtggctgcgttggcggcctgcccatgggagaacccatgggacgcttcaatactgacatggtgtgaagagtctattgagctaattggtagtcctccggcccctgaatgcggctaatcctaactgtggagcagattcccgcatgccagcgggtggtctgtcgtaacgggcaactctgcagcggaaccgactactttgggtgtccgtgtttccttttattcctatattggctgcttatggtgacaattgagagattgttaccatatagctattggattggccatccggtgacaaacagagcgattatctaccaatttattggttttgtaccattgaatttcaacgcattcaaaactcttaactttattttgactcttaatacagcaaa

SEQ ID NO: 20670 - DNA, 709 bp, synthetic construct
  source 1..709: mol_type = other DNA
ttaaaacagccttggggttgttcccaccccaagggcccacgtggcggctagtactctggtatttcggtacctttgtacgcctgttttatctcccttcccaacgcaacttagaagttttcaaatcgaggctcaataggtgaagcgcaaaccagcgctttcatgagcaagcacttctgtctccccggtgcagttgtatagactgtttccacggttgaaaacaacttatccgttatccgctatagtacttcgagaaacctagtatcacctttggattgttgatgcgttgcgctcagcacactaacccgtgtgtagcttgggtcgatgagtctggacgtaccccactggtgacagtggtccaggctgcgttggcggcctactcatggtgaaaaccatgagacgctaaacatgaacaaggtgtgaagagtctattgagctactatagagtcctccggcccctgaatgcggctaatcttaaccatggagcaagtgctcacaagccagtgagttgcttgtcgtaatgcgcaagtccgtggcagaaccgactactttgggtgtccgtgtttcactttttacttttatgactgcttatggtgacaatttaatattgttaccatttagcttgtcagatcaatcacgtgaaatcccaaatcttatttaataacctgtatttggataacttcatttgaaaattctaaactcgttcgcaaac

SEQ ID NO: 20671 - DNA, 571 bp, synthetic construct
  source 1..571: mol_type = other DNA
cttctgtttccccggactgagtatcaataagctgctcgcgcggctgaaggagaaaacgttcgtcacccggccaattacttcgagaaacctagtaccaccatggaggttgcgcagcgtttcgctccacacaaccccagtgtagatcaggtcgatgagtcaccgcactcctcacgggcgaccgtggcggtggctgcgttggcggcctgcccatggggcaacccatgggacgcttcaatactgacatggtgcgaagagtctattgagctaattggtagtcctccggcccctgaatgcggctaatcctaactgcggagcagatacccacatgccagtgggcagtctgtcgtaatgggtaactctgcagcggaaccgactactttgggtgtccgtgtttccttttattcctacattggctgcttatggtgacaattgagagattgttaccatatagctattggattggccatccagtgacaaacagagcaattgtttatctatttgttggtttcatatcactgaatttcaaagtgttaaaaacccttaacctgatcatactacttaattcagcaaa

SEQ ID NO: 20672 - DNA, 533 bp, synthetic construct
  source 1..533: mol_type = other DNA
ctaaaatttcctacccaagtaacgttagaagttttatcaataagtacaataggaagcatcacatccagtggtgttttgtacaagcacttctgtttccccggagcgaggtataggctgtacccactgccaaaagcctttaaccgttatccgccaaccaactacgtaaaagctagtatcatcatgtttctgactaggcgttcgatcaggtggactccccctccactagtttggtcgatgaggctaggaaatccccacgggcgaccgtgtcctagcctgcgtggcggccaacccagcttttgctgggacgccttttcatagacatggtgtgaagactcgcatgtgcttggttgtgattcctccggcccctgaatgcggctaaccctaaccctggagccctgtgttacaatccagtaacattagggtcgtaatgagtaattccgggacgggaccgactactttgggtgtccgtgtttctcatttttcttattattgtcttatggtcacagcatatatataacatatatactgtgatc

SEQ ID NO: 20673 - DNA, 714 bp, synthetic construct; identical to SEQ ID NO: 878
  source 1..714: mol_type = other DNA

SEQ ID NO: 20674 - DNA, 580 bp, synthetic construct
  source 1..580: mol_type = other DNA
tggtcaagcacttctgtttcccggaccgagtatcaataagctactcacgtggctgaaggagaaaacgttcgttacccgaccaactacttcgagaaacctagtaccaccatgaatgttgcgcggcgtttcgctccgcactaccccagtgtagatcaggtcgatgagtcaccgcatccctcacgggcgaccgtggcggtggctgcgctggcggcctgcccatgggacaacccatgggacgcttcaacacagacatggtgtgaagagtctattgagctagttggtagtcctccggcccctgaatgcggctaatcctaactgcggagcagatccccacaagccagtgggcagtctgtcgtaatgggcaactctgcagcggaaccgactactttgggtgtccgtgtttccttttattctcatactggctgcttatggtgacaattgaaggattgttaccatatagctattggattggccatccggtgtctaacagagcaataatttatctttttgttggattcgtcccacttaactacagagcacttgcaacgctcaattacatcatagatctcaacctaacaaa

SEQ ID NO: 20675 - DNA, 553 bp, synthetic construct
  source 1..553: mol_type = other DNA
gactgttcccacggttgaaagcgtccgatccgttatccgctcatgtacttcgagaagcctagtatcgctctggaatcttcgacgcgttgcactcagcactcaaccccggagtgtagcttgggccgatgagtctggacagtccccactggcgacagtggtccaggctgcgctggcggcccacctgtggcctaaagccacgggacgctagtagtgaacagggtgtgaagagcctattgagctacatgagagtcctccggcccctgaatgcggctaatcctaaccatggagcaggcagctgcaacccagcagccagcctgtcgtaacgcgcaagtccgtggcggaaccgactactttgggtgtccgtgtttccttttattcttgaatggctgcttatggtgacaatcatagattgttatcataaagcgagttggattggccatccagtgtgaatcagattaattactcccttgtttgttggatccaatcccgaaacgttaaacgttttactctttaacttattgaaattgtttgaagacaggatttcagtgtcaca

SEQ ID NO: 20676 - DNA, 576 bp, synthetic construct; identical to SEQ ID NO: 628
  source 1..576: mol_type = other DNA

SEQ ID NO: 20677 - DNA, 654 bp, synthetic construct
  source 1..654: mol_type = other DNA
cggctagtactctggtacttcggtacctttgtacgcctgttttatctcccttcccaatgtaatttagaagctcttaaatcaaggctcaataggtggggcgcaaaccagcgctctcatgagcaagcactcctgtctccccggtgtggttgtataaactgttcccacggttgaaaacaacctatccgttatccgctatagtacttcgagaaacctagtatcacctttggattgttgacgcgttgcgctcagcacactaacccgtgtgtagcttgggtcgatgagtctggacataccccactggcgacagtggtccaggctgcgttggcggcctactcatggtgaaaaccatgagacgctagacatgaacaaggtgtgaagagtctattgagctactatagagtcctccggcccctgaatgcggctaatcctaaccatggagcaagtgctcacaggccagtgagttgcttgtcgtaatgcgtaagtccgtggcggaaccgactactttgggtgtccgtgtttcactttttacttttatgactgcttatggtgacaatttgatattgttaccatttagcttgtcaaattaattgcaaaagatcctaaatcttacttaccaacttgcattttgacaactttgatttgaaaattttaata

SEQ ID NO: 20678 - DNA, 707 bp, synthetic construct
  source 1..707: mol_type = other DNA
gcggccagtactccggtattacggtacccttgtacgcctgttttatactcccttccccgtaacttagaagacttcaaagaaatccaagttcaataggagggggtacaaaccagtaccaccacgaacaagcacttctgttcccccggtgaagttgtatagactgtacccacggttgaaaacgactgatccgttatccgctctaatacttcgagaagcttagtatcatcttggaatcttcgatgcgttgcgctcagcactcaaccctggagtgtagcttaggtcgatgagtctggacgttcctcaccggtgacggtggtccaggctgcgttggcggcctacctgtggcccaaagccacaggacgctagttgtgaacaaggtgtgaagagcctattgagctattagagattcctccggcccctgaatgcggctaatcccaaccacggagcaggcgcttacaaaccagtaagtagcttgtcgtaacgcgaaagtctgtggcggaaccgactactttgggtgtccgtgtttccttttatttttaaatggctgcttatggtgacaatcattgattgttatcataaagcgagttggattggccatccggtgaaagtgagactcatcatatatctatttgttggatttactcctttgactaagtatactctcaacattatattcattgtaatattaattagaagatactatcata

SEQ ID NO: 20679 - DNA, 713 bp, synthetic construct; identical to SEQ ID NO: 874
  source 1..713: mol_type = other DNA

SEQ ID NO: 20680 - DNA, 617 bp, synthetic construct
  source 1..617: mol_type = other DNA
ctgttttatctcccttcccaatgtaatttagaagcttttaaatcaaggctcaataggtggggcgcaaaccagcactctcatgagcaagcactcctgtctccccggtgtggttgtataaactgttcccacggttgaaaacaacctatccgttatccgctatagtacttcgagaaacctagtatcacctttggattgttgacgcgttgcgctcagcacactaacccgtgtgtagcttgggtcgatgagtctggacataccccactggcgacagtggtccaggctgcgttggcggcctactcatggtgaaaaccatgagacgctagacatgaacaaggtgtgaagagtctattgagctactatagagtcctccggcccctgaatgcggctaatcctaaccatggagcaagtgctcacaggccagtgagttgcttgtcgtaatgcgcaagtccgtggcggaaccgactactttgggtgtccgtgtttcactttttacttttatgactgcttatggtgacaatttgatattgttaccatttagctgtcaaattaattgcaaaagatcctaagtcttacttaccaatttgcattttgataaccttgatttgaaaattttaata

SEQ ID NO: 20681 - DNA, 655 bp, synthetic construct
  source 1..655: mol_type = other DNA
acaccctcccccgagtgcaacttagaagatatccacacacggtcaataggcggctcagtatgccaactgagtcatgaccaagcacttctgttcccccggactgagtatcaataagctgcttacgtggctgaaggagaaaacgttcgttatccggccaattacttcgagaagcttagtaccaccatggaggttgcgcagtgtttcgttccgcacaaccccagtgtagatcaggtcgatgagtcaccgcactcctcacgggcgaccgtggcggtggctgcgctggcggcctgcccctggggcaacccctgggacgctccaatactgacatggtgcgaagagcctattgagctaattggtagtcctccggcccctgaatgcggctaatcctaactgcggagcagacacccacaagccagtgggcagtctgtcgtagtgggtaactctgcagcggaaccgactactttgggtgtccgtgtttccttttattcctacattggctgcttatggtgacaattgagagattgttaccatatagctattggattggccgtccagtgacaaacagagcgattatctatctatttgttggcttcgtaccattaaaccttagagtcctaaagaccctcaatttgattatacaatttaactctgtgaa

SEQ ID NO: 20682 - DNA, 571 bp, synthetic construct
  source 1..571: mol_type = other DNA
cttctgtttccccggactgagtatcaataagctgctcgcgcggctgaaagagaaaatgttcgttatccggccaattacttcgagaaacccagtatcaccatggaggttgcgcagcgtttcgctccgcacgaccccagtgtagatcaggccgatgagtcaccgcattcctcacgggcgaccgtggcggtggctgcgttggcggcctgcccatggggcaacccatgggacgcttcaatactgacatggtgtgaagagtctattgagctaattggtagtcctccggcccctgaatgcggctaatcccaactgcggagcagatactcacatgccagtgagcagtctgtcgtaacgggcaactctgcagcggaaccgactactttgggtgtccgtgtttccttttattcttatattggctgcttatggtgacaattgagagattgttaccatatagctattggattggccatccagtgacaaacagggcaatagtttatctatttgttggttttataccactgaatttcaaggttttaaaaacccttaacttggtcttactactcaattcagtaag

SEQ ID NO: 20683 - DNA, 619 bp, synthetic construct
  source 1..619: mol_type = other DNA
ttaaaacagcggatgggttccccaccatccgacccactgggtgtagtactctggtactttgtacctttgtacgcctgtttctcccctccctcccaacctatacaatcccagtaacttagaagttttgaactgttgtacaataggtatcgtcacatccagtggcggttggtacaagcacttctgtttccccggagcggagtatagatggccaccgctgtcaaaagctcttaaccgttatccgccaattaactacgcaacggctagtaacatcatgccgcctttggggcgttcgatcaggtgagtgcacccctcactagtctggtcgatgaggctgagaattccccacgggtgaccgtgtctcagcctgcgtggcggccagcccagcctatgctgggacgccttaattgtgacatggtgtgaagacccacgtgtgcttaattgtgagtcctccggcccctgaatgcggctaacctaaaccctggagccttgtgacacaatccagtgttggcaaggtcgtaatgagtaattctgggacgggaccgactactttgggtgtccgtgtttccttttatttttaaattgttcttatggtcacaatataagcatatatattgtgatc

SEQ ID NO: 20684 - DNA, 721 bp, synthetic construct
  source 1..721: mol_type = other DNA
cccacccacggggcctactgggcgccagcacactggtatcacggtacctttgtgcgcctgttttataacccctcccccgatcgtaacgtagaagctgaacctaagcggtcaataggcggctcagaacaccatctgggtcttgaccaagcacttctgttaccccggactgagtatcaataagctgcttacgcggctgaaggagaaaacgtccgttacccggccaattacttcaagaaacccagtaccaccatgaaggttgcgcagcgtttcgctccgcacaaccccagtgtagatcaggtcgatgagtcaccgcattcctcacgggcgaccgtggcggtggctgcgttggcggcctgcccatggggtaacccatgggacgcttcaatactgacatggtgcgaagagtctattgagctaagtggtagtcctccggcccctgaatgcggctaatcctaactgcggagcagacgcccaagctccagtgggtagtctgtcgtaacgggtaactctgcagcggaaccgactactttgggtgtccgtgtttccttttattcttacattggctgcttatggtgacaattgagagattgttaccatatagctattggattggccatccggtgacaaatagagcaattatatatctttttgttggattcataccactcgacaaaacaaatttcagaaccttgtgttatattattagattaaatacagcaaa

SEQ ID NO: 20685 - DNA, 600 bp, synthetic construct; identical to SEQ ID NO: 651
  source 1..600: mol_type = other DNA

SEQ ID NO: 20686 - DNA, 716 bp, synthetic construct
  source 1..716: mol_type = other DNA
tacctttgtacgcctgttttatactcccttcccctacatgtaaccttagaagtataaataaacaaagaccaataggagtccaacatccagttggatcgcggtcaagtacttctgtttccccggacctagtagtgataggctgtacccacggccgaagatgaacccgtccgttatccggccagctacttcgagaagcctagtaacatcaaagatctgtcttggcgtttcgctcagcgcgttccccccgcgtagatcgggctgatgggtctccgcataccccacgggcgaccgtggcggaggccgcgtggcggcccgcctatggcgaaagccataggacgccatttcagtgacagggtgtgaagagcctattgagctagttggtagtcctccggcccctgaatgcggctaatcctaaccacggagcgttcaccagcaaaccagctgggagggcgtcgtaatgggcaactctgtggcggaaccgactactttgggtgtccgtgtttccttttgatcctatattggctgcttatggtgacaacgataagttgttatcataaagcttttgggttggccacctggaaaaagttatcagtgtttgatattgttcggctttcacgcctaccaataaaacaagctttatattatttaatctccttttacccaaagggagagatttctgaatttcatatccagttgctcctaacactatcagcaaa

SEQ ID NO: 20687 - DNA, 597 bp, synthetic construct
  source 1..597: mol_type = other DNA
atgtaatttagaagcttttaaatcaaggctcaataggtggggcgcaaaccagcgctctcatgagcaagcactcctgtctccccggtgtggttgtataaactgttcccacggttgaaaacaacctatccgttatccgctatagtacttcgagaaacctagtatcacctttggattgttgacgcgttgcgctcagcacactaacccgtgtgtagcttgggtcgatgagtctggacataccccactggcgacagtggtccaggctgcgttggcggcctactcatggtgaaaaccatgagacgctagacatgaacaaggtgtgaagagtctattgagctactatagagtcctccggcccctgaatgcggctaatcctaaccatggagcaagtgctcacaggccagtgagttgcttgtcgtaatgcgcaagtccgtggcggaaccgactactttgggtgtccgtgtttcactttttacttttatgactgctcatggtgacaatttgatattgttaccatttagctgtcaaattaattgcaaaagatcctaagtcttacttaccaatttgcattttgataaccttgatttgaaaattttaata

SEQ ID NO: 20688 - DNA, 710 bp, synthetic construct
  source 1..710: mol_type = other DNA
ttaaaacagccttggggttgttcccaccccaagggcccacgtggcggctagtactctggtatttcggtacctttgtacgcctgttttatatccctccccaatgtaatttagaagctttcaaatcaaagctcaataggtggagcgcaagccagtgcttccgtgagcaagcacttctgtttccccggtgcggttgtatagactgttcccacggttgaaaacgacctatccgttatccgctatagtacttcgagaaacctagtatcacctttggattgttgatgcgttgcgctcaacacactaacccgtgtgtagcttgggtcgatgagtctggacgtaccccactggtgacagtggtccaggctgcgttggcggcctactcatggtgaaaaccatgagacgctagacatgaacaaggtgtgaagagtctattgagctactatagagtcctccggcccctgaatgcggctaatcttaaccatggagcaagtgctcacaaaccagtgagttgcttgtcgtaatgcgcaagtccgtggcggaaccgactactttgggtgtccgtgtttcactttttacttttatgactgcttatggtgacaatttaatattgttaccattcagctagtcgaaataatcacataaaactttaaatcctatctaataattcacatttggatagttttatttcgaggactttaaacctacttacaaag

SEQ ID NO: 20689 - DNA, 710 bp, synthetic construct
  source 1..710: mol_type = other DNA
ttaaaacagccttggggttgttcccaccccaagggcccacgtggcggctagtactctggtatttcggtacctttgtacgcctgttttatctccctccccaatgtaacttagaagctttcaaatcaaagctcaataggtggagcgcaagccagcgcttccgtgagcaagtacttctgtttccccggtgcggttgtatagactgttcccacggttaaaaacaacctatccgttatccgctatagtacttcgagaaacctagtatcacctttggattgttgatgcgttgcgctcaacacactaacccgtgtgtagcttgggtcgatgagtctggacataccccactggtgacagtggtccaggctgcgttggcggcctactcatggtgaaaaccatgagacgctagacatgaacaaggtgtgaagagtctattgagctactatagagtcctccggcccctgaatgcggctaatcttaaccatggagcaagtgctcacaaaccagtgagttgcttgtcgtaatgcgcaagtccgtggcggaaccgactactttgggtgtccgtgtttcactttttacttttatgactgcttatggtgacaatttaatattgttaccattcagctagtcgaaataatcgcataaaactttaaatcctatctaacagttcacatttggatagttttattttaaggactttaaacctacctagaaag

SEQ ID NO: 20690 - DNA, 653 bp, synthetic construct
  source 1..653: mol_type = other DNA
ggtaaccttgtacgcctgttttataatccccttcccccgtaacagtagaagcacaaaagcaaccgctcaatagatgccatacctccagtgtggttatgagcaagcacttctgtctccccggttgcgccctatatgctgtgcgaacggcaaaaaggggcaatatcgttacccgcttgactactacgggaaacctagtattatcttcgattgatttgagagttgcgttcagcgcccaacccccggcgtagctcaggctgatgaggctccgaacaccccacaggcgactgtgtcagagcctgcgttggcggcctgcccataccctgcggtatgggacgctcacttcatgacatggtatgaagagtctactgtgctagtcaagattcctccggcccctgaatgtggataatcctaaccactgatcctacgttcgcaatccagcgtttggtaggtcgtaatgcgcaagtcggtggcggaaccaactactttgggtgtccgtgtttcccttacttcctactgaatgcttatggtgacaattgttttgatcagttgttgccattacttgcgttcagtgtgtaattacaaaaacaagatcatcagttgttactatccctcacgttcagtgcgcaattacaaaaacaagattttctgtcata

SEQ ID NO: 20691 - DNA, 664 bp, synthetic construct
  source 1..664: mol_type = other DNA
ggcccacgtggcggctagtactctggtacttcggtacctttgtacgcctgttttatctcccttcccaatgtaatttagaagcttctaaatcaaggctcaataggtggggcgcaaaccagcgctctcatgagcaagcactcctgtctccccggtgtggttgtataaactgttcccacggttgaaaacaacctatccgttatccgctatagtacttcgagaaacctagtatcacctttggattgttgacgcgttgcgctcagcacactaacccgtgtgtagcttgggtcgatgagtctggacataccccactggcgacagtggtccaggctgcgttggcggcctactcatggtgaaaaccatgagacgctagacatgaacaaggtgtgaagagtctattgagctactatagagtcctccggcccctgaatgcggctaatcctaaccatggagcaagtgctcacaggccagtgagttgcttgtcgtaatgcgcaagtccgtggcggaaccgactactttgggtgtccgtgtttcactttttacttttatgactgcttatggtgacaatttgatattgttaccatttagctgtcaaattaattgcaaaagatcctaggtcttacttaccaatttgcattttgataaccttgatttgaaaattttaata

SEQ ID NO: 20692 - DNA, 597 bp, synthetic construct
  source 1..597: mol_type = other DNA
atgtaatttagaagcttttaaatcaaggctcaataggtggggcgcaaaccagcgctctcatgagcaagcactcctgtctccccggtgtggttgtataaactgttcccacggttgaaaacaacctatccgttatccgctatagtacttcgagaaacctagtatcacctttggattgttgatgcgttgcgctcatcacactaacccgtgtgtagcttgggtcgatgagtctggacataccccactggcgacagtggtccaggctgcgttggcggcctactcatggtgaaaaccatgagacgctagacatgaacaaggtgtgaagagtctattgagctactatagagtcctccggcccctgaatgcggctaatcctaaccatggagcaagtgctcacaggccagtgagttgcttgtcgtaatgcgcaagtccgtggcggaaccgactactttgggtgtccgtgtttcactttttacttttatgactgcttatggtgacaatttgatattgttaccatttagctgtcaaactaattgcaaaagatcctaagtcttacttaccaatttgcattttgataaccttgatttgaaaattttaata

SEQ ID NO: 20693 - DNA, 593 bp, synthetic construct
  source 1..593: mol_type = other DNA
ctacctgggtctcgaccaagcacttctgttgccccggactgagtatcaataggctgctcacgcggctgaaggagaaaacgttcgttacccggccaattacttcgagaaacttagtaccaccatgaaggttgcgcggcgtttcgctccacacaaccccagtgtagatcaggtcgatgagtcaccgcgttccccacgggcgaccgtggcggtggctgcgtcggcggcctgcccatgggtcaacccatgggacgcttcaatactgacatggtgtgaagagtctattgagctaattggtattcctccggcccctgaatgcggctaatcctaactgcggagcagatacccacatgccagtgggcagtctgtcgtaacgggcaactctgcagcggaaccgactactttgggtgtccgtgtttccttttatccttatactggctgcttatggtgacaattgagagattgttaccatatagctattggattggccatccggtgacaagcagagcaattatttatttgtttgttggcttcgtgccattaaatagtaaagctctaacaaccctcaacctcatcttgttacttaatagtgcaaa

SEQ ID NO: 20694 - DNA, 652 bp, synthetic construct
  source 1..652: mol_type = other DNA
aagaccaataggagtccaacatccagttggattacggtcaagcacttctgtctccccggacctagtagtgataggctgtacccacggccgaagatgaacccgtccgttatccggccagctacttcgagaagcctagtaacatcaaagatctgtcttggcgtttcgctcagcgcgttccccccgcgtagatcgggctgatgggtctccgcataccccacgggcgaccgtggcggaggccgcgtggcggcccgcctatggcgaaagccataggacgccatttcagtgacagggtgtgaagagcctattgagctagttggtagtcctccggcccctgaatgcggctaatcctaaccacggagcatccaccagcaaaccagctgggagggtgtcgtaacgggtaactctgtggcggaaccgactactttgggtgtccgtgtttccttttgatcctattttggctgcttatggtgacaacgataagttgttatcataaagcttttgggttggccacctggaaaaagatatcagtgtttgatattgttcggctttcgcgcctaccaataagacaagccttatactttttaatttccttttatccaaaggaagaaatttctgagtttcatctacagttgctcctaacattatcatcaag

SEQ ID NO: 20695 - DNA, 642 bp, synthetic construct
  source 1..642: mol_type = other DNA
atgtaacgtagaagctacgctcaaacggtcaacagatagtccagtaatccagctgggccacgaccaagcacttctgtttccccggacagagtaccaataagctgctcgcgcggctgaaggggaaaacgttcgttacccggccaattacttcgagaaacctagtaccgccatggacgttgcgcagcgtttcgctccacacaaccccagtgtagatcaggtcgatgagccaccgcattccccacgggcgaccgtggcggtggctgcgttggcggcctgcccatggggtaacccatgggacgcttcaatacagacatggtgcgaagagtctattgagctaattggtagtcctccggcccctgaatgcggctaatcctaactgcggagcaggtacccacaacccagtgggtcacctgtcgtaatgggcaactctgcagcggaaccgactactttgggtgtccgtgtttccttttaacctttacactggctgcttatggtgacaattgaaagattgttaccatatagctattggattggccatcctgtgagtaatagagcgattgtatacttatttgttggctttataccactcaatttgaaagctttacagacactgaattatattgtggcattaaacacagcaaa

SEQ ID NO: 20696 - DNA, 622 bp, synthetic construct
  source 1..622: mol_type = other DNA
ttaaaacagctgatgggttccccaccatccgacccaatgggtgtagtactctggtattctgtacctttgtacgcctgtttctccccacccccccgtcctaaataatcccagtaacttagaagatttgaattatcgtacaataggtgctgtcacatccagtgatggctagtacaagcacttctgtttccccggagcggagtatagatggccaccgctgtcaaaagctcttaaccgttatccgccaattaactacgcaacggttagtaacatcttgtcatttttgaggcgttcgatcaggtgagtacacccctcactagtctggtcgatgaggctgagaattccccacgggcgaccgtgtctcagcctgcgtggcggccagcccagcttatgctgggacgccttaattgtgacatggtgcgaagacccacgtgtgcttaattgtgagtcctccggcccccgaatgcggctaacctaaaccccggagccttgagacacaatccagtgttagcaaggtcgtaacgagcaattctgggacgggaccgactactttgggtgtccgtgtttcctgttattctcaaattgttcttatggtcacaatataagtaatatatatattgtgatc

SEQ ID NO: 20697 - DNA, 620 bp, synthetic construct
  source 1..620: mol_type = other DNA
ttaaaacagcggatgggtttcccaccatccgacccactgggtgtagtactctggtacattgtacctttgtacgcctgtttctcccctccctcccaacctatacaatcccggcaacttagaagatttgaactattgtacaataggcgctgtcacatccagtggcggctagtacaagcacttctgtttccccggagcggagtatagatggccaccgctgtcaaaagctcttaaccgttatccgccaattaactacgcaacggctagtaatatcatgtaacttttagggtgttcgatcaggtgagtgtacccctcactagtctggtcgatgaggctgagaattccccacgggcgaccgtgtctcagcctgcgtggcggccagcccagcttatgctgggacgccttaattgtgacatggtgtgaagacccacgtgtgcttaattgtgagtcctccggcccctgaatgcggctaacctaaaccctggagccttgaaacacaatccagtgttagcaaggtcgtaatgagtaattccgggacgggaccgactactttgggtgtccgtgtttccttttatttttaagttgttcttatggtcacaatataagtaatatatattgtgatc

SEQ ID NO: 20698 - DNA, 614 bp, synthetic construct
  source 1..614: mol_type = other DNA
atgggtttcccaccatccgacccactgggtgtagtgctctggtattttgtacccttgcacgcctgtttcccatttgtacccttccttaatttcctacccctgtaacattagaagttttggaattttacggtacaataggaagcgccacatccagtggtgttgtgtacaagcacttctgtttacccggagcgaggtataggttgtacccacggccaaaaaccttcaaccgttatccgccaaccaactacgtaacggctagtatcatcttgtatttgacttggcgttcgatcaggtggtatcccccactagtctggtcgatgaggctaggaattccccacgggcgaccgtgtcctagcctgcgtggcggccagcccagctttagctgggacgccttttcaaagacatggtgtgaagacctgcatgtgcttggttgtgagtcctccggcccctgaatgcggctaaccttaaccccggagcccagtgacataatccaatgttatttgggtcgtaatgagtaattccgggatgggaccgactactttgggtgtccgtgtttccttttattctttatattgtcttatggtcacagcatatatagtatatatactgtgatc

SEQ ID NO: 20699 - DNA, 707 bp, synthetic construct
  source 1..707: mol_type = other DNA
tacgcctgtcttaaatcccctgcctcaaacgtaacattagaagtataaataaacaaagaccaataggagtccaacatccagttggattgcggtcaagcacttctgtctccccggacctagtagtgataggctgtacccacggccgaagatgaacccgtccgttatccggccagctacttcgagaagcctagtaacatcaaagatctgtcttggcgtttcgctcagcgcgttccccccgcgtagatcgggctgatgggtctccgcataccccacgggcgaccgtggcggaggccgcgtggcggcccgcatatggcgaaagccataggacgccatttcagtgacagggtgtgaagagcctattgagctagttggtagtcctccggcccctgaatgcggctaatcctaaccacggagcatccaccagcaaaccagctggaagggggtcgtaacgggtaactctgtggcggaaccgactactttgggtgtccgtgtttccttttgatcctatattggctgcttatggtgacaacgataagttgttatcataaagcttttgggttggccacctggagaaagttatcagtgtttgatattgttcggctttcacgcctaccaataaaacaagctttatacttattagtttcattttatccgtctgaggaaatttctgagttttacctacagcttctgctcactctaacagcaaa

SEQ ID NO: 20700 - DNA, 705 bp, synthetic construct
  source 1..705: mol_type = other DNA
gcctgttttatattcccctcccccaaacgtaacattagaagtataaacaaacaaagaccaataggagtccaacatccagttggattgcggtcaagcacttctgtctccccggacctagtagtgataggctgtacccacggccgaagatgaacccgtccgttatccggccagctacttcgagaagcctagtaacatcaaagatctgtcttggcgtttcgctcagcgcgttccccccgcgtagatcgggctgatgggtctccgcataccccacgggcgaccgtggcggaggccgcgtggcggcctgcctatggcgaaagccataggacgccatttcagtgacagggtgtgaagagcctattgagctagttggtagtcctccggcccctgaatgcggctaatcctaaccacggagcatccaccagcaaaccagctggaagggtgtcgtaacgggtaactctgtggcggaaccgactactttgggtgtccgtgtttccttttgatcctatattggctgcttatggtgacaacgataagttgttatcataaagcttttgggttggccacctggaaaaagttatcagtgtttgatattgttcggctttcacgcctaccaataaaacaagctttatacttgctaatttcattttatccatctgaggatattactgaattttacctacaacttttgctcaccctaacagtaaa

SEQ ID NO: 20701 - DNA, 671 bp, synthetic construct
  source 1..671: mol_type = other DNA
cgcctgttttatactcccctcccccgtaacttagaaaacttcaaaatcaaagttcaataggagggggtacaaaccagtaccaccacgaacaagcacttctgtttccccggtgatgttgtatagactgtctccacggttgaaaacgactgatccgttatccgctctagtacttcgagaagcccagtaccaccttggaatcttcgatgcgttgcgctcagcactcaaccccagagtgtagcttaggttgatgagtctggacatccctcaccggcgacggtggtccaggctgcgttggcggcctacctgtggcccaaagccacaggacgctagttgtgaacaaggtgcgaagagcctattgagctactagagattcctccggcccctgaatgcggctaatcccaaccacggagcaggtactcacaacccagtgagcagcctgtcgtaacgcgcaagtctgtggcggaaccgactactttgggtgtccgtgtttccttttatttttatatggctgcttatggtgacaatcattgattgttatcataaagcgaattggattggccatccggtgaaagttagacttatcatttacttgtttgttggattcactcctttgactaaattcacccctgacatcatcttagttgtgatactgattaggagacttcatcata

SEQ ID NO: 20702 - DNA, 699 bp, synthetic construct
  source 1..699: mol_type = other DNA
cgctagcacactggtatcccggtacctttgtgcgcctgttttacgcaccctcccccgacagcaacttagaagatttccacacacggtcaataggcggctcagtatgccaactgggtcatgaccaagcacttctgtctccccggactgagtatcaataagctgctcacgtggctgaaggagaaaacgttcgttatccggccaattacttcgagaagcttagtaccaccatggaggttgcgcagtgtttcgttccgcacaaccccagtgtagatcaggtcgatgagtcaccgcactcctcacgggcgactgtggcggtggctgcgctggcggcctgcccatggggcaccccatgggacgcttcaatactgacatggtgcgaagagcctattgagctaattggtaatcctccggcccctgaatgcggctaatcctaactgcggagcagataccctcgagccagtgggcagtctgtcgtaatgggcaactctgcagcggaaccgactactttgggtgtccgtgtttccttttattcctatattggctgcttatggtgacaattgagagattgttaccatatagctattggattggccatccagtgacaaacagagcgattatctacttatttgttggctttgtaccattaaatcttggagtccttaagaccctcaacttgattatacaatttaactctgcgaa

SEQ ID NO: 20703 - DNA, 618 bp, synthetic construct
  source 1..618: mol_type = other DNA
tttaaacagcggatgggttccccaccatccgacccactgggtgtagtactctggtattttgtacctttgtacgcctgtttctcccctacctcccaacctaaacaatcctggtaacttagaagacttaaatcatcgtacaataggtgctgtcacatccagtgacggctagtacaagcacttctgtttccccggagcggagtataaatggccaccgctgtcaaaagctcttaaccgttatccgccaattaactacgcaacggctagtaacatcttgttatttttagggcgttcgatcaggtgagtaaacccctcactagtctggtcgatgaggctgagaattccccacgggcgaccgtgtctcagcctgcgtggcggccagcccagctaatgctgggacgccttaattgtgacatggtgtgaagacccacgtgtgcttaattgtgagtcctccggcccctgaatgcggctaacctaaaccctggagccttgagacacaatccagtgttggcaaggtcgtaatgagtaattccgggacgggaccgactactttgggtgtccgtgtttccttttattttcaaattgttcttatggtcacaatataagtaatatattgtgatc

SEQ ID NO: 20704 - DNA, 513 bp, synthetic construct
  source 1..513: mol_type = other DNA
ttcgttacccggccaattacttcgagaaacctagtaacaccatggaagttgcgtagtgtttcgctccgcacgaccccggtgtagatcaggtcgatgagccaccgcgttccccacgggcgaccgtggcggtggctgcgctggcggcctgctcatggggcaacccatgggacgcttcaatactgacatggtgcgaagagtctattgagctaattggtagtcctccggcccctgaatgcggctaatcctaactgcggagcaggcaccctcaagccagagggcagtctgtcgtaacgggcaactctgcagcggaaccgactactttgggtgtccgtgtttccttttattcttgaactggctgcttatggtgacaattgaaagattgttaccatatagctattggattggccatccagtgacaaatagagcaattatatatctttttgttggttttattccattaaactataaagttttaaacacacttaaatttgtcttaatactcaactcaataaa

SEQ ID NO: 20705 - DNA, 631 bp, synthetic construct
  source 1..631: mol_type = other DNA
ttaaaacagcggatgggttctcccaccatccgacccactgggtgtagtactctggtattatgtacctttgtacgcctgtttattcccaaaccccctcccgttacatttccaacccctgtaacgttagaagtttggaacttaacagtacaataggaggcaccatatccaatggtgtaatgtacgagcacttctgtttccccggagcgaggtataggtggtacccaccgctgaaagcctttaaccgttatccgccaatcaactacgtaacagctagtagcattttgttgttgactggacgttcgatcaggtggtttacccccccactagtttggtcgatgaggctggaaattccccacgggtgaccgtgttccagcctgcgtggcggccaacccagctcatgctgggacgccctttcaatgacatggtgtgaagactcgcatgtgcttgattgtgaatcctccggcccctgaatgcggctaaccctaaccccggagccttgcatcacaatccagtgatgttagggtcgtaatgagtaattctgggatgggaccgactactttgggtgtccgtgtttctcatttttctttgaattgtcttatggtcacagcatatagtaatatatactgtgatc

SEQ ID NO: 20706 - DNA, 627 bp, synthetic construct
  source 1..627: mol_type = other DNA
ttaatacagcggatgggtatcccaccatccgacccactgggtgtagtactctggtattatgtacctttgtacgcctgttcttcccattgtacccttcccaaatttccaacccaagtaacgttagaagtttgacattaaagtacaataggaggcaccacatccagtggtgttttgtacaagcacttctgtttccccggagcgaggtataggctgtacccactgccaaaaacctttaaccgttacccgccagccaactacgtaaaagctagtaacatcttgtttgtaacttggcgttcgatcaggtggattccccctccactagtttggtcgatgaggctaggaactccccacgggtgaccgtgtcctagcctgcgtggcggccaacccagctcttgctgggacgcccttttatagacatggtgtgaagactcgcatgtgcttggttgtgattcctccggcccctgaatgcggctaaccctaaccctggagccttgtgttacaaaccagtaatattaaggtcgtaatgagcaattccgggacgggaccgactactttgggtgtccgtgtttctcatttttcttattattgtcttatggtcacagcatatttgttaaatatactgtgatc

SEQ ID NO: 20707 - DNA, 630 bp, synthetic construct; identical to SEQ ID NO: 65
  source 1..630: mol_type = other DNA

SEQ ID NO: 20708 - DNA, 624 bp, synthetic construct
  source 1..624: mol_type = other DNA
ttaaaacagcggatgggtatcccaccatccgacccactgggtgtagtactctggtattatgtacctttgtacgcctgtttctcccccccattacccctccccacatatcccagtaacttagaagaattaaattatcgcacaataggagctattacaaccagtaatagttagtgcaagtacttctgtttccccggagcggagtatagatggccaccgctgtcaaaagctcttaaccgttatccgccagttaactacgtaacggctagtaacatcttgttgtgcttaaggtgttcgatcaggtgaagagacacccccttcactagtctggtcgatgaggctgagaaatccccacgggcgaccgtgtctcagcctgcgtggcggccagcccagcttatgctgggacgccttaagtatgacatggtgtgaagacccgcatgtgcttaactgtgagtcctccggcccctgaatgcggctaaccttaaccctggagccttggggtacaatccagtgctaacaaggtcgtaacgagcaattccgggacgggaccgactactttgggtgtccgtgtttccttttatttcattattgttcttatggttacaatatatagagtatattgtaatc

SEQ ID NO: 20709 - DNA, 574 bp, synthetic construct
  source 1..574: mol_type = other DNA
ctggtattatgtacctttgtacgcctgtttctccctccctactaccccgcctcaagcatcctgtaacttagaagaattgaaaaaccgcacaacaggagctattacaaccagtaatagttagtgcaagcacttctgtttccccggagcggagtatagacggccaccgctgtcaaaagctcttaaccgttatccgccagttaactacgtaacggctagtaacatcttgttgtgcttagggtgttcgatcaggtgaagaaaaacccccttcactagtctggtcgatgaggctgagaagtccccacgggcgaccgtgtctcagcctgcgtggcggccagcccagcatatgctgggacgccttaagtatgacatggtgtgaagacccgcatgtgcttaactgtgagtcctccggcccctgaatgcggctaacctaaaccctggagccttggagcacaagccagtgcttacaaggtcgtaatgagcaattccgggacgggaccgactactttgggtgtccgtgtttccttttatctcattattgttcttatggttacaatatatagagtatattgtaatc

SEQ ID NO: 20710 - DNA, 624 bp, synthetic construct
  source 1..624: mol_type = other DNA
ttaaaacagcggatgggtatcccaccatccgacccactgggtgtagtactctggtattatgtacctttgtacgcctgtttctccctccctaccaccccgccccacgtatcccgtaacttagaagaattgaacaatcgcacaataggagctattacaaccagtaatagttggtgcaagcacttctgtttccccggagcggagtatagacggccaccgctgtcaaaagctcttaaccgttacccgccagttaactacgtaacggctagtaacatcttgtcgtgcttagggtgttcgatcaggtgaagaaaaacccccttcactagtctggtcgatgaggctgagaagtccccacgggtaaccgtgtctcagcctgcgtggcggccagcccagcatatgctgggacgccttaagtatgacatggtgtgaagacccgcatgtgcttagctgtgagtcctccggcccctgaatgcggctaacctaaaccctggagccttggagcacaagccagtgcttgcaaggtcgtaatgagcaattccgggacgggaccgactactttgggtgtccgtgtttccttttatctcattattgttcttatggttacaatatatagagtatattgtaatc

SEQ ID NO: 20711 - DNA, 579 bp, synthetic construct
  source 1..579: mol_type = other DNA
aaatcaatgctcaatagggggggcgcaaaccagcgctctcatgagcaagcactcctgtctccccggtgaggttgtataaactgttcccacggttgaaaacaacctatccgttatccgctatagtacttcgagaaacctagtaccacctttggattgttgacgcgttgcgctcagcacactaacccgtgtgtagcttgggtcgatgagtctggacacacctcactggcgacagtggtccaggctgcgttggcggcctactcatggtgaaagccatgagacgctagacatgaacaaggtgtgaagagtctattgagctactatagagtactccggcccctgaatgcggctaatcctaaccatggagcaagtgctcacaggccagtgagttgcttgtcgtaatgcgcaagtccgtggcggaaccgactactttgggtgtccgtgtttcactttttacttttatgactgcttatggtgacaatttgatattgttaccatttagcttgtcaaatcaattgcaaaagatcctaaatcttatttgtcaacttgcatcttgataactttaatttgaaaattttaaca

SEQ ID NO: 20712 - DNA, 582 bp, synthetic construct
  source 1..582: mol_type = other DNA
ttccctccccaaaagtaactttagaagcaaataaactcacagctcgatagccgtcgcaccgccagtgcgactatgagcaagcactcctgtttccccggttgcgtcctatatgctgtggaaacggcagaaggggacaatatcgttacccgcttatctactacgggaagcctagtaacaccattgagcactttgagggttgcgttcagcgccaaacccagcgtagctcaggccgatggggcttcggaatccccacgggtgaccgtgtcgaagcccgcgttggcggcctgcccacaccaatgggtgtgggacgctcaatttgtgacatggtgcgaagagcctactgtgctaggtgagagtcctccggcccctgaatgtggctaatcccaaccaccgaacccgtggttacaatccagtaactagcgggccgtaatgcgcaagtcggtgacggaaccaactactttgggtgaccgtgtttcctttatctcttatattgcaattttatggtgacatttatagtatttaagtgttaccatatattgcgcaaatacattgtaataacacagagttactactgcagaaatc

SEQ ID NO: 20713 - DNA, 529 bp, synthetic construct
  source 1..529: mol_type = other DNA
gctgaaggagaaaacgtccgttatccggccaattacttcgagaaacctagtaccgccatgaaagttgcgcagcgtttcgatccgcacaaccccagtgtagatcaggtcgatgagtcaccgcgttccccacgggtgaccgtggcggtggctgcgttggcggcctgcccatgggagaacccatgggacgcttcaatactgacatggtgtgaagagtctattgagctaattggtagccctccggcccctgaatgcggctaatcctaactgcggagcagattcccgcatgccagcgggtggtctgtcgtaacgggcaactctgcagcggaaccgactactttgggtgtccgtgtttccttttattcctatatcggctgcttatggtgacaattgagagattgttaccatatagctattggattggccatccggtgacaaacagagcaattatttaccaatttattggttttgtaccattgaattttaacgtattcaaaactcttaaccttattttggctcttaatacagcaaa

SEQ ID NO: 20714 - DNA, 698 bp, synthetic construct
  source 1..698: mol_type = other DNA
ttaaaacagccttggggttgttcccactccaagggcccacgtggcggctagtactctggtacttcggtacctttgtacgcctgttttatctcccttcccaatgtaatttagaagctcttaaatcaaggctcaataggtggggcgcaaaccagcgctctcatgagcaagcactcctgtctccccggtgtggttgtataaactgttcccacggttgaaaacaacctatccgttatccgctatagtacttcgagaaacctagtatcacctttggattgttgacgcgttgcgctcagcacactaacccgtgtgtagcttgggtcgatgagtctggacataccccactggcgacagtggtccaggctgcgttggcggcctactcatggtgaaaaccatgagacgctagacatgaacaaggtgtgaagagtctattgagctactatagagtcctccggcccctgaatgcggctaatcctaaccatggagcaagtgctcacaggccagtgagttgcttgtcgtaatgcgcaagtccgtggcggaaccgactactttgggtgtccgtgtttcactttttacttttatgactgcttatggtgacaatttgatattgttaccatttagcttgtcaaattaattgcaaaggatcctaaatcttacttaccaatttgcattttgacaatcttgatttgaaaattttgaca

SEQ ID NO: 20715 - DNA, 667 bp, synthetic construct
  source 1..667: mol_type = other DNA
ctgttttatatccccctcacccccacttgaaatttagaagcaagaacatactgaccagtagtcggcgtggcaatccagccatgccttggtcaagcacttctgtttccccggaccgagtatcaatagactgctagcgcggttgaaggagaaaacgttcgttacccgactaactacttcgagaaacctagtagcatcatgaaagttgcagagtgtttcgctcagcacaaccccagtgtagatcaggccgatgagtcaccgcactcctcacgggcgaccgtggcggtggctgcgctggcggcctgcctgtgggataacccacaggacgctctaatacagacatggtgtgaagagtctattgagctagttagtagtcctccggcccctgaatgcggctaatcctaactgcggagcacgtgcccttactccaaggggtagcgtgtcgtaacgggcaactctgcagcggaaccgactactttgggtgtccgtgtttccttttatctttatactggctgcttatggtgacaattgagagattgttaccatatagctattggattggccatccggtgactaatagagctattgtgtacctctttgttggatacgttccactgaaccacaaggaattgaagacccttgattacatcttgcttttgaattcagcaaa

SEQ ID NO: 20716 - DNA, 743 bp, synthetic construct
  source 1..743: mol_type = other DNA
ttaaaacagctctggggttgttcccacccacagggcccactgggcgctagcactctggtatcccggtacccttgtgcgcctgttttatctacccttccccaattgcaatttagaagttcaacactcacggtcaatagacggctcagtacgccaactgagttacgaccaagtacttctgttaccccggaccgagtatcaataggctgctcacgcggctgaaggagaaaacgttcgttatccggccaattacttcgagaaacctagtaccaccatgaaggttgcgcagcgtttcgctccgcacaaccccagtgtagatcaggccgatgagtcaccgcactccccacgggcgaccgtggcggtggctgcgctggcggcctgcccatggggtaacccatgggacgcttcaatactgacatggtgcgaagagtctattgagctaattggtagtcctccggcccctgaatgcggctaatcctaactgcggagcaggtacccacatgccagtgggcaatctgtcgtaatgggcaactctgcagcggaaccgactactttgggtgtccgtgtttccttttattcctatactggctgcttatggtgacaattgagagattgttaccatatagctattggattggccatccggtgacaaacagagcaattgtttacttatttgttggttttgtaccattaaattttaaggctctaagaacacttaattacatattattactcaactcattcaa

SEQ ID NO: 20717 - DNA, 743 bp, synthetic construct
  source 1..743: mol_type = other DNA
ttaaaacaggctgtgggttgtttccacccacagggcccactgggcgctagcactttggtatcccggtacccttgtgcgcctgttttatttacccttccccaattgcaatttagaagttcaacactcacggtcaatagacggctcagtacgccaactgagttacgaccaagtacttctgttaccccggaccgagtatcaataggctgctcacgcggctgaaggagaaaacgttcgttatccggccaattacttcgagaaacctagtaccaccatgaaggttgcgcagcgtttcgctccgcacaaccccagtgtagatcaggccgatgagtcaccgcactccccacgggcgaccgtggcggtggctgcgctggcggcctgcccatggggtaacccatgggacgcttcaatactgacatggtgcgaagagtctattgagctaattggtagtcctccggcccctgaatgcggctaatcctaactgtggagcaggtacccacatgccagtgggcaatctgtcgtaatgggcaactctgcagcggaaccgactactttgggtgtccgtgtttccttttattcctatactggctgcttatggtgacaattgagagattgttaccatatagctattggattggccatccggtgacaaacagagcaattgtttacttatttgttggttttgtaccattaaattttaaggctctaagaacacttaattacatattattactcaactcattcaa

SEQ ID NO: 20718 - DNA, 628 bp, synthetic construct; identical to SEQ ID NO: 754
  source 1..628: mol_type = other DNA

SEQ ID NO: 20719 - DNA, 579 bp, synthetic construct
  source 1..579: mol_type = other DNA
ggtcaagcacttctgtttccccggaccaagtatcaataggctgctcacgcggctgaaggagaaagtgttcgttatccggccaattacttcgagaaacctagtaccaccatggaagttgcgcagcgtttcgctccgcacgaccccggtgtagatcaggccgatgagtcaccgcactccccacgggtgaccgtggcggtggctgcgctggcggcctgctcatggggcaacccatgggacgcttcaatactgacatggtgtgaagagtctattgagctaattggtagtcctccggcccctgaatgcggctaatcccaaccgcggagcggattcccacactccagtgggcagtctgtcgtaacgggcaactctgcggcggaaccgactactttgggtgtccgtgtttcattttattccttattggctgcttatggtgacaattgaaagattgttgccatatagctattggattggccatccagtgacaaacagagcgattgtctatctatttgttggtttcataccattaaatttcaaagttttaaagactatcaacttgattatattgcttaatacagcaaa

SEQ ID NO: 20720 - DNA, 646 bp, synthetic construct
  source 1..646: mol_type = other DNA
cccgaaagaaacttagaagctcaacttgtgtggtcaatagtaagatcagtacgccaactgagccacgaccaacgtacttctgttaccccggactgagtatcaataagctgctcacgtggctgaaggagaaaacgtccgttacccggccaattacttcgagaaacccagtaccaccatgaaagttgcgcggcgtttcgctccgcacaaccccagtgtagatcgggccgatgagtcaccgcgttccccacgggcgaccgtggcggtggctgcgttggcggcctgcccatggagcaatccatgggacgcttcaatactgacatggtgcgaagagtctattgagctaattggtagtcctccggcccctgaatgcggctaatcctaactgcggagcagatactcacatgccagtgggcagtctgtcgtaacgggcaacttcgcagcggaaccgactactttgggtgtccgtgtttccttttatttcatactggctgcttatggtgacaattgagagattgttaccatatagctattggattggccatccagtgtccaacagagcgatcatttacttgtttgttggattcgtacccttgaactacaaagcactcgtaacgctcaaacacattatagacctccacacagcaaa

SEQ ID NO: 20721 - DNA, 563 bp, synthetic construct
  source 1..563: mol_type = other DNA
ccccggaccaagtatcaataaactgctagcgcggttgaaggagaaaacgtccgttacccggccaattacttcgagaaacctagtaccaccatggatgttgcgcagtgtttcgctccgcacaaccccagtgtagatcaggccgatgagccaccgcattccccacgggcgaccgtggcggtggctgcgctggcggcctgcccatggggcaacccatgggacgcttcaatactgacatggtgcgaagagtctattgagctaattggtagtcctccggcccctgaatgcggctaatcctaactgcggagcagatgcccacatgccagtgggcggtctgtcgtaacgggcaactctgcagcggaaccgactactttgggtgtccgtgtttcctttttaaccttgtattggctgcatatggtgacaattgaaagattgttaccatatagctattggattggccacccggtgacgaacagagcaatcatttatttgttcgttggttttattccattgaatctcaaagtttggaacactctaaattttattatctcactcaacacaacaaa

SEQ ID NO: 20722 - DNA, 563 bp, synthetic construct
  source 1..563: mol_type = other DNA
ccccggactgagtatcaataagctgctcgcgcggctgaaggagaaaacgttcgttacccggccaattacttcgagaaacccagtaccaccatggaagttgcgtagtgtttcgttccacacaaccccagtgtagatcaggtcgatgagccaccgcatcccccacgggcgaccgtggcggtggctgcgttggcggcctgcccatggggtaacccatgggacgcttcaatactgacatggtgtgaagagtctattgagctaattggtagtcctccggcccctgaatgcggctaatcctaactgcggagcagatacccacacaccagtgggcagtctgtcgtaacgggcaactctgcagcggaaccgactactttgggtgtccgtgtttctttttattccatacattggctgcttatggtgacaattgagagattgttgccatatagctattggattggccatccggtgacaaacagagcaatcatttatttgttcgttggttttattccactgaatttcaaagtttggaacactctaaattttattatttcactcaacacaacaaa

SEQ ID NO: 20723 - DNA, 563 bp, synthetic construct
  source 1..563: mol_type = other DNA
ccccggaccaagtatcaataaactgctagcgcggttgaaggagaaaacgtccgttacccggccaattacttcgagaaacctagtatcaccatggatgttgcgcagtgtttcgctccgcacaaccccagtgtagatcaggccgatgagccaccgcattccccacgggcgaccgtggcggtggctgcgctggcggcctgcccatggggcaacccatgggacgcttcaatattgacatggtgcgaagagtctattgagctaattggtagtcctccggcccctgaatgcggctaatcctaactgcggagcagatgctcacatgccagtgggcggtctgtcgtaacgggcaactctgcagcggaaccgactactttgggtgtccgtgtttcctttttaaccttgtattggctgcatatggtgacaattgaaagattgttaccatatagctattggattggccatccggtgacgaacagagcaatcatttatttgttcgttggttttgttccgttgaatctcaaagtttggaacactctaaatttcattatctcactcaacacaacaaa

SEQ ID NO: 20724 - DNA, 563 bp, synthetic construct
  source 1..563: mol_type = other DNA
ccccggaccaagtatcaataaactgctagcgcggttgaaggagaaaacgtccgttacccggccaattacttcgagaaacctagtaccaccatggatgttgcgcagtgtttcgctccgcacaaccccagtgtagatcaggccgatgagccaccgcattccccacgggcgaccgtggcggtggctgcgctggcggcctgcccatggggcaacccatgggacgcttcaatactgacatggtgcgaagagtctattgagctaattggtagtcctccggcccctgaatgcggctaatcctaactgcggagcagatgctcacacgccagtgggtggtctgtcgtaacgggcaactctgcagcggaaccgactactttgggtgtccgtgtttcctttttaaccttgtattggctgcatatggtgacaattgaaagattgttaccatatagctattggattggccatccggtgacgaacagagcaatcatttattcgttcgttggttttattccattgaatctcaaagtttggaacactctaaattttattatctcactcaacacaacaaa

SEQ ID NO: 20725 - DNA, 624 bp, synthetic construct
  source 1..624: mol_type = other DNA
ttaaaacagcggatgggtatcccaccattcgacccattgggtgtagtactctggtactatgtacctttgtacgcctgtttctccccaaccacccttccttaaaattcccacccatgaaacgttagaagcttgacattaaagtacaataggtggcgccatatccaatggtgtctatgtacaagcacttctgtttccccggagcgaggtataggctgtacccactgccaaaagcctttaaccgttatccgccaaccaactacgtaacagttagtaccatcttgttcttgactggacgttcgatcaggtggattttccctccactagtttggtcgatgaggctaggaattccccacgggtgaccgtgtcctagcctcgtggcggccaacagcttatgctgggacgcccttttaaggacatggtgtgaagactcgcatgtgcttggttgtgagtctccggcccctgaatgcggctaaccttaaccctggagccttatgccacgatccagtggttgtaaggtcgtaatgagcaattccgggacgggaccgactactttgggtgtccgtgtttctcatttttcttcatattgtcttatggtcacagcatatatatacatatactgtgatc

SEQ ID NO: 20726 - DNA, 625 bp, synthetic construct; identical to SEQ ID NO: 742
  source 1..625: mol_type = other DNA

SEQ ID NO: 20727 - DNA, 626 bp, synthetic construct
  source 1..626: mol_type = other DNA
ttaaaacagcggatgggtatcccaccatccgacccactgggtgtagtactctggtactttgtacctttgtacgcctgttcttcccattgtacccttcctaaacttccaacccaagtaacgttagaagctcaactttcagtacaataggaagcaccacatccagtggtgtttagtacaagcacttctgtttccccggagcgaggtataggctgtacccactgccaaaagcctttaaccgttatccgccaaccaactacgtaaaagctagtaacatcatgtttgtaaatgggtgttcgatcaggtggatttcccctccactagtttggtcgatgaggctaggaattccccacgggtgaccgtgtcctagcctgcgtggcggccaacccagcgtatgctgggacgcctttttatagacatggtgcgaagactcgcatgtgcttggttgtgagtcctccggcccctgaatgcggctaaccctaaccctggagccttgagtcacaatccagtgatggcaaggtcgtaatgagcaattccgggatgggaccgactactttgggtgtccgtgtttctcatttttcttattattgtcttatggtcacagcatatatagtatatatactgtgatc

SEQ ID NO: 20728 - DNA, 588 bp, synthetic construct
  source 1..588: mol_type = other DNA
tgggtcacgaccaagcacttctgtaaccccggaccgagtatcaataggctgctcgcgcggctgaaggagaaaacgttcgtcatccggccaattacttcgagaaacctattaccaccatgaaagttgcgcggcgtttcgctccgcacaaccccagtgtagatcaggtcgatgagccaccgcgttccccacgggtgaccgtggcggtggctgcgttggcggcctgcccatggggcaacccatgggacgcttcaatactgacatggtgcgaagagtctattgagctaattggtagtcctccggcccctgaatgcggctaatcctaactgcggagcagatacccacatgccagtgggctgtctgtcgtaacgggtaactctgcagcggaaccgactactttgggtgtccgtgtttccttttattcttatactggctgcttatggtgacaattgagagattgttaccatatagctattggattggccatccggtatctaacagagcagtcatttatctgtttgttgggttcgtacccttgaattttaaagtcctcaacactcttaatcttgtgctacaactaaactcggtaaa

SEQ ID NO: 20729 - DNA, 732 bp, synthetic construct
  source 1..732: mol_type = other DNA
gggttgttcccaccccagaggcccacgtggcggctagtacactggtattacggtacccttgtacgcctgttttataccccctttccccgtaacttagaagttttaaatcaaagttcaacagtcagtggtacaacccagtactactacgaacaagcacttctgttaccccggtgagattgcataggctgttcccacggctaaaagcgattgatccgttacccgctcttgtacttcgagaagcctagtaagaccttgggatcctcgatgcgttgcgttcaacactcaaccccggagtgtagcttgggctgatgagtctggacattccccaccggtgacggtggtccaggctgcgttggcggcctacctgtggcccaaagccacaggacgctagttgtgaacaaggtgtgaagagcctattgagctacaagagagtcctccggcccctgaatgcggctaatcccaaccacggagcaggcgattgcaacccagcaactagcctgtcgtaatgcgcaagcctgtggcggaaccgactactttgggtgtccgtgtttccttttattacataatggctgcttatggtgacaatcacagattgttgtcataaagcgaattggattggccatccggtgagaattaaaacaatcatttatttgtttgttggatttgttcctatacacactcaaacaccttgcttgattgaagtaattctgttgataagacaatattattaca

SEQ ID NO: 20730 - DNA, 721 bp, synthetic construct
  source 1..721: mol_type = other DNA
cccacccacggggcctactgggcgccagcacactggtatcacggtacctttgtgcgcctgttttataacccctcccccgatcgtaacgtagaagctgaacctaagcggtcaataggcggctcagaacaccatctgggtcttgaccaagcacttctgttaccccggactgagtatcaataagctgctcacgcggctgaaggagaaaacgtccgttacccggccaattacttcaagaaacccagtaccaccatgaaggttgcgcagcgtttcgctccgcacaaccccagtgtagatcaggtcgatgagtcaccgcattcctcacgggcgaccgtggcggtggctgcgctggcggcctgcccatggggcaacccatgggacgcttcaatactgacatggtgcgaagagtcaattgagctaattggtagtcctccggcccctgaatgcggctaatcctaactgtggagcagatgcccacgtaccagtgggtagtctgtcgtaacgggcaactccgcagcggaaccgactactttgggtgtccgtgtttctctttattcttatgttggctgcttatggtgacaattgagagattgttaccatatagctattggattggccatccggtgacgaatagagcgattgtatatctttttgttggattcgtaccattaaacaaaacaaattacaaaaccttgtgttacattattagattaaacacagcaaa

SEQ ID NO: 20731 - DNA, 677 bp, synthetic construct
  source 1..677: mol_type = other DNA
tcccaccccaagggcccacgtggcggctagtactctggtatttcggtacctttgtacgcctgttttatctcccttcccaatgtaacttagaagctctcaaatcaaagctcgataggtggagcgcaaaccagcgctctcatgagcaagcactcctgtctccccggtgtggttgtataaactgttcccacggttgaaagcaacctatccgttatccgctatagtacttcgagaaacctagtatcacctttggattgttgatgcgttgcgctcagcacactaacccgtgtgtagcttgggtcgatgagtctggacataccccactggcgacagtggtccaggctgcgttggcggcctactcatggtgaaaaccatgagacgctaaacatgaacaaggtgtgaagagtctattgagctactatagagtcctccggcccctgaatgcggctaatcttaaccatggagcaagtgctcacaagccagtgagttgcttgtcgtaatgcgcaagtccgtggcggaaccgactactttgggtgtccgtgtttcactttttacttttatgactgcttatggtgacaattcaatattgttaccatttagcttgtcaaatcaattgcaaaagaccctaaaccttatttatcaacttgcattctgataacttcaatttgcaaattttaata

SEQ ID NO: 20732 - DNA, 576 bp, synthetic construct
  source 1..576: mol_type = other DNA
ctggtattttgtacctttgcacgcctgttttcccattgtacccatccttaaattcctccccaagtaacgttagaagtttaaggaaaccaatgtacaataggaagcatcacatccagtggtgtaatgtacaagcacttctgtttccccggagcgaggtataagtggtacccaccgctgaaagcctttaaccgttatccgccaatcaactacgtaatggctagtattatcatgtttgtaatctggcgttcgatcaggtggttccccccactagtttggtcgatgaggctgggaattccccacgggcgaccgtgtcctagcctgcgtggcggccaacccagctcttgctgggacgcctttttatagacatggtgtgaagacctgcatgtgcttgattgtgagtcctccggcccctgaatgcggctaaccttaaccccggagccttgcagcataatccaatgttgttgaggtcgtaatgagcaattctgggacgggaccgactactttgggtgtccgtgtttccttttattctttatattgtcttatggtcacagcatatatagtatatatactgtgatc

SEQ ID NO: 20733 - DNA, 654 bp, synthetic construct
  source 1..654: mol_type = other DNA
cggctagtactctggtacttcggtacctttgtacgcctgttttatctcccttcccaatgtaatttagaagcttttacatcaaggctcaataggtggggcgcaaaccagcgctctcatgagcaagcactcctgtctccccggtgtggttgtataaactgttcccacggttgaaaacaacctatccgttatccgctatagtacttcgagaaacctagtatcacctttggattgttgacgcgttgcgctcagcacactaacccgtgtgtagcttgggtcgatgagtctggacataccccactggcgacagtggtccaggctgcgttggcggcctactcatggtgaaaaccatgagacgctagacatgaacaaggtgtgaagagtctattgagctactatagagtcctccggcccctgaatgcggctaatcctaaccatggagcaagtgctcacaggccagtgagttgcttgtcgtaatgcgcaagtccgtggcggaaccgactactttgggtgtccgtgtttcactttttacttttatgactgcttatggtgacaatttgatattgttaccatttagcttgtcaaattaattgcaaaagatcctaaatcttacttaccaacttgcattttgacaaccttggtttgaaaattttaata

SEQ ID NO: 20734 - DNA, 644 bp, synthetic construct
  source 1..644: mol_type = other DNA
gtacctttgtacgcctgttttatatccctccccaatgtaatttagaagctttcaaatcaaagctcaataggtggagcgcaagccagcgcttccgtgagcaagcacttctgtttccccggtgcggttgtatagactgttcccacggttgaaaacgacctatccgttatccgctatagtacttcgagaaacctagtatcacctttggattgttgatgcgttgcgctcaacacactaacccgtgtgtagcttgggtcgatgagtctggacataccccactggtgacagtggtccaggctgcgttggcggcctactcatggtgaaaaccatgagacgctagacatgaacaaggtgtgaagagtctattgagctactatagagtcctccggcccctgaatgcggctaatcttaaccatggagcaagtgctcacaaaccagtgagttgcttgtcgtaatgcgcaagtccgtggcggaaccgactactttgggtgtccgtgtttcactttttacttttatgactgcttatggtgacaatttaatattgttaccattcagctagtcgaaataatcacataaaactttaaatcctatctaataattcacatttggatagtttcatttcgaggactttaaacctacttacaaag

SEQ ID NO: 20735 - DNA, 505 bp, synthetic construct
  source 1..505: mol_type = other DNA
caagcacttctgtttccccggttgcgtcctatatgctgtggaaacggcagaaggggacaatatcgttacccgcttatctactacgggaagcctagtaacaccattgaacactttgggagttgcgttcagcgcttaacccagcgtagctcaggctgatggggcttcggaacccccacgggcgaccgtgtcgaagcccgcgttggcggcctgcccgcaccgacaggtgtgggacgctcaatttgtgacatggtgcgaagagcctactgtgctaggtaagagtcctccggcccctgaatgtggctaatcctaaccactgaacccgtggttgcaagccagcaactagcgggccgtaatgcgcaagtcggtggcggaaccaactactttgggtgtccgtgtttcctttatttctaacattgcaagtttatggtgacatttatagtatttaagtgttaccatatactgcacaaatatattgtaataatacagaattgacactgcagagatc

SEQ ID NO: 20736 - DNA, 561 bp, synthetic construct
  source 1..561: mol_type = other DNA
tggggcgcaaaccagcgctctcatgagcaagcactcctgtctccccggtgtggttgtataaactgttcccacggttgaaaacaacctatccgttatccgctatagtacttcgagaaacctagtatcacctttggattgttgacgcgttgcgctcagcacactaacccgtgtgtagcttgggtcgatgagtctggacataccccactggcgacagtggtccaggctgcgttggcggcctactcatggtgaaaaccatgagacgctagacatgaacaaggtgtgaagagtctattgagctactatagagtcctccggcccctgaatgcggctaatcctaaccatggagcaagtgctcacaggccagtgagttgcttgtcgtaatgcgcaagtccgtggcggaaccgactactttgggtgtccgtgtttcactttttacttttatgactgcttatggtgacaatttgatattgttaccatttagcttgtcaaattaattgcaaaagatcctaaatcttacttaccaacttgcattttgataaccttgatttgaaaattttaata

SEQ ID NO: 20737 - DNA, 654 bp, synthetic construct
  source 1..654: mol_type = other DNA
cccccgcccccacttgaaacttagaagcaaaaacataccgaccaatagttggcaaggcaagccagccatgccttggtcaagcacttctgtatccccggaccgagtatcaataagctgctagcgcggctgaaggagaaaacgttcgttacccgactaactacttcgagaaacctagtagcatcatgaaagttgcagagtgtttcgctcagcacaaccccagtgtagatcaggccgatgagtcaccgcattcctcacgggcgaccgtggcggtggctgcgctggcggcctgcctgtggggcaacccacaggacgctctaatacagacatggtgcgaagagtctattgagctagttagtagtcctccggcccctgaatgcggctaatcctaactgcggagcacgtgcctctactccaagaggtagcgtgtcgtaacgggcaactctgcagcggaaccgactactttgggtgtccgtgtttccttttatctttatattggctgcttatggtgacaattgagagattgttaccatatagctattggattggccatccggtgactaatagagctattgtgtacctctttattggatacgttccactgaaccacaaggaattaaggaccctcgattacattctgcttttgaattcagcaaa

SEQ ID NO: 20738 - DNA, 655 bp, synthetic construct
  source 1..655: mol_type = other DNA
agccccttccccgaatgtaacgtagaagctgaacccaagcggtcaacaggcggctcagaacaccatctgggtcttgaccaagcacttctgttcccccggactgagtatcaataagctgctcacgcggctgaaggagaaaatgttcgttatccggccaattacttcgagaaacctagtaccaccatgaaggttgcgcagtgtttcgctccgcacaatcccagtgtagatcaggtcgatgagtcaccgcattcctcacgggcgaccgtggcggtggctgcgctggcggcctgcccatggggcaacccatgggacgcttcaatactgacatggtgcgaagagttaattgagctaattggtagtcctccggcccctgaatgcggctaatcctaactgcggagcagatgcccaagctccagtgggtagtctgtcgtaacgggtaactctgcagcggaaccgactactttgggtgtccgtgtttccttttattcttacattggctgcttatggtgacaattgagagattgttaccatatagctattggattggccatccggtgacgaatagagcaattgtgtatctttttgttggattcataccactagacaatacaaacttcaaaaccttgtgttacatcattagattaaacacagcaag

SEQ ID NO: 20739 - DNA, 641 bp, synthetic construct
  source 1..641: mol_type = other DNA
cctttgtacgcctgttttatatccctccccaatgtaatttagaagctttcaaatcaaagctcaataggtggagcgcaagccagcgcttccgtgagcaagcacttctgtttccccggtgcggttgtatagactgttcccacggttgaaaacgacctatccgttatccgctatagtacttcgagaaacctagtatcacctttggattgttgatgcgttgcgctcaacacactaacccgtgtgtagcttgggtcgatgagtctggacataccccactggtgacagtggtccaggctgcgttggcggcctactcatggtgaaaaccatgagacgctagacatgaacaaggtgtgaagagtctattgagctactatagagtcctccggcccctgaatgcggctaatcttaaccatggagcaagtgctcacaaaccagtgagttgcttgtcgtaatgcgcaagtccgtggcggaaccgactactttgggtgtccgtgtttcactttttacttttatgactgcttatggtgacaatttaatattgttaccattcagctagtcgaaataatcacataaaactttaaatcctatctaataattcacatttggatagtttcatttcgaggactttaaacctacttacaaag

SEQ ID NO: 20740 - DNA, 641 bp, synthetic construct
  source 1..641: mol_type = other DNA
cctttgtacgcctgttttatctccctccccaatgtaacttagaagctttcaaatcaaagctcaataggtggagcgcaagccagcgcttccgtgagcaagtacttctgtttccccggtgcggttgtatagactgttcccacggttaaaaacaacctatccgttatccgctatagtacttcgagaaacctagtatcacctttggattgttgatgcgttgcgctcaacacactaacccgtgtgtagcttgggtcgatgagtctggacataccccactggtgacagtggtccaggctgcgttggcggcctactcatggtgaaaaccatgagacgctagacatgaacaaggtgtgaagagtctattgagctactatagagtcctccggcccctgaatgcggctaatcttaaccatggagcaagtgctcacaaaccagtgagttacttgtcgtaatgcgcaagtccgtggcggaaccgactactttgggtgtccgtgtttcactttttacttttatgactgcttatggtgacaatttaatattgttaccattcagctagtcgaaataatcgcataaaactttaaatcctatctaacagttcacatttggatagttttattttaaggactttaaacctacctagaaag

SEQ ID NO: 20741 - DNA, 641 bp, synthetic construct
  source 1..641: mol_type = other DNA
cctttgtacgcctgttttatctccctccccaatgtaacttagaagctttcaaatcaaagctcaataggtggagcgcaaaccagcgcttccgtgagcaagtacttctgtttccccggtgcggttgtatagactgttcccacggtcgaaaacaacctatccgttatccgctatagtacttcgagaaacctagtatcacctttggattgttgatgcgttgcgctcaacacactaacccgtgtgtagcttgggtcgatgagtctggacataccccactggtgacagtggtccaggctgcgttggcggcctactcatggtgaaaaccatgagacgctagacatgaacaaggtgtgaagagtctattgagctactatagagtcctccggcccctgaatgcggctaatcttaaccatggagcaagtgctcacaaaccagtgagttgcttgtcgtaatgcgcaagtccgtggcggaaccgactactttgggtgtccgtgtttcactttttacttttatgactgcttatggtgacaatttaatattgttaccattcagctagtcgaaataatcgcataaaactttaaatcctatctaacagttcacatttggatagttttattttaaggactttaaacctacctagaaag

SEQ ID NO: 20742 - DNA, 641 bp, synthetic construct
  source 1..641: mol_type = other DNA
cctttgtacgcctgttttatctccctccccaatgtaacttagaagctttcaaatcaaagctcaataggtggagcgcaagccagcgctcccgtgagcaagtacttctgtttccccggtgcggttgtatagactgtccccacggttgaaaacaacctatccgttatccgctatagtacttcgagaaacctagtatcacctttggattgttgatgcgttgcgctcaacacactaacccgtgtgtagcttgggtcgatgagtctggacataccccactggtgacagtggtccaggctgcgttggcggcctactcatggtgaaaaccatgagacgctagacatgaacaaggtgtgaagagtctattgagctactatagagtcctccggcccctgaatgcggctaatcttaaccatggagcaagtgctcacaaaccagtgagttgcttgtcgtaatgcgcaagtccgtggcggaaccgactactttgggtgtccgtgtttcactttttacttttatgactgcttatggtgacaatttaatattgttaccattcagctagtcgaaataatcgcataaaactttaaatcctatctaacagttcacatttggatagttttattttaaggactttaaacctacctagaaag

SEQ ID NO: 20743 - DNA, 641 bp, synthetic construct
  source 1..641: mol_type = other DNA
cctttgtacgcctgttttatctccctccccaatgtaacttagaagctttcaaatcaaagctcaataggtggagcgcaagccagcgcttccgtgagcaagtacttctgtttccccggtgcggttgtatagactgttcccacggttaaaaacaacctatccgttatccgctatagtacttcgagaaacctagtatcacctttggattgtcgatgcgttgcgctcaacacactaacccgtgtgtagcttgggtcgatgagtctggacataccccactggtgacagtggtccaggctgcgttggcggcctactcatggtgaaaaccatgagacgctagacatgaacaaggtgtgaagagtctattgagctactatagagtcctccggcccctgaatgcggctaatcttaaccatggagcaagtgctcacaaaccagtgagttgcttgtcgtaatgcgcaagtccgtggcggaaccgactactttgggtgtccgtgtttcactttttacttttatgactgcttatggtgacaatttaatattgttaccattcagctagtcgaaacaatcgcacaaaactttaaatcctatctaacagttcacatttggatagttttattttaaggactttaaacctacctagaaag

SEQ ID NO: 20744 - DNA, 641 bp, synthetic construct
  source 1..641: mol_type = other DNA
cctttgtacgcctgttttatatccctccccaatgtaatttagaagctttcaaatcaaagctcaataggtggagcgcaagccagcgcttccgtgagcaagcacttctgtttccccggtgcggttgtatagactgttcccacggttgaaaacgacctatccgttatccgctatagtacttcgagaaacctagtatcacctttggattgttgatgcgttgcgctcaacacactaacccgtgtgtagcttgggtcgatgagtctggacgtaccccactggtgacagtggtccaggctgcgttggcggcctactcatggtgaaaaccatgagacgctagacatgaacaaggtgtgaagagtctattgagctactatagagtcctccggcccctgaatgcggctaatcttaaccatggagcaagtgctcacaaaccagtgagttgcttgtcgtaatgcgcaagtccgtggcggaaccgactactttgggtgtccgtgtttcactttttacttttatgactgcttatggtgacaatttaatattgttaccattcagctagtcgaaataatcacataaaactttaaatcctatctaataattcacatctggatagtttcatttcgaggactttaaacctacttacaaag

SEQ ID NO: 20745 - DNA, 641 bp, synthetic construct
  source 1..641: mol_type = other DNA
cctttgtacgcctgttttatctccctccccaatgtaacttagaagctttcaaatcaaagctcaataggtggagcgcaagccagcgcttccgtgagcaagtacttctgtttccccggtgcggttgtatagactgttcccacggttaaaaacaacctatccgttatccgctatagtacttcgagaaacctagtatcacctttggattgtcgatgcgttgcgctcaacacactaacccgtgtgtagcttgggtcgatgagtctggacataccccactggtaacagtggtccaggctgcgttggcggcctactcatggtgaaaaccatgagacgctagacatgaacaaggtgtgaagagtctattgagctactatagagtcctccggcccctgaatgcggctaatcttaaccatggagcaagtgctcacaaaccagtgagttgcttgtcgtaatgcgcaagtccgtggcggaaccgactactttgggtgtccgtgtttcactttttacttttatgactgcttatggtgacaatttaatattgttaccattcagctagtcgaaataatcgtataaaactttaaatcctatctaacagttcacatttggatagttttattttaaggactttaaacctacctagaaag

SEQ ID NO: 20746 - DNA, 641 bp, synthetic construct
  source 1..641: mol_type = other DNA
cctttgtacgcctgttttatatccctccccaatgtaatttagaagctttcaaatcaaagctcaataggtggagtgcaaaccagcgcttccgtgagcaagcacttctgtttccccggtgcggttgtatagactgttcccacggttgaaaacgacctatccgttatccgctatagtacttcgagaaacctagtatcacctttggattgttgatgcgttgcgctcaacacactaacccgtgtgtagcttgggtcgatgagtctggacgtaccccactggtgacagtggtccaggctgcgttggcggcctactcatggtgaaaaccatgagacgctagacatgaacaaggtgtgaagagtctattgagctactatagagtcctccggcccctgaatgcggctaatcttaaccatggagcaagtgctcacaaaccagtgagttgcttgtcgtaatgcgcaagtccgtggcggaaccgactactttgggtgtccgtgtttcactttttacttttatgactgcttatggtgacaatttaatattgttaccattcagctagtcgaaataatcacataaaactttaaatcctatctaataattcacatttggatagtttcatttcgaggactttaaacctacttacaaag

SEQ ID NO: 20747 - DNA, 641 bp, synthetic construct
  source 1..641: mol_type = other DNA
cctttgtacgcctgttttatatccctccccaatgtaatttagaagctttcaaatcaaagctcgataggtggagcgcaagccagcgcttccgtgagcaagcacttctgtttccccggtgcggttgtatagactgttcccacggttgaaaacgacctatccgttatccgctatagtacttcgagaaacctagtatcacctttggattgttgatgcgttgcgctcaacacactaacccgtgtgtagcttgggtcgatgagtctggacgtaccccactggtgacagtggtccaggctgcgttggcggcctactcatggtgaaaaccatgagacgctagacatgaacaaggtgtgaagagtctattgagctactatagagtcctccggcccctgaatgcggctaatcttaaccatggagcaagtgctcacaaaccagtgagttgcttgtcgtaatgcgcaagtccgtggcggaaccgactactttgggtgtccgtgtttcactttttacttttatgactgcttatggtgacaatttaatattgttaccattcagctagtcgaaataatcacataaaactttaaatcctatctaataattcacatttggatagtttcatttcgaggactttaaacctacttacaaag

SEQ ID NO: 20748 - DNA, 641 bp, synthetic construct
  source 1..641: mol_type = other DNA
cctttgtacgcctgttttatctccctccccaatgtaacttagaagctttcaaatcaaagctcaataggtggagcgcaagccagcgcttccgtgagcaagtacttctgtttccccggtgcggttgtatagactgttcccacggttaaaaacaacctatccgttatccgctatagtacttcgagaaacctagtatcacctttggattgttgatgcgttgcgctcaacacactaacccgtgtgtagcttgggtcgatgagtctggacataccccactggtgacagtggtccaggctgcgttggcggcctactcatggtgaaaaccatgagacgctagacatgaacaaggtgtgaagagtctattgagctactatagagtcctccggcccctgaatgcggctaatcttaaccatggagcaagtgctcacaaaccagtgagttgcttgtcgtaatgcgcaagtccgtggcggaaccgactactttgggtgcccgtgtttcactttttacttttatgactgcttatggtgacaatttaatattgttaccattcagctagtcgaaataatcgcataaaactttaaatcctatctaacagttcacatttggatagttttattttaaggactttaaacctacctagaaag

SEQ ID NO: 20749 - DNA, 641 bp, synthetic construct
  source 1..641: mol_type = other DNA
cctttgtacgcctgttttatatccctccccaatgtaatttagaagctttcaaatcaaagctcaataggtggagcgcaagccagcgcttccgtgagcaagcacttctgtttccccggtgcggttgtatagactgttcccacggttgaaaacgacctatccgttatccgctatagtacttcgagaaacctagtatcacctttggattgttgatgcgttgcgctcaacacactaacccgtgtgtagcttgggtcgatgagtctggacgtaccccactggtgacagtggtccaggctgcgttggcggcctactcatggtgaaaaccatgagacgctagacatgaacaaggtgtgaagagtctattgagctactatagagtcctccggcccctgaatgcggctaatcttaaccatggagcaagtgctcacaaaccagtgagttgcttgtcgtaatgcgcaagtccgtggcggaaccgactactttgggtgtccgtgtttcactttttacttttatgactgcttatggtgacaatttaatattgttaccattcagctagtcgaaataatcacataaaactttaaatcctatctaataattcacatttggatagtttcatttcgaggactttaaacctacttacaaag

SEQ ID NO: 20750 - DNA, 641 bp, synthetic construct
  source 1..641: mol_type = other DNA
cctttgtacgcctgttttatctccctccccaatgtaacttagaagctctcaaatcaaagctcaataggtggagcgcaagccagcgcttccgtgagcaagtacttctgtttccccggtgcggttgtatagactgttcccacggttgaaaacaacctatccgttacccgctatagtacttcgagaaacctagtatcacctttggattgttgatgcgttgcgctcaacacactaacccgtgtgtagcttgggtcgatgagtctggacgtaccccactggtgacagtggtccaggctgcgttggcggcctactcatggtgaaaaccatgagacgctagacatgaacaaggtgtgaagagtctattgagctactatagagtcctccggcccctgaatgcggctaatcttaaccatggagcaagtgctcacaaaccagtgagttgcttgtcgtaatgcgcaagtccgtggcggaaccgactactttgggtgtccgtgtttcactttttacttttatgactgcttatggtgacaatttaacattgttaccattcagctagtcgaaataatcgcacaaaactttgaatcctatctaacagttcacatttggacagtttcactttgaggacttcaaacctacttacaaag

SEQ ID NO: 20751 - DNA, 641 bp, synthetic construct
  source 1..641: mol_type = other DNA
cctttgtacgcctgttttatatccctccccaatgtaatttagaagctttcaaatcaaagctcaataggtggagcgcaagccagcgcttccgtgagcaagcacttctgtttccccggtgcggttgtataaactgttcccacggttgaaaacgacctatccgttatccgctatagtacttcgagaaacctagtatcgcctttggattgttgatgcgttgcgctcaacacactaacccgtgtgtagcttgggtcgatgagtctggacgtaccccactggtgacagtggtccaggctgcgttggcggcctactcatggtgaaaaccatgagacgctagacatgaacaaggtgtgaagagtctattgagctactatagagtcctccggcccctgaatgcggctaatcttaaccatggagcaagtgctcacaaaccagtgagttgcttgtcgtaatgcgcaagtccgtggcggaaccgactactttgggtgtccgtgtttcactttttacttttatgactgcttatggtgacaatttaatattgttaccattcagctagtcgaaataatcacataaaactttaaatcctatctaataattcacatttggatagtttcatttcgagaactttgaacctacttacaaag

SEQ ID NO: 20752 - DNA, 641 bp, synthetic construct
  source 1..641: mol_type = other DNA
cctttgtacgcctgttttatctccctccccaatgcaacttagaagctttcaaatcaaagctcaataggtggagcgcaagccagcgcttccgtgagcaagtacttctgtttccccggtgcggttgtatagactgttcccacggttaaaaacaacctatccgttatccgctatagtacttcgagaaacctagtatcacctttggattgttgatgcgttgcgctcaacacactaacccgtgtgtagcttgggtcgatgagtctggacataccccactggtgacagtggtccaggctgcgttggcggcctactcatggtgaaaaccatgagacgctagacatgaacaaggtgtgaagagtctattgagctactatagagtcctccggcccctgaatgcggctaatcttaaccatggagcaagtgctcacaaaccagtgagttgcttgtcgtaatgcgcaagtccgtggcggaaccgactactttgggtgtccgtgtttcactttttacttttatgactgcttatggtgacaatttaatattgttaccattcagctagtcgaaataatcgcataaaactttaaatcctatctaacagttcacatttggatagttttattttaaggactttaaacctacctagaaag

SEQ ID NO: 20753 - DNA, 641 bp, synthetic construct
  source 1..641: mol_type = other DNA
cctttgtacgcctgttttatctccctccccaatgtaacttagaagctttcaaatcaaagctcaataggtggagcgcaagccagcgcttccgtgagcaagtacttctgtttccccggtgcggttgtatagactgttcccacggttaaaaacaacctatccgttatccgctatagtacttcgagaaacctagtatcacctttggattgttgatgcgttgcgctcaacacactaacccgtgtgtagcttgggtcgatgagtctggacataccccactggtgacagtggtccaggctgcgttggcggcctactcatggtgaaaaccatgagacgctagacatgaacaaggtgtgaagagtctattgagctactatagagtcctccggcccctgaatgcggctaatcttaaccatggagcaagtgctcacaaaccagtgagttgcttgtcgtaatgcgcaagtccgtggcggaaccgactactttgggtgtccgtgtttcactttttacttttatgactgcttatggtgacaatttaatattgttaccattcagctagtcgaaataatcgcataaaactttaaatcctatctaacagttcacatttggatagttttattttaaggactttaaacctacctagaaag

SEQ ID NO: 20754 - DNA, 641 bp, synthetic construct
  source 1..641: mol_type = other DNA
cctttgtacgcctgttttatctccctccccaatgtaacttagaagctttcaaatcaaagctcaataggtggagcgcaaaccagcgcttccgtgagcaagtacttctgtttccccggtgcggttgtatagactgttcccacggtcgaaaacaacctatccgttatccgctatagtacttcgagaaacctagtatcacctttggattgttgatgcgttgcgctcaacacactaacccgtgtgtagcttgggtcgatgagtctggacataccccactggtgacagtggtccaggctgcgttggcggcctactcatggtgaaaaccatgagacgctagacatgaacaaggtgtgaagagtctattgagctactatagagtcctccggcccctgaatgcggctaatcttaaccatggagcaagtgctcacaaaccagtgagttgcttgtcgtaatgcgcaagtccgtggcggaaccgactactttgggtgtccgtgtttcactttttacttttatgactgcttatggtgacaatttaatattgttaccattcagctagtcggaataatcgcataaaactttaaatcctatctaacagttcacatttggatagttttattttaaggactttaaacctacctagaaag

SEQ ID NO: 20755 - DNA, 587 bp, synthetic construct
  source 1..587: mol_type = other DNA
ggccccggccaagcacttctgtatccccggactgagtatcagtaggctgctcgcgcggctgaaggagaaaacgttcgttacccggccacttacttcgagaaacctagtaacgccatgaaagttgcgcagcgtttcgctccgcacaaacccagtgtagatcaggtcgatgagtcaccgcattccccacgggcgaccgtggcggtggctgcgttggcggcctgcccatggggtaacccatgggacgcttcaatactgacatggtgcgaagagtctattgagctaagtggtagtcctccggcccctgaatgcggctaatcctaactgcggagcagatacccacactccagtgggcagtctgtcgtaacgggcaactctgcagcggaaccgactactttgggtgtccgtgtttccttttgtcttttacactggctgcttatggtgacaattgaaagattgttaccatatagctattggattggccatccgatatcaaacagagcaattatttacttgtttgttggttatatacctctcgacaccaaggttctaaaaacactcaactacatcttgttattgaatacgttgaa

SEQ ID NO: 20756 - DNA, 640 bp, synthetic construct
  source 1..640: mol_type = other DNA
cctttgtacgcctgttttatctccctcccaatgtaacttagaagctttcaaatcaaagctcaataggtggagcgcaagccagcgcttccgtgagcaagtacttctgtctccccggtgcggttgtatagactgttcccacggttgaaaacaacctatccgttatccgctatagtacttcgagaaacctagtatcacctttggattgttgatgcgttgcgctcagcacactaacccgtgtgtagcttgggtcgatgagtctggacataccccactggtgacagtggtccaggctgcgttggcggcctactcatggtgaaaaccatgagacgctagacatgaacaaggtgtgaagagtctattgagctactatagagtcctccggcccctgaatgcggctaatcttaaccatggagcaagtgctcacaaaccagtgagttgcttgtcgtaatgcgcaagtccgtggcggaaccgactactttgggtgtccgtgtttcactttttacttttatgactgcttatggtgacaatttaatattgttaccattcagctagtcgaaataatcgcataaaactttaaatcctatctaacagttcacatttggattgttttattttgaggactttaaacctacctacaaag

SEQ ID NO: 20757 - DNA, 610 bp, synthetic construct
  source 1..610: mol_type = other DNA
cccaccatccggcccactgggtgtagtactctggtattatgtacctttgtacgcctgttgttcccattgtacccgtcctaaaatttcctacccaagtaacgttagaagttttatcaataagtacaataggaagcatcacatccagtggtgttttgtacaagcacttctgtttccccggagcgaggtataggctgtacccactgccaaaagcctttaaccgttatccgccaaccaactacgtaaaagctagtatcatcatgtttctgactaggcgttcgatcaggtggactccccctccactagtttggtcgatgaggctaggaaatccccacgggcgaccgtgtcctagcctgcgtggcggccaacccagcttttgctgggacgccttttcatagacatggtgtgaagactcgcatgtgcttggttgtgattcctccggcccctgaatgcggctaaccctaaccctggagccctgtgttacaatccagtaacattagggtcgtaatgagtaattccgggacgggaccgactactttgggtgtccgtgtttctcatttttcttattattgtcttatggtcacagcatatatataacatatatactgtgatc

SEQ ID NO: 20758 - DNA, 643 bp, synthetic construct
  source 1..643: mol_type = other DNA
acctttgtacgcctgttttatctccctccccaatgtaacttagaagctttcgaatcaaagctcaataggtggagcgcaagccagcgcttccgtgagcaagtacttctgtttccccggtgcggttgtatagactgtccccacggttgaaaacaacctatccgttatccgctatagtacttcgagaaacctagtatcacctttggattgttgatgcgttgcgctcaacacactaacccgtgtgtagcttgggtcgatgagtctggacataccccactggtgacagtggtccaggctgcgttggcggcctactcatggtgaaaaccatgagacgctagacatgaacaaggtgtgaagagtctattgagctactatagagtcctccggcccctgaatgcggctaatcttaaccatggagcaagtgctcacaaaccagtgagttgcttgtcgtaatgcgcaagtccgtggcggaaccgactactttgggtgtccgtgtttcacttttttacttttatgactgcttatggtgacaatttaatattgttaccattcagctagtcgaaataatcgcataaaactttaaatcctatctaacagttcacatttggatagttttattttaaggactttaaacctacctagaaag

SEQ ID NO: 20759 - DNA, 502 bp, synthetic construct
  source 1..502: mol_type = other DNA
gccaattacttcgagaaacctagtaccaccatggaggttgcgcagcgtttcgctccgcacagccccagtgcagatcaggccgatgagtcaccgcattcctcacgggcgaccgtggcggtggctgcgttggcggcctgcccatggggcaacccatgggacgcttcaatactaacatggtgtgaagagtctattgagctaattggtagtcctccggcccctgaatgcggctaatcctaactgcggagcagatactcacatgccagtgggcagtctgtcgtaacgggcaactctgcagcggaaccgactactttgggtgtccgtgtttccttttattcttatactggctgcttatggtgacaattgagaaattgttaccatatagctattggattggccatccagtgacaaacagagcaattgtttacctatttgtcggcttcataccgttaaattttagagttttgaagacccttaacttgattatactattcaactctgcgaa

SEQ ID NO: 20760 - DNA, 742 bp, synthetic construct
  source 1..742: mol_type = other DNA
ttaaaacagctctggggttgtacccactcacagggcccactgggcgctagcacactggtatcacggtacctttgtgcgcctgttttataacccctttcccaaacgcaacgtagaagccacacacactgatcagtagtaggcacagcgcaccagttgtgtctcgatcaagcacttctgtctccccggaccgagtatcaatagactgctcacgcggttgaaggagaaagcgttcgttaaccggctgactacttcgagaaacctagtagtgctatgaaagttgcgaagcgtttcactcagcacttcccccgtgtagatcaggttgatgagtcactgcgttccccacgggtgaccgtggcagtggctgcgttggcggcctgcccatggggtgacccatgggacgcttcaatacggacatggtgcgaagagtctattgagctagccagtagtcctccggcccctgaatgcggctaatcctaactgcggagcatgtgccctcgatccagagggtagcatgtcgtaacgggcaactctgcagcggaaccgactactttgggtgtccgtgtttctttttattcttatattggctgcttatggtgacaattgagagattgttaccatatagctattggattggccacccggtgactaatagagctattatctactcctttgtaggttttgtgccattgaactacaaggtcttaaagactctaaactttatcataatacttaatactgcaaa

SEQ ID NO: 20761 - DNA, 617 bp, synthetic construct
  source 1..617: mol_type = other DNA
ctgttttatctcccttcccaatgtaatttagaagcttttaaatcaaggctcaataggtggggcgcaaaccagcgctctcatgagcaagcactcctgtctccccggtgtggttgtataaactgttcccacggttgaaaacaacctatccgttatccgctatagtacttcgagaaacctagtatcacctttggattgttgacgcgttgcgctcagcacactaacccgtgtgtagcttgggtcgatgagtctggacataccccactggcgacagtggtccaggctgcgttggcggcctactcatggtgaaaaccatgagacgctagacatgaacaaggtgtgaagagtctattgagctactatagagtcctccggcccctgaatgcggctaatcctaaccatggagcaagtgctcacaggccagtgagttgcttgtcgtaatgcgcaagtccgtggcggaaccgactactttgggtgtccgtgtttcactttttacttttatgactgcttatggtgacaatttgatattgttaccatttagctgtcaaattaattgcaaaagatcctaagtcttacttaccaatttgcattttgataaccttgatttgaaaactttaata

SEQ ID NO: 20762 - DNA, 641 bp, synthetic construct
  source 1..641: mol_type = other DNA
cctttgtacgcctgttttatctccctccccaatgtaacttagaagctttcaaatcaaagctcaataggtggagcgcaagccagcgcttccgtgagcaagtacttctgtttccccggtgcggttgtatagactgttcccacggttaaaaacaacctatccgttatccgctatagtacttcgagaaacctagtatcacctttggattgtcgatgcgttgcgctcaacacactaacccgtgtgtagcttgggtcgatgagtctggacataccccactggtaacagtggtccaggctgcgttggcggcctactcatggtgaaaaccatgagacgctagacatgaacaaggtgtgaagagtctattgagctactatagagtcctccggcccctgaatgcggctaatcttaaccatggagcaagtgctcacaaaccagtgagttgcttgtcgtaatgcgcaagtccgtggcggaaccgactactttgggtgtccgtgtttcactttttacttttatgactgcttatggtgacaatttaatattgttaccattcagctagtcgaaataatcgcataaaactttaaatcctatctaacagttcacatttggatagttttattttaaggactttaaacctacctagaaag

SEQ ID NO: 20763 - DNA, 714 bp, synthetic construct; identical to SEQ ID NO: 879
  source 1..714: mol_type = other DNA

SEQ ID NO: 20764 - DNA, 641 bp, synthetic construct
  source 1..641: mol_type = other DNA
cctttgtacgcctgttttatctccctccccaatgtaacttagaagctttcaaatcaaagctcaataggtggagcgcaaaccagcgcttccgtgagcaagtactcctgtttccccggtgcggttgtatagactgttcccacggttgaaaacaacctatccgttatccgctatagtacttcgagaaacctagtatcacctttggattgttgatgcgttgcgctcaacacactaacccgtgtgtagcttgggtcgatgagtctggacataccccactggtgacagtggtccaggctgcgttggcggcctactcatggtgaaaaccatgagacgctagacatgaacaaggtgtgaagagtctattgagctactatagagtcctccggcccctgaatgcggctaatcttaaccatggagcaagtgctcacaagccagtgagttgcttgtcgtaatgcgcaagtccgtggcggaaccgactactttgggtgtccgtgtttcactttttacttttatgactgcttatggtgacaatttaatattgttaccattcagctagtcgaaataatcgcataaagctttaaatcctatctaacgattcacatttggatagtttcattttgaggactttaaacctgcttacaaag

SEQ ID NO: 20765 - DNA, 597 bp, synthetic construct
  source 1..597: mol_type = other DNA
atccggctcaccgagcgtagtactctggtattttgtacctttgtacgcctgttttccaaaattccccatcctattcatttcctaccccgtaacgtaagaagttttcaaacagtacaataggaagcaccacatccagtggtgttgtgtacaagcacttctgtttccccggagcgaggtataggtggtcaccaccgccaaaagcctttaaccgttatccgccaaccaactacgtaatggctagtaacaccattgatttagattgacgttcgatcaggtggtacccccccactagtttggtcgatgaggctaggagcaccccacgggtgaccgtgtcctagcctgcgtggcggccaacccagcatacgctgggacgccagtttaatgacatggtgcgaagacttgcatgtgcttggttgagactcctccggcccctgaatgcggctaaccttaaccccagagccttgcagcataatccaatgttgttgaggtcgtaatgagcaattctgggacgggaccgactactttgggtgtccgtgtttcctgtttttctttacattgtcttatggtcacagcatatatattatatatactgtgatc

SEQ ID NO: 20766 - DNA, 632 bp, synthetic construct
  source 1..632: mol_type = other DNA
gtacctttgtacgcctgttttatctcccttcccaatgtaatttagaagctcttaaatcaaggctcaataggtggggcgcaaaccagcgctctcatgagcaagcactcctgtctccccggtgtggttgtataaactgttcccacggttgaaaacaacctatccgttatccgctatagtacttcgagaaacctagtatcacctttggattgttgacgcgttgcgctcagcacactaacccgtgtgtagcttaggtcgatgagtctggacataccccactggcgacagtggtccaggctgcgttggcggcctactcatggtgaaaaccatgagacgctagacatgaacaaggtgtgaagagtctattgagctactatagagtcctccggcccctgaatgcggctaatcctaaccatggagcaagtgctcacaggccagtgagttgcttgtcgtaatgcgcaagtccgtggcggaaccgactactttgggtgtccgtgtttcactttttacttttatgactgcttatggtgacaatttgatattgttaccatttagcttgtcaaattaattgcaaaagatcctgaatcttacttaccaacttgcattttgacaaccttgatttgaaaattttaata

SEQ ID NO: 20767 - DNA, 571 bp, synthetic construct
  source 1..571: mol_type = other DNA
cttctgtttccccggactgagtaccaataagctgctcgcgcggctgaaggggaaagcgttcgttacccgaccaattacttcgaaaaacctagtaccaccatgaaagttgcgcagtgtttcgctccacacaaccccagtgtagatcaggccgatgagtcaccgcattccccacgggcgaccgtggcggtggctgcgttggcggcctgcccatgggacaacccatgggacgcttcaatactgacatggtgtgaagagtctattgagctaattggtagtcctccggcccctgaatgcggctaatcccaactgcggagcagatactcacatgccagtgggcagtctgtcgtaacgggcaactctgcagcggaaccgactactttgggtgtccgtgtttccatttatttttatactggctgcttatggtgacaattgagagattgttaccatatagctattggattggccatccggtgacaagtagagcaatcatatacctgtttgttggttttgttccattaaattttaaggtcctaaaaacccttgacctgatcttagtgctcaacacggcaaa

SEQ ID NO: 20768 - DNA, 625 bp, synthetic construct
  source 1..625: mol_type = other DNA
gaacccaagtggtcaacaggcggctcagaacaccatctgggtcttgaccaagcacttctgtttccccggactgagtatcaataagctgctcacgcggctgaaggagaaaatgttcgttatccggccaattacttcgagaaacctagtaccaccatgaaggttgcgcagtgtttcgctccgcacaatcccagtgtagatcaggtcgatgagtcaccgcgttcctcacgggcgaccgtggcggtggctgcgctggcggcctgcccatggggcaacccatgggacgcttcaatactgacatggtgcgaagagtcaattgagctaattggtagtcctccggcccctgaatgcggctaatcctaactgcggagcagatgcccaagctccagtgggtagtctgtcgtaacgggtaactctgcagcggaaccgactactttgggtgtccgtgtttccttttattcttacattggctgcttatggtgacaattgagagattgttgccatatagctattggattggccatccggtgacgaatagagcaattgtgtatctttttgttggattcataccactagataatacaaacttcaaaaccctgtgttacatcattaggttaaacacagcaag

SEQ ID NO: 20769 - DNA, 544 bp, synthetic construct
  source 1..544: mol_type = other DNA
ataggctgcttacgcggccgaaggagaaaacgttcgttacccggccaattacttcgagaaacccagtaccaccatgaaggttgcgcagcgtttcgctccgcacaaccccagtgtagatcaggtcgatgggtcaccgcatccctcacgggcgaccgtggcggtggccgcgttggcggcctgcccatggggtatcccatgggacgcttcaatactgacatggtgcgaagagtctattgagctaattggtagtcctccggcccctgaatgcggctaatcctaactgcggagcagatacccacataccagtgggcagtctgtcgtaatgggcaactctgcagcggaaccgactactttgggtgtccgtgtttctttttattcctatttggctgcttatggtgacaattgaagaattgttaccatatagctattggattggccatccggtgactaatagagccattgtttacctctttgttggttttgtaccactgaatcacatagttctaaatactctaaatttgattttagtgctcaacacatcaaa

SEQ ID NO: 20770 - DNA, 631 bp, synthetic construct
  source 1..631: mol_type = other DNA
gtacctttgtacgcctgttttatctcccttcccaatgtaatttagaagctcttaaaccaaggctcaataggcggggcgcaacccagcgctctcatgagcaagcacttctgtctccccggtgtggttgtataaactgttcccacggttgaaaacaacctatccgttatccgctatagtacttcgagaaacctagtatcacctttggattgttgacgcgttgcgctcagcacactaacccgtgtgtagcttgggtcgatgagtctggacataccccactggcgacagtggtccaggctgcgttggcggcctactcatggtgaaaaccatgagacgctaaacatgaacaaggtgtgaagagtctattgagctactatagagtcctccggcccctgaatgcggctaatcctaaccatggagcaagcgctcacaagccagtgagttgcttgtcgtaatgcgcaagtccgtggcggaaccgactactttgggtgtccgtgtttcactttttacttttatgactgcttatggtgacaatttgatattgttaccatttagcttgtcaaattaattacaaaaggttctaaatcttacttaccaacttgcatttgataaccttgatttgaaaattttaata

SEQ ID NO: 20771 - DNA, 743 bp, synthetic construct
  source 1..743: mol_type = other DNA
ttaaaacagctctggggttgatcccactcacggggcctactgggcgctagcacactggtatcacggtaactttgtgcgcctgttttatccacccttccccgaaagaaacttagaagcttaacttgtgtggtcaatagtaaacccagtacgccaactgggtcacgaccaagcacttctgttaccccggactgagtatcaataagctgctcacgtggctgaaggagaaaacgttcgttacccggccaattacttcgagaaacccagtaccaccatgaaagttgcgcggcgtttcgctccgcacaaccccagtgtagatcgggccgatgagtcaccgcgttccccacgggcgaccgtggcggtggctgcgttggcggcctgcccatggggcaacccatgggacgcttcaatactgacatggtgcgaagagtctattgagctaattggtagtcctccggcccctgaatgcggctaatcctaactgcggagcagatacccacacgccagtgggcagtctgtcgtaacgggcaactctgcagcggaaccgactactttgggtgtccgtgtttccttttatatttatactggctgcttatggtgacaattgagagattgttgccatatagctattggattggccatccggtgtctaacagagcgatcgtttatttgtttgttggattcgtacccttgaattataaagcacttgtaacacttaaatacattatagatctcaacacaacaaa

SEQ ID NO: 20772 - DNA, 630 bp, synthetic construct
  source 1..630: mol_type = other DNA
cctttgtacgcctgttttatctcccttcccaatgtaatttagaagctcttaaatcaaggctcaataggtggggcgcaaaccagcgctctcatgagcaagcactcctgtctccccggtgtggttgtataaactgttcccacggttgaaaacaacctatccgttatccgctatagtacttcgagaaacctagtatcacctttggattgttgacgcgttgcgctcagcacactaacccgtgtgtagcttgggtcgatgagtctggacataccccactggcgacagtggtccaggctgcgttggcggcctactcatggtgaaaaccatgagacgctagacatgaacaaggtgtgaagagtctattgagctactatagagtcctccggcccctgaatgcggctaatcctaaccatggagcaagtgctcacaggccagtgagttgcttgtcgtaatgcgcaagtccgtggcggaaccgactactttgggtgtccgtgtttcactttttacttttatgactgcttatggtgacaatttgatattgttaccatttagcttgtcaaattaattgcaaaagatcctaaatcttacttaccaacttgcattttgacaaccttgatttgaaaatttttaata

SEQ ID NO: 20773 - DNA, 630 bp, synthetic construct
  source 1..630: mol_type = other DNA
acctttgtacgcctgttttatctcccttcccaatgtaatttagaagctcttaaatcaaggctcaataggtggggcgcaaaccagcgctctcatgagcaagcactcctgtctccccggtgtggttgtataaactgttcccacggttgaaaacgacctatccgttatccgctatagtacttcgagaaacctagtatcacctttggattgttgacgcgttgcgctcagcacactaacccgtgtgtagcttgggtcgatgagtctggacacaccccactggcgacagtggtccaggctgcgttggcggcctactcatggtgaaaaccatgagacgctagacatgaacaaggtgtgaagagtctattgagctactatagagtcctccggcccctgaatgcggctaatcctaaccatggagcaagtgctcacagaccagtgagttgcttgtcgtaatgcgcaagtccgtggcggaaccgactactttgggtgtccgtgtttcactttttacttttatgactgcttatggtgacaatttgatattgttaccatttagcttgtcaaattaattgcaaaagatcctaaatcttacttaccaatttgcattttgacaaccttgatttgaaaattttaata

SEQ ID NO: 20774 - DNA, 630 bp, synthetic construct
  source 1..630: mol_type = other DNA
cctttgtacgcctgttttatctcccttcccaatgtaatttagaagctcttaaatcaaggctcaataggtggggcgcaaaccagcgctctcatgagcaagcactcctgtctccccggtgtggttgtataaactgttcccacggttgaaaacaacctatccgttatccactatagtacttcgagaaacctagtatcacctttggattgttgacgcgttgcgctcagcacactaacccgtgtgtagcttgggtcgatgagtctggacataccccactggcgacagtggtccaggctgcgttggcggcctactcatggtgaaaaccatgagacgctagacatgaacaaggtgtgaagagtctattgagctactatagagtcctccggcccctgaatgcggctaatcctaaccatggagcaagtgctcacaggccagtgagttgcttgtcgtaatgcgcaagtccgtggcggaaccgactactttgggtgtccgtgtttcactttttacttttatgactgcttatggtgacaatttgatattgttaccatttagcttgtcaaattaattgcaaaagatcctaaatcttacttaccaacttgcattttgacaaccttgatttgaaaatttttaata

SEQ ID NO: 20775 - DNA, 630 bp, synthetic construct
  source 1..630: mol_type = other DNA
cctttgtacgcctgttttatctcccttcccaatgtaatttagaagctcttaaatcaaggctcaataggtggggcgcaaaccagcgctctcatgagcaagcactcctgtctccccggtgtggttgtataaactgttcccacggttgaaaacaacctatccgttatccgctatagtacttcgagaaacctagtatcacctttggattgttgacgcgttgcgctcagcacactaacccgtgtgtagcttgggtcgatgagtctggacataccccactggcgacagtggtccaggctgcgttggcggcctactcatggtgaaaaccatgagacgctagacatgaacaaggtgtgaagagtctattgagctactatagagtcctccggcccctgaatgcggctaatcctaaccatggagcaagtgctcacaggccagtgagttgcttgtcgtaacgcgcaagtccgtggcggaaccgactactttgggtgtccgtgtttcactttttacttttatgactgcttatggtgacaatttgatattgttaccatttagcttgtcaaattaattacaaaagatcctaaatcttacttaccaacttgcattttgacaaccttgatttgaaaatttttaata

SEQ ID NO: 20776 - DNA, 630 bp, synthetic construct
  source 1..630: mol_type = other DNA
cctttgtacgcctgttttatctcccttcccaatgtaatttagaagctcttaaatcaaggctcaataggtggggcgcaaaccagcgctctcatgagcaagcactcctgtctccccggtgtggttgtataaactgttcccacggttgaaaacaacctatccgttatccgctatagtacttcgagaaacctagtatcacctttggattgttgacgcgttgcgctcagcacactaacccgtgtgtagcttgggtcgatgagtctggacataccccactggtgacagtggtccaggctgcgttggcggcctactcatggtgaaaaccatgagacgctagacatgaacaaggtgtgaagagtctattgagctactatagagtcctccggcccctgaatgcggctaatcctaaccatggagcaagtgctcacaggccagtgagttgcttgtcgtaatgcgcaagtccgtggcggaaccgactactttgggtgtccgtgtttcactttttacttttatgactgcttatggtgacaatttgatattgttaccatttagcttgtcaaattaattgcaaaagatcctaaatcttacttaccaacttgcattttgacaaccttgatttgaaaatttttaata

SEQ ID NO: 20777 - DNA, 630 bp, synthetic construct
  source 1..630: mol_type = other DNA
cctttgtacgcctgttttatctcccttcccaatgtaatttagaagctcttaaatcaaggctcaataggtggggcgcaaaccagcgctctcatgagcaagcactcctgtctccccggtgtggttgtataaactgttcccacggttgaaaacaacctatccgttatccgctatagtacttcgagaaacctagtatcacctttggattgttgacgcgttgcgctcagcacactaacccgtgtgtagcttgggtcgatgagtctggacataccccactggcgacagtggtccaggctgcgttggcggcctactcatggtgaaaaccatgagacgctagacatgaacaaggtgtgaagagtctattgagctactatagagtcctccggcccctgaatgcggctaatcctaaccatggagcaagtgctcacaggccagtgagttgcttgtcgtaatgcgcaagtccgtggcggaaccgactactttgggtgtccgtgtttcactttttacttttatgactgcttatggtgacaatttgatattgttaccatttagcttgtcaaattaattgcaaaagatcctaaatcttacttaccaacttgcattttgacaaccttgatttgaaaattttaaata

SEQ ID NO: 20778 - DNA, 630 bp, synthetic construct
  source 1..630: mol_type = other DNA
acctttgtacgcctgttttatctcccttcccaatgtaatttagaagctcttaaatcaaggctcaataggtggggcgcaaaccagcgctctcatgagcaagcactcctgtctccccggtgtggttgtataaactgttcccacggttgaaaacaacctatccgttatccgctatagtacttcgagaaacctagtatcacctttggattgttgacgcgttgcgctcagcacactaacccgtgtgtagcttgggtcgatgagtctggacataccccactggcgacagtggtccaggctgcgttggcggcctactcatggtgaaaaccatgagacgctagacatgaacaaggtgtgaagagtctattgagctactatagagtcctccggcccctgaatgcggctaatcctaaccatggagcaagtgctcacaggccagtgagttgcttgtcgtaatgcgcaagtccgtggcggaaccgactactttgggtgtccgtgtttcactttttacttttatgactgcttatggtgacaatttgatattgttaccatttagcttgtcaaattaattgcaaaggatcctaaatcttacttaccaatttgcattttgacaatcttgatttgaaaattttaata

SEQ ID NO: 20779 - DNA, 745 bp, synthetic construct; identical to SEQ ID NO: 1115
  source 1..745: mol_type = other DNA

SEQ ID NO: 20780 - DNA, 520 bp, synthetic construct; identical to SEQ ID NO: 546
  source 1..520: mol_type = other DNA

SEQ ID NO: 20781 - DNA, 658 bp, synthetic construct
  source 1..658: mol_type = other DNA
tatccaccctctccccatagtaacttagaagtatgtttcatatggtcaataggcggctcagtatgccaactgagtctcgaccaagcacttctgttgccccggaccgagtatcaataagctactcacgtggctgaaggagaaaacgttcgttacccgaccaactacttcgagaaacctagtaccaccatggatgttgcgcggcgtttcgctccgcactaccccagtgtagatcaggtcgatgagtcaccgcattcctcacgggcgaccgtggtggtggctgcgctggcggcctgcccatggggcaacccatgggacgcttcaatacagacatggtgtgaagagtctattgagctagttggtagtcctccggcccctgaatgcggctaatcctaactgcggagcagatccccacacaccagtgggcagtctgtcgtaatgggtaactctgcagcggaaccgactactttgggtgtccgtgtttccttttattctcatactggctgcttatggtgacaattgaaagattgttaccatatagctattggattggccatccagtgtctaacagagcaataatttatctttttgttggattcgtcccacttgactacagagcacttgcaacgctcaattatattatagatctcaacacaacaag

SEQ ID NO: 20782 - DNA, 629 bp, synthetic construct
  source 1..629: mol_type = other DNA
cctttgtacgcctgttttatctcccttcccaatgtaacttagaagttcttaaatcaatgctcaataggtggggcgcaaaccagcgctctcatgagcaagcactcctgtctccccggtgaggttgtataaactgttcccacggttgaaaacaacctatccgttatccgctatagtacttcgagaaacctagtaccacctttggattgttgacgcgttgcgctcagcacactaacccgtgtgtagcttgggtcgatgagtctggacatacctcactggcgacagtggtccaggctgcgttggcggcctactcatggtgaaagccatgagacgctagacatgaacaaggtgtgaagagtctattgagctactatagagtcctccggcccctgaatgcggctaatcctaaccatggagcaagtgctcacaggccagtgagttgcttgtcgtaatgcgcaagtccgtggcggaaccgactactttgggtgtccgtgtttcactttttacttttatgactgcttatggtgacaatttgatattgttaccatttagcttgtcaaatcaattgcaaaagatcctaaatcttatttatcaacttgcatcttgataactttaatttgaaaattttaaca

SEQ ID NO: 20783 - DNA, 629 bp, synthetic construct
  source 1..629: mol_type = other DNA
cctttgtacgcctgttttatctcccttcccaacgcaacttagaagttttcaaatcgaggctcaataggtgaagcgcaaaccagcgctttcatgagcaagcacttctgtctccccggtgcagttgtatagactgtttccacggttgaaaacaacttatccgttatccgctatagtacttcgagaaacctagtatcacctttggattgttgatgcgttgcgctcagcacactaacccgtgtgtagcttgggtcgatgagtctggacgtaccccactggtgacagtggtccaggctgcgttggcggcctactcatggtgaaaaccatgagacgctaaacatgaacaaggtgtgaagagtctattgagctactatagagtcctccggcccctgaatgcggctaatcttaaccatggagcaagtgctcacaagccagtgagttgcttgtcgtaatgcgcaagtccgtggcggaaccgactactttgggtgtccgtgtttcactttttacttttatgactgcttatggtgacaatttaatattgttaccatttagcttgtcaaatcaattgcaaaagatcctaaatcttatttatcaacttgcatcttgataactttaatttgaaaattttaaca

SEQ ID NO: 20784 - DNA, 629 bp, synthetic construct
  source 1..629: mol_type = other DNA
cctttgtacgcctgttttatctcccttcccaatgtaatttagaagctcttaaatcaaggctcaataggtggggcgcaaaccagcgctctcatgagcaagcactcctgtctccccggtgtggttgtataaactgttcccacggttgaaaacaacctatccgttatccgctatagtacttcgagaaacctagtatcacctttggattgttgacgcgttgcgctcagcacactaacccgtgtgtagcttgggtcgatgagtctggacataccccactggcgacagtggtccaggctgcgttggcggcctactcatggtgaaaaccatgagacgctagacatgaacaaggtgtgaagagtctattgagctactatagagtcctccggcccctgaatgcggctaatcctaaccatggagcaagtgctcacaggccagtgagttgcttgtcgtaatgcgcaagtccgtggcggaaccgactactttgggtgtccgtgtttcactttttacttttatgactgcttatggtgacaatttgatattgttaccatttagcttgtcaaattaattgcaaaagatcctaaatcttacttaccaacttgcattttgacaaccttggtttgaaaattttaata

SEQ ID NO: 20785 - DNA, 629 bp, synthetic construct
  source 1..629: mol_type = other DNA
cctttgtacgcctgttttatctcccttcccaatgtaatttagaagctcttaaatcaaggctcaataggtggggcgcaaaccagcgctctcatgagcaagcacttctgtctccccggtgtggttgtataaactgttcccacggttgaaaacaacctatccgttatccgctatagtacttcgagaaacctagtatcacctttggattgttgacgcgttgcgctcagcacactaacccgtgtgtagcttgggtcgatgagtctggacataccccactggcgacagtggtccaggctgcgttggcggcctactcatggtgaaaaccatgagacgctagacatgaacaaggtgtgaagagtctattgagctactatagagtcctccggcccctgaatgcggctaatcctaaccatggagcaagtgctcacaggccagtgagttgcttgtcgtaatgcgcaagtccgtggcggaaccgactactttgggtgtccgtgtttcactttttacttttatgactgcttatggtgacaatttgatattgttaccatttagcttgtcaaattaattgcaaaagatcctgaatcttacttaccaacttgcattttgacaaccttgatttgaaaattttaata

SEQ ID NO: 20786 - DNA, 629 bp, synthetic construct
  source 1..629: mol_type = other DNA
cctttgtacgcctgttttatctcccttcccaatgtaatttagaagctcttaaatcaaggctcaataggtggggcgcaaaccagcgctctcatgagcaagcactcctgtctccccggtgtggttgtataaactgttcccacggttgaaaacaacctatccgttatccgctatagtacttcgagaaacctagtatcacctttggattgttgacgcgttgcgctcagcacactaacccgtgtgtagcttgggtcgatgagtctggacgtaccccactggcgacagtggtccaggctgcgttggcggcctactcatggtgaaaaccatgagacgctagacatgaacaaggtgtgaagagtctattgagctactatagagtcctccggcccctgaatgcggctaatcctaaccatggagcaagtgctcacaggccagtgagttgcttgtcgtaatgcgcaagtccgtggcggaaccgactactttgggtgtccgtgtttcactttttacttttatgactgcttatggtgacaatttgatattgttaccatttagcttgtcaaattaattgcaaaagatcctaaatcttacttaccaacttgcattttgacgaacttgatttgaaaattttaata

SEQ ID NO: 20787 - DNA, 629 bp, synthetic construct
  source 1..629: mol_type = other DNA
cctttgtacgcctgttttatctcccttcccaatgtaatttagaagctcttaaatcaaggctcaataggtggggcgcaaaccagcgctctcatgagcaagcactcctgtctccccggtgtggttgtataaactgttcccacggttgaaaacaacctatccgttatccgctatagtacttcgagaaacctagtatcacctttggattgttgatgcgttgcgctcagcacactaacccgtgtgtagcttgggtcgatgagtctggacataccccactggcgacagtggtccaggctgcgttggcggcctactcatggtgaaaaccatgagacgctagacatgaacaaggtgtgaagagtctattgagctactatagagtcctccggcccctgaatgcggctaatcctaaccatggagcaagtgctcacaggccagtgagttgcttgtcgtaatgcgcaagtccgtggcggaaccgactactttgggtgtccgtgtttcactttttacttttatgactgcttatggtgacaatttgatattgttaccatttagcttgtcaaattaattgcaaaagatcctaaatcttacttaccaatttgcattttgacaaccttgatttgaaaattttaata

SEQ ID NO: 20788 - DNA, 629 bp, synthetic construct
  source 1..629: mol_type = other DNA
cctttgtacgcctgttttatctcccttcccaatgtaatttagaagctcttaaatcaaggctcaataggtggggcgcaaaccagcgctctcatgagcaagcactcctgtctccccggtgtggttgtataaactgttcccacggttgaaaacaacctatccgttatccgctatagtacttcgagaaacctagtatcacctttggattgttgacgcgttgcgctcagcacactaacccgtgtgtagcttgggtcgatgagtctggacataccccactggcgacagtggtccaggctgcgttggcggcctactcatggtgaaaaccatgagacgctagacatgaacaaggtgtgaagagtctattgagctactatagagtcctccggcccctgaatgcggctaatcctaaccatggagcaagtgctcacaggccagtgagttgcttgtcgtaatgcgcaagtccgtggcggaaccgactactttgggtgtccgtgtttcactttttacttttatgactgcttatggtgacaatttgatattgttaccatttagcttgtcaaattaattgcaaaagatcctaaatcttacttatcaacttgcattttgacaaccttgatttgaaaattttaata

SEQ ID NO: 20789 - DNA, 629 bp, synthetic construct
  source 1..629: mol_type = other DNA
cctttgtacgcctgttttatctcccttcccaatgtaatttagaagctcttaaatcaaggctcaataggtggggcgcaaaccagcgctctcatgagcaagcactcctgtctccccggtgtggttgtataaactgttcccacggttgaaaacaacctatccgttatccgctatagtacttcgagaaacctagtatcacctttggattgttgacgcgttgcgctcagcacactaacccgtgtgtagcttgggtcgatgagtctggacacaccccactggcgacagtggtccaggctgcgttggcggcctactcatggtgaaaaccatgagacgctagacatgaacaaggtgtgaagagtctattgagctactatagagtcctccggcccctgaatgcggctaatcctaaccatggagcaagtgctcacaggccagtgagttgcttgtcgtaatgcgcaagtccgtggcggaaccgactactttgggtgtccgtgtttcactttttacttttatgactgcttatggtgacaatttgatattgttaccatttagcttgtcaaattaattgcaaaagatcctaaatcttacttaccaacttgcattttgacaaccttgatttgaaaattttaata

SEQ ID NO: 20790 - DNA, 629 bp, synthetic construct
  source 1..629: mol_type = other DNA
cctttgtacgcctgttttatctcccttcccaatgtaatttagaagctcttaaatcaaggctcaataggtggggcgcaaaccagcgctctcatgagcaagcactcctgtctccccggtgtggttgtataaactgttcccacggttgaaaacaacctatccgttatccgctatagtacttcgagaaacctagtatcacctttggattgttgacgcgttgcgctcagcacactaacccgtgtgtagcttgggtcgatgagtctggacataccccactggcgacagtggtccaggctgcgttggcggcctactcatggtgaaaaccatgagacgctagacatgaacaaggtgtgaagagtctattgagctactatagagtcctccggcccctgaatgcggctaatcctaaccatggagcaagtgctcacaggccagtgagttgcttgtcgtaatgcgcaagtccgtggcggaaccgactactttgggtgtccgtgtttcactttttacttttatgactgcttatggtgacaatttgatattgttaccatttagcttgtcaaattaattgcaaaagatcctaaatcttacttaccaatttgcattttgacaaccttgatttgaaaattttaata

SEQ ID NO: 20791 - DNA, 629 bp, synthetic construct
  source 1..629: mol_type = other DNA
cctttgtacgcctgttttatctcccttcccaatgtaatttagaagctcttaaatcaaggctcaataggtggggcgcaaaccagcgctctcatgagcaagcactcctgtctccccggtgtggttgtataaactgttcccacggttgaaaacaacctatccgttatccgctatagtacttcgagaaacctagtatcacctttggattgttgacgcgttgcgctcagcacactaacccgtgtgtagcttgggtcgatgagtctggacgtaccccactggcgacagtggtccaggctgcgttggcggcctactcatggtgaaaaccatgagacgctagacatgaacaaggtgtgaagagtctattgagctactatagagtcctccggcccctgaatgcggctaatcctaaccatggagcaagtgctcacaggccagtgagttgcttgtcgtaatgcgcaagtccgtggcggaaccgactactttgggtgtccgtgtttcactttttacttttatgactgcttatggtgacaatttgatattgttaccatttagcttgtcaaattaattgcaaaagatcctaaatcttacttaccaacttgcattttgacgaacttgatttgaaaattttaaca

SEQ ID NO: 20792 - DNA, 629 bp, synthetic construct
  source 1..629: mol_type = other DNA
cctttgtacgcctgttttatctcccttcccaatgtaatttagaagctcttaaatcaaggctcaataggtggggcgcaaaccagcgctctcatgagcaagcactcctgtctccccggtgtggttgtataaactgttcccacggttgaaaacaacctatccgttatccgctatagtacttcgagaaacctagtatcacctttggattgttgacgcgttgcgctcagcacactaacccgtgtgtagcttgggtcgatgagtctggacataccccactggcgacagtggtccaggctgcgttggcggcctactcatggtgaaaaccatgagacgctagacatgaacaaggtgtgaagagtctattgagctactatagagtcctccggcccctgaatgcggctaatcctaaccatggagcaagtgctcacaggccagtgagttgcttgtcgtaatgcgcaagtccgtggcggaaccgactactttgggtgtccgtgtttcactttttacttttatgactgcttatggtgacaatttgatattgttaccatttagcttgtcaaattaattgcaaaagatcctaaatcttacttaccaacttgcattttgacaaccttgatttgaaaattttaata

SEQ ID NO: 20793 - DNA, 629 bp, synthetic construct
  source 1..629: mol_type = other DNA
cctttgtacgcctgttttatctcccttcccaatgtaatttagaagctcttaaatcaaggctcaataggtggggcgcaaaccagcgctctcatgagcaagcactcctgtctccccggtgtggttgtataaactgttcccacggttgaaaacaacctatccgttatccgctatagtacttcgagaaacctagtatcacctttggattgttgacgcgttgcgctcagcacactaacccgtgtgtagcttgggtcgatgagtctggacataccccactggcgacagtggtccaggctgcgttggcggcctactcatggtgaaaaccatgagacgctagacatgaacaaggtgtgaagagtctattgagctactatagagtcctccggcccctgaatgcggctaatcctaaccatggagcaagtgctcacaggccagtgagttgcttgtcgtaatgcgcaagtccgtggcggaaccgactactttgggtgtccgtgtttcactttttacttttatgactgcttatggtgacaatttgatattgttaccatttagcttgtcaaattaattgcaaaaggtcctaaatcttatttaccaacttgcattttgacaatcttggtttaaaaattttaata

SEQ ID NO: 20794 - DNA, 629 bp, synthetic construct
  source 1..629: mol_type = other DNA
cctttgtacgcctgttttatctcccttcccaatgtaatttagaagctcttaaatcaaggctcaataggtggggcgcaaaccagcgctctcatgagcaagcactcctgtctccccggtgtggttgtataaactgttcccacggttgaaaacaacctatccgttatccgctatagtacttcgagaaacctagtatcacctttggatcgttgacgcgttgcgctcagcacactaacccgtgtgtagcttgggtcgatgagtctggacgtaccccactggcgacagtggtccaggctgcgttggcggcctactcatggtgaaaaccatgagacgctagacatgaacaaggtgtgaagagtctattgagctactatagagtcctccggcccctgaatgcggctaatcctaaccatggagcaagtgctcacaggccagtgagttgcttgtcgtaatgcgcaagtccgtggcggaaccgactactttgggtgtccgtgtttcactttttacttttatgactgcttatggtgacaatttgatattgttaccatttagcttgtcaaattaattgcaaaagatcctaaatcttacttaccaacttgcattttgacgaacttgatttgaaaattttaata

SEQ ID NO: 20795 - DNA, 629 bp, synthetic construct
  source 1..629: mol_type = other DNA
cctttgtacgcctgttttatctcccttcccaatgtaatttagaagctcttaaatcaaggctcaataggtggggcgcaaaccagcgctctcatgagcaagcactcctgtctccccggtgtggttgtataaactgttcccacggttgaaaacaacctatccgttatccgctatagtacttcgagaaacctagtatcacctttggattgttgacgcgttgcgctcagcacactaacccgtgtgtagcttgggtcgatgagtctggacataccccactggcgacagtggtccaggctgcgttggcggcctactcatggtgaaaaccatgagacgctagacatgaacaaggtgtgaagagtctattgagctactatagagtcctccggcccctgaatgcggctaatcctaaccatggagcaagtgctcacaggccagtgagttgcttgtcgtaatgcgcaagtccgtggcggaaccgactactttgggtgtccgtgtttcactttttacttttatgactgcttatggtgacaatttgatattgttaccatttagcttgtcaaattaattgcaaaagatcctgaatcttacttaccaacttgtattttgacaaccttgatttgaaaattttaaca

SEQ ID NO: 20796 - DNA, 629 bp, synthetic construct
  source 1..629: mol_type = other DNA
cctttgtacgcctgttttatctcccttcccaatgtaatttagaagctcttaaatcaaggctcaataggtggggcgcaaaccagcgctctcatgagcaagcactcctgtctccccggtgtggttgtataaactgttcccacggttgaaaacaacctatccgttatccgctatagtacttcgagaaacctagtatcacctttggattgttgacgcgttgcgctcagcacactaacccgtgtgtagcttgggtcgatgagtctggacataccccactggcgacagtggtccaggctgcgttggcggcctactcatggtgaaaaccatgagacgctagacatgaacaaggtgtgaagagtctattgagctactatagagtcctccggcccctgaatgcggctaatcctaaccatggagcaagtgctcacagaccagtgagttgcttgtcgtaatgcgcaagtccgtggcggaaccgactactttgggtgtccgtgtttcactttttacttttatgactgcttatggtgacaatttgatattgttaccatttagcttgtcaaattaattgcaaaagatcttgaatcttacttaccaacttgcattttgacaaccttgatttgaaaattttaata

SEQ ID NO: 20797 - DNA, 629 bp, synthetic construct
  source 1..629: mol_type = other DNA
cctttgtacgcctgttttatctcccttccctatgtaatttagaagctcttaaatcaaggctcaataggtggggcgcaaaccagcgctctcatgagcaagcactcctgtctccccggtgtggttgtataaactgttcccacggttgaaaacaacctatccgttatccgctatagtacttcgagaaacctagtatcacctttggattgttgacgcgttgcgctcagcacactaacccgtgtgtagcttgggtcgatgagtctggacataccccactggcgacagtggtccaggctgcgttggcggcctactcatggtgaaaaccatgagacgctagacatgaacaaggtgtgaagagtctattgagctactatagagtcctccggcccctgaatgcggctaatcttaaccatggagcaagtgctcacaggccagtgagttgcttgtcgtaatgcgcaagtccgtggcggaaccgactactttgggtgtccgtgtttcactttttacttttatgactgcttatggtgacaatttgatattgttaccatttagcttgtcaaattaattacaaaagatcctaaatcttacataccaacttgcattttgacaacctcgatttgaaaattttaata

SEQ ID NO: 20798 - DNA, 629 bp, synthetic construct
  source 1..629: mol_type = other DNA
cctttgtacgcctgttttatctcccttcccaatgtaatttagaagctcttaaatcaaggctcaataggtggggcgcaaaccagcgctctaatgagcaagcactcctgtctccccggtgtggttgtataaactgttcccacggttgaaaacaacttatccgttatccgctatagtacttcgagaaacctagtatcacctttggattgttgacgcgttgcgctcagcacactaacccgtgtgtagcttgggtcgatgagtctggacataccccactggcgacagtggtccaggctgcgttggcggcctactcatggtgaaaaccatgagacgctagacatgaacaaggtgtgaagagtctattgagctactatagagtcctccggcccctgaatgcggctaatcctaaccatggagcaagtgctcacaggccagtgagttgcttgtcgtaatgcgcaagtccgtggcggaaccgactactttgggtgtccgtgtttcactttttacttttatgactgcttatggtgacaatttgatattgttaccatttagcttgtcaaattaattgcaaaagatcataaatcttacttaccaacttgcattttgacaaccttgatttgaaaattttaata

SEQ ID NO: 20799 - DNA, 629 bp, synthetic construct
  source 1..629: mol_type = other DNA
cctttgtacgcctgttttatctcccttcccaatgtaatttagaagctcttaaatcaaggctcaataggtggggcgcaaaccagcgctctcatgagcaagcactcctgtctccccggtgtggttgtataaactgttcccacggttgaaaacaacctatccgttatccgctatagtacttcgagaaacctagtatcacctttggattgttgacgcgttgcgctcagcacactaacccgtgtgtagcttgggtcgatgagtctggacataccccactggcgacagtggtccaggctgcgttggcggcctactcatggtgaaaaccatgagacgctagacatgaacaaggtgtgaagagtctattgagctactatagagtcctccggcccctgaatgcggctaatcctaaccatggagcaagtgctcacaggccagtgagttgcttgtcgtaatgcgcaagtccgtggcggaaccgactactttgggtgtccgtgtttcactttttacttttatgactgcttatggtgacaatttgatattgttaccatttagcttgtcaaattaattgcaaaagatcctaaatcttactcaccaatttgcattttgacaaccttgatttgaaaattttaata

SEQ ID NO: 20800 - DNA, 629 bp, synthetic construct
  source 1..629: mol_type = other DNA
cctttgtacgcctgttttatctcccttcccaatgtaatttagaagctcttaaatcaaggctcaataggtggggcgcaaaccagcgctctcatgagcaagcactcctgtctccccggtgtggttgtataaactgttcccacggttgaaaacgacctatccgttatccgctatagtacttcgagaaacctagtatcacctttggattgttgacgcgttgcgctcagcacactaacccgtgtgtagcttgggtcgatgagtctggacataccccactggcgacagtggtccaggctgcgttggcggcctactcatggtgaaaaccatgagacgctagacatgaacaaggtgtgaagagtctattgagctactatagagtcctccggcccctgaatgcggctaatcctaaccatggagcaagtgctcacagaccagtgagttgcttgtcgtaacgcgcaagtccgtggcggaaccgactactttgggtgtccgtgtttcactttttacttttatgactgcttatggtgacaatttgatattgttaccatttagcttgtcaaattaattgcaaaagatcccaaatcttacttaccaatttgcattttgacaaccttgatttgaaaattttaata

SEQ ID NO: 20801 - DNA, 558 bp, synthetic construct
  source 1..558: mol_type = other DNA
ggactgagtatcaataagctgctcacgcggctgagggagaaaacgtccgttacccggccaattacttcgagaagcctagtaccaccacgaaagttgcgcagcgtttcgatccgcacaaccccagtgtagatcaggtcgatgagtcaccgcgttccccacgggcgaccgtggcggtggctgcgttggcggcctgcccatgggagaacccatgggacgcttcaatactgacatggtgtgaagagtctattgagctaattggtagtcctccggcccctgaatgcggctaatcctaactgtggagcagattcccgcatgccagcgggtggtctgtcgtaacgggcaactctgcagcggaaccgactactttgggtgtccgtgtttccttttattcctatattggctgcttatggtgacaattgagagattgttaccatatagctattggattggccatccggtgacaaacagagcaattatctaccaatttattggttttgtaccattgaattacaacgcattcaaaactcttaactttattttggctcttaatacagcaaa

SEQ ID NO: 20802 - DNA, 629 bp, synthetic construct
  source 1..629: mol_type = other DNA
cctttgtacgcctgttttatctcccttcccaatgtaatttagaagctcttaaatcaaggctcaataggtggggcgcaaaccagcgctctcatgagcaagcactcctgtctccccggtgcggttgtataaactgttcccacggttgaaaacgacctatccgttatccgctatagtacttcgagaaacctagtatcacctttggattgttgacgcgttgcgctcagcacactaacccgtgtgtagcttgggtcgatgagtctggacataccccactggcgacagtggtccaggctgcgttggcggcctactcatggtgaaaaccatgagacgctagacatgaacaaggtgtgaagagtctattgagctactatagaatcctccggcccctgaatgcggctaatcctaaccatggagcaagtgctcacagaccagtgagttgcttgtcgtaacgcgcaagtccgtggcggaaccgactactttgggtgtccgtgtttcactttttacctttatgactgcttatggtgacaatttaatattgttaccatttagcttgtcaaattaattgcaaaacatcctaaatcttacttaccaacttgcattttgataaccttggtttgaaaatttcagta

SEQ ID NO: 20803 - DNA, 629 bp, synthetic construct
  source 1..629: mol_type = other DNA
cctttgtacgcctgttttatctcccttcccaatgtaatttagaagctcttaaatcaaggctcaataggcggggcgcaacccagcgctctcatgagcaagcacttctgtctccccggtgtggttgtataaactgttcccacggttgaaaacaacctatccgttatccgctatagtacttcgagaaacctagtatcacctttggattgttgacgcgttgcgctcagcacactaacccgtgtgtagcttgggtcgatgagtctggacataccccactggcgacagtggtccaggctgcgttggcggcctactcatggtgaaaaccatgagacgctaaacatgaacaaggtgtgaagagtctattgagctactatagagtcctccggcccctgaatgcggctaatcctaaccatggagcaagcgctcacaagccagtgagttgcttgtcgtaatgcgcaagtccgtggcggaaccgactactttgggtgtccgtgtttcactttttacttttatgactgcttatggtgacaatttgatattgttaccatttagcttgtcaaattaattacaaaaggttctaaatcttacttaccaacttgcattttgataaccttgatttgaaaattttaata

SEQ ID NO: 20804 - DNA, 629 bp, synthetic construct
  source 1..629: mol_type = other DNA
cctttgtacgcctgttttatctcccttcccaatgtaatttagaagctcttaaatcaaggctcaataggtggggcgcaaaccagcgctctcatgagcaagcactcctgtctccccggtgtggttgtataaactgttcccacggttgaaaacaacctatccgttatccgctatagtacttcgagaaacctagtatcacctttggattgttgacgcgttgcgctcagcacactaacccgtgtgtagcttgggtcgatgagtctggacataccccactggcgacagtggtccaggctgcgttggcggcctactcatggtgaaaaccatgagacgctagacatgaacaaggtgtgaagagtctattgagctactatagagtcctccggcccctgaatgcggctaatcctaaccatggagcaagtgctcacaggccagtgagttgcttgtcgtaatgcgcaagtccgtggcggaaccgactactttgggtgtccgtgtttcactttttacttttatgactgcttatggtgacaatttgatattgttaccatttagcttgtcaaattaattgcaaaggatcctaaatcttacttaccaatttgcattttgacaatcttgatttgaaaattttgaca

SEQ ID NO: 20805 - DNA, 629 bp, synthetic construct
  source 1..629: mol_type = other DNA
cctttgtacgcctgttttatctcccttcccaatgtaatttagaagctcttaaatcaaggctcaataggcggggcgcaacccagcgctctcatgagcaagcacttctgtctccccggtgtggttgtataaactgttcccacggttgaaaacaacctatccgttatccgctatagtacttcgagaaacctagtatcacctttggattgttgacgcgttgcgctcagcacactaacccgtgtgtagcttgggtcgatgagtctggacataccccactggcgacagtggtccaggctgcgttggcggcctactcatggtgaaaaccatgagacgctaaacatgaacaaggtgtgaagagtctattgagctactatagagtcctccggcccctgaatgcggctaatcctaaccatggagcaagcgctcacaagccagtgagttgcttgtcgtaatgcgcaagtccgtggcggaaccgactactttgggagtccgtgtttcactttttacttttatgactgcttatggtgacaatttgatattgttaccatttagcttgtcaaattaattacaaaaggttctaaatcttacttaccaacttgcattttgataaccttgatttgaaaattttaata

SEQ ID NO: 20806 - DNA, 629 bp, synthetic construct
  source 1..629: mol_type = other DNA
cctttgtacgcctgttttatttcccttcccaatgtaatttagaagctcttaaatcaaggctcaataggtggggcgcaaaccagcgctctcatgagcaagcactcctgtctccccggtgtggttgtataaactgttcccacggttgaaaacaacctatccgttatccgctatagtacttcgagaaacctagtatcacctttggattgttgacgcgttgcgctcagcacactaacccgtgtgtagcttgggtcgatgagtctggacataccccactggcgacagtggtccaggctgcgttggcggcctactcatggcgaaaaccatgagacgctagacatgaacaaggtgtgaagagtctattgagctactatagagtcctccggcccctgaatgcggctaatcctaaccatggagcaagtgctcacaggccagtgagttgcttgtcgtaatgcgcaagtccgtggcggaaccgactactttgggtgtccgtgtttcattttttacttttatgactgcttatggtgacaatttgatattgttaccatttagcttgtcaaattaattgcaaaggatcctaaatcttacttaccaatttgcattttgacaatcttgatttgaaaattttaata

SEQ ID NO: 20807 - DNA, 629 bp, synthetic construct
  source 1..629: mol_type = other DNA
cctttgtacgcctgttttatctcccttcccaatgtaatttagaagctcttaaatcaaggctcaataggtggggcgcaaaccagcgctctcatgagcaagcactcctgtctccccggtgtggttgtataaactgttcccacggttgaaaacaacctatccgttatccgctatagtacttcgagaaacctagtatcacctttggattgttgacgcgttgcgctcagcacactaacccgtgtgtagcttgggtcgatgagtctggacataccccactggcgacagtggtccaggctgcgttggcggcctactcatggtgaaaaccatgagacgctagacatgaacaaggtgtgaagagtctattgagctactatagagtcctccggcccctgaatgcggctaatcctaaccatggagcaagtgctcacaggccagtgagttgcttgtcgtaatgcgcaagtccgtggcggaaccgactactttgggtgtccgtgtttcactttttacttttatgactgcttatggtgacaatttgatattgttaccatttagcttgtcaaattaattgcaaaggatcctaaatcttacttaccaatttgtattttgacaatcttgatttgaaaattttaata

SEQ ID NO: 20808 - DNA, 629 bp, synthetic construct
  source 1..629: mol_type = other DNA
cctttgtacgcctgttttatctcccttcccaatgtaatttagaagctcttaaatcaaggctcaataggcggggcgcaacccagcgctctcatgagcaagcacttctgtctccccggtgtggttgtataaactgttcccacggttgaaaacaacctatccgttatccgctatagtacttcgagaaacctagtatcacctttggattgttgacgcgttgcgctcagcacactaacccgtgtgtagcttgggtcgatgagtctggacataccccactggcgacagtggtccaggctgcgttggcggcctactcatggtgaaaaccatgagacgctaaacatgaacaaggtgtgaagagtctattgagctactatagagtcctccggcccctgaatgcggctaatcctaaccatggagcaagcgctcacaagccagtgagttgcttgtcgtaatgcgcaagtccgtggcggaaccgactactttgggtgtccgtgtttcactttttacttttatgactgcttatggtgacaatttgatattgttaccatttagcttgtcaaattaattacaaaaggttctaaatcttacttaccaacttgcattttcataaccttgatttgaaaattttaata

SEQ ID NO: 20809 - DNA, 629 bp, synthetic construct
  source 1..629: mol_type = other DNA
cctttgtacgcctgttttatctcccttcccaatgtaatttagaagctcttaaactaaggctcaataggcggggcgcaacccagcgctctcatgagcaagcacttctgtctccccggtgtggttgtataaactgttcccacggttgaaaacaacctatccgttatccgctatagtacttcgagaaacctagtatcacctttggattgttgacgcgttgcgctcagcacactaacccgtgtgtagcttgggtcgatgagtctggacataccccactggcgacagtggtccaggctgcgttggcggcctactcatggtgaaaaccatgagacgctaaacatgaacaaggtgtgaagagtctattgagctactatagagtcctccggcccctgaatgcggctaatcctaaccatggagcaagcgctcacaagccagtgagttgcttgtcgtaatgcgcaagtccgtggcggaaccgactactttgggtgtccgtgtttcactttttacttttatgactgcttatggtgacaatttgatattgttaccatttagcttgtcaaattaattacaaaaggttctaaatcttactcaccaacttgcattttgataaccttgatttgaaaattttaata

SEQ ID NO: 20810 - DNA, 629 bp, synthetic construct
  source 1..629: mol_type = other DNA
cctttgtacgcctgttttatctcccttcccaatgtaatttagaagctcttaaatcaaggctcaataggtggggcgcaaaccagcgctctcatgagcaagcacttctgtctccccggtgtggttgtataaactgttcccacggttgaaaacaacctatccgttatccgctatagtacttcgagaaacctagtatcacctttggattgttgacgcgttgcgctcagcacactaacccgtgtgtagcttgggtcgatgagtctggacataccccactggcgacagtggtccaggctgcgttggcggcctactcatggtgaaaaccatgagacgctagacatgaacaaggtgtgaagagtctattgagctactatagagtcctccggcccctgaatgcggctaatcctaaccatggagcaagtgctcacaggccagtgagttgcttgtcgtaatgcgcaagtccgtggcggaaccgactactttgggtgtccgtgtttcactttttacttttatgactgcttatggtgacaatttgatattgttaccatttagcttgtcaaattaattgcaaaggatcctaaatcttacttaccaatttgcattttgacaatcttgatttgaaaattttaata

SEQ ID NO: 20811 - DNA, 629 bp, synthetic construct
  source 1..629: mol_type = other DNA
cctttgtacgcctgttttatctcccttcccaatgtaatttagaagctcttaaatcaaggctcaataggtggggcgcaaaccagcgctctcatgagcaagcacttctgtctccccggtgtggttgtatagactgttcccacggttgaaaacaacctatccgttatccgctatagtacttcgagaaacctagtatcacctttggattgttgacgcgttgcgctcagcacactaacccgtgtgtagcttgggtcgatgagtctggacataccccactggcgacagtggtccaggctgcgttggcggcctactcatggtgaaaaccatgagacgctagacatgaacaaggtgtgaagagtctattgagctactatagagtcctccggcccctgaatgcggctaatcctaaccatggagcaagtgctcacaggccagtgagttgcttgtcgtaatgcgcaagtccgtggcggaaccgactactttgggtgtccgtgtttcactttttacttttatgactgcttatggtgacaatttgatattgttaccatttagcttgtcaaattaattgcaaaggatcctaaatcttacttaccaatttgcattttgacaatcttgatttgaaaattttaata

SEQ ID NO: 20812 - DNA, 629 bp, synthetic construct
  source 1..629: mol_type = other DNA
cctttgtacgcctgttttatctcccttcccaatgtaatttagaagctcttaaaccaaggctcaataggcggggcgcaacccagcgctctcatgagcaagcacttctgtctccccggtgtggttgtataaactgttcccacggttgaaaacaacctatccgttatccgctatagtacttcgagaaacctagtatcacctttggattgttgacgcgttgcgctcagcacactaacccgtgtgtagcttgggtcgatgagtctggacataccccactggcgacagtggtccaggctgcgttggcggcctactcatggtgaaaaccatgagacgctaaacatgaacaaggtgtgaagagtctattgagctactgtagagtcctccggcccctgaatgcggctaatcctaaccatggagcaagcgctcacaagccagtgagttgcttgtcgtaatgcgcaagtccgtggcggaaccgactactttgggtgtccgtgtttcactttttacttttatgactgcttatggtgacaatttcatattgttaccatttagcttgtcaaattaattacaaaaggttctaaatcttacttaccaacttgcattttgataaccttgatttgaaaatcttaata

SEQ ID NO: 20813 - DNA, 629 bp, synthetic construct
  source 1..629: mol_type = other DNA
cctttgtacgcctgttttatctcccttcccaatgtaatttagaagctcttaaatcaaggctcaataggtggggcgcaaaccagcgctctcatgagcaagcactcctgtctccccggtgtggttgtataaactgttcccacggttgaaaacaacctatccgttatccgctatagtacttcgagaaacctagtatcacctttggattgttgacgcgttgcgctcagcacactaacccgtgtgtagcttgggtcgatgagtctggacataccccactggcgacagtggtccaggctgcgttggcggcctactcatggtgaaaaccatgagacgctagacatgaacaaggtgtgaagagtctattgagctactatagagtcctccggcccctgaatgcggctaatcctaaccatggagcaagtgctcacaggccagtgagttgcttgtcgtaatgcgcaagtccgtggcggaaccgactactttgggtgtccgtgtttcactttttacttttatgactgcttatggtgacaatttgatattgttaccatttagcttgtcaaattaattgcaaaggatcctaaatcttacttaccaatttgcattttgacaatcttgatttgaaaattttaata

SEQ ID NO: 20814 - DNA, 629 bp, synthetic construct
  source 1..629: mol_type = other DNA
cctttgtacgcctgttttatctcccttcccaatgtaatttagaagctcttaaaccaaggctcaataggcggggcgcaacccagcgctctcatgagcaagcacttctgtctccccggtgtggttgtataaactgttcccacggttgaaaacaacctatccgttatccgctatagtacttcgagaaacctagtatcacctttggattgttgacgcgttgcgctcagcacactaacccgtgtgtagcttgggtcgatgagtctggacataccccactggcgacagtggtccaggctgcgttggcggcctactcatggtgaaaaccatgagacgctaaacatgaacaaggtgtgaagagtctattgagctgctatagagtcctccggcccctgaatgcggctaatcctaaccatggagcaagcgctcacaagccagtgagttgcttgtcgtaatgcgcaagtccgtggcggaaccgactactttgggtgtccgtgtttcactttttacttttatgactgcttatggtgacaatttgatattgttaccatttagcttgtcaaattaattacaaaaggttctaaatcttacttaccaacttgcattttgataaccttgatttgaaaattttaata

SEQ ID NO: 20815 - DNA, 629 bp, synthetic construct
  source 1..629: mol_type = other DNA
cctttgtacgcctgttttatctcccttcccaatgtaatttagaagctcttaaatcaaggctcaataggtggggcgcaaaccagcgctctcatgagcaagcactcctgtctccccggtgtggttgtataaactgttcccacggttgaaaacaacctatccgttatccgctatagtacttcgagaaacctagtatcacctttggattgttgacgcgttgcgctcagcacactaacccgtgtgtagcttgggtcgatgagtctggacataccccactggcgacagtggtccaggctgcgttggcggcctactcatggtgaaaaccatgagacgctagacatgaacaaggtgtgaagagtctattgagctactatagagtcctccggcccctgaatgcggctaatcctaaccatggagcaagtgctcacaggccagtgagttgcttgtcgtaatgcgcaagtccgtggcggaaccgactactttgggtgtccgtgtttcactttttacttttatgactgcttatggtgacaatttgatattgttaccatttagcttgtcaaattaattgcaaaggatcctaaatcttacttaccaatttgcattttgacaatcttgatttgaaaattttgata

SEQ ID NO: 20816 - DNA, 629 bp, synthetic construct
  source 1..629: mol_type = other DNA
cctttgtacgcctgttttatctcccttcccaatgtaatttagaagctcttaaaccaaggctcaataggcggggcgcaacccagcgctctcatgagcaagcacttctgtctccccggtgtggttgtataaactgttcccacggttgaaaacaacctatccgttatccgctatagtacttcgagaaacctagtatcacctttggattgttgacgcgttgcgctcagcacactaacccgtgtgtagcttgggtcgatgagtctggacataccccactggcgacagtggtccaggctgcgttggcggcctactcatggtgaaaaccatgagacgctaaacatgaacaaggtgtgaagagtctattgagctactatagagtcctccggcccctgaatgcggctaatcctaaccatggagcaagcgctcacaagccagtgagttgcttgtcgtaatgcgcaagtccgtggcggaaccgactactttgggtgtccgtgtttcactttttacttttatgactgcttatggtgacaatttgatattgttaccatttagcttgtcaaattaattacaaaaggttctaaatcttacttaccaacttgcattttgataaccttgatttgaaaatcttaata

SEQ ID NO: 20817 - DNA, 629 bp, synthetic construct
  source 1..629: mol_type = other DNA
cctttgtacgcctgttttatctcccttcccaatgtaatttagaagctcttaaatcaaggctcaataggtggggcgcaacccagcgctctcatgagcaagcacttctgtctccccggtgcggttgtataaactgttcccacggttgaaaacagcctatccgttatccgctatagtacttcgagaaacctagtatcacctttggattgtcgacgcgttgcgctcagcacactaacccgtgtgtagcttgggtcgatgagtctggacataccccactggcgacagtggtccaggctgcgttggcggcctactcatggtgaaaaccatgagacgctagacatgaacaaggtgtgaagagtctattgagctactatagagtcctccggcccctgaatgcggctaatcctaaccatggagcaagtgctcacaggccagtgagttgcttgtcgtaatgcgcaagtccgtggcggaaccgactactttgggtgtccgtgtttcactttttacttttatgactgcttatggtgacaatttgatattgttaccatttagcttgtcaaattaattgcaaaagatcctaaatcttacttactaacttgcattttgataaccttgatttgaaaattttaata

SEQ ID NO: 20818 - DNA, 628 bp, synthetic construct
  source 1..628: mol_type = other DNA
tttgtacgcctgttttatctcccttcccaatgtaatttagaagctcttaaatcaaggctcaataggtggggcgcaaaccagcgctctcatgagcaagcactcctgtctccccggtgtggttgtataaactgttcccacggttgaaaacaacctatccgttatccgctatagtacttcgagaaacctagtatcacctttggattgttgacgcgttgcgctcagcacactaacccgtgtgtagcttgggtcgatgagtctggacacaccccactggcgacagtggtccaggctgcgttggcggcctactcatggtgaaaaccatgagacgctagacatgaacaaggtgtgaagagtctattgagctactatagagtcctccggcccctgaatgcggctaatcctaaccatggagcaagtgctcacaggccagtgagttgcttgtcgtaatgcgcaagtccgtggcggaaccgactactttgggtgtccgtgtttcactttttacttttatgactgcttatggtgacaatttgatattgttaccatttagcttgtcaaattaattgcaaaagatcctaaatcttacttaccaacttgcattttgacaatcttgatttgaaaatttttaata

SEQ ID NO: 20819 - DNA, 628 bp, synthetic construct
  source 1..628: mol_type = other DNA
cctttgtacgcctgttttatctccctttccaatgtaatttagaagctcttaaaccaaggctcaataggcggggcgcaacccagcgctctcatgagcaagcacttctgtctccccggtgtggttgtataaactgttcccacggttgaaaacaacctatccgttatccgctatagtacttcgagaaacctagtatcacctttggattgttgacgcgttgcgctcagcacactaacccgtgtgtagcttgggtcgatgagtctggacataccccactggcgacagtggtccaggctgcgttggcggcctactcatggtgaaaaccatgagacgctaaacatgaacaaggtgtgaagagtctattgagctactatagagtcctccggcccctgaatgcggctaatcctaaccatggggcaagcgctcacaagccagtgagttgcttgtcgtaatgcgcaagtccgtggcggaaccgactactttgggtgtccgtgtttcactttttacttttatgactgcttatggtgacaatttgatattgttaccatttagcttgtcaaattaattacaaaaggttctaaatcttacttaccaacttgcatttgataaccttgatttgaaaattttaata

SEQ ID NO: 20820 - DNA, 628 bp, synthetic construct
  source 1..628: mol_type = other DNA
cctttgtacgcctgttttatctcccttcccaatgtaatttagaagctcttaaaccaaggctcaataggcggggcgcaacccagcgctctcatgagcaagcacttctgtctccccggtgtggttgtataaactgttcccacggttgaaaacaacctatccgttatccgctatagtacttcgagaaacctagtatcacctttggattgttgacgcgttgcgctcagcacactaacccgtgtgtagcttgggtcgatgagtctggacataccccactggcgacagtggtccaggctgcgttggcggcctactcatggtgaaaaccatgagacgctaaacatgaacaaggtgtgaagagtctattgagctactatagagtcctccggcccctgaatgcggctaatcctaaccatggagcaagcgctcacaagccagtgagttgcttgtcgtaatgcgcaagtccgtggcggaaccgactactttgggtgtccgtgtttcactttttacttttatgactgcttatggtgacaatttgatattgttaccatttagcttgtcaaattaattacaaaaggttctaaatcttacttaccaacttgcatttgataaccttgatttgaaaattttaata

SEQ ID NO: 20821 - DNA, 628 bp, synthetic construct
  source 1..628: mol_type = other DNA
cctttgtacgcctgttttatctcccttcccaatgtaatttagaagcttttaaatcaaggctcaataggtggggcgcaaaccagcgctctcatgagcaagcactcctgtctccccggtgtggttgtataaactgttcccacggttgaaaacaacctatccgttatccgctatagtacttcgagaaacctagtatcacctttggattgttgacgcgttgcgctcagcacactaacccgtgtgtagcttgggtcgatgagtctggacataccccactggcgacagtggtccaggctgcgttggcggcctactcatggtgaaaaccatgagacgctagacatgaacaaggtgtgaagagtctattgagctactatagagtcctccggcccctgaatgcggctaatcctaaccatggagcaagtgctcacaggccagtgagttgcttgtcgtaatgcgcaagtccgtggcggaaccgactactttgggtgtccgtgtttcactttttacttttatgactgcttatggtgacaatttgatattgttaccatttagctgtcaaattaattgcaaaagatcctaagtcttacttaccaatttgcattttgttaaccttgatttgaaaattttaata

SEQ ID NO: 20822 - DNA, 628 bp, synthetic construct
  source 1..628: mol_type = other DNA
cctttgtacgcctgttttatctcccttcccaatgtaatttagaagcttttaaatcaaggctcaataggtggggcgcaaaccagcgctctcatgagcaagcactcctgtctccccggtgtggttgtataaactgttcccacggttgaaaacaacctatccgttatccgctatagtacttcgagaaacctagtatcacctttggattgttgacgcgttgcgctcagcacactaacccgtgtgtagcttgggtcgatgagtctggacataccccactggcgacagtggtccaggctgcgttggcggcctactcatggtgaaaaccatgagacgctagacatgaacaaggtgtgaagagtctattgagctactatagagtcctccggcccctgaatgcggctaatcctaaccatggagcaagtgctcacaggccagtgagttgcttgtcgtaatgcgcaagtccgtggcggaaccgactactttgggtgtccgtgtttcactttttacttttatgactgcttatggtgacaatttgatattgttaccatttagctgtcaaattaattgcaaaagatcctaagtcttacttaccaatttgcattttgataaccttgatttgaaaattttaata

SEQ ID NO: 20823 - DNA, 628 bp, synthetic construct
  source 1..628: mol_type = other DNA
cctttgtacgcctgttttatctcccttcccaatgtaatttagaagcttttaaatcaaggctcaataggtggggcgcaaaccagcgctctcatgagcaagcactcctgtctccccggtgtggttgtataaactgttcccacggttgaaaacaacctatccgttatccgctacagtacttcgagaaacctagtatcacctttggattgttgacgcgttgcgctcagcacactaacccgtgtgtagcttgggtcgatgagtctggacataccccactggcgacagtggtccaggctgcgttggcggcctactcatggtgaaaaccatgagacgctagacatgaacaaggtgtgaagagtctattgagctactatagagtcctccggcccctgaatgcggctaatcctaaccatggagcaagtgctcacaggccagtgagttgcttgtcgtaatgcgcaagtccgtggcggaaccgactactttgggtgtccgtgtttcactttttacttttatgactgcttatggtgacaatttgatattgttaccatttagctgtcaaattaattgcaaaagatcctaagtcttacttaccaatttgcattttgataaccttgatttgaaaattttaata

SEQ ID NO: 20824 - DNA, 520 bp, synthetic construct
  source 1..520: mol_type = other DNA
ccagtgtggtttcgagcaagcacttctgtttccccggccgcgccctatatgctgtgcaaacggcagaaaggggcaacgtcgttatccgcttgcatactacgggaaacccagtaccaccattgattgtattgagagttgcgttcagcgcctctcccccctggcgtagctcgggccgatgaggctcagaagcccccacaggtgactgtgtctgagcctgcgttggcggcctgcccgcacctcttggtgtgggacgcttaatacatgacatggtgcgaagagtctactgtgctatgtaagattcctccggcccctgaatgtggataatcctaaccactgatcccatgtgcgcaaaccagcgtgcggtgggtcgtaacgcgcaagtcggtggcggaaccaactactttgggtgaccgtgtttcctttattacctattgaatgtttatggtgacaattgcttgattcagttgttgccatttattacattcgttgacctagagtgaaaaccaactgaaccaataca

SEQ ID NO: 20825 - DNA, 519 bp, synthetic construct
  source 1..519: mol_type = other DNA
aaaacgttcgttatccggccaattacttcgagaagcttagtaccaccatggaggttgcgcagtgtttcgttccgcacaaccccagtgtagatcaggtcgatgagtcaccgcactcctcacgggcgaccgtggcggtggctgcgctggcggcctgcccatggggcaacccatgggacgcttcaatactgacatggtgcgaagagcctattgagctaattggtagtcctccggcccctgaatgcggctaatcctaactgcggagcagatacccacgagccagtgggcagtctgtcgtaatgggtaactctgcagcggaaccgactactttgggtgtccgtgtttccttttattcctacattggctgcttatggtgacaattgagagattgttaccatatagctattggattggccgtccagtgacaaacagagcgattatctatctatttgttggtttcgtaccattaaaccttagagtcctaaagaccctcaatttgattatacaattaaactctgcgaa

SEQ ID NO: 20826 - DNA, 518 bp, synthetic construct
  source 1..518: mol_type = other DNA
ccagtgtggtttcgagcaagcacttctgtttccccggttgcgtcccatatgctgtgcaaacggcaaaaaggggcaatatcgttatccgcttgcatactacgggaaacctagtaccaccattgattgtattgagggttgcgttcatcacctcttccctggtgtagctcaggccgatgaggctcagagtcccccacaggtaactgtgtctgagcctgcgttggcggcctgccctcgccttatggcgtgggacgctcactacatgacatggtgcgaagagtctactgtgctatgtaagagtcctccggcccctgaatgtggataatcctaaccactgatcccacgaacgcaagccagcgtgtagtgggtcgtaacgcgcaagtcggtggcggaaccaactactttgggtgaccgtgtttcctttattacctattgaatgtttatggtgacaattgtttgattcagttgttgccatttactacattcatcagcttagtgttaaaaccgattgaactgctaca

SEQ ID NO: 20827 - DNA, 559 bp, synthetic construct
  source 1..559: mol_type = other DNA
gggcgcaaaccagcgctctcatgagcaagcactcctgtctccccggtgtggttgtataaactgtttccacggttgaaaacaacctatccgttatccgctatagtacttcgagaaacctagtatcacctttggattgttgacgcgttgcgctcagcacactaacccgtgtgtagcttgggtcgatgagtctggacataccccactggcgacagtggtccaggctgcgttggcggcctactcatggtgaaaaccatgagacgctagacatgaacaaggtgtgaagagtctattgagctactatagagtcctccggcccctgaatgcggctaatcctaaccatggagcaagtgctcacaggccagtgagttgcttgtcgtaatgcgcaagtccgtggcggaaccgactactttgggtgtccgtgtttcactttttacttttatgactgcttatggtgacaatttgatattgttaccatttagcttgtcaaattaattgcaaaagatcctaaatcttacttaccaacttgcattttgataaccttgatttgaaaattttaata

SEQ ID NO: 20828 - DNA, 630 bp, synthetic construct
  source 1..630: mol_type = other DNA
cctttgtacgcctgttttatctcccttcccaatgtaatttagaagctcttaaatcaaggctcaataggtggggcgcaaaccagcgctctcatgagcaagcactcctgtctccccggtgtggttgtataaactgttcccacggttgaaaacaacctatccgttatccgctatagtacttcgagaaacctagtatcacctttggattgttgacgcgttgcgctcagcacactaacccgtgtgtagcttgggtcgatgagtctggacacaccccactggcgacagtggtccaggctgcgttggcggcctactcatggtgaaaaccatgagacgctagacatgaacaaggtgtgaagagtctattgagctactatagagtcctccggcccctgaatgcggctaatcctaaccatggagcaagtgctcacaggccagtgagttgcttgtcgtaatgcgcaagtccgtggcggaaccgactactttgggtgtccgtgtttcactttttacttttatgactgcttatggtgacaatttgatattgttaccatttagcttgtcaaattaattgcaaaagatcctaaatcttacttaccaacttgcattttgacaaccttgatttgaaaatttttaata

SEQ ID NO: 20829 - DNA, 629 bp, synthetic construct
  source 1..629: mol_type = other DNA
cctttgtacgcctgttttatctcccttcccaatgtaatttagaagctcttaaatcaaggctcaataggtagggcgcaaaccagcgctcttatgagcaagcactcctgtctccccggtgtggttgtataaactgttcccacggttgaaaacaacctatccgttatccgctatagtacttcgagaaacctagtatcacctttggattgttgacgcgttgcgctcagcacactaacccgtgtgtagcttgggtcgatgagtctggacataccccactggcgacagtggtccaggctgcgttggcggcctactcatggtgaaaaccatgagacgctagacatgaacaaggtgtgaagagtctattgagctactatagagtcctccggcccctgaatgcggctaatcctaaccatggagcaagtgctcacaggccagtgagttgcttgtcgtaatgcgcaagtccgtggcggaaccgactactttgggtgtccgtgtttcactttttacttttatgactgcttatggtgacaatttgatattgttaccatttagcttgtcaaattaattgcaaaagatcctaaatcttacttaccaacttgcattttgacaaccttgatttgaaaattttaata

SEQ ID NO: 20830 - DNA, 539 bp, synthetic construct
  source 1..539: mol_type = other DNA
catgagcaagcactcctgtctccccggtgtggttgtataaactgttcccacggttgaaaacaacctatccgttatccgctatagtacttcgagaaacctagtatcacctttggattgttgatgcgttgcgctcagcacactaacccgtgtgtagcttgggtcgatgagtctggacataccccactggcgacagtggtccaggctgcgttggcggcctactcatggtgaaaaccatgagacgctagacatgaacaaggtgtgaagagtctattgagctactatagagtcctccggcccctgaatgcggctaatcctaaccatggagcaagtgctcgcaggccagtgagttgcttgtcgtaatgcgcaagtccgtggcggaaccgactactttgggtgtccgtgtttcactttttacttttatgactgcttatggtgacaatttgatattgttaccatttagctgtcaaattaattgcaaaagatcctaagtcttacttaccaatttgcattttgataaccttgatttgaaaattttaata

SEQ ID NO: 20831 - DNA, 629 bp, synthetic construct
  source 1..629: mol_type = other DNA
cctttgtacgcctgttttatctcccttcccaatgtaatttagaagctcttaaaccaaggctcaataggcggggcgcaacccagcgctctcatgagcaagcacttctgtctccccggtgtggttgtataaactgttcccacggttgaaaacaacctatccgttatccgctatagtacttcgagaaacctagtatcacctttggattgttgacgcgttgcgctcagcacactaacccgtgtgtagcttgggtcgatgagtctggacataccccactggcgacagtggtccaggctgcgttggcggcctactcatggtgaaaaccatgagacgctaaacatgaacaaggtgtgaagagtctattgagctactatagagtcctccggcccctgaatgcggctaatcctaaccatggagcaagcgctcacaagccagtgagttgcttgtcgtaatgcgcaagtccgtggcggaaccgactactttgggtgtccgtgtttcactttttacttttatgactgcttatggtgacaatttgatattgttaccatttagcttgtcaaattaattacaaaaggttctaaatcttacttaccaacttgcattttgataaccttgatttgaaaattttaata

SEQ ID NO: 20832 - DNA, 629 bp, synthetic construct
  source 1..629: mol_type = other DNA
cctttgtacgcctgttttatctcccttcccaatgtaatttagaagctcttaaatcaaggctcaataggtggggcgcaaaccagcgctctcatgagcaagcactcctgtctccccggtgtggttgtataaactgttcccacggttgaaaacaacctatccgttatccgctatagtacttcgagaaacctagtatcacctttggattgttgacgcgttgcgctcagcacactaacccgtgtgtagcttaggtcgatgagtctggacataccccactggcgacagtggtccaggctgcgttggcggcctactcatggtgaaaaccatgagacgctagacatgaacaaggtgtgaagagtctattgagctactatagagtcctccggcccctgaatgcggctaatcctaaccatggagcaagtgctcacaggccagtgagttgcttgtcgtaatgcgcaagtccgtggcggaaccgactactttgggtgtccgtgtttcactttttacttttatgactgcttatggtgacaatttgatattgttaccatttagcttgtcaaattaattgcaaaagatcctgaatcttacttaccaacttgcactttgacaaccttgatttgaaaattttaata

SEQ ID NO: 20833 - DNA, 629 bp, synthetic construct
  source 1..629: mol_type = other DNA
cctttgtacgcctgttttatctcccttcccaatgtaatttagaagctcttaaatcaaggctcaataggtggggcgcaaaccagcgctctcatgagcaagcactcctgtctccccggtgtggttgtataaactgttcccacggttgaaaacaacctatccgttatccgctatagtacttcgagaaacctagtatcacctttggattgttgacgcgttgcgctcagcacactaacccgtgtgtagcttgggtcgatgagtctggacataccccactggcgacagtggtccaggctgcgttggcggcctactcatggtgaaaaccatgagacgctagacatgaacaaggtgtgaagagtctattgagctactatagagtcctccggcccctgaatgcggctaatcctaaccatggagcaagtgctcacaggccagtgagttgcttgtcgtaatgcgcaagtccgtggcggaaccgactactttgggtgtccgtgtttcactttttacttttatgactgcttatggtgacaatttgatattgttaccatttagcttgtcaaattaattgcaaaagatcctgaatcttacttaccaacttgcattttgacaaccttgatttgaaaattttaata

SEQ ID NO: 20834 - DNA, 629 bp, synthetic construct
  source 1..629: mol_type = other DNA
cctttgtacgcctgttttatctcccttcccaatgtaatttagaagctcttaaatcaaggctcaataggtggggcgcaaaccagcgctctcatgagcaagcactcctgtctccccggtgtggttgtataaactgttcccacggttgaaaacaacctatccgttatccgctatagtacttcgagaaacctagtatcacctttggattgttgacgcgttgcgctcagcacactaacccgtgtgtagcttgggtcgatgagtctggacataccccactggcgacagtggtccaggctgcgttggcggcctactcatggtgaaaaccatgagacgctagacatgaacaaggtgtgaagagtctattgagctaccatagagtcctccggcccctgaatgcggctaatcctaaccatggagcaagtgctcacaggccagtgagttgcttgtcgtaatgcgcaagtccgtggcggaaccgactactttgggtgtccgtgtttcactttttacttttatgactgcttatggtgacaatttgatattgttaccatttagcttgtcaaattaattgcaaaagatcctaaatcttacttaccaatttgcattttgacaaccttgatttgaaaattttaata

SEQ ID NO: 20835 - DNA, 629 bp, synthetic construct
  source 1..629: mol_type = other DNA
cctttgtacgcctgttttatctcccttcccaatgtaatttagaagctcttaaatcaaggctcaataggcggggcgcaacccagcgctctcatgagcaagcacttctgtctccccggtgtggttgtataaactgttcccacggttgaaaacaacctatccgttatccgctatagtacttcgagaaacctagtatcacctttggattgttgacgcgttgcgctcagcacactaacccgtgtgtagcttgggtcgatgagtctggacataccccactggcgacagtggtccaggctgcgttggcggcctactcatggtgaaaaccatgagacgctaaacatgaacaaggtgtgaagagtctattgagctactatagagtcctccggcccctgaatgcggctaatcctaaccatggagcaagcgctcacaagccagtgagttgcttgtcgtaatgcgcaagtccgtggcggaaccgactactttgggtgtccgtgtttcactttttacttttatgactgcttatggtgacaatttgatattgttaccatttagcttgtcaaattaattacaaaaggttctaaatcttacttaccaacctgcattttgataaccttgatttgaaaattttaata

SEQ ID NO: 20836 - DNA, 516 bp, synthetic construct
  source 1..516: mol_type = other DNA
ccagtgtggtttcgagcaagcacttctgttttcccggttgcgtcccatatgctgtgcaaacggcaaaaaggggcaatatcgttacccgcttgtatactacgggaaacctagtaccaccattgattgtattgagagttgcgctcatcacctttccccggtgtagctcaggccgatgaggctcagaatcccccacaggtgactgtgtctgagcctgcgctggcggcctgccctcgccttatggcgcgggacgcttaatacatgacatggtgcgaagagtctactgtgctatgcaagagtcctccggcccctgaatgtggataatcctaaccactgatcccacgcacgcaaaccagtgtgtagtgggtcgtaacgcgcaagtcggtggcggaaccaactactttgggtgaccgtgtttcctttattacctattgaatgtttatggtgacaattgtttgattcagttgttgccattttctacattcatttacctagtgtcaaaccaattgaactgttaca

SEQ ID NO: 20837 - DNA, 629 bp, synthetic construct
  source 1..629: mol_type = other DNA
cctttgtacgcctgttttatctcccttcccaatgtaatttagaagctcttaaatcaaggctcaataggtggggcgcaaaccagcgctctcatgagcaagcactcctgtctccccggtgtggttgtataaactgtttccacggttgaaaacaacctatccgttatccgctatagtacttcgagaaacctagtatcacctttggattgttgacgcgttgcgctcagcacactaacccgtgtgtagcttgggtcgatgagtctggacgtaccccactggcgacagtggtccaggctgcgttggcggcctactcatggtgaaaaccatgagacgctagacatgaacaaggtgtgaagagtctattgagctactatagagtcctccggcccctgaatgcggctaatcctaaccatggagcaagtgctcacaggccagtgagttgcttgtcgtaatgcgcaagtccgtggcggaaccgactactttgggtgtccgtgtttcactttttacttttatgactgcttatggtgacaatttgatattgttaccatttagcttgtcaaattaattgcaaaagatcctaaatcttacttatcaacttgcattttgacaaccttgatttgaaaattttaata

SEQ ID NO: 20838 - DNA, 628 bp, synthetic construct
  source 1..628: mol_type = other DNA
ctttgtacgcctgttttatctcccttcccaatgtaatttagaagctcttaaatcaaggctcaataggtggggcgcaaaccagcgctctcatgagcaagcactcctgtctccccggtgtggttgtataaactgttcccacggttgaaaacaacctatccgttatccgctatagtacttcgagaaacctagtatcacctttggattgttgacgcgttgcgctcagcacactaacccgtgtgtagcttgggtcgatgagtctggacgtaccccactggcgacagtggtccaggctgcgttggcggcctactcatggtgaaaaccatgagacgctagacatgaacaaggtgtgaagagtctattgagctactatagagtcctccggcccctgaatgcggctaatcctaaccatggagcaagtgctcacaggccagtgagttgcttgtcgtaatgcgcaagtccgtggcggaaccgactactttgggtgtccgtgtttcactttttacttttatgactgcttatggtgacaatttgatattgttaccatttagcttgtcaaattaattgcaaaagatcctaaatcttacttaccaacttgcattttgacaaccttgatttgaaaattttaata

SEQ ID NO: 20839 - DNA, 628 bp, synthetic construct
  source 1..628: mol_type = other DNA
ctttgtacgcctgttttatctcccttcccaatgtaatttagaagctcttaaatcaaggctcaataggtggggcgcaaaccagcgctctcatgagcaagcactcctgtctccccggtgtggttgtataaactgttcccacggttgaaaacaacctatccgttatccgctatagtacttcgagaaacctagtatcacctttggattgttgacgcgttgcgctcagcacactaacccgtgtgtagcttgggtcgatgagtctggacataccccactggcgacagtggtccaggctgcgttggcggcctactcatggtgaaaaccatgagacgctagacatgaacaaggtgtgaagagtctattgagctactatagagtcctccggcccctgaatgcggctaatcctaaccatggagcaagtgctcacaggccagtgagttgcttgtcgtaatgcgcaagtccgtggcggaaccgactactttgggtgtccgtgtttcactttttacttttatgactgcttatggtgacaatttgatattgttaccatttagcttgtcaaattaattgcaaaagatcctaaatcttactcaccaatttgcattttgacaaccttgatttgaaaattttaata

SEQ ID NO: 20840 - DNA, 515 bp, synthetic construct
  source 1..515: mol_type = other DNA
ccagtgtggtttcgagcaagcacttctgttttcccggttgcgtcccatatgctgtgcaaacggcaaaaagggacaatatcgttacccgcttgtatactacgggaaacctagtaccaccattgattgtattgagggttgcgctcatcacctttcccggtgtagctcaggctgatgaggctcagaatcccccacaggtaactgtgtctgagcctgcgttggcggcctgccctcgccttatggcgtgggacgctcactacatgacatggtgcgaagagtctactgtgctatacaagagtcctccggcccctgaatgtggataatcctaaccactgatcccacgtacgcaaaccagcgtgtagtgggtcgtaacgcgcaagtcggtggcggaaccaactactttgggtgaccgtgtttcctttattacctattgaatgtttatggtgacaattgtttgattcagttgttaccatttaccacattcattaacctagagtcaaaccgattgaactgctaca

SEQ ID NO: 20841 - DNA, 627 bp, synthetic construct
  source 1..627: mol_type = other DNA
tttgtacgcctgttttatctcccttcccaatgtaatttagaagctcttaaatcaaggctcaataggtggggcgcaaaccagcgctctcatgagcaagcactcctgtctccccggtgtggttgtataaactgttcccacggttgaaaacaacctatccgttatccgctatagtacttcgagaaacctagtatcacctttggattgttgacgcgttgcgctcagcacactaacccgtgtgtagcttgggtcgatgagtctggacataccccactggcgacagtggtccaggctgcgttggcggcctactcatggtgaaaaccatgagacgctagacatgaacaaggtgtgaagagtctattgagctactatagagtcctccggcccctgaatgcggctaatcctaaccatggagcaagtgctcacaggccagtgagttgcttgtcgtaatgcgcaagtccgtggcggaaccgactactttgggtgtccgtgtttcactttttacttttatgactgcttatggtgacaatttgatattgttaccatttagcttgtcaaattaattgcaaaagatcctgaatcttacttaccaacttgtattttgacaaccttgatttgaaaattttaaca

SEQ ID NO: 20842 - DNA, 627 bp, synthetic construct
  source 1..627: mol_type = other DNA
tttgtacgcctgttttatctcccttcccaatgtaatttagaagctcttaaatcaaggctcaataggtggggcgcaaaccagcgctctcatgagcaagcactcctgtctccccggtgtggttgtataaactgttcccacggttgaaaacaacctatccgttatccgctatagtacttcgagaaacctagtatcacctttggattgttgacgcgttgcgctcagcacactaacccgtgtgtagcttgggtcgatgagtctggacacaccccactggtgacagtggtccaggctgcgttggcggcctactcatggtgaaaaccatgagacgctagacatgaacaaggtgtgaagagtctattgagctactatagagtcctccggcccctgaatgcggctaatcctaaccatggagcaagtgctcacaggccagtgagtagcttgtcgtaatgcgcaagtccgtggcggaaccgactactttgggtgtccgtgtttcactttttacctttatgactgcttatggtgacaatttgatattgttaccatttagcttgtcaaattaattgcaaaagacactaaatcttacttaccaacttgcattttgataaccttgatttgaaaattttaata

SEQ ID NO: 20843 - DNA, 627 bp, synthetic construct
  source 1..627: mol_type = other DNA
tttgtacgcctgttttatctcccttcccaatgtaatttagaagcttttaaatcaaggctcaataggtggggcgcaaaccagcgctctcatgagcaagcactcctgtctccccggtgtggttgtataaactgttcccacggttgaaaacaacctatccgttatccgctatagtacttcgagaaacctagtatcacctttggattgttgacgcgttgcgctcagcacactaacccgtgtgtagcttgggtcgatgagtctggacataccccactggcgacagtggtccaggctgcgttggcggcctactcatggtgaaaaccatgagacgctagacatgaacaaggtgtgaagagtctattgagctactatagagtcctccggcccctgaatgcggctaatcctaaccatggagcaagtgctcacaggccagtgagttgcttgtcgtaatgcgcaagtccgtggcggaaccgactactttgggtgtccgtgtttcactttttacttttatgactgcttatggtgacaatttgatattgttaccatttagcttgtcaaattaattgcaaaagatcctgaatcttacttaccaacttgcattttgacaaccttgatttaaaaattttaata

SEQ ID NO: 20844 - DNA, 627 bp, synthetic construct
  source 1..627: mol_type = other DNA
tttgtacgcctgttttatctcccttcccaatgtaatttagaagctcttaaatcaaggctcaataggtggggcgcaaaccagcgctctcatgagcaagcactcctgtctccccggtgtggttgtataaactgttcccacggttgaaaacaacctatccgttatccgctatagtacttcgagaaacctagtatcacctttggattgttgacgcgttgcgctcagcacactaacccgtgtgtagcttgggtcgatgagtctggacataccccactggcgacagtggtccaggctgcgttggcggcctactcatggtgaaaaccatgagacgctagacatgaacaaggtgtgaagagtctattgagctactatagagtcctccggcccctgaatgcggctaatcctaaccatggagcaagtgctcacaggccagtgagttgcttgtcgtaatgcgcaagtccgtggcggaaccgactactttgggtgtccgtgtttcactttttacttttatgactgcttatggtgacaatttgatattgttaccatttagcttgtcaaattaattgcaaaaggtcctaaatcttatttaccaacttgcattttgacaatcttggtttaaaaattttaata

SEQ ID NO: 20845 - DNA, 659 bp, synthetic construct
  source 1..659: mol_type = other DNA
ataaataaagaccaataggagtccaacatccagttggatcgcggtcaagcacttctgtctccccggacctagtagtgataggctgtacccacggccgaagatgaacccgtccgttatccggccagctacttcgagaagcctagtaacatcaaagatctgtcttggcgtttcgctcagcgcgttccccccgcgtagatcgggctgatgggtctccgcataccccacgggcgaccgtggcggaggccgcgtggcggcccgcctatggcgaaagccataggacgccatttcagtgacagggtgtgaagagcctattgagctagttggtagtcctccggcccctgaatgcggctaatcctaaccacggagcgtccaccagcaaaccagctgggagggcgtcgtaacgggtaactctgtggcggaaccgactactttgggtgtccgtgtttccttttgatcctatattggctgcttatggtgacaacgataagttgttatcataaagcttttgggttggccacctggaaaaagttatcagtgtttgatattattcggctttcacgcctaccaataaaacaagctttatacttgctagtttcattttatccatctgaggatattactgaattttacctacaacttttgctcactctaacagcaaa

SEQ ID NO: 20846 - DNA, 538 bp, synthetic construct
  source 1..538: mol_type = other DNA
gctcacgcggctgaaggagaaaacgttcgttacccggccaattacttcgagaaacctagtaccactatgaaggttgcgcagcgtttcgctccgcacaaccccagtgtagatcaggccgatgagtcaccgcatccctcacgggcgaccgtggcggtggctgcgttggcggcctgcccatggggcaacccatgggacgcttcaatactgacatggtgcgaagagtctattgagctaattggtagtcctccggcccctgaatgcggctaatcctaactgcggagcagatacccgcgcaccagcgggcagtctgtcgtaatgggcaactctgcagcggaaccgactactttgggtgtccgtgtttccttttattcttatactggctgcttatggtgacaattgagagattgttaccatatagctattggattggccacccggtgactaacagagcgattatctaccaatttgttggttttgtgccattggacttttcaaccctaagaaccctcaatttcatattagtgcttaacacagcaaa

SEQ ID NO: 20847 - DNA, 604 bp, synthetic construct
  source 1..604: mol_type = other DNA
caccatccgacccacagggtgtagtgctctggtattttgtacctttgcacgcctgttttcccatcgtacccctccttaaattcctccccaagtaacgttagaagtttaaggaaaccaatgtacaataggaagcatcacatccagtggtgtaatgtacaagcacttctgtttccccggagcgaggtataagtggtacccaccgctgaaagcctttaaccgttatccgccaatcaactacgtaatggctagtattatcatgtttgtaatctggcgttcgatcaggtggttccccccactagtttggtcgatgaggctaggaactccccacgggcgaccgtgtcctagcctgcgtggcggccaacccagctcttgctgggacgcctttttatagacatggtgtgaagacctgcatgtgcttgattgtgagtcctccggcccctgaatgcggctaaccttaaccccggagccttgcagcataatccaatgttgttgaggtcgtaatgagcaattctgggacgggaccgactactttgggtgtccgtgtttccttttattctttatattgtcttatggtcacagcatatatagtatatatactgtgatc

SEQ ID NO: 20848 - DNA, 622 bp, synthetic construct; identical to SEQ ID NO: 730
  source 1..622: mol_type = other DNA

SEQ ID NO: 20849 - DNA, 616 bp, synthetic construct
  source 1..616: mol_type = other DNA
ttaaaactgagtgtgggttgtacccacccacactgtctacggacgtagtacacttgtatctcggtacacttgtacgccagtttgcctccccttccctttatgtaacgcaagaagcttaaacacaacgaccaacaggtggtaacaagccatgttgcctacggtcaagcactcctgtctccccggtacaaagggtgttaagtcttacccaagactgaagccttgagtatcgttatccgcataactactggacaaagcctagtaacaccccacgatataggatggttggtcgctccaccagtgtaccccctggtagacctggcagatgaggctagagtttccccactggcgacagtgttctagcctgcgtggctgcctgctcccttatgggagaagccattctattgacaaggtgtgaagagccccgtacgctagttatgagtcctccggcccctgaatgcggctaatccaaccctgcagccattgcatgggaaccaccatgtagatggtcgtaatgagcaattgcgggacggaaccgactactttgggtgtccgtgtttcttgtttttcttatcaattgcttatggtgacaatatatactgctaatatattgttcacc

SEQ ID NO: 20850 - DNA, 593 bp, synthetic construct
  source 1..593: mol_type = other DNA
tgggtgtagtactctggtattatgtacctttgtatgcctgtttattcccaaaccccctcccgttacatttccaacccctgtaacgttagaagtttggaatttaacagtacaataggaggcaccatacccaatggtgtaatgtacaagcacttctgttttcccggagcgaggtataggtggtacccaccgctgaaagcctttaaccgttatccgccaaccaactacgtaacagctagtagcattttgttgttgactggacgttcgatcaggtggtttacccccccactagtttggtcgatgaggctggaagttccccacgggtgaccgtgttccagcctgcgtggcggccaacccagcttatgctgggacgccctttcaatgacatggtgtgaagactcacatgtgcttggttgtgaatcctccggcccctgaatgcggctaaccctaaccccggagccttgcatcacaatccagtgatgttagggtcgtaatgagtaattctgggatgggaccgactactttgggtgtccgtgtttctcatttttctttgaattgtcttatggtcacagcatatagaaatatatactgtgatc

SEQ ID NO: 20851 - DNA, 621 bp, synthetic construct; identical to SEQ ID NO: 63
  source 1..621: mol_type = other DNA

SEQ ID NO: 20852 - DNA, 614 bp, synthetic construct; identical to SEQ ID NO: 53
  source 1..614: mol_type = other DNA

SEQ ID NO: 20853 - DNA, 614 bp, synthetic construct
  source 1..614: mol_type = other DNA
taaaactggatccaggttgttcccacctggatctcctattgggagttgtactctattattccggtaattttgtacgccagttttatcttccccctccccaattgtaacttagaaggttatcaatacgaccaataggtggtagttagccaaactaccaaaggtcaagcacttctgtttccccggtcaaagttgatatgctccaacagggcaaaaacaactgagatcgttatccgcaaagtgcctacgcaaagcctagtaacacctttgaagatttatggttggtcgttccgctatttcccatagtagacctggcagatgaggctagaaatcccccactggcgacagtgttctagcctgcgtggctgcctgcgcaccccttgggtgcgaagccatacattggacaaggtgtgaagagccccgtgtgctcactttgagtcctccggcccctgaatgtggctaaccttaaccctgcagctagtgcatgtaatccaacatgttgctagtcgtaatgagcaattgcgggacgggaccaactactttgggtgtccgtgtttcactttttccttttaatattgcttatggtgacaatatatatagctatatatattgacacc

SEQ ID NO: 20854 - DNA, 614 bp, synthetic construct
  source 1..614: mol_type = other DNA
taaaactgggtccaggttgttcccacctggatctcctattgggagttgtactctattattccggtaattttgtacgccagttttatcttccccctccccaattgtaacttagaaggttatcaatacgaccaataggtggtagttagccaaactaccaaaggtcaagcacttctgtttccccggtcaaagttgatatgctccaacagggcaaaaacaactgagatcgttatccgcaaagtgcctacgcaaagcctagtaacacctttgaagatttatggttggtcgttccgctatttcccatagtagacctggcagatgaggctagaaatcccccactggcgacagtgttctagcctgcgtggctgcctgcgcaccccttgggtgcgaagccatacattggacaaggtgtgaagagccccgtgtgctcactttgagtcctccggcccctgaatgtggctaaccttaaccctgcagctagtgcatgtaatccaacatgttgctagtcgtaatgagtaattgcgggacgggaccaactactttgggtgtccgtgtttcactttttccttttaatattgcttatggtgacaatatatatagctatatatattgacacc

SEQ ID NO: 20855 - DNA, 614 bp, synthetic construct
  source 1..614: mol_type = other DNA
taaaactgggtccaggttgttcccacctggatctcctattgggagttgtactctattattccggtaattttgtacgccagttttatctttcccctccccaattgtaacttagaaggttatcaatacgaccaataggtggtagttagccaaactaccaaaggtcaagcacttctgtttccccggtcaaagttgatatgctccaacagggcaaaaacaactgagatcgttatccgcaaagtgcctacgcaaagcctagtaacacctttgaagatttatggttggtcgttccgctatttcccatagtagacctggcagatgaggctagaaatcccccactggcgacagtgttctagcctgcgtggctgcctgcgcaccccttgggtgcgaagccatacattggacaaggtgtgaagagccccgtgtgctcactttgagtcctccggcccctgaatgtggctaaccttaaccctgcagctagtgcatgtaatccaacatgttgctagtcgtaatgagtaattgcgggacgggaccaactactttgggtgtccgtgtttcactttttccttttaatattgcttatggtgacaatatatatagctatatatattgacacc

SEQ ID NO: 20856 - DNA, 614 bp, synthetic construct
  source 1..614: mol_type = other DNA
taaaactgggtccaggttgttcccacctggatctcctattgggagttgtactctattattccggtaattttgtacgccagttttatcttccccctccccaattgtaacttagaaggttatcaatacgaccaataggtggtagttagccaaactaccaaaggtcaagcacttctgtttccccggtcaaagttgatatgctccaacagggcaaaaacaactgagatcgttatccgcaaagtgcctacgcaaagcctagtaacacctttgaagatttatggttggttgttccgctatttcccatagtagacctggcagatgaggctagaaatcccccactggcgacagtgttctagcctgcgtggctgcctgcgcaccccttgggtgcgaagccatacattggacaaggtgtgaagagccccgtgtgctcactttgagtcctccggcccctgaatgtggctaaccttaaccctgcagctagtgcatgtaatccaacatgttgctagtcgtaatgagtaattgcgggacgggaccaactactttgggtgtccgtgtttcactttttccttttaatattgcttatggtgacaatatatatagctatatatattgacacc

SEQ ID NO: 20857 - DNA, 614 bp, synthetic construct
  source 1..614: mol_type = other DNA
taaaactggatccaggttgttcccacctggatctcctattgggagttgtactctattattccggtaattttgtacgccagttttatcttccccctccccaattgtaacttagaaggttatcaatacgaccaataggtggtagttagccaaactaccaaaggtcaagcacttctgtttccccggtcaaagttgatatgctccaatagggcaaaaacaactgagatcgttatccgcaaagtgcctacgcaaagcctagtaacacctttgaagatttatggttggtcgttccgctatttcccatagtagacctggcagatgaggctagaaatcccccactggcgacagtgttctagcctgcgtggctgcctgcgcaccccttgggtgcgaagccatacattggacaaggtgtgaagagccccgtgtgctcactttgagtcctccggcccctgaatgtggctaaccttaaccctgcagctagtgcatgtaatccaacatgttgctagtcgtaatgagcaattgcgggacgggaccaactacattgggtgtccgtgtttcactttttccttttattattgcttatggtgacaatatatatagctatatatattgacacc

SEQ ID NO: 20858 - DNA, 565 bp, synthetic construct; identical to SEQ ID NO: 612
  source 1..565: mol_type = other DNA

SEQ ID NO: 20859 - DNA, 657 bp, synthetic construct; identical to SEQ ID NO: 796
  source 1..657: mol_type = other DNA

SEQ ID NO: 20860 - DNA, 611 bp, synthetic construct
  source 1..611: mol_type = other DNA
acactggtatcgtggtacctttgtacgcctgttttatacccccttccccgcaactttagaagcatcaaaagcaccgctcaatagtcaccacacccccagtgtggtttcgagcaagcacttctgttttcccggttgcgtcccatatgctgtgcaaacggcaaaaagggacaatatcgttacccgcttgtatactacgggaaacctagtaccaccattgattgtattgagagttgcgctcatcacctttccccggtgtagctcaggccgatgaggctcagaatcccccacaggtgactgtgtctgagcctgcgttggcggcctgccctcgccttatggcgtgggacgcttaatgcatgacatggtgcgaagagtctactgtgctatgcaagagtcctccggcccctgaatgtggctaatcctaaccactgatcccacgcacgcaaaccagtgtgtagtgggtcgtaacgcgcaagtcggtggcggaaccaactactttgggtgaccgtgtttcctttattacctattgaatgtttatggtgacaattgtttgattcagttgttgccattctctacattcatttacccagtgtcaaaccaattgaactgttaca

SEQ ID NO: 20861 - DNA, 603 bp, synthetic construct
  source 1..603: mol_type = other DNA
tgtacccacccacactgtccacggacgtagtgctctcatattacggtatgtttgcacgccagtttttcccccccttcccccttttgtaactttagaagcttgtacttaatctgaccaataggcagtagtaatccatactacttacggtcaagcacttctgttaccccggtatgcggagaataggctctaaaagggctgaagcttcaagtatcgttatccgcacaattactacgcaaagcttagtaacttcccaagaaattctttggttggtcgctccgctggtaccccaccagtagacttggcagatgaggctgagtaatccccactggcgacagtgactcagcctgcgtggctgcctacacacctggcaacaggtgtgaagccatagaaaggacagggtgtgaagagccccgtgtgctaattgtgattcctccggcccctgaatgcggctaatccaaccccacatccaatgcgcataaaccaatgcgtatttggtcgtaatgggtaactgtgggacggaaccgactactttgggtgtccgtgtttccttttattctttaaattagttcatggtgacaagtataagaatttatatttgtcatc

SEQ ID NO: 20862 - DNA, 518 bp, synthetic construct
  source 1..518: mol_type = other DNA
aaacgttcgttacccggccaattacttcgaaaaacctagtaccaccatggaggttgcgaggtgtttcgctccgcacaaccccagtgtagatcaggtcgatgagtcaccgcgttccccacgggcgaccgtggcggtggctgcgttggcggcctgcccatggggcaacccgtgggacgcttcaatactgacatggtgcgaagagtctattgagctaattggtagtcctccggcccctgaatgcggctaatcctaactgcggagcagatgcccgcaagccagcgggtattctgtcgtaacgggcaactctgcagcggaaccgactactttgggtgtccgtgtttccttttatccttacaatggctgcttatggtgacaattgaaagattgttaccatatagctattggattggccacccggtaacaaatagagcgcttgtttatttatttgttggttttgtgccgctgaactacaaagtgttaagtactctcaattttattttatcactcaattcagtgaa

SEQ ID NO: 20863 - DNA, 634 bp, synthetic construct
  source 1..634: mol_type = other DNA
tagaagctacgctcaaacggtcaacagatagtccagtaatccagctgggccacgaccaagcacttctgtttccccggacagagtaccaataagctgctcgcgcggctgaaggggaaaacgttcgttacccggccaattacttcgagaaacctagtaccgccatggacgttgcgcagcgtttcgctccacacaaccccagtgtagatcaggtcgatgagccaccgcattccccacgggcgaccgtggcggtggctgcgttggcggcctgcccatggggtaacccatgggacgcttcaatacagacatggtgcgaagagtctattgagctaattggtagtcctccggcccctgaatgcggctaatcctaactgcggagcaggtacccacaacccagtgggtcacctgtcgtaatgggcaactctgcagcggaaccgactactttgggtgtccgtgtttccttttaacctttacactggctgcttatggtgacaattgaaagattgttaccatatagctattggattggccatcctgtgagtaatagagcgattgtatacttatttgttggctttataccactcaatttgaaagctttacagacactgaattatattgtggcattaaacacagcaaa

SEQ ID NO: 20864 - DNA, 514 bp, synthetic construct
  source 1..514: mol_type = other DNA
gattgtacccacggtcgaaaacggctgacccgttatccgcttaagtacttcgagaagcctagtatcaccttggaatcttcgacgcgttgcgctcagcactctaccccgagtgtagcttaggccgatgagtctgggcataccccaccggcgacggtggcccaggctgcgttggcggcctacccatggctaacgccatgggacgctagttgtgaacaaggtgtgaagagcctattgagctacttaagagtcctccggcccctgaatgcggctaatcctaaccacggagcaagtgctcacaaaccagtgagtggcttgtcgtaacgcgcaagtctgtggcggaaccgactactttgggtgtccgtgtttccttttatttttattatggctgcttatggtgacaatctaagattgttatcatatagcatttggattggccatccggtgatttcaaaagcgacacatttgtcctattgttttactgtatttatctacttgctacatccatccaaccata

SEQ ID NO: 20865 - DNA, 616 bp, synthetic construct
  source 1..616: mol_type = other DNA
gttttatctcccttcccaatgtaatttagaagctcttaaatcaaggctcaataggtggggcgcaaaccagcgctctcatgagcaagcactcctgtctccccggtgtggttgtataaactgttcccacggttgaaaacaacctatccgttatccgctatagtacttcgagaaacctagtatcacctttggattgttgacgcgttgcgctcagcacactaacccgtgtgtagcttgggtcgatgagtctggacataccccactggcgacagtggtccaggctgcgttggcggcctactcatggtgaaaaccatgagacgctagacatgaacaaggtgtgaagagtctattgagctactatagagtcctccggcccctgaatgcggctaatcctaaccatggagcaagtgctcacaggccagtgagttgcttgtcgtaatgcgcaagtccgtggcggaaccgactactttgggtgtccgtgtttcactttttacttttatgactgcttatggtgacaatttgatattgttaccatttagcttgtcaaattaattgcaaaagatcctaaatcttacttaccaacttgcattttgacaaccttgatttgaaaattttaata

SEQ ID NO: 20866 - DNA, 670 bp, synthetic construct
  source 1..670: mol_type = other DNA
gtgctcctgttttacgcaccctcccccgacagcaacttagaagatttccacacacggtcaataggcggctcagtatgccaactgggtcatgaccaagcacttctgtctccccggactgagtatcaataagctgctcacgtggctgaaggagaaaacgttcgttatccggccaattacttcgagaagcttagtaccaccatggaggttgcgcagtgtttcgttccgcacaaccccagtgtagatcaggtcgatgagtcaccgcactcctcacgggcgactgtggcggtggctgcgctggcggcctgcccatggggcaccccatgggacgcttcaatactgacatggtgcgaagagcctattgagctaattggtaatcctccggcccctgaatgcggctaatcctaactgcggagcagataccctcgagccagtgggcagtctgtcgtaatgggcaactctgcagcggaaccgactactttgggtgtccgtgtttccttttattcctatattggctgcttatggtgacaattgagagattgttaccatatagctattggattggccatccagtgacaaacagagcgattatctacttatttgttggctttgtaccattaaatcttggagtccttaagaccctcaacttgattatacaatttaactctgcgaa

SEQ ID NO: 20867 - DNA, 614 bp, synthetic construct
  source 1..614: mol_type = other DNA
ttaaaactgggtccaggttgttcccacctggatctcctattgggagttgtactctattattccggtaattttgtacgccagttttatctccccttccccaattgcaacttagaagtttatcaatacgaccaataggtggtagttagccaaactaccaaaggtcaagcacttctgtttccccggtcaaagttgatatgctccaacagggcaaaaacaactgagatcgttatccgcaaagtgcctacgcaaagcctagtaacacctttgaagatttatggttggtcgttccgctatttcccatagtagacctggcagatgaggctagaaatcccccactggcgacagtgctctagcctgcgtggctgcctgcgcaccccttgggtgcgaagccatacattggacaaggtgtgaagagccccgtgtgctcactttgagtcctccggcccctgaatgtggctaaccttaaccctgcagctagtgcatgtaatccaacatgttgctagtcgtaatgagtaattgcgggacgggaccaactactttgggtgtccgtgtttcactttttccttttaatattgcttatggtgacaatatatatagctatatatattgacacc

SEQ ID NO: 20868 - DNA, 604 bp, synthetic construct
  source 1..604: mol_type = other DNA
gtcgcggttgttcccaccacgactatctacggatgtagtgctcttgtattccggtacacttgcacgccagttttgttaccctccccacattgtaacttagaagattaacacaaagaccaataggcggcaatgaaccacattgtcaacggtcaagcacttctgtctccccggtcaatctggatatgctttaccaaaggcaaaaactggagcgatcgttatccgcaaggtgcctacgggaaacctagtagcactctttatttgatctggttggttgttcagccgttaaacccaaacggtaaacctggcagatgaggctggaaaatccccaccagcgatggtgttccagcctgcgtggctgcctgcacacccgaaagggtgtgaagccttttcaaagacagggtgcgaagagtctactgtgctcaccttgattcctccggcccctgaatgtggctaatcctaaccccgcagctgtagtgtgcaatccagcacatttgcagtcgtaatgggtaactgcgggatggaaccaactactttgggtgtccgtgtttctctttttacctttatatttgcttatggtgacaattatacagatatagttgtcatc

SEQ ID NO: 20869 - DNA, 564 bp, synthetic construct
  source 1..564: mol_type = other DNA
aggtggggcgcaaaccagcgctctcatgagcaggcactcctgtctccccggtgtggttgtataaactgttcccacggttgaaaacaacctatccgttatccgctatagtacttcgagaaacctagtatcacctttggattgttgacgcgttgcgctcagcacactaacccgtgtgtagcttgggtcgatgagtctggacacaccccactggcgacagtggtccaggctgcgttggcggcctactcatggtgaaaaccatgagacgctagacatgaacaaggtgtgaagagtctattgagctactatagagtcctccggcccctgaatgcggctaatcctaaccatggagcaagtgctcacaggccagtgagttgcttgtcgtaatgcgcaagtccgtggcggaaccgactactttgggtgtccgtgtttcactttttacttttatgactgcttatggtgacaatttgatattgttaccatttagcttgtcaaattaattgcaaaagatcctaaatcttacttatcaacttgcattttgacaaccttgatttgaaaattttaata

SEQ ID NO: 20870 - DNA, 561 bp, synthetic construct
  source 1..561: mol_type = other DNA
cccggactgagtatcaataggctgctcgcgtggctgatggagaaaacgtccgttacccggccaattacttcgagaaacctagtaccaccatgaaagttgcgcagcgtttcgctccgcacaaccccagtgtagatcaggtcgatgagtcactgcgttccccacgggcgaccgtggcagtggctgcgttggcggcctgcccatggggtatcccatgggacgcttcaatactgacatggtgcgaagagtctattgagctaattggtagtcctccggcccctgaatgcggctaatcctaactgcggagcagatacccacgcaccagtgggcagtctgtcgtaacgggcaactctgcagcggaaccgactactttgggtgaccgtgtttccttttattctaatactggctgcttatggtgacaattgaaagattgttaccatatagctattggattggccatccggtaacaaacagagcaattatttacctgtttattggttttatacctctcaatcacaaggctataaatactctcaacctcattttagcacttaacacagtaaa

SEQ ID NO: 20871 - DNA, 645 bp, synthetic construct; identical to SEQ ID NO: 780
  source 1..645: mol_type = other DNA

SEQ ID NO: 20872 - DNA, 563 bp, synthetic construct
  source 1..563: mol_type = other DNA
accctggaccgagtatcaataagctactcacgtggctgaaggagaaaacgttcgttacccggccaattacttcgagaaacctagtaccgccatgaaagttgcgcagcgtttcgctccgcacgaccccagtgtagatcaggctgatgagtcaccgcgttccccacgggtgaccgtggcggtggctgcgttggcggcctgcccttggggcaacccaagggacgcttcaatactgacatggtgcgaagagtctattgagctaattggtagtcctccggcccctgaatgcggctaatcccaactgcggagcagatacccacataccagtgggcagtctgtcgtaatgggcaactctgcagcggaaccgactactttgggtgtccgtgtttcctttatttctcacactggctgcttatggtgacaattgagagattgttgccatatagctattggattggccatccggtgtctaatagagcaattatctacctttttgttggatttatcccacttaactataaagcactcaaaacactaatatacattgtggatcttaacacaacaaa

SEQ ID NO: 20873 - DNA, 563 bp, synthetic construct
  source 1..563: mol_type = other DNA
ccccggaccaagtatcaataaactgctagcgcggttgaaggagaaaacgtccgttacccggccaattacttcgaaaaacctagtaccaccatggatgttgcgcagtgtttcgctccgcacaaccccagtgtagatcaggccgatgagccaccgcattccccacgggcgaccgtggcggtggctgcgctggcggcctgcccatggggcaacccatgggacgcttcaatactgacatggtgtgaagagtctattgagctaattggtagtcctccggcccctgaatgcggctaatcctaactgcggagcagatgcccacatgccagtgggcagtctgtcgtaacgggcaactctgcagcggaaccgactactttgggtgtccgtgtttcctttttaaccttgtattggctgcatatggtgacaattgtaagattgttaccatatagctattggattggccatccggtgacgaacagagcaatcatttatttgtttgttggttttattccattgaatctcaaagtttggaacactctaaattttattatttcactcaacacaacaaa

SEQ ID NO: 20874 - DNA, 618 bp, synthetic construct
  source 1..618: mol_type = other DNA
ttaaaactgggagtgggttgttcccacccactccacccatgcggtgttgtactctgttattacggtaactttgtacgccagttttctccacccttccccacaatgtaacttagaagtttgtacaatatgaccaataggtgacaattatccagattgtcaaaggtcaagcacttctgtttccccggtcaatgaggatatgctttacccaaggcaaaaaccttaaagatcgttatccccacactgcctacacagagcctagtatcacttttgatgtagttaggttggtcgctccctgcaaacccagcagtagacctggcagatgaggctggacattccccactggcgacagtggtccagcctgcgtggctgcctgctcaccctttttgggtgagaagcctaattattgacaaggtgtgaagagccgcgtgtgctcagtgtgcttcctccggcccctgaatgtggctaaccttaaccctgcagccgttgcccataatccaatgggtttgcggtcgtaatgcgcaagtgcgggacgggaccaactactttgggtgtccgtgtttcttgtttttcttttgattgcattttatggtgacaatttatagagtatagattgtcatc

SEQ ID NO: 20875 - DNA, 618 bp, synthetic construct
  source 1..618: mol_type = other DNA
ttaaaactgggagtgggttgttcccactcactccacccatgcggtgttgtactctgttattacggtaactttgtacgccagtttttcccacccttccccataatgtaacttagaagtttgtacaatatgaccaataggtgacaatcatccagactgtcaaaggtcaagcacttctgtttccccggtcaatgaggatatgctttacccaaggcaaaaaccttaaagatcgttatccccacactgcctacacagagcccagtaccatttttgatataattgggttggtcgctccctgcaaacccagcagtagacctggcagatgaggctggacattccccactggcgacagtggtccagcctgcgtggctgcctgctcacccttcttgggtgagaagcctaattattgacaaggtgtgaagagccgcgtgtgctcagtgtgcttcctccggcccctgaatgtggctaaccttaaccctgcagccgttgcccataatccaatgggtttgcggtcgtaatgcgtaagtgcgggatgggaccaactactttgggtgtccgtgtttcctgtttttcttttgattgcattttatggtgacaatttatagtgtatagattgtcatc

SEQ ID NO: 20876 - DNA, 590 bp, synthetic construct
  source 1..590: mol_type = other DNA
tgggtgtagtgctctggtattttgtacctttgcacgcctgtttcccctttgtacccacccttaatttcctccctctgtaacgttagaagtttgtgaaattaaaagtacaataggaagcatcacatccagtggtgtttagtacaagcactcctgtttccccggagcgaggtataggttgtacccacgaccaaaagcctttaaccgttacccgccaatcaactacgtaacggctagtaccatcatgtttttaatctggtgttcgatcaggtggtatcccccactagtctggtcgatgaggctaggaattccccacgggtaaccgtgtcctagcctgcgtggcggccagcccagcttatgctgggacgcctttttaaagacatggtgtgaagacccgcatgtgcttgattgtgagtcctccggcccctgaatgcggctaaccctaaccccggagcccagcaacataatccaatgttgtttgggtcgtaatgagtaattctgggatgggaccgactactttgggtgtccgtgtttccttttattcttatattgtcttatggtcacagcatatatattacatatatactgtgatc

SEQ ID NO: 20877 - DNA, 551 bp, synthetic construct
  source 1..551: mol_type = other DNA
aatcccttcccctcttttctatcacctccaattttccacgtaacttagaagcaaagtacatgagcccaataggagcggctaatccatagccgtatagggcaagcacttctgttaccccggatgtgtgaatagacttctcacgaggttgaagctgaagcattcgttacccgcacttgtactgcgcggaaattagtagcacctttgccagcctcatggcgtttcgctcagcgtttcccccacgtagatcagggcaatggggctacacaacccccaccggcgacggtggtgtagcccgcgtggtgccccgcccgagctatcagctcgggacgccatgatgaagacagggtgtgaaggttcgagtgcgctacaagtgagtcctccggcccctgaatgcggctaaccttaaccccgtagctgtggtatgcatgccagcataaacacagtcgtaatgggcaactacgggatgggaccgactactttgggtgtccgtgtttcactttttccttaaatttgtcttatggttacaggtttatgcaaatagatctgtaatc

SEQ ID NO: 20878 - DNA, 616 bp, synthetic construct
  source 1..616: mol_type = other DNA
ttaaaactgggagtgggttgttcccactcactccacccatgcggtgttgtactctgttattacggtaaccttgtacgccagttttcccacccttccccacaatgtaacttagaagtttgtacaatatgaccagtaggtgacaattatccagattgtcaaaggtcaagcacttctgtttccccggtcaatgaggatatgctttacccaaggcaaaaaccttaaagatcgttatccccacactgcctacacagagcctagtaccacttttgatgtagttaggttggtcgctccctgcaaacccagcagtagacctggcagatgaggctggacattccccactggcgacagtggttcagcctgcgtggctgcctgctcacccttttgggtgagaagcctaattattgacaaggtgcgaagagccgcgtgtgctcagtgtgcttcctccggcccctgaatgtggctaaccttaaccctgcagccgttgcccataatccaatgggtttgcggtcgtaacgcgcaagtgcgggacgggaccaactactttgggtgtccgtgtttcctgtttttcttttgattgcattttatggtgacaatttatagagtatagattgtcatc

SEQ ID NO: 20879 - DNA, 610 bp, synthetic construct; identical to SEQ ID NO: 666
  source 1..610: mol_type = other DNA

SEQ ID NO: 20880 - DNA, 612 bp, synthetic construct; identical to SEQ ID NO: 681
  source 1..612: mol_type = other DNA

SEQ ID NO: 20881 - DNA, 686 bp, synthetic construct
  source 1..686: mol_type = other DNA
tggggttgttcccactccaagggcccacgtggcggctagtactctggtacttcggtacctttgtacgcctgttttatctcccttcccaatgtaacttagaagttcttaaaccaatgctcaataggtggggcgcaaaccagcgctctcatgagcaagcactcctgtctccccggtgaggttgtataaactgttcccacggttgaaaacaacctatccgttatccgctatagtacttcgagaaacctagtaccacctttggattgttgacgcgttgcgctcagcacactaacccgtgtgtagcttgggtcgatgagtctggacatacctcactggcgacagtggtccaggctgcgttggcggcctactcatggtgaaagccatgagacgctagacatgaacaaggtgtgaagagtctattgagctactatagagtcctccggcccctgaatgcggctaatcctaaccatggagcaagtgctcacaggccagtgagttgcttgtcgtaatgcgcaagtccgtggcggaaccgactactttgggtgtccgtgtttcactttttacttttatgactgcttatggtgacaatttgatattgttaccatttagcttgtcaaatcaattgcaaaagatcctaactcttatttatcaacttgcatcttgataactttaatttgaaaattttaaca

SEQ ID NO: 20882 - DNA, 621 bp, synthetic construct; identical to SEQ ID NO: 725
  source 1..621: mol_type = other DNA

SEQ ID NO: 20883 - DNA, 600 bp, synthetic construct
  source 1..600: mol_type = other DNA
atccgacccactgggtgtagtactctggtactctgtacctttgtacgcctgttcttcccattgtacccttcctgaacttccaacccaagtaacgttagaagctcaactttcagtacaacaggaagcaccgcatccagtggtgtttagtacaagcacttctgtttccccggagcgaggtataggctgtacccactgccaaaagcctttaaccgttatccgccaaccaactacgtaaaagctagtaacatcatgtttctaaatcggcgttcgatcaggtggatttcccctccactagtttggtcgatgaggctaggaattccccacgggtgaccgtgtcctagcctgcgtggcggccaacccagcgtatgctgggacgcctttttacagacatggtgcgaagactcgcatgtgcttggttgtgagtcctccggcccctgaatgcggctaaccttaaccctggagccttgcgtcacaatccagtgatggtaaggtcgtaatgagcaattccgggatgggaccgactactttgggtgtccgtgtttctcatttttcttattattgtcttatggtcacagcatatatattgtatatactgtgatc

SEQ ID NO: 20884 - DNA, 618 bp, synthetic construct; identical to SEQ ID NO: 712
  source 1..618: mol_type = other DNA

SEQ ID NO: 20885 - DNA, 618 bp, synthetic construct
  source 1..618: mol_type = other DNA
ttaaaactgggagtgggttgttcccactcactccacccacgtggtgctgtacactgttattccggtaactttgtacgccagtttttccctcccttccctcattatgtaacttagaagcatgaacatatggaccaataggcaataatcatccagattattgaaggtcaagcacttctgtttccccggtcaataaagatatgctttacccaaggcaaaaacttttgagatcgttacccgcacatcaactacgcaaagcctagtatcacctttgatgtactaagactggtcgtttcctgcaaccccagcagtagacctggcagatgaggctggacgtaccccactggcgacagtggtccagcctgcgtggctgcctgctcgcccatatgggcgagaagccttattattgacaaggtgtgaagagccgcgtgtgcttggtgtgagtcctccggcccctgaatgtggctaaccttaaccctgcagccattgctcataatccaatgagttagtggtcgtaatgcgcaagtgcgggatgggaccaactactttgggtgtccgtgtttcttatttttctttcatgtgtgttatatggtgacaatttatagtatataagttgtcatc

SEQ ID NO: 20886 - DNA, 645 bp, synthetic construct
  source 1..645: mol_type = other DNA
agggattttaaaacagtcgaccggttgttcccaccggcgagcatactgtgcgttgtacactggaattacggttcctttgtatgcctgttttataatcccttcccctcttttctatcgtctctaattttccacgtaacttagaagcaaagtacatgagcccaataggagcggctaacccatagccgtatagggcaagcacttctgttaccccggatgtgtgaatagacttctcacgaggttgaagctgaagcattcgttacccgcacttgtactgcgcggaaattagtagcacctttgccagcttcatggcgtttcgctcagcgtttcccccacgtagatcagggcaatggggctacacaacccccaccggcgacggtggtgtagcccgcgtggtgccccgcccgagctatcagctcgggacgccatgatgaagacagggtgtgaaggttcgagtgcgctacaagtgagtcctccggcccctgaatgcggctaaccttaaccccgtagctgtggtatgcatgccagcataaacacagtcgtaatgggcaactacgggatgggaccgactactttgggtgtccgtgtttcacttttttccttaaatttgtcttatggttacaggtttatgcaaatagatctgtaatc

SEQ ID NO: 20887 - DNA, 615 bp, synthetic construct; identical to SEQ ID NO: 694
  source 1..615: mol_type = other DNA

SEQ ID NO: 20888 - DNA, 622 bp, synthetic construct; identical to SEQ ID NO: 731
  source 1..622: mol_type = other DNA

SEQ ID NO: 20889 - DNA, 622 bp, synthetic construct
  source 1..622: mol_type = other DNA
ttaaaactgaatcatggttgttcccaccatgattacctacgggtgtagtacacttgtatcccggtacatttgtgcgccagttttatatcccctaccccaattgtaacttagaagttaagcaacacaagatcaataggcggtggttatccaaaccatcaatgatcaagtacttctgtctccccggtaggtgtgaatatgctttaaccaaggcagaagctaatcctatcgttatccgcaaggtgcctacgggaagcctattaacactttgaaagaaatttggctggtcgctcagttgcgcaatcccacgcaatagacctggcagatggggctagacaaaccccaccagcgatggtggtctagcccgcgtggctgcctgcacacccttttttgggtgtgaagccagaaattggacagggtgcgaagagcctactgtgctcaccttgagtcctccggcccctgaatgtggctaatcctaaccctgcagctgttgcacaagatccattgtgtatacagtcgtaatgagcaattgcgggatggaaccaactactttgggtgtccgtgtttccttgttttcttttatcattgcttatggtgacaagtatatatagatatatttgtcatc

SEQ ID NO: 20890 - DNA, 613 bp, synthetic construct
  source 1..613: mol_type = other DNA
taaaactgggtttgggttgatcccacccaaaccacccatgtggtgtagtacactgttatttcggtaactttgtacgccagttttatctccccttcccccttcgtaacttagaagtaacacataatgaccaatagcgggcaatcatccagattgtcactggtcaagcacttctgtttccccggttcagattgatatgctccaacagggcaaaaacagtttgaatcgttacccgcaagatgcctacgcagaacctagtatcacactgaaagattcttggttggtcgttcagttacatccccagtaacagacctggcagatgaggctagaagttccccactggcgacagtgttctagcctgcgtggctgcctgcacacccatttgggtgtgaagcctagaattggacagggtgtgaagagtcgagtgtgctcatcttgagtcctccggcccctgaatgcggctaaccttaaccccgcagccattgcccacaaaccagtgggtttatggtcgtaatgagcaattgtgggatgggaccgactactttgggtgtccgtgtttcactttttacttattatttgcttatggtgacaatatatagatacatatattgacacc

SEQ ID NO: 20891 - DNA, 464 bp, synthetic construct
  source 1..464: mol_type = other DNA
ttgcgcagtgtttcgctccgcacaaccccagtgtagatcaggtcgatgagtcaccgcatcccccacgggcgaccgtggcggtggctgcgttggcggcctgcccatggggcaacccatgggacgctacaatactgacatggtgtgaagagtctattgagctaactggtagtcctccggcccctgaatgcggctaatcccaactgcggagcacgtgcttccaatccaggaggtagcgtgtcgtaacgggcaactctgcagcggaaccgactactttgggtgtccgtgtttcctttatctctttattggctgcttatggtgacaattgaaagattgttgccatatagctattggattggccatccggtatctaacagagcaatcatatacctgtttgttggatttgttccacttaacaaaacagagttctgtactttgtgttatattattaggttgaacacatcaaa

SEQ ID NO: 20892 - DNA, 621 bp, synthetic construct; identical to SEQ ID NO: 726
  source 1..621: mol_type = other DNA

SEQ ID NO: 20893 - DNA, 612 bp, synthetic construct; identical to SEQ ID NO: 682
  source 1..612: mol_type = other DNA

SEQ ID NO: 20894 - DNA, 697 bp, synthetic construct; identical to SEQ ID NO: 837
  source 1..697: mol_type = other DNA

SEQ ID NO: 20895 - DNA, 451 bp, synthetic construct
  source 1..451: mol_type = other DNA
ggacaatatcgttacccgcttatctactacgggaagcctagtaacaccattgaacactttgagagttgcgttcagcgcctaacccagcgtagctcaggccgatggggcttcggaatccccacgggcgaccgtgtcgaagcccgcgttggcggcctgcccgcgccgtcaggcgtgggacgctcaatttgtgacatggtgcgaagagcctactgtgctaggtaagagtcctccggcccctgaatgtggctaatcctaaccaccgaacccatggttgcaaaccagcgactagtgggccgtaatgcgcaagtcggtgacggaaccaactactttgggtgaccgtgtttcctttatttcctatattgcaagtttatggtgacatttatagtatttaagtgttaccatatactgcgaaaatatattgtaataacacagaattaatactgcagaaatt

SEQ ID NO: 20896 - DNA, 593 bp, synthetic construct
  source 1..593: mol_type = other DNA
cccacctggatctcctattgggagttgtactctattattccggtaattttgtacgccagttttatcttccccctccccaattgtaacttagaaggttatcaatacgaccaataggtggtagttagccaaactaccaaaggtcaagcacttctgtttccccggtcaaagttgatatgctccaacagggcaaaaacaactgagatcgttatccgcaaagtgcctacgcaaagcctagtaacacctttgaagatttatggttggtcgttccgctatttcccatagtagacctggcagatgaggctagaaatcccccactggcgacagtgttctagcctgcgtggctgcctgcgcaccccttgggtgcgaagccatacattggacaaggtgtgaagagccccgtgtgctcactttgagtcctccggcccctgaatgtggctaaccttaaccctgcagctagtgcatgtaatccaacatgttgctagtcgtaatgagtaattgcgggacgggaccaactactttgggtgtccgtgtttcactttttccttttaatattgcttatggtgacaatatatatagctatatatattggcacc

SEQ ID NO: 20897 - DNA, 593 bp, synthetic construct
  source 1..593: mol_type = other DNA
cccacctggatctcctattgggagttgtactctattattccggtaattttgtacgccagttttatcttccccctccccaattgtaacttagaaggttatcaatacgaccaataggtggtagttagccaaactaccaaaggtcaagcacttctgtttccccggtcaaagttgatatgctccaacagggcaaaaacaactgagatcgttatccgcaaagtgcctacgcaaagcctagtaacacctttgaagatttatggttggtcgttccgctatttcccatagtagacctggcagatgaggctagaaatcccccactggcgacagtgttctagcctgcgtggctgcctgcgcaccccttgggtgcgaagccatacattggacaaggtgtgaagagccccgtgtgctcactttgagtcctccggcccctgaatgtggctaaccttaaccctgcagctagtgcatgtaatccaacatgttgctagtcgtaatgagtaattgcgggacgggaccaactactttgggtgtccgtgtttcactttttcctttcaatattgcttatggtgacaatatatatagctatatatattgacacc

SEQ ID NO: 20898 - DNA, 593 bp, synthetic construct
  source 1..593: mol_type = other DNA
cccacctggatctcctattgggagttgtactctattattccggtaattttgtacgccagttttatcttccccctccccaattgtaacttagaaggttatcaatacgaccaataggtggtagttagccaaactaccaaaggtcaagcacttctgtttccccggtcaaagttgatatgctccaacagggcaaaaacaactgagatcgttatccgcaaagtgcctacgcaaagcctagtaacacctttgaagatttatggttggtcgttccgctatttcccatagtagacctggcagatgaggctagaaatcccccactggcgacagtgttctagcctgcgtggctgcctgcgcaccccttgggtgcgaagccatacattggacaaggtgtgaagagccccgtgtgctcactttgagtcctccggcccctgaatgtggctaaccttaaccctgcagctagtgcatgtaatccaacgtgttgctagtcgtaatgagtaattgcgggacgggaccaactactttgggtgtccgtgtttcactttttccttttaatattgcttatggtgacaatatatatagctatatatattgacacc

SEQ ID NO: 20899 - DNA, 742 bp, synthetic construct
  source 1..742: mol_type = other DNA
ttaaaacagctctggggttgtacccactcacagggcccactgggcgctagcacactggtatcacggtacctttgtgcgcctgttttataacccctttcccaaacgcaacgtagaagccacacacactgatcagtagtaggcacagcgcaccagttgtgtctcgatcaagcacttctgtctccccggaccgagtatcaatagactgctcacgcggttgaaggagaaaacgttcgttaaccggctgactacttcgagaaacctagtagtactatgaaagttgcgaagcgtttcactcagcacttcccccgtgtagatcaggccgatgagtcactgcgttccccacgggtgaccgtggcagtggctgcgttggcggcctgcccatggggtaacccatgggacgcttcaatacggacatggtgcgaagagtctattgagctagccagtagtcctccggcccctgaatgcggctaatcctaactgcggagcatgtgccctcgatccagagggtagcatgtcgtaacgggcaactctgcagcggaaccgactactttgggtgtccgtgtttctttttattcttatactggctgcttatggtgacaattgggagattgttaccatatagctattggattggccacccggtgactaatagagctattatctactcctttataggttttgtgccattgaactacaaggtcttaaagactctcaactttatcatcatacttaatactgcaaa

SEQ ID NO: 20900 - DNA, 616 bp, synthetic construct; identical to SEQ ID NO: 702
  source 1..616: mol_type = other DNA

SEQ ID NO: 20901 - DNA, 616 bp, synthetic construct
  source 1..616: mol_type = other DNA
ttaaaactgggagtgggttgttcccactcactccacccatgcggtgttgtacactgttattacggtaaccttgtacgccagttttgccacccttccctaatatgtaacttagaagtttgagcaataagaccaataggtgataattatccagattatcaaaggtcaagcacttctgtttccccggtcaacgaggatatgctttacccaaggcaaaaaccttagagatcgttatccccacactgcctacacagagcctagtatcacttttgatgtaattaggttggtcgctccctgcaaacccagcagtagacctggcagatgaggctggacattccccactggcgacagtggtccagcctgcgtggctgcctgctcaccctatcgggtgagaagcctacttattgacaaggtgtgaagagccgcgtgtgctcagtgtgcttcctccggcccctgaatgtggctaaccttaaccctgcagccgctgcccataatccaatgggtctacggtcgtaacgcgcaagtgcgggatgggaccaactactttgggtgtccgtgtttcttatttttcctttatttgcattttatggtgacaatttatggtatatagattgtcatc

SEQ ID NO: 20902 - DNA, 610 bp, synthetic construct
  source 1..610: mol_type = other DNA
tctcccttcccaatgtaatttagaagctcttaaatcaaggctcaataggtggggcgcaaaccagcgctctcatgagcaagcactcctgtctccccggtgtggttgtataaactgttcccacggttgaaaacaacctatccgttatccgctatagtacttcgagaaacctagtatcacctttggattgttgacgcgttgcgctcagcacactaacccgtgtgtagcttgggtcgatgagtctggacataccccactggcgacagtggtccaggctgcgttggcggcctactcatggtgaaaaccatgagacgctagacatgaacaaggtgtgaagagtctattgagctactatagagtcctccggcccctgaatgcggctaatcctaaccatggagcaagtgctcacaggccagtgagttgcttgtcgtaatgcgcaagtccgtggcggaaccgactactttgggtgtccgtgtttcactttttacttttatgactgcttatggtgacaatttgatattgttaccatttagcttgtcaaattaattgcaaaagatcctagatcttacttaccaatttgcattttgacaaccttgatttgaaaattttaata

SEQ ID NO: 20903 - DNA, 615 bp, synthetic construct
  source 1..615: mol_type = other DNA
ttaaaactgggttcgggttgttcccacccaaaccacccacgtggtgtagtacactgttatcccggtaactttgtacgccagttttatctccccacccccttttgtaacttagaagttatgcacaatgaccaatagtgggcaatcatccagattgtcatcggtcgagcactcctgtttccccggttcaagttgatatgctctaacagggcaaaaacaatttgaatcgttacccgcaaggtgcctacacagaacttagtaccattctggaaaattcttggctggtcgctcagttactaccccagtaatagacctggcagatggggctagaagttccccactggcgacagtgttctagcctgcgtggctgcctgcacacccttcttgggtgtgaagcctagaattggacagggtgtgaagagtcgcgtgtgctcatcttgagtcctccggcccctgaatgcggctaaccctaaccctgcagccattgcccacaacccagtgggtctatggtcgtaatgagcaattgcgggatgggaccgactactttgggtgtccgtgtttcactttttacttattatttgcttatggtgacaatatatagatacatatattgacacc

SEQ ID NO: 20904 - DNA, 618 bp, synthetic construct
  source 1..618: mol_type = other DNA
ttaaaactgggagtaggttgttcccacctactctacccacgtggtgttgtacactgttatcacggtaactttgtatgccagttttgccacccttccccgtagcgtaacttagaagtttgtacacttagaccaataggcgataatcatccagattatcaaaggtcaagcacttctgtttccccggtcaatgaggatatgcttttcccaaggcaaaaaccttagagatcgttatccccacattgcctacacagagcctagtatcacctttgatgtatttagactggtcgctccctgcaaacccagcagtagacctggcagatgaggctggacgttccccactggcgacagtggtccagcctgcgtggctgcctgcccacccatttgggtgggaagcctaactattgacatggtgtgaagagccgcgtgtgctcaatgtgcctcctccggcccctgaatgtggctaaccttaaccccgcagccgctgcccatgatccagtgggtatacggtcgtaacgcgcaagtgtgggatgggaccaactactttgggtgtccgtgtttcctgtttttcttttttttatgcattttatggtgacaatttatggtatatagattgtcatc

SEQ ID NO: 20905 - DNA, 614 bp, synthetic construct; identical to SEQ ID NO: 54
  source 1..614: mol_type = other DNA

SEQ ID NO: 20906 - DNA, 611 bp, synthetic construct; identical to SEQ ID NO: 672
  source 1..611: mol_type = other DNA

SEQ ID NO: 20907 - DNA, 618 bp, synthetic construct
  source 1..618: mol_type = other DNA
ttaaaactgggtctgggttgctcccacccagaccacccatgtggtgttgtacactgttattccggtaactttgtacgccagttttgaactcccctaccccttttgtaacttagaagctaaacacatcgaccaatagcaggcaatcacccagattgcttatggtcaagtacttctgtttccccggtctcctctgatatgctctaccagggcaaaaacagagtagatcgttatccgcaagatgcctacgcaacgcctagtaacactttgaagtgtttttggttggtcgctcagttacaaccccagtaatagacctggcagatgaggctagatatcccccactggcgacagtgatctagcctgcgtggctgcctgcacaccctttatgggtgtgaagccaaacatatgacaaggtgcgaagagccacgtgtgctcatcttgagtcctccggcccctgaatgcggctaacctcaaccctgcagccattgctcacaagccagtgggtatgtggtcgtaatgagaaattgcgggacgggaccgactactttgggtgtccgtgtttcacttttttaccttattttgcttatggtgacaatatatatacagatatatattgacacc

SEQ ID NO: 20908 - DNA, 612 bp, synthetic construct
  source 1..612: mol_type = other DNA
ttaaaactggatccaggttgttcccacctggatttcctacatggagttgtactctgttattccggtaaccttgtacgccagttttatatccccccccattgtaacttagaagttatgcatacagaccaataggtggtgatcctccagatcactaacggtcaagcacttctgtttccccggtttgaattgatacgctccaacagggcgaaaacagtttaaatcgttatccgcaaagtgcctacgcaaagcctagtagcactttagaaaatctatggttggtcgttcagctataccccctagtggacctggcagatgaggctagaagtaccccactggcgacagtgttctagcctgcgtggctgcctgcacacccttatgggtgtgaagccatatatttgacaaggtgtgaagagccccgtgtgctcactttgagtcctccggcccctgaatgtggctaaccttaaccctgcagctagtgcatgtaatccaacatgttgctagtcgtaatgagcaattgcgggatgggaccaactactttgggtgtccgtgtttcactttttccttttaatttgcttatggtgacaatatatatataacatatatattggcatc

SEQ ID NO: 20909 - DNA, 565 bp, synthetic construct
  source 1..565: mol_type = other DNA
actctactattccggtagttttgtacaccagttttatctcccttccccgtgtaacttagaagacaagcacttcagaccaataggatggtaactaaccaagttatcaaaggtcaagcacttctgtttccccggtcaaaattgatatgctccaccagggcaaaaacagttttgatcgttatccgcaaagtgcctacgcaaagcttagtaacactttgaagaatgtgtggttggtcgttccgctattccccatagtagacctggcagatgaggctagaaaatccccactggtgacagtgttctagcctgcgtggctgcctgcgcacctctttgaggtgcgaagccattcctttgacaaggtgtgaagagccccgtgtgctcactttgagtcctccggcccctgaatgtggctaaccttaaccctgcagctagtgcatgcaatccagcatgtctctagtcgtaatgagtaattgcgggatgggaccaactactttgggtgtccgtgtttctctttttacttttaaattgcttatggtgacaatatatatagtacatatatattgacacc

SEQ ID NO: 20910 - DNA, 616 bp, synthetic construct
  source 1..616: mol_type = other DNA
agatatcttaaaactgggttcaggttgttcccacctgaacttcccacgtggagtagtacactattatcacggtaatcttgtacgccagttttgcttccctccccaatagtaacttagaagatgtacacaacgaccaataggcggtggttatccaaaccatcaaaggtcaagcacttctgtttccccggtcaacgttgatatgctccaacagggcaaaaacaactgcgatcgttacccgcaagatgcctacgcaaagcccagtaatgcactggaagatttatggctggtcgctccactataccccatagtagacctggcagatgaggctagaagtaccccactggtgacagtgttctagcctgcgtggctgcctgcgcaccctacgggtgcgaagccatacattggacagggtgtgaagagccccgtgtgctcatcttgagtcctccggcccctgaatgtggctaaccttaaccccgcagccagagcatacaatccagtgtgtttctggtcgtaatgagtaattgtgggatgggaccaactactttgggtgtccgtgtttcactttttccctttattatgcttatggtgacaatatatacacatatatattgacacc

SEQ ID NO: 20911 - DNA, 612 bp, synthetic construct; identical to SEQ ID NO: 683
  source 1..612: mol_type = other DNA

SEQ ID NO: 20912 - DNA, 610 bp, synthetic construct
  source 1..610: mol_type = other DNA
tgggttgttcccacccacactgtctacggacgtagtactctcatatcacggtatgtttgtacgccagtttgccctcccccccccaaatgtaacttagaagtttgtactttataaaggccagtaggcgagtagtaaaccatactactcatggtcaagcacttctgtttccccggtatgcggagaataagctttaacaaaggctgaagcttcaattatcgttatccgcatgataactacgcaaagcttagtaacattttgaaagtttattggttggtcgctccactggaaaacccccccagtagacctggcagatgaggctaagtaatccccactggtgacagtgacttagcctgcgtggctgcctgcacacctggaaacaggtgtgaagccaagtaatggacaaggtgtgaagagccccgtgtgcttatcatgagtcctccggcccctgaatgcggctaatccaaccccacagctattgcacataatccaatgtgtatttagtcgtaacgggcaactgtgggacggaaccgactactttgggtgtccgtgtttcctttattctcatttaagtttcctatggtgacaaatataagtgattatatctgtcatc

SEQ ID NO: 20913 - DNA, 605 bp, synthetic construct
  source 1..605: mol_type = other DNA
tctcccacccacactgtctacggacgtagtgctctcatattacggtatgcttgcacgccagtttgccctccccttccccgttttgtaaccatagaagattgtacttaactttgaccaataggcggtagtgatccacactacttacggtcaagcacttctgttaccccggtatgcggagaataggctctcaaaagggctgaagcttcaattatcgttatccgcgcaattactacgcaaagcttagtaacttcccatgagattctttggttggccgctccgctggtaccccaccagtaggcttggcagatgaggctgagtaatccccactggcgacagtgactcagcctgcgtggctgcctacacacctggcaacaggtgtgaagccatagaaaggacagggtgtgaagagccccgtgtgctaattgtgattcctccggcccctgaatgcggctaatccaaccccacatccaatgcgcataaaccaatgcgtagttggtcgtaatgggcaactgtgggacggaaccgactactttgggtgtccgtgtttccttttattccttattattagttcatggtgacaagtataagtgtttatatttgtcatc

SEQ ID NO: 20914 - DNA, 608 bp, synthetic construct; identical to SEQ ID NO: 42
  source 1..608: mol_type = other DNA

SEQ ID NO: 20915 - DNA, 626 bp, synthetic construct
  source 1..626: mol_type = other DNA
ttaaaactgggtgtgggttgttcccacccacaccacccaatgggtgttgtactctgttattccggtaactttgtacgccagtttttccctcccctccccatccttttacgtaacttagaagttttaaatacaagaccaatagtaggcaactctccaggttgtctaaggtcaagcacttctgtttccccggttgatgttgatatgctccaacagggcaaaaacaacagataccgttatccgcaaagtgcctacacagagcttagtaggattctgaaagatctttggttggtcgttcagctgcatacccagcagtagaccttgcagatgaggctggacattccccactggtaacagtggtccagcctgcgtggctgcctgcgcacctctcatgaggtgtgaagccaaagatcggacagggtgtgaagagccgcgtgtgctcactttgagtcctccggcccctgaatgcggctaaccttaaacctgcagccatggctcataagccaatgagtttatggtcgtaacgagtaattgcgggatgggaccgactactttgggtgtccgtgtttcactttttcctttattaattgcttatggtgacaatatatatattgatatatattggcatc

SEQ ID NO: 20916 - DNA, 644 bp, synthetic construct
  source 1..644: mol_type = other DNA
ctctggtacttcggtacctttgtacgcctgttttatctcccttcccaatgtaatttagaagcttctaaatcaaggctcaataggtggggcgcaaaccagcgctctcatgagcaagcactcctgtctccccggtgtggttgtataaactgttcccacggttgaaaacaacctatccgttatccgctatagtacttcgagaaacctagtatcacctttggattgttgacgcgttgcgctcagcacactaacccgtgtgtagcttgggtcgatgagtctggacataccccactggcgacagtggtccaggctgcgttggcggcctactcatggtgaaaaccatgagacgctagacatgaacaaggtgtgaagagtctattgagctactatagagtcctccggcccctgaatgcggctaatcctaaccatggagcaagtgctcacagaccagtgagttgcttgtcgtaatgcgcaagtccgtggcggaaccgactactttgggtgtccgtgtttcactttttacttttatgactgcttatggtgacaatttgatattgttaccatttagctgtcaaattaattgcaaaagatcctaggtcttacttaccaatttgcattttgataaccttgatttgaaaattttaata

SEQ ID NO: 20917 - DNA, 626 bp, synthetic construct
  source 1..626: mol_type = other DNA
ttaaaactgggtgtgggttgttcccactcacaccacccaatgggtgttgtactctgttattccggtaactttgtacgccagttttccctccccctcctacccctttacgtaacttagaagttttaaacacgaggccaatagcaggcaactttccaggttgtctaaggtcaagcacttctgtttccccggttgatgttgatatgctccaacagggcaaaaacaactgatatcgttatccgcaaagtgcctacacagagcctagtaggattctgaaagatctttggttggtcgctcagctgcatacccagcagtagaccttgcagatgaggctggacattccccactggtaacagtggtccagcctgcgtggctgcctgcacacctcttacgaggtgtgaagccaaggattggacagggtgcgaagagccgcgtgtgctcactttgagtcctccggcccctgaatgcggctaaccttaaacctgcagccatagctcataagccaatgagtttatggtcgtaatgagtaattgcgggatgggaccgactactttgggtgtccgtgtttcattttttccttttatcaattgcttatggtgacaatatatatataaatatatattggcatc

SEQ ID NO: 20918 - DNA, 610 bp, synthetic construct
  source 1..610: mol_type = other DNA
ttaaaactggatctgggttgttcccactcagatctcccatgcggagttgtactctattattccggtaatcttgtacgccagtttttacaccctccccccttgtaacttagaagaaagtacataacgaccaataggtggcaattaaccaaattgtcaacggtcaagcacttctgtttccccggtcaagattgatacgctccaacagggcgaaaacaattgagatcgttatccgcaaagtgcccacgcaaagcctagtaacactttgaaaggtctatggttggtcgttcagctaaaccccatagtagacctggcagatgaggctagaaattccccactggcgacagtgttctagcctgcgtggctgcctgcacaccctcacgggtgtgaagccatatactcgacaaggtgtgaagagccccgtgtgctcactttgagtcctccggcccctgaatgtggctaaccttaaccccgcagctagtgcatacaaaccagtatgtggctagtcgtaatgagcaattgtgggatgggaccaactactttgggtgtccgtgtttcacttttttccttttgtttgcttatggtgacaatatatatagtatatattgacacc

SEQ ID NO: 20919 - DNA, 611 bp, synthetic construct
  source 1..611: mol_type = other DNA
ttaatactggatccaggttgttcccacctggatctcccaagcggagtggtacactattatcccggtaattttgtacgccagttttataacccctcccctttgtaacttagaagatgtaaacacagaccaataggtggtaactaaccaagttactaaaggtcaagcacttctgtttccccggctgatattgatatgctccaccagggcaaaaacaatagaagtcgttatccgcaaagtgcctacgcaaagcctagtaacactttgaattgtttatggttggtcgctcagctattccccctagtagacctggcagatgaggctagaaataccccactggtaacagtgttctagcctgcgtggctgcctgcgcacccctccgggtgcgaagccatacacatgacaaggtgcgaagagccccgtgtgctcactttgaatcctccggctcctgaatgtggctaaccttaaacctgcagccagtgcacataagccaatgtgtatctggtcgtaatgagtaattgcgggatgggaccaactactttggatgtccgtgtttcttgtttttccttaattttgcttatggtgacaatatatagataatatatattggcatc

SEQ ID NO: 20920 - DNA, 614 bp, synthetic construct
  source 1..614: mol_type = other DNA
ttaaaactggatctgggttgttcccacccagatcatccacgtgatgttgtgctctattattccggtaattttgcacgccagtttttcatcccttccccctttgtaacttagaagacttaaacaaatgaccaataggaagcaacaaaccagttgcgataggtcaagcacttctgtttccccggtcaatgttgatatgctccaacggggcaaaaacagcagcgatcgttatccgcaaggtgcctacgcaaagcctagtagcgctcttgaaattgtttggttggtcgctcaagtacaaacccagtactagacctggcagatgaggctagaaaacccccactggcgacagtgttctagcctgcgtggctgcctgcacacccatttgggtgtgaagccaaacaacggacagggtgtgaagagccacgtgtgctcatcttgattcctccggcccctgaatgcggctaaccttaaacctgcagccattgctcacaatccagtgagttggtggtcgtaatgagcaattgcgggatgggaccgactactttgggtgtccgtgtttcactttttaccttgttttatgcttatggtgacaatatatagtagtatatattgacacc

SEQ ID NO: 20921 - DNA, 611 bp, synthetic construct; identical to SEQ ID NO: 673
  source 1..611: mol_type = other DNA

SEQ ID NO: 20922 - DNA, 611 bp, synthetic construct; identical to SEQ ID NO: 674
  source 1..611: mol_type = other DNA

SEQ ID NO: 20923 - DNA, 656 bp, synthetic construct; identical to SEQ ID NO: 795
  source 1..656: mol_type = other DNA

SEQ ID NO: 20924 - DNA, 615 bp, synthetic construct; identical to SEQ ID NO: 696
  source 1..615: mol_type = other DNA

SEQ ID NO: 20925 - DNA, 613 bp, synthetic construct; identical to SEQ ID NO: 687
  source 1..613: mol_type = other DNA

SEQ ID NO: 20926 - DNA, 614 bp, synthetic construct
  source 1..614: mol_type = other DNA
ttaaaactgggtccaggttgttcccacctggatctcctattgggagttgtactctattattccggtaattttgtacgccagttttatctccccttccccaattgcaacttagaagtttatcaatatgaccaataggcggtagttagccaaactaccagaggtcaagcacttctgtttccccggtcaaagttgatatgctccaacagggcaaaaacaactgagatcgttatccgcaaagtgcctacgcaaagcctagtaacacctttgaagatttatggttggtcgttccgctatttcccatagtagacctggcagatgaggctagaaattccccactggcgacagtgttctagcctgcgtggctgcctgcgcaccccttgggtgcgaagccatacattggacaaggtgtgaagagccccgtgtgctcactttgagtcctccggcccctgaatgtggctaaccttaaccctgcagctagtgcatgtaatccaacatgttgctagtcgtaatgagcaattgcgggacgggaccaactactttgggtgtccgtgtttcactttttccttttaatattgcttatggtgacaatatatataaacatatatattgacacc

SEQ ID NO: 20927 - DNA, 612 bp, synthetic construct; identical to SEQ ID NO: 685
  source 1..612: mol_type = other DNA

SEQ ID NO: 20928 - DNA, 626 bp, synthetic construct
  source 1..626: mol_type = other DNA
ttaaaactgggtgtgggttgttcccactcacaccacccaatgggtgttgtactctgttattccggtaactttgtacgccagttttccctccccctcctacccctttacgtaacttagaagttttaaacacgaggccaatagcaggcaactttccaggttgtctaaggtcaagcacttctgtttccccggttgatgttgatatgctccaacagggcaaaaacaactgatatcgttatccgcaaagtgcctacacagagcctagtaggattctgaaagatctttggttggtcgctcagctgcatacccagcagtagaccttgcagatgaggctggacattccccactggtaacagtggtccagcctgcgtggctgcctgcacacctcttacgaggtgtgaagccaaggattggacagggtgcgaagagccgcgtgtgctcactttgagtcctccggcccctgaatgcggctaaccttaaacctgcagccatagctcataagccaatgagtttatggtcgtaatgagtaattgcgggatgggaccgactactttgggtgtccgtgtttcattttttccttttatcaattgcttatggtgacaatatatatatatatatatattggcatc

SEQ ID NO: 20929 - DNA, 622 bp, synthetic construct
  source 1..622: mol_type = other DNA
ttaaaactgggtgtgggttgttcccactcacaccacccaatgggtgttgtactctgttattccggtaactttgtacgccattttccctccctccccatccttttacgtaacttacaacttttaaacacaagaccaatagtaggcaactctccaggttgtctaaggtcaagcacttctgtttccccggttgacgttgatatgctctaacagggcaaaaacaactgatatcgttacccgcaaagtgcctacacagagcttagtaggattctgaaagatctttggttggtcgctcagctgcatacccagcagtagaccttgcagatgaggctggacattccccactggtaacagtggtccagcctgcgtggctgcctgcacactcttatgaggtgtgaagccaaagattggacagggtgtgaagagccgcgtgtgctcactttgagtcctccggcccctgaatgcggctaaccttaaacctgcagccatggctcataaaccaatgagcttatggtcgtaatgagcaattgcgggatgggaccgactactttgggtgtccgtgtttcactttttcctttatcaattgcttatggtgacaatatatacatagatatatattggcatc

SEQ ID NO: 20930 - DNA, 612 bp, synthetic construct
  source 1..612: mol_type = other DNA
ttaaaactggatctgggttgttcccactcaggtctcccacgtggagtagtacactgttattacggtaactttgtacgccagttttatatcccctcccctcaagtaatttagaagataaacacacagaccaataggagatgatcagccagatcattatgggtcaagcacttctgtttccccggtcgaagttgatatgctccaacagggcaaaaacaactgagatcgttatccgcaaagcgcctacgcaaagcctagtaactatctggaaattacttggttggtcgctccgccataccccatggtagacctggcagatgaggctagaaattccccactggcgacagtgttctagcctgcgtggctgcctgcacacccttttgggtgtgaagccaagtaacggacagggtgtgaagagccccgtgtgctcgctttgagtcctccggcccctgaatgtggctaaccttaaccctgcagctagagcacacaacccagtgtgtatctagtcgtaatgagcaattgcgggatgggaccaactactttgggtgtccgtgtttcttgtttttcttttatatttgcttatggtgacaatatatagtgatatatattggcatc

SEQ ID NO: 20931 - DNA, 610 bp, synthetic construct; identical to SEQ ID NO: 47
  source 1..610: mol_type = other DNA

SEQ ID NO: 20932 - DNA, 619 bp, synthetic construct; identical to SEQ ID NO: 717
  source 1..619: mol_type = other DNA

SEQ ID NO: 20933 - DNA, 610 bp, synthetic construct; identical to SEQ ID NO: 667
  source 1..610: mol_type = other DNA

SEQ ID NO: 20934 - DNA, 610 bp, synthetic construct; identical to SEQ ID NO: 668
  source 1..610: mol_type = other DNA

SEQ ID NO: 20935 - DNA, 451 bp, synthetic construct
  source 1..451: mol_type = other DNA
gctccgcactaccccagtgtagatcaggtcgatgagtcaccgcactcctcacgggcgaccgtggcggtggctgcgctggcggcctgcccgtggggcaacccatgggacgcttcaatacagacatggtgtgaagagtctattgagctagtcggtagtcctccggcccctgaatgcggctaatcctaactgcggagcagatccccacaagccagtgggcagtctgtcgtaatgggcaactctgcagcggaaccgactactttgggtgtccgtgtttccttttattcttatactggctgcttatggtgacaattgaaggattgttgccatatagctattggattggccacccggtgtctaacagagcaataatttatctttttgttggattcgtcccacttaactacagagcacttgcaacgctcaattacatcacagatctcaacacaacaaa

SEQ ID NO: 20936 - DNA, 621 bp, synthetic construct; identical to SEQ ID NO: 727
  source 1..621: mol_type = other DNA

SEQ ID NO: 20937 - DNA, 615 bp, synthetic construct
  source 1..615: mol_type = other DNA
ttaaaactggatctgggttgttcccacccagatcacccaagaggtgtagtgctctgtcattccggtgaccttgcacgccagttttatcaccccttccctcttgtaacttagaagaattaaactcagaccaataggaagcgacaagccagtcgtgacaggtcaagcacttctgtttccccggtcaaagttgatatgcttcaccaaggcaaaaacaacagcgatcgttatccgcaagatgcctacgcaaagcctagtagtgcctttgaaaatatttgtctggttgctcaagtacaaccccagtactaaacctggcagatgaggctggagcttccccactggtaacagtgttccagcctgcgtggctgcctgcacacccttacgggtgtgaagccaaatattggacaaggtgtgaagagccccgtgtgctcatcttgagtcctccggcccctgaatgcggctaaccttaaccccacagccattgctcacaatccagtgagtgtatggtcgtaacgagcaattgtgggatgggaccgactactttgggtgtccgtgtttctcttttttcctttttaattctgcttatggtgacaatatatagtgttatatattggcatc

SEQ ID NO: 20938 - DNA, 621 bp, synthetic construct
  source 1..621: mol_type = other DNA
ttaaaactggatctaggttgttcccacctagatctcctacatggagttgtactctattattccggtaattttgtacgccagttttatcctcccctccccttaaagtaacttagaagttggacatatcgaccaataggtaacatttatccaaaatgttaaaggtcaagcacttctgtttccccggtcaaggttgatgtgctctaacagggcaaaaacagctgcgatcgttatccgcaaagcaactacgcaaagcctagtagcattttttgagagtatgtggttggtcgctccactataaacccaatagtagacctggcagatgaggctagaaattccccactggtaacagtgttctagcctgcgtggctgcctgcgtgctccttgtgagcacgaagccatatatttgacaaggtgtgaagagccccgtgtgcttgctttgagtcctccggcccctgaatgtggctaaccttaaccctgcagctagcgtgtacaatccagtacaaagctagtcgtaatgagcaattgcgggatgggaccaactactttgggtgtccgtgtttcctgtttttcttttatatttgcttatggtgacaatatatatataacatatatattggcatc

SEQ ID NO: 20939 - DNA, 608 bp, synthetic construct; identical to SEQ ID NO: 660
  source 1..608: mol_type = other DNA

SEQ ID NO: 20940 - DNA, 611 bp, synthetic construct; identical to SEQ ID NO: 675
  source 1..611: mol_type = other DNA

SEQ ID NO: 20941 - DNA, 611 bp, synthetic construct; identical to SEQ ID NO: 676
  source 1..611: mol_type = other DNA

SEQ ID NO: 20942 - DNA, 600 bp, synthetic construct
  source 1..600: mol_type = other DNA
gttcaggttgttcccacctgaacttcccacgtggagtagtacactattactacggtaattttgtacgccagttttgcttccctccccaaatggtaacttagaagatgtacacaacgaccaacaggcggtggttacccaaaccatcaaaggtcaagcacttctgtttccccggtcaacgttgatatgctccaacagggcaaaaacaaccacgatcgttacccgcaagatgcctacgcaaagcctagtaatacactggaagatttatggctggtcgctccactataccccatagtagacctggcagatgaggctagaagtaccccactggcgacagtgttctagcctgcgtggctgcctgcgcaccctatgggtgcgaagccatacattggacagggtgtgaagagccccgtgtgctcatcttgagtcctccggcccctgaatgtggctaaccttaaccccgcagccagagcatacaatccagtgtgtttctggtcgtaacgagtaattgtgggatgggaccaactactttgggtgtccgtgtttcactttttccctttattatgcttatggtgacaatatatacacatatatattgacacc

SEQ ID NO: 20943 - DNA, 576 bp, synthetic construct
  source 1..576: mol_type = other DNA
aagcacttctgttgccccggactgagtatcaataggctgctcacgcggctgaaggagaaaacgttcgttacccggccaattacttcgagaaacttagtaccaccatgaaggttgcgcggcgtttcgctccacacaaccccagtgtagatcaggtcgatgagtcaccgcgttccccacgggcgaccgtggcggtggctgcgttggcggcctgcccatgggtcaacccatgggacgcttcaatactgacatggtgtgaagagtctattgagctaattggtattcctccggcccctgaatgcggctaatcctaactgcggagcagatacccacatgccagtgggcagtctgtcgtaacgggcaactctgcagcggaaccgactactttgggtgtccgtgtttccttttatccttatactggctgcttatggtgacaattgagagattgttaccatatagctattggattggccatccggtgacaagcagagcaattatttatttgtttgttggcttcgtgccattaaatagtaaagttctaataaccctcaacctcatcttgttacttaatagtgcaaa

SEQ ID NO: 20944 - DNA, 449 bp, synthetic construct
  source 1..449: mol_type = other DNA
tccgcactaccccagtgtagatcaggtcgatgagtcaccgcactcctcacgggcgaccgtggcggtggctgcgctggcggcctgcccgtggggcaacccatgggacgcttcaatacagacatggtgtgaagagtctattgagctagttggtagtcctccggcccctgaatgcggctaatcctaactgcggagcagatccccacaagccagtgggcagtctgtcgtaatgggcaactctgcagcggaaccgactactttgggtgtccgtgtttccttttattcttatactggctgcttatggtgacaattgtagaattgttgccatatagctattggattggccatccggtgtctaacagagcaataatttatctttttgttggattcgtcccacttaactacagagcacttgcaacgctcaattacatcacagatctcaacacaacaaa

SEQ ID NO: 20945 - DNA, 615 bp, synthetic construct; identical to SEQ ID NO: 698
  source 1..615: mol_type = other DNA

SEQ ID NO: 20946 - DNA, 614 bp, synthetic construct; identical to SEQ ID NO: 56
  source 1..614: mol_type = other DNA

SEQ ID NO: 20947 - DNA, 456 bp, synthetic construct
  source 1..456: mol_type = other DNA
gtttcgctccgcactaccccagtgtagatcaggtcgatgagtcaccgcactcctcacgggcgaccgtggcggtggctgcgctggcggcctgcccgtggggcaacccatgggacgcttcaatacagacatggtgtgaagagtctattgagctagttggtagtcctccggcccctgaatgcggctaatcctaactgcggagcagatccccacaagccagtgggcagtctgtcgtaatgggcaactctgcagcggaaccgactactttgggtgtccgtgtttccttttattcttataccggctgcttatggtgacaattgaaggattgttgccatatagctattggattggccatccggtgtctaacagagcaataatttatctttttgttggattcgtcccacttaactacagagcacttgcaacgctcaattacatcacagatctcaacacaacaaa

SEQ ID NO: 20948 - DNA, 614 bp, synthetic construct
  source 1..614: mol_type = other DNA
ttaaaactggatctgggttgttcccacccagatcacccaagtggtgtagtactctgtcattccggtgactttgtacgccagtttttacaccccccccttcttgtaacttagaagaattaagttcagaccaataggaaaacgacaaaccagtcgtttaaggtcaagcacttctgtttccccggtcaatgctgatatgcttcaccaaggcaaaaacagcagcgatcgttacccgcaagacgcctacgcaaagcctagtaatgcctttgaagatatttgtctggtcactcaggtacaatcccagtactagacctggcagatgaggctggaaaatccccactggcgacagtgttccagcctgcgtggctgcctgcacacccatacgggtgtgaagccaaatattggacaaggtgtgaagagccccgtgtgctcgtcttgagtcctccggcccctgaatgcggctaaccttaaccccacagccattgcttgcattccagcaagtctatggtcgtaatgagcaattgtgggatgggaccgactactttgggtgtccgtgtttcactttttaccttttattatgcttatggtgacaatatatagcgttatatattggcatc

SEQ ID NO: 20949 - DNA, 615 bp, synthetic construct
  source 1..615: mol_type = other DNA
ttaaaactggatcatggttgttcccaccatgattacctacgggtgtagtatacttgtattccggtacatttatacgccagttttataatccccaccccaaatgtaacttagaagcatgtacacaatgatcaatagggtggtggctatccaagtcacctaagatcaagcacttctgtttccccggtgagtgtggatatgctttacccaaggcagaaactaatctcatcgttatccgcaaggtgcctacgggaagcctagtaatactctgaaggtattttggttggtcgctcagttgcattcacccatgcaatagacctggtagatggggctaggcataccccactggtaacagtggcctagcccgcgtggctgcctgcacaccttcgggtgtgaagccataatattgacagggtgtgaagagcctactgtgctcaccttgagtcctccggcccctgaatgtggctaatcctaaccccgtatccattacacacaagccagtgtgtttatggtcgtaatgggtaactacgggatggaaccaactactttgggtgtccgtgtttcttgtttttctttaacattgcttatggtgacattatatattgatatagtgtcatc

SEQ ID NO: 20950 - DNA, 562 bp, synthetic construct
  source 1..562: mol_type = other DNA
ccccggactgagtatcaataagctgctcacgcggctgaaggagaaaacgttcgttacccggccaattacttcgagaaacctagtaccaccatgaaagttgcgcagcgtttcgctccgcacaaccccagtgcagatcaggttgatgagccaccgcgttccccacgggtgaccgtggcggtggctgcgttggcggcctgcccatggggtaacccatgggacgcttcaatactgacatggtgcgaagagtctattgagctaattggtagtcctccggcccctgaatgcggctaatcctaactgcggagcagatacccacacaccagtgggcggtctgtcgtaacgggtaactctgcagcggaaccgactactttgggtgtccgtgtttccttttattcttatactggctgcttatggtgacaattgagagattgttgccatatagctattggattggccatccggtgtctaacagagcaatcatttatctgtttgttgggttcgtacccttgaattttaaagtcctcaatactctcgatcttgtgctacaactaaactcggcaaa

SEQ ID NO: 20951 - DNA, 640 bp, synthetic construct; identical to SEQ ID NO: 769
  source 1..640: mol_type = other DNA

SEQ ID NO: 20952 - DNA, 562 bp, synthetic construct
  source 1..562: mol_type = other DNA
ccccggactgagtatcaataagctgctcacgcggctgaaggaaaaaacgttcgttacccggccaattacttcgagaaacctagtaccaccatgaaagttgcgcagcgtttcgctccgcacaaccccagtgtagatcaggtcgatgagccaccgcattccccacgggtgaccgtggcggtggctgcgttggcggcctgcccatggggcaacccatgggacgcttcaatactgacatggtgcgaagagtctattgagctaattggtagtcctccggcccctgaatgcggctaatcctaactgcggagcagatacccacacaccagtgggcggtctgtcgtaacgggcaactccgcagcggaaccgactactttgggtgtccgtgtttccttttattcttatactggctgcttatggtgacaattgagagattgttaccatatagctattggattggccatccggtgtctaacagagcaatcatttatctgtttgttggatttgtacccttgaatcttaaagccctcaacactctcaaccttgtgctacaactgaactcggcaaa

SEQ ID NO: 20953 - DNA, 513 bp, synthetic construct
  source 1..513: mol_type = other DNA
ttcgttacccggccaactacttcgagaagcccagtactaccatgaaggatgcgcggtgtttcgttcagcacgaccccagtgtagatcaggccgatgagtcaccgcaatccccacgggtgaccgtggcggtggctgcgccggcggcctgcccatggggcaacccatgggacgcttcaattccgacatggtgcgaagagtctattgagctagttggtagtcctccggcccctgaatgcggctaatcccaactgcggagcagacacccacaggccagtgggcagtttgtcgtaacgggcaactctgcagcggaaccgactactttgggtgtccgtgtttccttttatccctacattggctgcttatggtgacaattgaaagattgttgccatatagctgttggattagccatccggtaacaaacagagctattatttacctttttattggctttgtgccactgaatttcaaagttataaaaaccataaacgttatcttgacactcaacacagcaaa

SEQ ID NO: 20954 - DNA, 613 bp, synthetic construct
  source 1..613: mol_type = other DNA
ttgatcccaccagcgggcacaatgtgcgttgtacactgcgatctcggtcgctttgtatgcctgtttttaccacccaccccaactttactgtcttctttatttcacaagtaacatagaagcatgtacatgatgcccagtaggataacgtcccagacggctgttttaagggcaagcacttctgtttccccggatgtgtgaataggcttcacccgaggctgaaactgtagcattcgttatccgcatggctactacgcgactgctagtagcattctgtatggcatgtggggtttcgctcagcagagacccagtctgtagatcagggtaatgaggctacacaatccccactggtgacagtggtgtagcctgcgtggtgccctgcccgaggttcatcctcgggaccctccatgttagacagggtgtgaagacactagtgtgctagtcatgagtcctccggcccctgaatgcggctaatcttaaacctgcagccatcgcatgcatgccagcgtgtaggtggtcgtaatgagtaattgcgggatggaaccgactactttgggtgtccgtgtttccctttttacatttgtgtgtctcttatggttacatcattggtgtaatc

SEQ ID NO: 20955 - DNA, 618 bp, synthetic construct
  source 1..618: mol_type = other DNA
ttaaaactggatctgggttgttcccacccagatcacctacatggtgttgtacactattattgcggtaattttgtacgccagttttatattcccctccctttaatgtaacttagaagcaaagcaaactgatcaatagggggcaatcgtccagattgtcaaagatcaagcacttctgtttccccggtcaaagttgatatgctccacaagggcaaaaacagctgagatcgttatccgcaagatgcctacgcaaagcctagtaacacattgaaagatacttggttggtcactcagctgttaacccaacagtagacctggcagatgaggctagagattcccctccggcgacggagttctagcctgcgtggctgcctgcacacccgttgggtgtgaagccaaatattggacaaggtgtgaagagccgcgtgtgctcatcttgagtcctccggcccctgaatgtggctaaccttaaacctgcagccagtgcgcgcaatccagtgtgtagctggtcgtaatgagtaattgcgggatgggaccaactactttgggtgtccgtgtttcactttttccttttattattgcttatggtgacaatatatatagcatatatatattgttatc

SEQ ID NO: 20956 - DNA, 589 bp, synthetic construct; identical to SEQ ID NO: 640
  source 1..589: mol_type = other DNA

SEQ ID NO: 20957 - DNA, 618 bp, synthetic construct; identical to SEQ ID NO: 59
  source 1..618: mol_type = other DNA

SEQ ID NO: 20958 - DNA, 555 bp, synthetic construct
  source 1..555: mol_type = other DNA
actgagtatcaataagctgctcacgtggctgaaggagaaaacgttcgttatccgaccaattacttcgagaaacccagtaccaccatgaaagttgcgcggcgtttcgctccgcacaaccccagtgtagatcgggccgatgagtcaccgcgttccccacgggcgaccgtggcggtggctgcgttggcggcctgcccatggagcaatccatgggacgcttcaatactgacatggtgcgaagagtctattgagctaattggtagtcctccggcccctgaatgcggctaatcctaactgcggagcagatacccacaagccagtgggcagtctgtcgtaacgggcaacttcgcagcggaaccgactactttgggtgtccgtgtttccttttattttatactggctgcttatggtgacaattgagagattgttaccatatagctattggattggccatccggtgtccaacagagcgatcatttacttgtttgttggattcgtacccttgaactacaaagcactcgtaacgcttaaatacgttatagacctcaacacagcaaa

SEQ ID NO: 20959 - DNA, 625 bp, synthetic construct; identical to SEQ ID NO: 745
  source 1..625: mol_type = other DNA

SEQ ID NO: 20960 - DNA, 613 bp, synthetic construct; identical to SEQ ID NO: 688
  source 1..613: mol_type = other DNA

SEQ ID NO: 20961 - DNA, 599 bp, synthetic construct
  source 1..599: mol_type = other DNA
gttcaggttgttcccacctgaacttcccacgtggggtagtacactattattacggtaatcttgtacgccagttttgcttccctccccaatagtaacttagaagatgtacacaacgaccaataggcggtggttatccaaaccatcaaaggtcaagcacttctgtttccccggtcaacgttgatatgctccaacagggcaaaaacaactgcgatcgttacccgcaagatgcctacgcaaagcccagtaatgcactggaagatttatggctggtcgctccactataccccatagtagacctggcagatgaggctagaagtaccccactggtgacagtgttctagcctgcgtggctgcctgcgcaccctacgggtgcgaagccatacattggacagggtgtgaagagccccgcgtgctcatcttgagtcctccggcccctgaatgtggctaaccttaaccccgcagccagagcatacaatccagtgtgtttctggtcgtaatgagtaattgtgggatgggaccaactactttgggtgtccgtgtttcactttttccctttattatgcttatggtgacaatatatacacatatatattgacacc

SEQ ID NO: 20962 - DNA, 612 bp, synthetic construct
  source 1..612: mol_type = other DNA
ttaaaactggatctgggttgttcccacctggatctcctacatggagttgtactctattattccggtaatcttgtacgccagttttatacccctttcccttttgtaacttagaagttaaacacacagaccaataggtgatggctatccaagtcattaacggtcaagcacttctgtttccccggtttaaattgatacgctccaccagggcgaaaacaatttaaatcgttatccgcaaaatgactacgcaaagcctagtaacatcttgaagaacttatggttggtcgttccactaaaccccatagtagacctggcagatgaggctagaaataccccactggagacagtgttctagcctgcgtggctgcctgcacaccctatgggtgtgaagccatatttttgacaaggtgtgaagagccccgtgtgctcattttgagtcctccggcccctgaatgtggctaaccttaaccctgcagctagtgcatgcaatccagcatgttgctagtcgtaatgagcaattgcgggatgggaccaactactttgggtgtccgtgtttcactttttccttttatttgcttatggtgacaatatatatagtacatatatattggcatc

SEQ ID NO: 20963 - DNA, 614 bp, synthetic construct
  source 1..614: mol_type = other DNA
ttaaaactgggagtgggttgttcccacccagaccacccacgtggtgttgtgctctgttattccggtaaccttgcacgccaattttataaccccctttccccatgtaacttagaagttttgcacataggccaatagcaagcagcgaaccagctgtataaggtcaagcacttctgtttccccggtcaatgttgatatgcttcaacaaggcaaaaacaacagcgatcgttatccgcaagatgcctacacaaagcttagtacctcctttgacggtatttgtctggtcgctcaggtgtttccccagcactagacctggcagatgaggctagaaactccccactggtgacagtgttctagcctgcgtggctgcctgcacacccttctgggtgtgaagccaaatactagacaaggtgtgaagagccccgtgtgttcatcttgagtcctccggcccctgaatgcggctaaccttaaacccgcagccattactcacaatccagtgagcggatggtcgtaatgagcaattgtgggatgggaccgactactttgggtgtccgtgtttcatgtttttctttataatttgcttatggtgacaatatatagtgatatatattggcatc

SEQ ID NO: 20964 - DNA, 612 bp, synthetic construct
  source 1..612: mol_type = other DNA
gtgggttgttcccactcacaccacccaatgggtgttgtactctgttattccggtaactttgtacgccagttttccctccctccccatccttttacgtaacttagaagttttaaacacaagaccaatagtaggcaactctccaggttgtctaaggtcaagcacttctgtttccccggttgacgttgatatgctctaacagggcaaaaacaactgatatcgttacccgcaaagtgcctacacagagcttagtaggattctgaaagatctttggttggtcgctcagctgcatacccagcagtagaccttgcagatgaggctggacattccccactggtaacagtggtccagcctgcgtggctgcctgcacacctcttatgaggtgtgaagctgaagattggacagggtgtgaagagccgcgtgtgctcactttgagtcctccggcccctgaatgcggctaaccttaaacctgcagccatggttcataaaccaatgagcttatggtcgtaatgagcaattgcgggatgggaccgactactttgggtgtccgtgtttcactttttcctttatcaattgcttatggtgacaatatatacatagatatatattggcatc

SEQ ID NO: 20965 - DNA, 615 bp, synthetic construct
  source 1..615: mol_type = other DNA
ttaaaactgagtcatggttgttcccaccatgattacccacgggtgtagtatacttgtatcccggtacatttatacgccagttttataatccccaccccaaatgtaacttagaagcttgtacacaatgatcaataggatgatggctatccaagtcatctaagatcaagcacttctgtctccccggtgagtgtgaatatgctttacccaaggcaaaagctaatctcatcgttatccgcaaggtgcctacgggaagcctagtaatactctgaagatattttggttggtcgatcagttgcactcacccatgcaatagacctggcagatggggctaggcacacctcactggtaacagtggcctagcccgcgtggctgcctgcacaccttcgggtgtgaagccataatattgacagggtgtgaagagcctactgtgctcaccttgagtcctccggcccctgaatgtggctaatcctaaccccgtatccattgcacacaaaccagtgtgtctatggtcgtaatgggtaactacgggatggaaccaactactttgggtgtccgtgtttcttgtttttctttaatactgcttatggtgacattatatattgatatagtgtcatc

SEQ ID NO: 20966 - DNA, 592 bp, synthetic construct
  source 1..592: mol_type = other DNA
gatctcctacatggagttgtactctattattccggtaattttgtacgccagttttatctcccctaccccctttatgtaacttagaagttttgtacacaccgaccaataggtggtatttaaccaaaataccaaaggtcaagcacttctgttaccccggtcaagattgatatgctccaccagggcaaaaaacagtcgcgatcgttacccgcaaagcaactacgcaaagcctagtatcatttttgatggtgtatggttggtcgttccgctatgaacctgatagtagacctggcagatgaggctagaaaatccccactggtaacagtgttctagcctgcgtggctgcctgcgtaccccttgtgggtacgaagccgtacatttgacaaggtgtgaagagccccgtgtgcttgctttgagtcctccggcccctgaatgtggctaaccttaaccccgcagctagtgtgcacaagccagtgcatagctagtcgtaatgagcaattgcgggatgggaccaactactttgggtgtccgtgtttcttgtttttcttttatatttgcttatggtgacaatatatttaatacatatattgacacc

SEQ ID NO: 20967 - DNA, 604 bp, synthetic construct
  source 1..604: mol_type = other DNA
gtcgtggttgttcccaccacgactatctacggatgtagtgctcttgtatcccggtacacttgcacgccagttttgttaccctccccatattgtaacttagaagattgacacaaagaccaataggcggcaatgaaccacattgtcaacggtcaagcacttctgtctccccggtcaatctggatatgctttaccaaaggcaaaaactggagcgatcgttatccgcaaggtgcctacgggaaacctagtaacaccctttatttgatctggttggttgttcagccgttaaacccaaacggtaaacctggcagatgaggctggaaaatccccaccagcgatggtgttccagcctgcgtggctgcctgcacacccgaaagggtgtgaagccttttcaaagacagggtgcgaagagtctactgtgctcaccttgattcctccggcccctgaatgtggctaatcctaaccccgcagctgtagtgtgcaatccagcacatttgcagtcgtaatgggtaactgcgggatggaaccaactactttgggtgtccgtgtttctcttttttcctttacatttgcttatggtgacaattatacggatatagttgtcatc

SEQ ID NO: 20968 - DNA, 645 bp, synthetic construct
  source 1..645: mol_type = other DNA
agggattttaaaacagtcgaccggttgttcccaccggcgagcatactgtgcgttgtacactggaattacggttcctttgtatgcctgttttacaatcccttcccctcttttctatcgtctccaattttccacgtaacttagaagcaaagtacatgagcccaataggagcggctaatccatagccgtatagggcaagcacttctgttaccccggatgtgtgaatagacttctcacgaggttgaagctgaagcattcgttacccgcacttgtactgcgcggaaattagtagcacctttgccagcttcatggcgtttcgctcagcgtttcccccacgtagatcagggcaatggggctacacaacccccaccggcgacggtggtgtagcccgcgtggtgccccgcccgagctatcagctcgggacgccatgatgaagacagggtgtgaaggttcgagtgcgctacaagtgagtcctccggcccctgaatgcggctaaccttaaccccgtagctgtggtatgcatgccagcataaacacagtcgtaatgggcaactacgggatgggaccgactactttgggtgtccgtgtttcactttttcctttaaatttgtcttatggttacaggtttatgcaaatagatctgtaatc

SEQ ID NO: 20969 - DNA, 610 bp, synthetic construct; identical to SEQ ID NO: 669
  source 1..610: mol_type = other DNA

SEQ ID NO: 20970 - DNA, 531 bp, synthetic construct
  source 1..531: mol_type = other DNA
tccccggtgcggttgtatagactgtttccacggttgaaaacaacttatccgttatccgctatagtacttcgagaaacctagtatcacctttggattgttgatgcgttgcgctcagcacactaacccgtgtgtagcttgggctgatgagtctggacgtaccccactggtgacagtggtccaggctgcgttggcggcctactcatggtgaaaaccatgagacgctagacatgaacaaggtgtgaagagtctattgagctactatagagtcctccggcccctgaatgcggctaatcttaaccatggagcaagtgctcacaagccagtgagttgcttgtcgtaacgcgcaagtccgtggcggaaccgactactttgggtgtccgtgtttcactttttacctttacgactgcttatggtgacaatttaatattgttaccatttagcttgtcagattaatcgcgtaaaatcctgaatcttgttcaccaatttgtatttggatagctttatttgaaaattctaaactcattcataaag

SEQ ID NO: 20971 - DNA, 606 bp, synthetic construct; identical to SEQ ID NO: 658
  source 1..606: mol_type = other DNA

SEQ ID NO: 20972 - DNA, 604 bp, synthetic construct
  source 1..604: mol_type = other DNA
gtcgcggttgttcccaccacgactatctacggatgtagtgctcttgtattccggtacacttgcacgccagttttgttaccctccccacattgtaacttagaagattaacacaaagaccaataggcggcaatgaaccacattgtcaacggtcaagcacttctgtctccccggtcaatctggatatgctttaccaaaggcaaaaactggagcgatcgttatccgcaaggtgcctacgggaaacctagtagcactctttatttgatctggttggttgttcagccgttaaacccaaacggtaaacctggcagatgaggctggaaaatccccaccagcgatggtgttccagcctgcgtggctgcctgcacacccgaaagggtgtgaagccttttcaaagacagggtgcgaagagtctactgtgctcaccttgattcctccggcccctgaatgtggctaatcctaaccccgcagctgtagtgtgcaatccagcacatttgcagtcgtaatgggtaactgcgggatggaaccaactactttgggtgtccgtgtttctctttttacctttatatttgcttatggtgacaattatacggatatagttgtcatc

SEQ ID NO: 20973 - DNA, 552 bp, synthetic construct; identical to SEQ ID NO: 595
  source 1..552: mol_type = other DNA

SEQ ID NO: 20974 - DNA, 611 bp, synthetic construct; identical to SEQ ID NO: 677
  source 1..611: mol_type = other DNA

SEQ ID NO: 20975 - DNA, 611 bp, synthetic construct; identical to SEQ ID NO: 678
  source 1..611: mol_type = other DNA

SEQ ID NO: 20976 - DNA, 610 bp, synthetic construct; identical to SEQ ID NO: 670
  source 1..610: mol_type = other DNA

SEQ ID NO: 20977 - DNA, 604 bp, synthetic construct
  source 1..604: mol_type = other DNA
gttgtggttgatcccaccacactgcccactgggcgtagtgctctcatattccggtatgcttgcacgccagttttattcccccttcccccattgtaacttagaagcaaagcacacatgatcaataggagataacctgccaggttatttaagatcaagcacttctgtttccccggcaagtgtgaatatgctttacccaaggcaaaagctaatcttgtcgttatccgcaaggtgcctacgagaagcctagtaatgctcaagatgtaatttggctggtcgctccgctgtttcccacagtagacctggcagatgaggctagacattccccaccagcgatggtggtctagcctgcgtggctgcctgcacaccctatgggtgtgaagccaaatttactgacagggtgtgaagagcctattgtgctcaccttgattcctccggcccctgaatgtggctaatcctaaccccgctgctattgcacacgaaccagtgtgtggatagtcgtaatgagcaatagtgggatggaaccaactactttgggtgtccgtgtttcttgtttttctttaatttgtcttatggtcacaatatatatataacatatattgtgatc

SEQ ID NO: 20978 - DNA, 604 bp, synthetic construct
  source 1..604: mol_type = other DNA
catggttgttcccaccatgattacctacgggtgtagtatacttgtattccggtacatttatacgccagttttatgatcccccaccccaaatgtaacttagaagcatgtacacaatgatcaatagggtggtggctatccaagtcacctaagatcaagcacttctgtttccccggtgagtgtggatatgctttacccaaggcagaaactaatctcatcgttatccgcaaggtgcctacgggaagcctagtaatattctgaaggtattttggttggtcgctcagttgcattcacccgtgcaatagacctggcagatggggctaggcataccccactggtaacagtggcctagcccgcgtggctgcctgcacaccttcgggtgtgaagccataatattgacagggtgtgaagagcctactgtgctcaccttgagtcctccggcccctgaatgtggctaatcctaaccccgtatccattgcacacaagccagtgtgtttatggtcgtaatgggtaactacgggatggaaccaactactttgggtgtccgtgtttcttgtttttctttaatattgcttatggtgacattatatattgatatagtgtcatc

SEQ ID NO: 20979 - DNA, 609 bp, synthetic construct
  source 1..609: mol_type = other DNA
ggttgttcccactcacaccacccaatgggtgttgtactctgttattccggtaactttgtacgccagttttccctccctccccatccttttacgtaacttagaagttttaaacacaagaccaatagtaggcaactctccaggttgtctaaggtcaagcacttctgtttccccggttgacgttgatatgctctaacagggcaaaaacaactgatatcgttacccgcaaagtgcctacacagagcttagtaggattctgaaagatctttggttggtcgctcagctgcatacccagcagtagaccttgcagatgaggctggacattccccactggtaacagtggtccagcctgcgtggctgcctgcacacctcttatgaggtgtgaagctgaagattggacagggtgtgaagagccgcgtgtgctcactttgagtcctccggcccctgaatgcggctaaccttaaacctgcagccatggttcataaaccaatgagcttatggtcgtaatgagcaattgcgggatgggaccgactactttgggtgtccgtgtttcactttttcctttatcaattgcttatggtgacaatatatacatagatatatattggcatc

SEQ ID NO: 20980 - DNA, 567 bp, synthetic construct
  source 1..567: mol_type = other DNA
acactattattacggtaattttgtacgccagttttatacccccttcccaaaatgtaacttagaagcaatacaaactgatcaataggaagcaatcatccagattgctaacgatcaagcacttctgtctccccggtcaaggttgatatgctccaccagggcaaaaacagctaagatcgttatccgcaagatgcctacgcaaagcctagtaatgctttcgaagatacttggttggtcgctcagctgtgcacccgacagtagacctggcagatgaggctagaagtacccctctggtgacagagttctagcctgcgtggctgcctgcacaccctattgggtgtgaagccaaatattggacaaggtgtgaagagccccgtgtgctcatcttgagtcctccggcccctgaatgtggctaaccttaaacctgcagccagtgcacacaaaccagtgtgtagctggtcgtaacgagcaattgcaggatgggaccaactactttgggtgtccgtgtttcactttttacccttatattgcttatggtgacaatatatatagtatatatatattgttatc

SEQ ID NO: 20981 - DNA, 617 bp, synthetic construct; identical to SEQ ID NO: 709
  source 1..617: mol_type = other DNA

SEQ ID NO: 20982 - DNA, 617 bp, synthetic construct
  source 1..617: mol_type = other DNA
ttaaaactggatctgggttgttcccacccagatcacctacatggtgttgtacactattattacggtaattttgtacgccagttttatatccccttccccaaatgtaacttagaagcaatgcaaactgatcaatagggggcaatcatccagattgctaatgatcaagcacttctgtttccccggtcaaggttgatatgctccacaagggcaaaaacaaccgagatcgttatccgcaagatgcctacgcaaagcctagtaatgcttttgaagatacttggttggtcgctcagctgtgcacccgacagtagacctggcagatgaggctagaagtacccctctggcgacagagttctagcctgcgtggctgcctgcacacccttttgggtgtgaagccaagtattggacaaggtgtgaagagccccgtgtgctcatcttgaatcctccggcccctgaatgtggctaaccttaaacctgcagccagtgcacacaaaccagtgtgtagctggtcgtaatgagcaattgcgggatgggaccaactactttgggtgtccgtgtttcactttttacctttatattgcttatggtgacaatatatatagcacatatatattgttatc

SEQ ID NO: 20983 - DNA, 607 bp, synthetic construct
  source 1..607: mol_type = other DNA
tgttcccactcacaccacccaatgggtgttgtactctgttattccggtaactttgtacgccagttttccctccctccccatccttttacgtaacttagaagttttaaacacaagaccaatagtaggcaactctccaggttgtctaaggtcaagcacttctgtttccccggttgacgttgatatgctctaacagggcaaaaacaactgatatcgttacccgcaaagtgcctacacagagcttagtaggattctgaaagatctttggttggtcgctcagctgcatacccagcagtagaccttgcagatgaggctggacattccccactggtaacagtggtccagcctgcgtggctgcctgcacaccttcttatgaggtgtgaagccaaagattggacagggtgtgaagagccgcgtgtgctcactttgagtcctccggcccctgaatgcggctaaccttaaacctgcagccatggttcataaaccaatgagcttatggtcgtaatgagcaattgcgggatgggaccgactactttgggtgtccgtgtttcactttttcctttatcaattgcttatggtgacaatatatacatagatatatattggcatc

SEQ ID NO: 20984 - DNA, 617 bp, synthetic construct
  source 1..617: mol_type = other DNA
ttaaaactggatctgggttgttcccactcagatcacctacatggtgttgtacactattatcacggtaattttgtacgccagttttatacccccttccccaaatgtaacttagaagcaaagcaaactgatcaacagggggcaatcgtccagattgtcaaagatcaagcacttctgtttccccggtcaaagttgatatgctccacaagggcaaaaacaactgagatcgttatccgcaagatgcctacgcaaagcctagtaatacattgaaagatacttggttggtcgctcagctgttaacccaacagtagacctggtggatgaggctagagattcccctccggcgacggagttctagcctgcgtggctgcctgcacacccattgggtgtgaagccaagtattggacaaggtgtgaagagccgcgtgtgctcatcttgagtcctccggcccctgaatgtggctaaccttaaacctgcagccagtgcacacaaaccagtgtgtagctggtcgtaatgagcaattgcgggatgggaccaactactttgggtgtccgtgtttcactttttccttttattattgcttatggtgacaatatatatagcatatatatattgttatc

SEQ ID NO: 20985 - DNA, 598 bp, synthetic construct
  source 1..598: mol_type = other DNA
gtaattcacacagttcaatagagagggggtacaaaccagtaccaccacgaacaagcacttctgtttccccggtgaagctacatagactgtccccacggttgaaagtggcagatccgttatccgcttaagtacttcgagaagcctagtatcaccttggaatcttcgacgcgttgcgctcagcactctaccccgagtgtagcttaggctgatgagtctgggcataccccaccggcgacggtggcccaggctgcgttggcggcctacccatggctaacgccatgggacgctagttgtgaacaaggtgtgaagagcctattgagctacttaagagtcctccggcccctgaatgcggctaatcctaaccacggagcaagtgcccacaaaccagtgggtggcttgtcgtaacgcgtaagtctgtggcggaaccgactactttgggtgtccgtgtttccttttatttttatcatggctgcttatggtgacaatctaagattgttatcatatagctattggattggccatccggtgattcacagagacttgaaagctaactcaccttcctataacactcatttgtttatcaatcttatagcacaca

SEQ ID NO: 20986 - DNA, 618 bp, synthetic construct
  source 1..618: mol_type = other DNA
ttaaaactgagtgtgggttgctcccacccacactgtctacgggacgttgtactcttgtattccggtacacttgtacgccagtttgccaccctaaataccccgtaacaatagaagtctacgcacacttagaccaatagggggtgttcatccagttcacccaaggtcaagcacttctgtttccccggcataggggtgttaggcttcacccgaggccaaagctctgattgtcgttatccgcacaactactggacaaagcctagtagcgccctacgatgtagtatggttggttgttccgccagtatcccctggtaaacctggcagatggggctagaagttcctcactggcgacagtgttctagcccgcgtggctgcctgctccctcacgggagaagccattctactgacaaggtgtgaagagccccgtacgctagttgtgattcctccggcccctgaatgcggctaatccaaccctgcagccattacatggaagccaccatgtggatggtcgtaatgagtaattgcgggacggaaccgactactttgggtgtccgtgtttcttgtttttcttttactgacgtttatggtgacaatatatatataacgtatatattgttcatc

SEQ ID NO: 20987 - DNA, 618 bp, synthetic construct
  source 1..618: mol_type = other DNA
ttaaaactgggtctgggttgtccccacccagaccacccacgtggtgttgtacactgttatcccggtaactttgtacgccagttttaaactcccttaccccttttgcaacttagaagttatacacaccgaccaacagcagacaatcatccagattgtttatggtcaagcacttctgtctccccggtctcctctgatatgctccaacagggcaaaaacagagtagatcgttacccgcaagatgcctacgcaacgcctagtaacactttgaagtgattttggttggtcgctcatttacaaccccagtaatagacctggcagatgaggctagatgttccccactggcgacagtgatctagcctgcgtggctgcctgcacaccctttgtgggtgtgaagccaaatttatgacaaggtgcgaagagccacgtgtgctcatcttgagtcctccggcccctgaatgcggctaaccttaaccctgcagccattgctcacaaaccagtgagtatgtggtcgtaatgagaaattgcgggacgggaccgactactttgggtgtccgtgtttcactttttaccttatttttgcttatggtgacaatatatatatagatatatattgacacc

SEQ ID NO: 20988 - DNA, 431 bp, synthetic construct; identical to SEQ ID NO: 476
  source 1..431: mol_type = other DNA

SEQ ID NO: 20989 - DNA, 520 bp, synthetic construct
  source 1..520: mol_type = other DNA
tccccggtgtggttgtataaactgttcccacggttgaaaacaacctatccgttatccgctatagtacttcgagaaacctagtatcacctttggattgttgatgcgttgcgctcagcacactaacccgtgtgtagcttgggtcgatgagtctggacataccccactggcgacagtggtccaggctgcgttggcggcctactcatggtgaaaaccatgagacgctagacatgaacaaggtgtgaagagtctattgagctactatagagtcctccggcccctgaatgcggctaatcctaaccatggagcaagtgctcacaagccagtgagttgcttgtcgtaatgcgcaagtccgtggcggaaccgactactttgggtgtccgtgtttcactttttacttttatgactgcttatggtgacaatttgatattgttaccatttagcttgtcaaaccaattgcaaaagatcctaaatcttatttataaacttgcaatttgacaactttgatttaaaagttttaata

SEQ ID NO: 20990 - DNA, 477 bp, synthetic construct
  source 1..477: mol_type = other DNA
cctatccgttatccgctatagtacttcgagaaacctagtatcacctttggattgttgacgcgttgcgctcagcacactaacccgtgtgtagcttgggtcgatgagtctggacataccccactggcgacagtggtccaggctgcgttggcggcctactcatggtgaaaaccatgagacgctagacatgaacaaggtgtgaagagtctattgagctactatagagtcctccggcccctgaatgcggctaatcctaaccatggagcaagtgctcacaggccagtgagttgcttgtcgtaatgcgcaagtccgtggcggaaccgactactttgggtgtccgtgtttcactttttacttttatgactgcttatggtgacaatttgatattgttaccatttagcttgtcaaattaattgcaaaagatcctaaatcttacttaccaacttgcattttgataaccttgatttgaaaattttaata

SEQ ID NO: 20991 - DNA, 616 bp, synthetic construct
  source 1..616: mol_type = other DNA
ttaaaactggatctaggttgtccccacctagatctcccatgtggagtggtactctattattccggtaatcttgtacgccagttttatatcccctcccccttttgtaacttagaagttatgaacatagaccaataggtggtgatcatccagatcacttaaggtcaagcacttctgtttccccggtcgacgttgatatgctccaccagggcaaaaacaacagagatcgttatccgcaaggtgcctacacaaagcctagtaaccccttggagagtatgtggttggtcgctcagctattccccatagtagacctggcagatgaggctagaaattccccactggtaacagtgttctagcctgcgtggctgcctgcgcactcttatgagtgcgaagccatatatttgacaaggtgcgaagagccccgtgtgctcaccttgagtcctccggcccctgaatgtggctaaccctaaccctgcagctagtgcatgaaatccatcatgttgctagtcgtaatgagtaattgcgggatgggaccaactactttgggtgtccgtgtttcactttttccttttatatttgcttatggtgacaatatatatataacatatatattggcatc

SEQ ID NO: 20992 - DNA, 639 bp, synthetic construct; identical to SEQ ID NO: 766
  source 1..639: mol_type = other DNA

SEQ ID NO: 20993 - DNA, 608 bp, synthetic construct
  source 1..608: mol_type = other DNA
ttaaaactgagttcaggttgttcccatctgaacttcccacgtggagtagtacactattattacggtaattttgtacgccagttttgcctccctccccaaatgtaacttagaagatgtacacaacggccaacaggcggtggttatccaaaccatcaaaggtcaagcacttctgtttccccggtcaatgttgatatgctccaacagggcaaaaacaactgcgatcgttatccgcaagatgcctacgcaaagcttagtaacactttggaagatttatggctggtcgttccactataccccatagtagacctggcagatgaggctagaaataccccactggtgacagtgttctagcctgcgtggctgcctgcgcaccctatgggtgcgaagccatacattggacaaggtgtgaagagccccgtgtgctcatcttgagtcctccggcccctgaatgtggctaaccttaaccccgcagccaatgcacacaatccagtgtgtttttggtcgtaatgagtaattgtgggatgggaccaactactttgggtgtccgtgtttcactttttcctttattatgcttatggtgacaatatatatacatatatattgacacc

SEQ ID NO: 20994 - DNA, 518 bp, synthetic construct
  source 1..518: mol_type = other DNA
cccggtgtggttgtatagactgtccccacggttgaaaacaacttatccgttatccgctatagtacttcgagaaacctagtatcacctttggattgttgacgcgttgcgctcagcacactaacccgtgtgtagcttgggtcgatgagtctggacgtaccccactggcgacagtggtccaggctgcgttggcggcctactcatggtgaaaaccatgagacgctagacatgaacaaggtgtgaagagtctattgagctactatagagtcctccggcccctgaatgcggctaatcctaaccatggagcaagtgctcacaggccagtgagttgcttgtcgtaatgcgcaagtccgtggcggaaccgactactttgggtgtccgtgtttcactttttacttttatgactgcttatggtgacaatttaatattgttaccatttagcttgtcaaattaattgcaaaagatcctaaatcttatttaccaacttgcattttgataaccttgatttgaaaattttaata

SEQ ID NO: 20995 - DNA, 475 bp, synthetic construct
  source 1..475: mol_type = other DNA
tatccgttatccgctatagtacttcgagaaacctagtatcacctttggattgttgacgcgttgcgctcagcacactaacccgtgtgtagcttgggtcgatgagtctggacataccccactggcgacagtggtccaggctgcgttggcggcctactcatggtgaaaaccatgagacgctagacatgaacaaggtgtgaagagtctattgagctactatagagtcctccggcccctgaatgcggctaatcctaaccatggagcaagtgctcacaggccagtgagttgcttgtcgtaatgcgcaagtccgtggcggaaccgactactttgggtgtccgtgtttcactttttacttttatgactgcttatggtgacaatttgatattgttaccatttagcttgtcaaattaattgcaaaagatcctaaatcttacttaccaacttgcattttgataaccttgatttgaaaattttaata

SEQ ID NO: 20996 - DNA, 600 bp, synthetic construct
  source 1..600: mol_type = other DNA
acccacactgtctacggacgtagtgctctcatattacggtatgcttgcacgccagtttgcccccccctctccccgttttgtaactatagaagattgtacttaatttcgaccaataggcagtagtgatccacactacttacggtcaagcacttctgttaccccggtatgcggagaataggctcccaaaagggctgaagcttcaattatcgttatccgcgcaattactacacaaagcttagtaacttcccaagaaattctttggttggccgctccgctggtaccccaccagtaggcttggcagatgaggctgagtaatccccactggcgacagtgactcagcctgcgtggctgcctacacacctggcaacaggtgtgaagccatagaaaggacagggtgtgaagagccccgtgtgctaattgtgattcctccggcccctgaatgcggctaatccaaccccacatccaatgcgcataaaccaatgcgtagttggtcgtaatgggcaactgtgggacggaaccgactactttgggtgtccgtgtttccttttattccttattattagttcatggtgacaagtataagtgtttatatttgtcatc

SEQ ID NO: 20997 - DNA, 606 bp, synthetic construct
  source 1..606: mol_type = other DNA
ttaaaactgggttcaggttgttcccatctgaacttcccacgtggagtagtacactattattacggtaattttgtacgccagttttacctccctccccaaatgtaacttagaagatgtacacaacgaccaacaggcggtggttatccaaaccatcaaaggtcaagcacttctgtttccccggtcaatgttgatatgctccaacagggcaaaaacaactgcgatcgttatccgcaagatgcctacgcaaagcttagtaacactttggaagatttatggctggtcgttccactataccccatagtagacctggcagatgaggctagaaataccccactggtgacagtgttctagcctgcgtggctgcctgcgcaccctatgggtgcgaagccatacattggacaaggtgtgaagagccccgtgtgctcatcttgagtcctccggcccctgaatgtggctaaccttaaccccgcagccagtgcacacaatccagtgtgtttttggtcgtaatgagtaattgtgggatgggaccaactactttgggtgtccgtgtttcactttttcctttattatgcttatggtgacaatatatacatatatattgacacc

SEQ ID NO: 20998 - DNA, 619 bp, synthetic construct; identical to SEQ ID NO: 719
  source 1..619: mol_type = other DNA

SEQ ID NO: 20999 - DNA, 612 bp, synthetic construct
  source 1..612: mol_type = other DNA
ttaaaactggatccaggttgttcccacctggatctcccaaagggagtggaactctgttattacggtaactttgtacgccagttttatcctcccccaccccatgtaacttagaagcttttcacaaagaccaatagttggtaatcatccagattacttaaggtcaagcacttctgtttccccggtcaacgttgatatgctctaacagggcaaaaacaactgcgatcgttatccgcaaagcgcctacgcaaagcctagtaacacctttgaaattgtttggttggtcgttccgccattttccctggtagacctggcagatgaggctagaaacaccccactggcgacagtgttctagcctgcgtggctgcctgcacaccctgtgggtgtgaagccaaataatggacaaggtgtgaagagccccgtgtgctcgctttgagtcctccggcccctgaatgcggctaaccttaaccctgcagctagagcacacaagccagtgtgtatctagtcgtaatgagtaattgcgggacgggaccgactactttgggtgtccgtgtttcactttttacttataattgcttatggtgacaatatatatatagtatatatattgacacc

SEQ ID NO: 21000 - DNA, 606 bp, synthetic construct
  source 1..606: mol_type = other DNA
gtgggttgctcccacccacactgtctacggacgttgtactcttgtattccggtacacttgtacgccagtttgccaccctaaataccccgtaacaatagaagtctacgcacacttagaccaataggggggtgttcatccagttcacccaaggtcaagcacttctgtttccccggcataggggtgctaggcttcacccgaggccgaagctctgattgtcgttatccgcacaactactggacaaagcctagtaacaccctacgatgtagtatggttggttgttccgccagtatcccctggtaaacctggcagatggggctagaagttcctcactggcgacagtgttctagcccgcgtggctgcctgctccctcacgggagaagccattctactgacaaggtgtgaagagccccgtacgctagttgtgactcctccggcccctgaatgcggctaatccaaccctgcagccattacatggaagccaccatgtggatggtcgtaatgagtaattgcgggacggaaccgactactttgggtgtccgtgtttcttgtttttcttttactgacgtttatggtgacaatatatatataacgtatatattgttcacc

SEQ ID NO: 21001 - DNA, 613 bp, synthetic construct
  source 1..613: mol_type = other DNA
gtaggtgatctgggtgggaacaacccagatcccctacatggtgttgtacactattatcacggtaattttgtacgccagttttatatccccttcccttaatgtaacttagaagtaaagcaaactgatcaataggggacaatcatccagattgtcaaagatcaagcacttctgtttccccggtcaaagttgatatgctccacaagggcaaaaacaactgagatcgttatccgcaagatgcctacgcaaagcctagtaacatattgaaagatacttggttggtcgctcagctgttaacccaacagtagacctggcagatgaggctagagattcccctccggcgacggagttctagcctgcgtggctgcctgcacaccctttgggtgtgaagccaagtattggacaaggtgtgaagagccgcgtgtgctcatcttgagtcctccggcccctgaatgtggctaaccttaaacctgcagccagtgcacgcaatccagtgtgtagctggtcgtaatgagcaattgcgggatgggaccaactactttgggtgtccgtgtttcactttttcttttattattgcttatggtgacaatatatatagcatatatatattgttatc

SEQ ID NO: 21002 - DNA, 652 bp, synthetic construct; identical to SEQ ID NO: 790
  source 1..652: mol_type = other DNA

SEQ ID NO: 21003 - DNA, 464 bp, synthetic construct
  source 1..464: mol_type = other DNA
ttgcgcagtgtttcgctccgcacaaccccagtgtagatcaggtcgatgagtcaccgcatcccccacgggcgaccgtggcggtggctgcgttggcggcctgcccatggggtaacccatgggacgctacaatactgacatggtgtgaagagtctattgagctaactggtagtcctccggcccctgaatgcggctaatcccaactgcggagcacgtgcttccaatccaggaggtagcgtgtcgtaacgggcaactctgcagcggaaccgactactttgggtgtccgtgtttcctttatctctttattggctgcttatggtgacaattgaaagattgttgccatatagctattggattggccatccggtatctaacagagcaatcatatacctgtttgttggatttgttccacttaacaaaacagagttccgtactttgtgttatattattaggttgaacacatcaaa

SEQ ID NO: 21004 - DNA, 613 bp, synthetic construct; identical to SEQ ID NO: 689
  source 1..613: mol_type = other DNA

SEQ ID NO: 21005 - DNA, 641 bp, synthetic construct; identical to SEQ ID NO: 772
  source 1..641: mol_type = other DNA

SEQ ID NO: 21006 - DNA, 610 bp, synthetic construct; identical to SEQ ID NO: 48
  source 1..610: mol_type = other DNA

SEQ ID NO: 21007 - DNA, 445 bp, synthetic construct; identical to SEQ ID NO: 489
  source 1..445: mol_type = other DNA

SEQ ID NO: 21008 - DNA, 554 bp, synthetic construct
  source 1..554: mol_type = other DNA
tcttatgagcaagcacttctgtctccccggtgcggttgtatagactgtttccacggttgaaaacaacttatccgttatccgctatagtacttcgagaaacctagtatcacctttggattgttgatgcgttgcgctcagcacactaacccgtgtgtagcttgggctgatgagtctggacgtaccccactggtgacagtggtccaggctgcgttggcggcctactcatggtgaaaaccatgagacgctagacatgaacaaggtgtgaagagtctattgagctactatagagtcctccggcccctgaatgcggctaatcttaaccatggagcaagtgctcacaagccagtgagttgcttgtcgtaacgcgcaagtccgtggcggaaccgactactttgggtgtccgtgtttcactttttacctttatgactgcttatggtgacaatttaatattgttaccatttagcttgtcagattaatcgcgtgaaatcctaaatcttgttcaccaatttgtattcggatagcttcatttgaaaattctaaactcattcataaag

SEQ ID NO: 21009 - DNA, 523 bp, synthetic construct
  source 1..523: mol_type = other DNA
ggaaaaaacgtccgttatccggccaattacttcaagaaacccagtaccaccatgaaggttgcgcagcgtttcgctccgcacaaccccagtgtagatcaggtcgatgagtcaccgcattcctcacgggcgaccgtggcggtggctgcgctggcggcctgcccatggggcaacccatgggacgcttcaatactgacatggtgcgaagagtcaattgagctaattggtagtcctccggcccctgaatgcggctaatcctaactgtggagcagattcccgcatgccagcgggtggtctgtcgtaacgggcaactctgcagcggaaccgactactttgggtgtccgtgtttccttttattcctatatcggctgcttatggtgacaattgagagattgttaccatatagctattggattggccatccggtgacaaacagagcaattatttaccaatttattggttttgtaccattgaattttaacgtattcaaaactcttaaccttattttggctcttaatacagcaaa

SEQ ID NO: 21010 - DNA, 613 bp, synthetic construct
  source 1..613: mol_type = other DNA
ataaaactgggtccaggttgttcccacctggatctcctacatggagttgtactctattattccggtaatcttgtacgccagttttatatcccctacccctttgtaacttagaagttaaacacacagaccaataggcggtggctatccaggtcactaatggtcaagcacttctgtttccccggtcaagattgatacgctctaacagggcgaaaacagtcaagatcgttaaccgcaaagtgactacgcaaagcttagtaataccttgaagagtctatggctggtcgttccgctataaccccctagtagacctggcagatgaggctagaaacaccccactggtaacagtgttctagcctgcgtggctgcctgcacaccctttcgggtgtgaagccatatatttgacaaggtgtgaagagccccgtgtgctcactttgagtcctccggcccctgaatgtggctaaccttaaccctgcagctagcgtatgtaatccaacatattgctagtcgtaatgagcaattgcgggatgggaccaactactttgggtgtccgtgtttcactttttccttttattttgcttatggtgacaatatatatagtatatatattggcatc

SEQ ID NO: 21011 - DNA, 591 bp, synthetic construct
  source 1..591: mol_type = other DNA
cccaatgggtgttgtactctgttattccggtaactttgtacgccagtttttccctcccctccccatccttttacgtaacttagaagttttaaatacaagaccaatagtaggcaactctccaggttgtctaaggtcaagcacttctgtttccccggttgatgttgatatgctccaacagggcaaaaacaacagataccgttatccgcaaagtgcctacacagagcttagtaggattctgaaagatctttggttggtcgttcagctgcatacccagcagtagaccttgcagatgaggctggacattccccactggtaacagtggtccagcctgcgtggctgcctgcgcacctctcatgaggtgtgaagccaaagatcggacagggtgtgaagagccgcgtgtgctcactttgagtcctccggcccctgaatgcggctaaccttaaacctgcagccatggctcataagccaatgagtttatggtcgtaacgagtaattgcgggatgggaccgactactttgggtgtccgtgtttcactttttcctttattaattgcttatggtgacaatatatatattgatatatattggcatc

SEQ ID NO: 21012 - DNA, 553 bp, synthetic construct
  source 1..553: mol_type = other DNA
cttatgagcaagcacttctgtctccccggtgcggttgtatagactgtttccacggttgaaaacaacttatccgttatccgctatagtacttcgagaaacctagtatcacctttggattgttgatgcgttgcgatcagcacactgacccgtgtgtagcttgggctgatgagtctggacgtaccccactggtgacagtggtccaggctgcgttggcggcctactcatggtgaaaaccatgagacgctagacatgaacaaggtgtgaagagtctattgagctactatagagtcctccggcccctgaatgcggctaatcttaaccatggagcaagtgctcacaagccagtgagttgcttgtcgtaacgcgcaagtccgtggcggaaccgactactttgggtgtccgtgtttcactttttacctttatgactgcttatggtgacaatttaatattgttaccatttagcttgtcagattaatcgcgtgaaatcctaaatcttgttcaccaatttgtattcggatagcttcatttgaaaattctaaactcattcataaag

SEQ ID NO: 21013 - DNA, 604 bp, synthetic construct
  source 1..604: mol_type = other DNA
gtcgtggttgttcccaccacgactatctacggatgtagtgctcttgtattccggtacacttgcacgccagttttgttaccctccccacattgtaacttagaagattaacacaaagaccaataggcggcaatgaaccacattgtcaacggtcaagcacttctgtctccccggtcaatctggatatgctttaccaaaggcaaaaactggagcgatcgttatccgcaaggtgcctacgggaaacctagtagcactctttatttgatctggttggttgttcagccgttaaacccaaacggtaaacctggcagatgaggctggaaaatccccaccagcgatggtgttccagcctgcgtggctgcctgcacacccggaagggtgtgaagccttttcaaagacagggtgcgaagagtctactgtgctcaccttgattcctccggcccctgaatgtggctaatcctaaccccgcagctgtagtgtgcaatccagcacatttgcagtcgtaatgggtaactgcgggatggaaccaactactttgggtgtccgtgtttctctttttacctttatatttgcttatggtgacaattatacagatatagttgtcatc

SEQ ID NO: 21014 - DNA, 614 bp, synthetic construct
  source 1..614: mol_type = other DNA
ttaaaactgagtcgtggttgttcccaccacgactatctacggatgtagtgctcttgtattccggtacacttgcacgccagttttgttaccctccccacattgtaacttagaagatcaacacaaagaccaataggcggcaatgaaccacattgtcaacggtcaagcacttctgtctccccggtcaatctggatatgctttaccaaaggcaaaaactggagcgatcgttatccgcaaggtgcctacgggaaacctagtagcactctttatttgatctggttggttgctcagccgttaaacccaaacggtaaacctggcagatgaggctggaaaatccccaccagcgatggtgttccagcctgcgtggctgcctgcacacccgaaagggtgtgaagccttttcaaagacagggtgcgaagagtctactgtgctcaccttgattcctccggcccctgaatgtggctaatcctaaccccgcagctgtagtgtgcaatccagcacatttgcagtcgtaatgggtaactgcgggatggaaccaactactttgggtgtccgtgtttctctttttacctttatatttgcttatggtgacaattatacagatatagttgtcatc

SEQ ID NO: 21015 - DNA, 611 bp, synthetic construct
  source 1..611: mol_type = other DNA
ttaaaactgggtccaggttgttcccacctggatctcccaaagggagtggtactctgttattacggtaactttgtacgccagttttatcctccccctaccccctgtaacttagaagtttttcacaaagaccaatagttggtaatcatccagattacttaaggtcaagcacttctgtttccccggtcaatgctgatatgctccaacagggcaaaaacaactgcgatcgttatccgcaaagcgcctacacaaagcctagtagcacctttgaaattatttggttggtcattccgccatttcccctggtagacctggcagatgaggctggaagtaccccactggcgacagtgttccagcctgcgtggctgcctgcacaccctatgggtgtgaagccaaataatggacaaggtgtgaagagccccgtgtgctcgctttgagtcctccggcccctgaatgcggctaaccttaaccctgcagctggagcacacaaaccagtgtgtatctagtcgtaatgagcaattgcgggatgggaccgactactttgggtgtccgtgtttcactttttacttataattgcttatggtgacaatatatatatagtatatattggcact

SEQ ID NO: 21016 - DNA, 608 bp, synthetic construct; identical to SEQ ID NO: 43
  source 1..608: mol_type = other DNA

SEQ ID NO: 21017 - DNA, 590 bp, synthetic construct
  source 1..590: mol_type = other DNA
ccaatgggtgttgtactctgttattccggtaactttgtacgccagtttttccctcccctccccatccttttacgtaacttagaagttttaaatacaagaccaatagtaggcaactctccaggttgtctaaggtcaagcacttctgtttccccggttgatgttgatatgctccaacagggcaaaaacaacagataccgttatccgcaaagtgcctacacagagcttagtaggattctgaaagatctttggttggtcgttcagctgcatacccagcagtagaccttgcagatgaggctggacattccccactggtaacagtggtccagcctgcgtggctgcctgcgcacctctcatgaggtgtgaagccaaagatcggacagggtgtgaagagccgcgtgtgctcactttgagtcctccggcccctgaatgcggctaaccttaaacctgcagccatggctcataagccaatgagtttatggtcgtaacgagtaattgcgggatgggaccgactactttgggtgtccgtgtttcactttttcctttattaattgcttatggtgacaatatatatattgatatatattggcatc

SEQ ID NO: 21018 - DNA, 588 bp, synthetic construct
  source 1..588: mol_type = other DNA
ggtaactttgtgtttgagtagtactctattattacggtaatcttgtacgccagttttatatccccttccccctttgtaacttagaagttatgaacacagaccaataggtggtgatcatccagatcgcttaaggtcaagcacttctgtttccccggtcaacgttgatatgctccaccagggcaaaaacagcagagatcgttatccgcaaggtgcctacgcaaagcctagtaacatcttcgagggtacatggttggtcgctcagctattccccatagtagacctggcagatgaggctagaaaccccccactggtaacagtgttctagcctgcgtggctgcctgcgcactcttatgagtgcgaagccatatattcgacaaggtgtgaagagccccgtgtgctcactttgagtcctccggcccctgaatgtggctaaccctaaccctgcagctagtgcatgaaatccatcatgttgctagtcgtaatgagcaattgcgggatgggaccaactactttgggtgtccgtgtttcactttttccttttatatttgcttatggtgacaatatatatataacatatatattggcatc

SEQ ID NO: 21019 - DNA, 595 bp, synthetic construct
  source 1..595: mol_type = other DNA
accacccaatgggtgttgtactctgttattccggtaactttgtacgccagtttttccctcccctccccatccttttacgtaacttagaagttttaaatacaagaccaatagtaggcaactctccaggttgtctaaggtcaagcacttctgtttccccggttgatgttgatatgctccaacagggcaaaaacaacagataccgttatccgcaaagtgcctacacagagcttagtaggattctgaaagatctttggttggtcgttcagctgcatacccagcagtagaccttgcagatgaggctggacattccccactggtaacagtggtccagcctgcgtggctgcctgcgcacctctcatgaggtgtgaagccaaagatcggacagggtgtgaagagccgcgtgtgctcactttgagtcctccggcccctgaatgcggctaaccttaaacctgcagccatggctcataagccaatgagtttatggtcgtaacgagtaattgcgggatgggaccgactactttgggtgtccgtgtttcactttttcctttattaattgcttatggtgacaatatatatattgatatatattggcatc

SEQ ID NO: 21020 - DNA, 613 bp, synthetic construct
  source 1..613: mol_type = other DNA
caccggcgagcatactgtgcgttgtacactggaattacggttcctttgtatgcctgttttatgatcccttcccctcttttctatcgtctccaattttccacgtaacttagaagcaaagtacatgagcccaataggagcggctaacccatagccgtatagggcaagcacttctgttaccccggatgtgtgaatagacttctcacgaggttgaagctgaagcattcgttacccgcacttgtactgcgcggaaattagtagcacttttgccagcttcatggcgtttcgctcagcgtttcccccacgcagatcagggcaatggggctacacaacccccaccggcgacggtggtgtagcccgcgtggtgccccgcccgagctatcagctcgggacgccatgatgaagacagggtgtgaaggttcgagtgcgctacaagtgagtcctccggcccctgaatgcggctaaccttaaccccgtagctgtggtatgcatgccagcataaacacagtcgtaatgggcaactacgggatgggaccgactactttgggtgtccgtgtttcactttttccttaaatttgtcttatggttacaggtttatgcaaatagatctgtaatc

SEQ ID NO: 21021 - DNA, 601 bp, synthetic construct; identical to SEQ ID NO: 652
  source 1..601: mol_type = other DNA

SEQ ID NO: 21022 - DNA, 614 bp, synthetic construct
  source 1..614: mol_type = other DNA
gttaaaattgggtctgggttgctcccacccagatcacccacgtggtgttgtgctctgttattccggtaactttgcacgccaattttataaccccttcccccatgtaacttagaagttttgcacacagaccaatagcaagcagcataccagctgtataaggtcaagcacttctgtctccccggtcgacgttgatatgcttcaacaaggcaaaaacaacagagatcgttatccgcaagatgcctacacaaagcctagtacctcctttgacggtgtttgtctggtcgctcaggtgcttccccagcactagacctggcagatgaggctagaaactccccactggcgacagtgttctagcctgcgtggctgcctgcacacccttctgggtgtgaagccaaatactagacaaggtgtgaagagccccgtgtgctcatcttgagtcctccggcccctgaatgcggctaaccttaaacccgcagccattgctcacaatccagtgggtagatggtcgtaatgagcaattgtgggatgggaccgactactttgggtgtccgtgtttcatgttttactttatgatttgcttatggtgacaatatatagtgatatatattggcatc

SEQ ID NO: 21023 - DNA, 554 bp, synthetic construct
  source 1..554: mol_type = other DNA
ttgtacgcctgtttctcccttccctcccatcctaaattatcccagtaacttagaagacttgaactaccgtacaataggtgctgtcacatccagtgatggctagtacaagcacttctgtttccccggagcggagtatagatggccaccgctgtcaaaagctcttaaccgttatccgccaattaactacgcaacggctagtaacatcttgttattcttagggcgttcgatcaggtgagtacacccctcactagtctggtcgatgaggctgagaattccccacgggcgaccgtgtctcagcctgcgtggcggccagcccagcttatgctgggacgccttaattgtgacatggtgtgaagacccacgtgtgcttaattgtgagtcctccggcccctgaatgcggctaacctaaaccctggagccttgagacacaatccagtgttggcaaggtcgtaatgagcaattccgggacgggaccgactactttgggtgtccgtgtttcctgttatttccaaattgttcttatggtcacaatataagttatatatattgtgatc

SEQ ID NO: 21024 - DNA, 617 bp, synthetic construct
  source 1..617: mol_type = other DNA
taaaactgggagtgggttgttcccacccactccacccatgtggtgttgtactctgttattacggtaaccttgtacgccagttttccccacccttccccacaatgtaacttagaagtttgtacaacatgaccaataggtgacaattatccagattgtcaaaggtcaagcacttctgtttccccggtcaatgaggatatgctttacccaaggcaaaaaccttaaagatcgttatccccacactgcctacacagagcctagtaccacttttgatgtagttaggttggtcgctccctgcaaacccagcagtagacctggcagatgaggctggacattccccactggcgacagtggtccagcctgcgtggctgcctgctcaccctttatgggtgagaagcctaattattgacaaggtgtgaagagccgcgtgtgctcagtgtgcttcctccggcccctgaatgtggctaaccttaaccctgcagccgttgcccataatccaatgggtttgcggtcgtaatgcgcaagtgcgggacgggaccaactactttgggtgtccgtgtttcctgtttttcttttgattgcattttatggtgacaatttatagaatatagattgtcatc

SEQ ID NO: 21025 - DNA, 599 bp, synthetic construct
  source 1..599: mol_type = other DNA
ccacaccgtctacggacgtagtactcttgtatctcggtacatttgtacgccagttttccctccctcccccctttcacgtaacttatagaagcttgaacatacaggcgaataggaagccaacaaaccatgttggtaaacgccaagcacttctgtttccccggtattagagtgttaggcttctcacgaggctgaagcttgatatatcgttacccgcacagttactaagcagagcctagtaacactttgatctctatactggctggtcgctccgtcagaaaccccctgatagacctggcagatggggctggaaattccccactggtgacagtgttccagcccgcgtggctgcctgtccccctttcttgggggaaagccaatatatagacaaggtgccaagagccgcgtttgctaattgtgagtcctccggcccctgaatgcggctaatccaaccccacagctatcgcatggattccaccatgtaggtagtcgtaatgggcaactgtgggacggaaccgactactttgggtgtccgtgtttccttttataccttattttatctcatggtgacaacatatattgataagtatatgttgactacc

SEQ ID NO: 21026 - DNA, 635 bp, synthetic construct
  source 1..635: mol_type = other DNA
cgcctgttttatatccccttacccagtaactttagaagtaattcacacagttcaatagagagggggtacaaaccagtaccaccacgaacaagcacttctgtttccccggtgaagctacatagactgtccccacggttgaaagtggcagatccgttatccgcttaagtacttcgagaagcctagtatcaccttggaatcttcgacgcgttgcgctcagcactctaccccgagtgtagcttaggctgatgagtctgggcataccccaccggcgacggtggcccaggctgcgttggcggcctacccatggctaacgccatgggacgctagttgtgaacaaggtgtgaagagcctattgagctacttaagagtcctccggcccctgaatgcggctaatcctaaccacggagcaagtgcccacaaaccagtgggtggcttgtcgtaacgcgtaagtctgtggcggaaccgactactttgggtgtccgtgtttccttttatttttatcatggctgcttatggtgacaatctaagattgttatcatatagctattggattggccatccggtgattcacagagacttgaaagctaactcaccttcctataacactcatttgtttatcaatcttatagcacaca

SEQ ID NO: 21027 - DNA, 599 bp, synthetic construct
  source 1..599: mol_type = other DNA
ccacaccgtctacggacgtagtactcttgtatctcggtacatttgtacgccagttttccctccctcccccctttcacgtaacttatagaagcttgaacatacaggcgaataggaagccaacaaaccatgttggtaaacgccaagcacttctgtttccccggtattagagtgttaggcttctcacgaggctgaagcttgatatatcgttacccgcacagttactaagcagagcctagtaacactttgatctctatactggctggtcgctccgtcagaaaccccctgatagacctggcagatggggctggaaattccccactggtgacagtgttccagcccgcgtggctgcctgtcccccttccttgggggaaagccaatatatagacaaggtgccaagagccgcgtttgctaattgtgagtcctccggcccctgaatgcggctaatccaaccccacagctatcgcatggattccaccatgtaggtagtcgtaatgggcaactgtgggacggaaccgactactttgggtgtccgtgtttccttttataccttattttatctcatggtgacaacatatattgataagtatatgttgactacc

SEQ ID NO: 21028 - DNA, 593 bp, synthetic construct
  source 1..593: mol_type = other DNA
accacccaatgggtgttgtactctgttattccggtaactttgtacgccagtttttccctcccctccccatccttttacgtaacttagaagttttaaatacaagaccaatagtagcaactctccaggttgtctaaggtcaagcacttctgtttccccggttgatgttgatatgctccaacagggcaaaaacaacagataccgttatccgcaaagtgcctacacagagcttagtaggattctgaaagatctttggttggtcgttcagctgctacccagcagtagaccttgcagatgaggctggacattccccactggtaacagtggtccagcctgcgtggctgcctgcgcacctctcatgaggtgtgaagccaaagatcggacagggtgtgaagagccgcgtgtgctcactttgagtcctccggcccctgaatgcggctaaccttaaacctgcagccatggctcataagccaatgagtttatggtcgtaacgagtaattgcgggatgggaccgactactttgggtgtccgtgtttcactttttcctttattaattgcttatggtgacaatatatatattgatatatattggcatc

SEQ ID NO: 21029 - DNA, 602 bp, synthetic construct
  source 1..602: mol_type = other DNA
ctggatccaggttgtccccacctggatctcccacagggagtggtactctgttattacggtaactttgtatgccagttttatcctccccacccctatgtaacttagaagttttacataaagaccaataggtagtaatcatccagattacttaaggtcaagcacttctgtttccccggttgatgttgatatgctccaacagggcaaaaacaacagaaatcgttacccgcaaagtgcctacgcaaagcctagtagcactttagaagttgtctggctggtcgctccgccatttcccctggtagacctggcagatgaggctagaaataccccactggcgacagtgttctagcctgcgtggctgcctgcacaccctatgggtgtgaagccatacaatggacaaggtgtgaagagccccgtgtgctcactttgagtcctccggcccctgaatgtggctaaccttaaccctgcagctagggcacacaatccagtgtgtatctagtcgtaatgagcaattgcgggacgggaccaactactttgggtgtccgtgtttctcttttatccttatgtttgcttatggtgacaatatatgaatatatattgacacc

SEQ ID NO: 21030 - DNA, 593 bp, synthetic construct
  source 1..593: mol_type = other DNA
ctcccacccagatcacccaagcggtgtagtactctgtcattccggtgactttgtacgccagttttgcacccctccccttttgtaacttagaagaaataagttcagaccaataggaaggcgacaagccagtcgtctaaggtcaagtacttctgtttccccggtcaatgctgatatgcttcaccaaggcaaaaacagcagcgatcgttatccgcaagacgcctacacaaagcctagtaacgcctttgaagatatttgtctggtcactcaggtacaaccccagtactagacctggcagatgaggctggaaaatccccactggcgacagtgttccagcctgcgtggctgcctgcacacccatatgggtgtgaagccaaatattggacaaggtgtgaagagccccgtgtgctcgttttgagtcctccggcccctgaatgcggctaaccttaaccccacagccattgcttgcattccagcaagtctatggtcgtaatgagtaattgtgggatgggaccgactactttgggtgtccgtgtttcacttttttccttttattatgcctatggtgacaatatatagtgttatatattggcatc

SEQ ID NO: 21031 - DNA, 543 bp, synthetic construct
  source 1..543: mol_type = other DNA
ttcttatgagcaagcacttctgtctccccggtgcggttgtataaactgttcccacggttgaaaacaacctatccgttatccgctatagtacttcgagaaacctagtatcacctttggattgttgatgcgttgcgctcagcacactaacccgtgtgtagcttgggtcgatgagtctggacataccccactggcgacagtggtccaggctgcgttggcggcctactcatggtgaaaaccatgagacgctagacatgaacaaggtgtgaagagtctattgagctactatagagtcctccggcccctgaatgcggctaatcttaaccatggagcaagtgctcacaagccagtgagttgcttgtcgtaatgcgcaagtccgtggcggaaccgactactttgggtgtccgtgtttcactttttacttttatgactgcttatggtgacaatttgatattgttaccatttagcttgtcaaatcaattacaaaagacctaaatcttgtttatcaacttgcattttgataacttcaattagaaaaatttaata

SEQ ID NO: 21032 - DNA, 569 bp, synthetic construct
  source 1..569: mol_type = other DNA
ggagtggtacactattatcccggtaattttgtacgccagttttataacccctcccccttgcaacttagaagatgtaaacacagaccaataggtggtaactaaccaagttactaaaggtcaagcacttctgtttccccggctgacattgatatgctccaccagggcaaaaacaatagaagtcgttatccgcaaagtgcctacgcaaagcctagtagcactttagattgtatatggttggtcgctcagctattccccctagtagacctggcagatgaggctagaaataccccactggtaacagtgttctagcctgcgtggctgcctgcgcatccttctgggtgcgaagccatatacatgacaaggtgtgaagagccccgtgtgctcactttgagtcctccggctcctgaatgtggctaaccttaaacctgcagccagtgcacataaaccaatgtgtggctggtcgtaatgagtaattgcgggatgggaccaactactttggatgtccgtgtttcttgtttttccttaattttgcttatggtgacaatatatagataatatatattggcatc

SEQ ID NO: 21033 - DNA, 610 bp, synthetic construct
  source 1..610: mol_type = other DNA
taaaactgaatcatggttgttcccaccatgattacccacgcggtgcagtggtcttgtattacggtacatttccataccagttttatacaccccaccccgaaacacatagaagcttgtacacaatgaccaataggtggtgaccatccaggttactaacggtcgagcacttctgtttccccggtacccttgtatacgcttcacccgaggcgaaaaacgaggttatcgttatccgcaaagtgcctacgagaagcctagtagcacttttgaaacctatggctggtcgctcagctgctcacccagcagtagacctggcagatgaggctagacattccccaccagcgatggtggtctagcctgcgtggctgcctgcacaccctgtcgggtgtgaagccagaaagtggacaaggtgtgaagagcctattgtgctcactttgagtcctccggcccctgaatgtggctaatcctaaccccgtagctgttgcatgcaacccagcatgtatgcagtcgtaatgggcaactatgggatggaaccaactactttgggtgtccgtgtttcttgttttacttttcattgcttatggtgacaattgtagttgatacacttgttacc

SEQ ID NO: 21034 - DNA, 527 bp, synthetic construct
  source 1..527: mol_type = other DNA
cactgtttccccggtgtggttgtataaactgttcccacggttgaaaacaacctatccgttatccgctatagtacttcgagaaacctagtatcacctttggattgttgacgcgttgcgctcagcacactaacccgtgtgtagcttgggttgatgagtctggacataccccactggcgacagtggtccaggctgcgttggcggcctactcatggtgaaaaccatgagacgctagacatgaacaaggtgtgaagagtctattgagctactatagagtcctccggcccctgaatgcggctaatcctaaccatggagcaagtgctcacagaccagtgagttgcttgtcgtactgagcaagtctgtggcggaaccgactactttgggtgtccgtgtttcactttttacttttatgactgcttatggtgacaatttgatattgttaccatttagcttgtcaaattaattgcaaaagatcctaaatcttacttaccaacttgcattttgataaccttgatttgaaaattttaata

SEQ ID NO: 21035 - DNA, 527 bp, synthetic construct
  source 1..527: mol_type = other DNA
cactgtttccccggtgtggttgtataaactgttcccacggttgaaaacaacctatccgttatccgctatagtacttcgagaaacctagtatcacctttggattgttgacgcgttgcgctcagcacactaacccgtgtgtagcttgggttgatgagtctggacataccccactcgcgacagtggttcaggctgcgttggcggcctactcatggtgaaaaccatgagacgctaaacatgaccaaggtgtgaagagtgtattgagctactatagagtcctccggcccctgaatgcggctaatcctaaccatggagcaagagctcacagaccagtgagtcgcttgtcgtactgcgcaagtctgtggcggaaccgactactttgggtgtccgtgtttcactttttacttttatgactgcttatggtgacaatttgatattgttaccatttagcttgtcaaattaattgcaaaagatcctaaatcttacttaccaacttgcattttgataaccttgatttgaacattttaata

SEQ ID NO: 21036 - DNA, 527 bp, synthetic construct
  source 1..527: mol_type = other DNA
cactgtttccccggtgtggttgtataaactgttcccacggttgaaaacaacctatccgttatccgctatagtacttcgagaaacctagtatcacctttggattgttgacgcgttgcgctcagcacactaacccgtgtgtagcttgggtcgatgagtctggacataccccactggcgacagtggtccaggctgcgttggcggcctactcatggtgaaaaccatgagacgctagacatgaacaaggtgtgaagagtctattgagctactatagagtcctccggcccctgaatgcggctaatcctaaccatggagcaagtgctcacaggccagtgagttgcttgtcgtaatgcgcaagtccgtggcggaaccgactactttgggtgtccgtgtttcactttttacttttatgactgcttatggtgacaatttgatattgttaccatttagcttgtcaaattaattgcaaaagatcctaaatcttacttaccaacttgcattttgataaccttaatttgaaaatgttaata

SEQ ID NO: 21037 - DNA, 455 bp, synthetic construct; identical to SEQ ID NO: 495
  source 1..455: mol_type = other DNA

SEQ ID NO: 21038 - DNA, 568 bp, synthetic construct
  source 1..568: mol_type = other DNA
gagtggtactctgttattacggtaactttgtacgccagttttatcctccccttaccccgtgtaacttagaagtttttcacaaagaccaatagttggtaatcatccagattacttaaggtcaagcacttctgtttccccggtcaatgttgatatgctccaacagggcaaaaacaactgcgatcgttatccgcaaagcgcctacgcaaagcctaatagcacctttgagattatttggttggtcgttccgccatttcccctggtagacctggcagatgaggctggaagtaccccactggcgacagtgttccagcctgcgtggctgcctgcacaccctatgggtgtgaagccaaataatggacaaggtgtgaagagccccgtgtgctcgctttgagtcctccggcccctgaatgcggctaaccttaaccctgcagctggagcacacaaaccagtgtgtatctagtcgtaatgagcaattgcgggatgggaccgactactttgggtgtccgtgtttcactttttacttataattgcttatggtgacaatatatatatagtatatattggcact

SEQ ID NO: 21039 - DNA, 600 bp, synthetic construct
  source 1..600: mol_type = other DNA
acccctaccacccatgtggtgtagtgctcttgtattacggtacacttgcacgccagtttgcctccccaccccctttccatttacacccaaccttatgtaacttagaagcagtacactggaccaataggtggtaacaatccatgttaccaaaggtcaagcacttctgtctccccggcatgcgtggaataaacagtgcaaacggttgagaccacaaatgtcgttacccgcgcatgaactacgcagagcctagtatctccctgaaagtccattggttggtcactcagctaaaccccatagtagacctggcagatgaggcaagacgcaccccactggcgacagtggtcttgcctgcgtggctgcctgcacacccttcggggtgtgaagccaattgatagacagggtgtgaagagccgagtgtgcttcatgtgaatcctccggcccctgaatgcggctaatctaaccccgcagctgtggcacacaagccagtgtgtatgcagtcgtaacgggcaactgcgggacggaaccgactactttgggtgtccgtgtttccttttattcttttatcaagtacttatggtgacaataataaatattgttacc

SEQ ID NO: 21040 - DNA, 609 bp, synthetic construct
  source 1..609: mol_type = other DNA
actgaatccaggttgttcccacctggatttcccacgtggagtagtacactgttattccggtaactttgtacgccagttttatatcccctccccttttgtaacttagaagataagcacaaggaccaataggtggtggctatcccagtcactaaaggtcaagcacttctgtttccccggtcaatgttgatatgctccaccagggcaaaaacaacagagatcgttatccgcaaagtgcctacgcaaagcctagtagcactttgaatggtatgtggttggtcgttccgctatttcccatagtagacctggcagatgaggctagaaattccccactggcgacagtgttctagcctgcgtggctgcctgcgtgtcctaacggacacgaagccatatacttgacaaggtgtgaagagccccgtgtgctcactttgagtcctccggcccctgaatgtggctaaccttaaccctgcagctaaggcacacaacccagtgtgaacttagtcgtaatgagcaattgcgggacgggaccaactactttgggtgtccgtgtttcactttttaccttttataatgcttatggtgacaatatataataatttgtatattggcacc

SEQ ID NO: 21041 - DNA, 625 bp, synthetic construct
  source 1..625: mol_type = other DNA
ccggttgttcccaccggcgagcatactgtgcgttgtacactggaattacggttcctttgtatgcctgttttataatcccttcccctcttttctatcgtctctaattttccacgtaacttagaagcaatgtacatgagcccaataggagcggctaatccatagccgtatagggcaagcacttctgttaccccggatgtgtgaatagacttcttacgaggttgaagctgaagcattcgttatccgcacttgtactgcgcggaaattagtagcacctttgtcagcttcatggtgtttcgctcagcgtttcccccacgtagatcagggcaatggggctacacaaccctcaccggcgacggtggtgtagcccgcgtggtgccccgcccgagctatcagctcgggacgccatgatgaagacagggtgtgaaggttcgagtgcgctacaagtgagtcctccggcccctgaatgcggctaaccttaaccccgtagctgtggtatgcatgccagcataaacacagtcgtaatgggcaactacgggatgggaccgactactttgggtgtccgtgtttcactttttcctttaaatttgtcttatggttacaggtttatgcaaatagatctgtaatc

SEQ ID NO: 21042 - DNA, 626 bp, synthetic construct
  source 1..626: mol_type = other DNA
gatagaaactgggtgtgggttgtccccactcacaccacccaatgggtgttgtactctgttattccggtaactttgtacgccagtttttccccccctccccatcctttatgtaacttagaagtttaaaacataagaccaatagcaggcaactctccaggttgtctaaggtcaagcacttctgtttccccggttgacgttgatatgctccaacagggcaaaaacaactgatatcgttatccgcaaagtgcctacacagagcttagtaggattctgaaagatctttggttggtcgctcagctgcatacccagcagtagaccttgcagatgaggctggacattccccactggtaacagtggtccagcctgcgtggctgcctgcacacctcttatgaggtgtgaagccaaggattggacagggtgtgaagagccgcgtgtgctcactttgagtcctccggcccctgaatgcggctaaccttaaacctgcagccatggctcataaaccaatgagtttgtggtcgtaatgagtaattgcgggatgggaccgactactttgggtgtccgtgtttcactttttcctttattaattgcttatggtgacaatatatacatagatatatattggcatc

SEQ ID NO: 21043 - DNA, 601 bp, synthetic construct
  source 1..601: mol_type = other DNA
gatctaggttgtccccacctagatctcccacagggagtggtactctgttattacggtaactttgtatgccagttttatctcccctaccccttatgcaacttagaagttttacacaaagaccaataggcagtaaccatccaggttacttaaggtcaagcacttctgtttccccggttgacgttgatatgctccaacagggcaaaaacaacagaaatcgttacccgcaaagtgcctacgcaaagcctagtaacactttagaagttgtctggttggtcgctccgccatttcccctggtagacctggcagatgaggctagaaataccccactggcgacagtgttctagcctgcgtggctgcctgcacaccctatgggtgtgaagccatacaatggacaaggtgtgaagagccccgtgtgctcactttgagtcctccggcccctgaatgtggctaaccttaaccctgcagctagggcacataatccagtgtgtatctagtcgtaatgagcaattgcgggacgggaccaactactttgggtgtccgtgtttctctttttatccttatatttgcttatggtgacaatatatgaatatatattgacacc

SEQ ID NO: 21044 - DNA, 545 bp, synthetic construct
  source 1..545: mol_type = other DNA
ataagctgctcacgcggctgaaggagaaaacgtccgttacccggccaattacttcaagaaacccagtaccaccatgaaggttgcgcagcgtttcgctccgcacaaccccagtgtagatcaggtcgatgagtcaccgcattcctcacgggcgaccgtggcggtggctgcgctggcggcctgcccatggggcaacccatgggacgcttcaatactgacatggtgcgaagagtcaattgagctaattggtagtcctccggcccctgaatgcggctaatcctaactgtggagcagatgcccacgtaccagtgggtagtctgtcgtaacgggcaactccgcagcggaaccgactactttgggtgtccgtgtttctctttattcttatgttggctgcttatggtgacaattgagagattgttaccatatagctattggattggccatccggtgacgaatagagcgattgtatatctttttgttggattcgtaccattaaacaaaacaaattacaaaaccttgtgttacattattagattaaacacagcaaa

SEQ ID NO: 21045 - DNA, 580 bp, synthetic construct
  source 1..580: mol_type = other DNA
gtctactgggcgcagtgctctcatattccggtatgcttgcacgccagttttattcccccttccccattgtaacttagaagcaaagcacacatgatcaataggagataacctgccaggttatttaagatcaagcacttctgtttccccggcaagtgtgaatatgctttacccaaggcaaaagctaatcttgtcgttatccgcaaggtgcctacgagaagcctagtaatgctcaagatgtaatttggctggtcgctccgctgtttcccacagtagacctggcagatgaggctagacattccccaccagcgatggtggtctagcctgcgtggctgcctgcacaccctatgggtgtgaagccaaatttactgacagggtgtgaagagcctattgtgctcaccttgattcctccggcccctgaatgtggctaatcctaaccccgctgctattgcacacgaaccagtgtgtggatagtcgtaatgagcaatagtgggatggaaccaactactttgggtgtccgtgtttcttgtttttctttaatttgtcttatggtcacaatatatatataacgtatattgtgatc

SEQ ID NO: 21046 - DNA, 526 bp, synthetic construct
  source 1..526: mol_type = other DNA
tttccaacccctgtaacgttagaagtttggaacttaacagtacaataggaggcaccatatccaatggtgtaatgtacgagcacttctgtttccccggagcgaggtataggtggtacccaccgctgaaagcctttaaccgttatccgccaatcaactacgtaacagctagtagcattttgttgttgactggacgttcgatcaggtggtttacccccccactagtttggtcgatgaggctggaaattccccacgggtgaccgtgttccagcctgcgtggcggccaacccagctcatgctgggacgccctttcaatgacatggtgtgaagactcgcatgtgcttgattgtgaatcctccggcccctgaatgcggctaaccctaaccccggagccttgcatcacaatccagtgatgttagggtcgtaatgagtaattctgggatgggaccgactactttgggtgtccgtgtttctcatttttctttgaattgtcttatggtcacagcatatagtaatatatactgtgatc

SEQ ID NO: 21047 - DNA, 610 bp, synthetic construct
  source 1..610: mol_type = other DNA
ttaaaactgggtacaggttgttcccacctgtatcacccacgtggtgtggtgctcttgtattccggtacatttgcacgccagtttgccaccccctacccatcgtaacttagaagccatcaactcgaccaataggcggtggtaaaccataccacttacggtcaagcactcctgtttccccggtatgcgaggaatagactcctacagggttgaagcctcaagtatcgtcatccgcattggtactacgcaaagcttagtagtgccttgaaagtcttttggttggtcactccgctagtttcccctagtagacctggcagatgaggcaggacattccccactggcgacagtggtcctgcctgcgtggctgcctgcgcacccctaggggtgcgaagccaagtgacggacaaggtgtgaagagccccgtgtgctactaatgagtcctccggcccctgaatgcggctaatccaaccccacagctattgcacacaagccagtgtgtatatagtcgtaacgagcaattgtgggacggaaccgactactttgggtgtccgtgtttccttttattcttatcattctgcttatggtgacaatactgtgaagtagtgttgttacc

SEQ ID NO: 21048 - DNA, 611 bp, synthetic construct
  source 1..611: mol_type = other DNA
ttgaaactgaatcatggttgttcccaccatgattacccacgcggtgcagtggtcttgtattacggtacatttccataccagttttatacaccctaccccgaaacatatagaagcttgtacacaatgaccaataggtggtggccatccaggttactgacggtcaagcacttctgtttccccggtacccttgtatacgcttcaccagaggcgaaaaacgaggttatcgttatccgcaaagtgcctacgagaagcctagtagcactttcgaaacctatggctggtcgctcagctgcttacccagcagtagacctggcagatgaggctagacattccccaccagcgatggtggtctagcctgcgtggctgcctgcacaccctatcgggtgtgaagccagaaagtggacaaggtgtgaagagcctattgtgctcactttgagtcctccggcccctgaatgtggctaatcctaaccccgtagctgttgcatgcaacccagcatgtatgcagtcgtaatgggcaactatgggatggaaccaactactttgggtgtccgtgtttcttgttttacttttcattgcttatggtgacaattgtagttgatacacttgttacc

SEQ ID NO: 21049 - DNA, 611 bp, synthetic construct
  source 1..611: mol_type = other DNA
ttgaaactgaatcatggttgttcccaccatgattacccacgtggtgcagtggtcttgtattacggtacatttccataccagttttatacaccctaccccgaaacatatagaagcttgtacacaatgaccaataggtggtgaccatccaggttaccgacggtcaagcacttctgtttccccggtacccttgtatacgcttcaccagaggcgaaaaacgaggttatcgttatccgcaaagtgcctacgagaagcctagtagcactttcgaaacctatggctggtcgctcagctgctcacccagcagtagacctggcagatgaggctagacatcccccaccagtgatggtggtctagcctgcgtggctgcctgcacaccctatcgggtgtgaagccagaaagtggacaaggtgtgaagagcctattgtgctcactttgagtcctccggcccctgaatgtggctaatcctaaccccgtagctgttgcatgcaacccagcatgtatgcagtcgtaatgggcaactatgggatggaaccaactactttgggtgtccgtgtttcttgttttacttttcattgcttatggtgacaattgtagttgatacacttgttacc

SEQ ID NO: 21050 - DNA, 609 bp, synthetic construct; identical to SEQ ID NO: 663
  source 1..609: mol_type = other DNA

SEQ ID NO: 21051 - DNA, 598 bp, synthetic construct; identical to SEQ ID NO: 649
  source 1..598: mol_type = other DNA

SEQ ID NO: 21052 - DNA, 578 bp, synthetic construct
  source 1..578: mol_type = other DNA
aagtggtgtagtgctcttgtatttcggtacatttgcacgccagtttgccacccctaccccttatgtaacttagaagcttacacaaagaccaataggcggtggtaaacccataccactaacggtcaaatacttctgtttccccggcacgtgaggaataggctccaaaagggctgaagccactagtgtcgttatccgcattggtactacgcaaagcctagtatcagcctgaaaattccttggttggtcgctcggccagttatcccactggtagacctggtagatgaggcaggacttaccccactggcgacagtggtcctgcctgcgtggctgcctgcacacccctatggggtgtgaagcctaggaacggacagggtgtgaagagccccgtgtgctaccaatgagtcctccggcccctgaatgcggctaatcttaccccgcagctgttgcacacaatccagtgtgtatgcagtcgtaacgagcaattgtgggatggaaccgactactttgggtgtccgtgtttccttgtttttcttttatttgcttatggtgacaatattgatattatcagtgttgtcatc

SEQ ID NO: 21053 - DNA, 594 bp, synthetic construct
  source 1..594: mol_type = other DNA
ccacgtgggagatccaggtggagttgtactctattattccggtaattttgtacgccagttttatctccccttcccttttgtaacttagaagatgaacttaccgaccaataggtggcatttatccaaaatgtcaaaggtcaagtacttctgtttccccggttaaggatgatatgctccaacagggcaaaaacatctgcgatcgttatccgcaaaacaactacgcaaagcctagtaccacttttgagagtatgtggttggtcgctccactataaacccaatagtagacctggcagatgaggctagaagttccccactggtaacagtgttctagcctgcgtggctgcctgcgtgcctccagtaggcacgaagccatatatttgacaaggtgtgaagagccccgtgtgcttgttttgagtcctccggcccctgaatgtggctaaccttaaccctgcagctagtgtgcgcaatccagtgcatggctagtcgtaatgagcaattgcgggatgggaccaactactttgggtgtccgtgtttcttgtttttccttttatttgcttatggtgacaatatatataatacatatatattggcatc

SEQ ID NO: 21054 - DNA, 609 bp, synthetic construct
  source 1..609: mol_type = other DNA
ggcgagcacactgtgcgttgtacactggaattacggttcctttgtatgcctgttttataaccccttcccctcttttctatcatctctaatttccatgtaacttagaagcaacgtacatgagcccaataggagcggctaacccacagccgtacagggcaagcacttctgttaccccggatgtgtgaatagacttctcacgaggttgaagctgaagcattcgttatccgcacttgtactgcacggaaattagtagcacccttgccagcttcatggtgtttcgctcagcgtttcccccacgtagatcagggcaatggggctacacaacccccaccggcgacggtggtgtagcccgcgtggtgccccgcccgggctatcagcccgggacgccatgatgaagacagggtgtgaaggttcgagtgcgctacaagtgagtcctccggcccctgaatgcggctaaccctaaccccgtagctgtggtgtgcacgccagcacaagcacagtcgtaatgggtaactacgggatgggaccgactactttgggtgtccgtgtttcactttttcctttaaatttgtcctatggttacaggtttatgcaaatagatctgtaatc

SEQ ID NO: 21055 - DNA, 608 bp, synthetic construct; identical to SEQ ID NO: 661
  source 1..608: mol_type = other DNA

SEQ ID NO: 21056 - DNA, 591 bp, synthetic construct; identical to SEQ ID NO: 642
  source 1..591: mol_type = other DNA

SEQ ID NO: 21057 - DNA, 563 bp, synthetic construct
  source 1..563: mol_type = other DNA
cagtttaggtaactttgtgtttgacgccagttttatcatccctttcccttttgtaacttagaagttataaacttgagaccaataggtggtgatcaaccagatcactaaaggtcaagcacttctgtttccccggtcaatgctgatatgctccaccagggcaaaaacagccgcgatcgttatccgcaaagtgcctacgcaaagcctagtaatatcttgaatgatatatggttggtcgttcagctaaaccccatagtagacctggcagatgaggctggaaattcctcactggcgacagtgttccagcctgcgtggctgcctgcgcactctcacgagtgcgaagccatatatttgacaaggtgtgaagagccccgtgtgctcactttgagtcctccggcccctgaatgtggctaaccttaaccctgcagctagtgcatacaatccagtgtgtggctagtcgtaatgagcaattgcgggatgggaccaactactttgggtgtccgtgtttcactttttccttttataatttgcttatggtgacagtatatagcttatatattgttacc

SEQ ID NO: 21058 - DNA, 484 bp, synthetic construct
  source 1..484: mol_type = other DNA
gtacaataggttgcactacatccagtggtgtttcgtacaagcacttctgtttccccggagcggggtatagacggtacccactgtcaaaagcccttaaccgttatccgccaatcaactacgtaatggctagtaacatcatgaaggtgagttgacgttcgatcaggtggtaacccccactagtttggtcgatgaggctaggaatcccccacgggtaaccgtgtcctagcctgcgtggcggccaacccagcgtttgctgggacgccaattcactgacatggtgcgaatacttgcatgtgcttgattgtgattcctccggcccctgaatgcggctaaccttaaccccggagccttgcagcataaaccaatgttgtggaggtcgtaatgagcaattctgggatgggaccgactactttgggtgtccgtgtttcctgtttttctcaaattgtcttatggtcacagcatatatattgtatatactgtgatc

SEQ ID NO: 21059 - DNA, 594 bp, synthetic construct
  source 1..594: mol_type = other DNA
tgttcccacctggatctcccatagggagtggtactctgctattacggtagccttgtatgccagttttatctcccctcccccatgtaacttagaagttttacacaaggaccaatagtcggtaatcagccagattactaaaggtcaagcacttctgtttccccggtcaatgctgatatgctccaacagggcaaaaacagcagcgatcgttatccgcaaagcgcctacgcaaagcttagtagcatctccgaaattgtctggttggtcgttccgccattttccccttggtagacctggcagatgaggctagaaataccccactggcgacagtgttctagcctgcgtggctgcctgcacaccctatgggtgtgaagccaaacaatggacaaggtgtgaagagccccgtgtgctcgctttgactcctccggcccctgaatgtggctaaccttaaccctgcagctagagcacgcaaaccagcgtgtttctagtcgtaatgagcaattgcgggatgggaccaactactttgggtgtccgtgtttcactttttctttttatattgcttatggtgacaatatatatatcatatatattgacacc

SEQ ID NO: 21060 - DNA, 421 bp, synthetic construct; identical to SEQ ID NO: 462
  source 1..421: mol_type = other DNA

SEQ ID NO: 21061 - DNA, 599 bp, synthetic construct
  source 1..599: mol_type = other DNA
tcccaccaccaggcacacagtgcgtggtacactggaatttcggttcctttgtacgcctgttttcccaccctcatgtttgtttgtctttacgcgtaacttagaagcattgcacacagctcaataggaatagtccatccaggactgttacgagcaagtacttctgtctccccggacgtgtgaatagacctcaccaaggttgaagctgtagcgttcgttatccgctcatctactgcgcaaagactagtaactaactggaaccttaatggtgtttcgctcagcagtaccccactgtagatcagggcaatgaggctacgcatcccccactggtgacagtggcgtagcctgcgtggtgccctgcccaggtttcggcctgggacaccattttgatgacagggtgtgaagaccggcgtgcgctaggtgtgaatcctccggcccctgaatgcggctaatcctaaccctgcagccattgcatgtgatccaacatgtggatggtcgtaatgagtaattgcgggatggaaccgactactttgggtgtccgtgtttcttgtttttccaattattgtctcatggttacaaatttgtgtatcaagtttgtaact

SEQ ID NO: 21062 - DNA, 398 bp, synthetic construct
  source 1..398: mol_type = other DNA
ggcgaccgtggtggtggctgcgctggcggcctgcccatggggcaacccatgggacgcttcaatacagacatggtgtgaagagtctattgagctagttggtagtcctccggcccctgaatgcggctaatcctaactgcggagcagatccccacacaccagtgggcagtctgtcgtaatgggtaactctgcagcggaaccgactactttgggtgtccgtgtttccttttattcttatactggctgcttatggtgacaattgaaagattgttaccatatagctattggattggccatccagtgtctaacagagcaataatttatctttttgttggattcgtcccacttgactacagagcacttgcaacgctcaattacattatagatctcaacacaataaa

SEQ ID NO: 21063 - DNA, 570 bp, synthetic construct
  source 1..570: mol_type = other DNA
ggagtggtacactattatcccggtaattttgtacgccagttttataacccctcccccttgtaacttagaagatgtaaacacagaccaataggtggtaactaaccaagttactaaaggtcaagcacttctgtttccccggctgatattgatatgctccaccagggcaaaaacaatagaagtcgttatccgcaaagtgcctacgcaaagcctagtagcactttagattgtgtatggttggtcgctcagctattccccctagtagacctggcagatgaggctagaaataccccactggtaacagtgttctagcctgcgtggctgcctgcgcaccctttcgggtgcgaagccatatacatgacaaggtgtgaagagccccgtgtgctcactttgagtcctccggctcctgaatgtggctaaccttaaacctgcagccagtgcacataagccaatgtgtagctggtcgtaatgagtaattgcgggatgggaccaactactttggatgtccgtgtttcttgtttttcctttaattttgcttatggtgacaatatatagataatatatattggcatc

SEQ ID NO: 21064 - DNA, 575 bp, synthetic construct
  source 1..575: mol_type = other DNA
ggtgtagtatacttgtattccggtacatttatacgccagttttatgatcccccaccccaaatgtaacttagaagcatgtacacaatgatcaatagggtggtggctaaccaagtcacctaagatcaagcacttctgtttccccggtgagtgtggatatgctttacccaaggcagaaactaatctcatcgttatccgcaaggtgcctacgggaagcctagtaatattctgaaggtattctggttggtcactcagttgcattcacccgtgcaatagacctggcagatggggctaggcataccccactggtaacagtggcctagcccgcgtggctgcctgcacaccttcgggtgtgaagccataatattgacagggtgtgaagagcctactgtgctcaccttgagtcctccggcccctgaatgtggctaatcctaaccccgtatccattgcacacaagccagtgtgtttatggtcgtaatgggtaactacgggatggaaccaactactttgggtgtccgtgtttcttgtttttctttaatattgcttatggtgacattatatattgatatagtgtcatc

SEQ ID NO: 21065 - DNA, 603 bp, synthetic construct; identical to SEQ ID NO: 655
  source 1..603: mol_type = other DNA

SEQ ID NO: 21066 - DNA, 608 bp, synthetic construct; identical to SEQ ID NO: 662
  source 1..608: mol_type = other DNA

SEQ ID NO: 21067 - DNA, 597 bp, synthetic construct; identical to SEQ ID NO: 647
  source 1..597: mol_type = other DNA

SEQ ID NO: 21068 - DNA, 524 bp, synthetic construct
  source 1..524: mol_type = other DNA
aacctaacatatccaagtaacttagaagatttgaacactgcacaatagggactattgcaaccagcaatagtcagtgcaagcacttctgtctccccggagcggagtatagacggccaccgctgtcaaaagctcttaaccgttatccgccagttaactacgcaacagctagtaacatcttgttgttcttagggtgttcgatcaggtgagtttaccccctcactagtctggtcgatgaggctgagaaacccccacgggcgaccgtgtctcagcctgcgtggcggccagcccagcatatgctgggacgccttaagtatgacatggtgtgaagactcgcgtgtgcttagctgtgagtcctccggcccctgaatgcggctaacctaaaccccggagccttgaggcacaacccagtgcccgcaaggtcgtaatgagtaattctgggacgggaccgactactttgggtgtccgtgtttccttttatctttttgatgttcttatggttacaatatatagagtatattgtaatc

SEQ ID NO: 21069 - DNA, 578 bp, synthetic construct
  source 1..578: mol_type = other DNA
aagtggtgtagtgctcttgtatttcggtacatttgcacgccagtttgccacccttaccctttatgtaacttagaagcttacacaaagaccaataggcggtggtaaacccataccactaacggtcaaacacttctgtttccccggcacgtgaggaataggctccaaaagggctgaagccactagtgtcgttatccgcattggtactacgcaaagcctagtatcagcctgaaaattccttggttggtcgctcggccagttatcccactggtagacctggcagatgaggcaggacttaccccactggcgacagtggtcctgcctgcgtggctgcctgcacacccctatggggtgtgaagcctaggaacggacagggtgtgaagagccccgtgtgctaccaatgagtcctccggcccctgaatgcggctaatcttaccccgcagctgttgcacacaatccagtgtgtatgcagtcgtaatgagcaattgtgggatggaaccgactactttgggtgtccgtgtttccttgtttttcttttatttgcttatggtgacaatattgatattatcagtgttgtcatc

SEQ ID NO: 21070 - DNA, 523 bp, synthetic construct; identical to SEQ ID NO: 549
  source 1..523: mol_type = other DNA

SEQ ID NO: 21071 - DNA, 588 bp, synthetic construct
  source 1..588: mol_type = other DNA
ccacctggatctcccatagggagtggtactctgctattacggtagccttgtatgccagttttatctcccctccccatgtaacttagaagttttacacaaggaccaatagtcggtaatcagccagattactaaaggtcaagcacttctgtttccccggtcaatgctgatatgctccaacagggcaaaaacagtagcgatcgttatccgcaaagcgcctacgcaaagcttagtagcatctccgaaattgtctggttggtcgttccgccattttccccatggtagacctggcagatgaggctagaaataccccactggcgacagtgttctagcctgcgtggctgcctgcacaccctatgggtgtgaagccaaacaatggacaaggtgtgaagagccccgtgtgctcgctttgattcctccggcccctgaatgtggctaaccttaaccctgcagctagaacacgcaaaccagcgtgtttctagtcgtaatgagtaattgcgggatgggaccaactactttgggtgtccgtgtttcacttttttcttttatattgcttatggtgacaatatatacagcatatatattgacacc

SEQ ID NO: 21072 - DNA, 609 bp, synthetic construct
  source 1..609: mol_type = other DNA
gttgttcccacccctaccacccatgtggtgtagtgctcttgtattacggtacacttgcacgccagtttgcctccccaccccctttccatttacacccaaccttatgtaacttagaagcagtacactggaccaataggtggtaacaatccatgttaccaaaggtcaagcacttctgtctccccggcatgcgtggaataaacagtgcaaacggttgagaccacaaatgtcgttacccgcgcatgaactacgcagagcctagtatctccctgaaagtccattggttggtcgttcagctaaaccccatagtagacctggcagatgaggcaagacgcaccccactggcgacagtggtcttgcctgcgtggctgcctgcacacccttcggggtgtgaagccaattgacagacagggtgtgaagagccgagtgtgcttcatgtgaatcctccggcccctgaatgcggctaatctaaccccgcagctgtggcacacaagccagtgtgtatgcagtcgtaacgggcaactgcgggacggaaccgactactttgggtgtccgtgtttccttttattcttttatcaagtacttatggtgacaataataaatattgttacc

SEQ ID NO: 21073 - DNA, 389 bp, synthetic construct
  source 1..389: mol_type = other DNA
tggcggtggctgcgttggcggcctgcccatggggcaacccatgggacgctacaatactgacatggtgtgaagagtctattgagctaactggtagtcctccggcccctgaatgcggctaatcccaactgcggagcacgtgcttccaatccaggaggtagcgtgtcgtaacgggcaactctgcagcggaaccgactactttgggtgtccgtgtttcctttatctctttattggctgcttatggtgacaattgaaagattgttgccatatagctattggattggccatccggtatctaacagagcaatcatatacctgtttgttggatttgttccacttaacaaaacagagttctgtactttgtgttatattattaggttgaacacatcaaa

SEQ ID NO: 21074 - DNA, 544 bp, synthetic construct
  source 1..544: mol_type = other DNA
tgacgccagttttgccaccctcccctaacatgtaacttagaagtttgaacgataagaccaataggtgataatcatccagattatcaaaggtcaagcacttctgtttccccggtcgatgaggatatgctttacccgaggcaaaaaccttagagatcgttatccacacactgcctacacagagcctagtaccacttttgacgtaactaggttggtcgctccctgcaaacccagcagtagacctggcagatgaggctggacgttccccactggcgacagtggtccagcctgcgtggctgcctgctcaccctatagggtgagaagcctacttattgacaaggtgcgaagagccgcgtgtgctcagtgtgcttcctccggcccctgaatgtggctaaccttaaccctgcagccgctgcccataatccaatgggtttacggtcgtaacgcgtaagtgcgggatgggaccaactactttgggtgtccgtgtttcttatttttcctttatttgcattttatggtgacaattcatggtatatagattgtcatc

SEQ ID NO: 21075 - DNA, 427 bp, synthetic construct
  source 1..427: mol_type = other DNA
cagcgccttacccccggcgtagctcaggctgatgaggctccgaacaccccacaggcgactgtgtcggagcctgcgttggcggcctgcccataccttgcggtatgggacgctcacttcatgacatggtgcgaagagtctactgtgctagtcaagattcctccggcccctgaatgtggataatcctaaccactgatcctacgttcgcaatccagcgttcagtaggtcgtaacgcgcaagtcggtggcggaaccaactactttgggtgtccgtgtttcctttatttcctactgaatgcttatggtgacaattgttttgatcagttgttgccattactcgcgttcagtgtgtaattacaaaaacaagatcatcagttattaccatccctcacgttcagtgcacaattacaaaaacgagattttctgtcata

SEQ ID NO: 21076 - DNA, 579 bp, synthetic construct
  source 1..579: mol_type = other DNA
gtagtactcttgtactccggtacacttgtacgccagttttcccttcctacccccccttaggtaactcttagaagcatttgcactcagacgaataggcaaccaacactccatgttggtcaacgtcaagcacttctgtttccccggtattagggtgttaggctttccaagaggctgaagcctgaagtatcgttacccgcacaattactaagcagagcctagtatcactttggccctttcactggctggtcgttcaatgagaaaacccactcatagacctggcagatggggctggaaataccccactggtaacagtgttccagcccgcgtggctgcctgtccccctttttgggggaaagccaatgtaaggacaaggtgtgaagagccgcgtttgctaattgtgagtcctccggcccctgaatgcggctaatcttaccccacagctattgcatggaagccaccatgtggatagtcgtaacgggcaactgtgggacggaaccgactactttgggtgtccgtgtttccttttattccatttattatctcatggtgacaacgtatacagattatatgttgttcacc

SEQ ID NO: 21077 - DNA, 495 bp, synthetic construct
  source 1..495: mol_type = other DNA
tcccacggttgaaaacaacctatccgttatccgctatagtacttcgagaaacctagtatcacctttggattgttgacgcgttgcgctcagcacactaacccgtgtgtagcttgggtcgatgagtctggacataccccactggcgacagtggtccaggctgcgttggcggcctactcatggtgaaaaccatgagacgctagacatgaacaaggtgtgaagagtctattgagctactatagagtcctccggcccctgaatgcggctaatcctaaccatggagcaagtgctcacaggccagtgagttgcttgtcgtaatgcgcaagtccgtggcggaaccgactactttgggtgtccgtgtttcactttttacttttatgactgcttatggtgacaatttgatattgttaccatttagcttgtcaaattaattgcaaaagatcctaaatcttacttaccaacttgcattttgataaccttgatttgaaaattttaata

SEQ ID NO: 21078 - DNA, 587 bp, synthetic construct
  source 1..587: mol_type = other DNA
ccacctgtaccacccacgtggtgtggtgctcttgtattccggtacatttgcacgccagtttgccacccctcatcctttgtaacctagaagctatcaactcgaccaataggcggtggtaagccataccacttacggtcaagcacttctgtttccccggtatgcgaggaatagactctcacagggttgaagcctcaaatatcgttatccgcattggtactacgcaaagcctagtagcgcctcggaaatcccttggttggtcgttccgctagtttcccctagtagacctggcagatgaggcaggacattccccactggtgacagtggtcctgcctgcgtggctgcctgcgcaccctccggggtgcgaagccaagtgatggacaaggtgtgaagagccccgtgtgctactaatgagtcctccggcccctgaatgcggctaatccaaccccacagctattgcacacaaaccagtgtgtatatagtcgtaacgagcaattgtgggacggaaccgactactttgggtgtccgtgtttccttttattctcattatcttgcttatggtgacaatactgtaatatagtgttgttacc

SEQ ID NO: 21079 - DNA, 558 bp, synthetic construct
  source 1..558: mol_type = other DNA
gtttaggtaactttgtgtttgacgccagttttatcctccccttaccccgtgtaacttagaagtttttcataaagaccaatagttggtaatcatccagattacttaaggtcaagcacttctgtttccccggtcaatgttgatatgctccaacagggcaaaaacaactgcgatcgttatccgcaaagcgcctacgcaaagcctagtagcacctttgagattatttggttggtcgttccgccatttcccctggtagacctggcagatgaggctggaagtaccccactggcgacagtgttccagcctgcgtggctgcctgcacaccctatgggtgtgaagccaaataatggacaaggtgtgaagagccccgtgtgctcgctttgagtcctccggcccctgaatgcggctaaccttaaccctgcagctggagcacacaaaccagtgtgtatctagtcgtaatgagcaattgcgggatgggaccgactactttgggtgtccgtgtttcactttttacttataattgcttatggtgacaatatatatatagtatatattggcact

SEQ ID NO: 21080 - DNA, 585 bp, synthetic construct
  source 1..585: mol_type = other DNA
cgactatctacggatgtagtgctcctgtattccggtacacttgcacgccagttttgttaccctccccatattgtaacttagaagattaacacaaagaccaataggcggcaatgaaccacattgtcaacggtcaagcacttctgtctccccggtcaatctggatatgctttaccaaaggcaaaaactggagcgatcgttatccgcaaggtgcctacgggaaacctagtaacactctctatttgatctggttggttgttcagccgttaaacccaaacggtaaacctggcagatgaggctggaaaatccccaccagcgatggtgttccagcctgcgtggctgcctgcacacccgaaagggtgtgaagccttttcaaagacagggtgcgaagagtctactgtgctcaccttgattcctccggcccctgaatgtggctaatcctaaccccgtagctgtagtgtgcaatccagcacatttgcagtcgtaatgggtaactgcgggatggaaccaactactttgggtgtccgtgtttctctttttacctttatatttgcttatggtgacaattatacagatatagttgtcatc

SEQ ID NO: 21081 - DNA, 548 bp, synthetic construct; identical to SEQ ID NO: 589
  source 1..548: mol_type = other DNA

SEQ ID NO: 21082 - DNA, 513 bp, synthetic construct
  source 1..513: mol_type = other DNA
tgtggttgtataaactgttcccacggttgaaaacaacctatccgttatccgctatagtacttcgagaaacctagtatcacctttggattgttgacgcgttgcgctcagcacactaacccgtgtgtagcttgggtcgatgagtctggacataccccactggcgacagtggtccaggctgcgttggcggcctactcatggtgaaaaccatgagacgctagacatgaacaaggtgtgaagagtctattgagctactatagagtcctccggcccctgaatgcggctaatcctaaccatggagcaagtgctcacaggccagtgagttgcttgtcgtaatgcgcaagtccgtggcggaaccgactactttgggtgtccgtgtttcactttttacctttatgactgcttatggtgacaatttgatattgttaccatttagcttgtcaaatcaattgcaaaaggtcctaaatcttatttatcaacttgcattttgataactttaatttgaagattttaata

SEQ ID NO: 21083 - DNA, 526 bp, synthetic construct
  source 1..526: mol_type = other DNA
cccacctaacatatccaagtaacttagaagatttgaacactgcacaatagggactattgcaaccagcaatagtcagtgcaagcacttctgtctccccggagcggagtatagacggccaccgctgtcaaaagctcttaaccgttatccgccagttaactacgcaacagctagtaacatcttgttgttcttagggtgttcgatcaggtgagtttaccccctcactagtctggtcgatgaggctgagaaacccccacgggcgaccgtgtctcagcctgcgtggcggccagcccagcatatgctgggacgccttaagtatgacatggtgtgaagactcgcgtgtgcttagctgtgagtcctccggcccctgaatgcggctaacctaaaccccggagccttgaggcacaacccagtgcccgcaaggtcgtaatgagtaattctgggacgggaccgactactttgggtgtccgtgtttccttttatctttttgatgttcttatggttacaatatatagagtatattgtaatc

SEQ ID NO: 21084 - DNA, 576 bp, synthetic construct; identical to SEQ ID NO: 629
  source 1..576: mol_type = other DNA

SEQ ID NO: 21085 - DNA, 530 bp, synthetic construct
  source 1..530: mol_type = other DNA
ccacccttccctaatatgtaacttagaagtttgagcaataagaccaataggtgataattatccagattatcaaaggtcaagcacttctgtttccccggtcaacgaggatatgctttacccaaggcaaaaaccttagagatcgttatccccacactgcctacacagagcctagtatcacttttgatgtaattaggttggtcgctccctgcaaacccagcagtagacctggcagatgaggctggacattccccactggcgacagtggtccagcctgcgtggctgcctgctcaccctatcgggtgagaagcctacttattgacaaggtgtgaagagccgcgtgtgctcagtgtgcttcctccggcccctgaatgtggctaaccttaaccctgcagccgctgcccataatccaatgggtctacggtcgtaacgcgcaagtgcgggatgggaccaactactttgggtgtccgtgtttcttatttttcctttatttgcattttatggtgacaatttatggtatatagattgtcatc

SEQ ID NO: 21086 - DNA, 607 bp, synthetic construct; identical to SEQ ID NO: 659
  source 1..607: mol_type = other DNA

SEQ ID NO: 21087 - DNA, 574 bp, synthetic construct
  source 1..574: mol_type = other DNA
gtggagttgtgcactgttattccggtaactttacacgccagttttatttcccccctccccaaatgtaacttagaagatgtacacaacgaccaataggcggcaactaaccaagttgcttaaggtcaagcacttctgtctccccggtcaacgttgatacgctctcccagggcgaaaacaactgagatcgttatccgcaagacgcctacgcaaaacctagtaatatcttgaatggtacatggttggtcgttccgctaaaccccatagtagacctggcagatgaggctagaaactccccactggtgacagtgttctagcctgcgtggctgcctgcgtgtccttacgggcacgaagccatttacttgacaaggtgtgaagagtcccgtgtgctcgtcttgagtcctccggcccctgaatgtggctaaccttaaccctgcagccagtacgcgcaagccagtgcgtagctggtcgtaatgagcaattgcgggatgggaccaactactttgggtgtccgtgtttcactttttaccttttattatgcttatggtgacaatatatagatatatatattgacacc

SEQ ID NO: 21088 - DNA, 475 bp, synthetic construct
  source 1..475: mol_type = other DNA
ctacacccagtggtgttaagcacaagtacttctgtttccccggagcggagtatagacggtccccactgtcaaaagctcttaaccgttatccgccaaccaactacgtgacgactagtagcatcattttgacactttgacgttcgatcaggtaggttcaccccacctactagtttggtcgatgaggctgggagtccctcacaggtaactgtgtcccagcctgcgtggcggccaacccagcaattgctgggacgccaatttgttgacatggtgtgaagatcctaatgtgcttggttgtgagtcctccggcccctgaatgcggctaaccttaaccccggagccttgtggcacaagccagtgacattaaggtcgtaaggagcaattctgggatgggaccgactactttgggtgtccgtgtttcctatttttctttaaattgtcttatggtcacagcatatattaattatatactgtgatc

SEQ ID NO: 21089 - DNA, 610 bp, synthetic construct; identical to SEQ ID NO: 671
  source 1..610: mol_type = other DNA

SEQ ID NO: 21090 - DNA, 568 bp, synthetic construct; identical to SEQ ID NO: 617
  source 1..568: mol_type = other DNA

SEQ ID NO: 21091 - DNA, 529 bp, synthetic construct
  source 1..529: mol_type = other DNA
tttataacccctcccccttgcaacttagaagatgtaaacacagaccaataggtggtaactaaccaagttactaaaggtcaagcacttctgtttccccggctgacattgatatgctccaccagggcaaaaacaatagaagtcgttatccgcaaagtgcctacgcaaagcctagtagcactttagattgtatatggttggtcgctcagctattccccctagtagacctggcagatgaggctagaaataccccactggtaacagtgttctagcctgcgtggctgcctgcgcacccttctgggtgcgaagccatatacatgacaaggtgtgaagagccccgtgtgctcactttgagtcctccggctcctgaatgtggctaaccttaaacctgcagccagtgcacataagccaatgtgtagctggtcgtaatgagtaattgcgggatgggaccaactactttggatgtccgtgtttcttgtttttccttaattctgcttatggtgacaatatatagataatatatattggcatc

SEQ ID NO: 21092 - DNA, 540 bp, synthetic construct
  source 1..540: mol_type = other DNA
gtacgccagttttgccacccctccccacaatgtaacttagaagttttgcacttacagaccaataggatgtgattatccaaatcactaaaggtcaagcacttctgtttccccggttagatttgatacgctccaacagggcgaaaacagatctagtcgttatccgcaaggtgcctacgcaaagcctagtagcattctgaaagctttttgactggttgttccactacaaacccagtagtaaacctggcagatgaggctagaaattccccactggtgacagtgttctagcctgcgtggctgcctgcacaccctttgggtgtgaagccaatcagttgacagggtgtgaagagccccgtgtgctcaccttgagtcctccggcccctgaatgtggctaaccttaaacccgcagccaaggtgtgcaagccagcatattcttggtcgtaacgagcaattgtgggatgggaccaactactttgggtgtccgtgtttctttttattcttttataatgcctatggtgacaatatatagcatatattgtcatt

SEQ ID NO: 21093 - DNA, 494 bp, synthetic construct
  source 1..494: mol_type = other DNA
gaattaccgtacaataggtgctgtcacatccagtgatggcttgtacaagcacttctgtttccccggagcggagtatagatggccaccgctgtcaaaagctcttaaccgttatccgccaattaactacgcaacggctagtaacatcttgttattcttagggcgttcgatcaggtgagtacacccctcactagtctggtcgatgaggctgagaattccccacgggcgaccgtgtctcagcctgcgtggcggccagcccagcttatgctgggacgccttaattgtgacatggtgtgaagacccacgtgtgcttaattgtgagtcctccggcccctgaatgcggctaacctaaaccctggagccttgagacacaatccagtgttggcaaggtcgtaatgagcaattccgggacgggaccgactactttgggtgtccgtgtttcctgttatttccaaattgttcttatggtcacaatataagctatatatattgtgatc

SEQ ID NO: 21094 - DNA, 610 bp, synthetic construct
  source 1..610: mol_type = other DNA
ttaaaactggatctgggttgttcccacccgggtctcccacgtggagttgtactctattattccggtaatcttgtacgccagtttttacacccccccccttgtaacttagaagaaagtacacaacgaccaataggcggcaattaaccaaattgtcaatggtcaagcacttctgtttccccggtcaagattgatacgctccaacagggcgaaaacaatcaagatcgttatccgcaaagtgcctacacaaagcttagtaacattttggaaagtttatggttggtcgctcagctaaaccccatagtagacctggcagatgaggctagaaactccccactggcgacagtgttctagcctgcgtggctgcctgcacaccctcacgggtgtgaagccatatacttgacaaggtgcgaagagccccgtgtgctcactttgactcctccggcccctgaatgtggctaaccttaaccccgcagctagcgcatgcaaaccagtgtgtagctagtcgtaacgagcaattgtgggatgggaccaactactttgggtgtccgtgtttcactttttaccttttatttgcttatggtgacaataatatatagtatatattgacacc

SEQ ID NO: 21095 - DNA, 540 bp, synthetic construct; identical to SEQ ID NO: 579
  source 1..540: mol_type = other DNA

SEQ ID NO: 21096 - DNA, 472 bp, synthetic construct
  source 1..472: mol_type = other DNA
cacccagtggtattaagcacaagtacttctgtttccccggagcggagtatagacggtccccactgtcaaaagctcttaaccgttatccgccaaccaactacgtgacgactagtagcatcattttgacactttgacgttcgatcaggtaggttcaccccacctactagtttggtcgatgaggctgggagttcctcacaggtaactgtgtcccagcctgcgtggcggccaacccagcaattgctgggacgccaatttgttgacatggtgtgaagatcctaatgtgcttggttgtgagtcctccggcccctgaatgcggctaaccctaaccccggagccttgtggcacaagccagtgacattaaggtcgtaaggagtaattctgggatgggaccgactactttgggtgtccgtgtttcctgtttttctttaaattgtcttatggtcacagcatatattgattatatactgtgatc

SEQ ID NO: 21097 - DNA, 613 bp, synthetic construct
  source 1..613: mol_type = other DNA
cggggataccggttgttcccacctgtatcacccaagtggtgtggtgctcttgtatttcggtacatttgcacgccagtttgccaccccttcccttttacgtaacttagaagtttacacaaagaccaacaggcggtggtaaatccataccactaacggtcaaacacttctgtttccccggcatgcgaggaataggctccaaaagggctgaagccactagtgtcgttatccgcattggtactacgcaaagcctagtattaccttgaaaatttcttggctggtcgctccaccagataccccactggtagacctggcagatgaggcaggacttaccccactggcgacagtggtcctgcctgcgtggctgcctgcacaccccctacggggtgtgaagcccagaaacagacagggtgtgaagagccccgtgtgctaccaatgagtcctccggcccctgaatgcggctaatcttaccccacagctgttgcacgcaagccagcgtgtatgcagtcgtaatgagcaattgtgggatggaaccgactactttgggtgtccgtgtttctttttattcctattatttgcttatggtgacaatattgatattatcagtgttgtcatc

SEQ ID NO: 21098 - DNA, 586 bp, synthetic construct
  source 1..586: mol_type = other DNA
gttgtacactgcgatctcggtcgctttgtatgcctgtttttaccacccaccccaactttactgtcttctttacttcacaagtaacgtagaagcatgcacatgatgcccagtaagacaacgtcccaaccaggggcgttaagggcaagcacttctgtttccccggatgtgtgaataggcttcacccgaggctgaaactgtagcattcgttatccgcatggctactacgcgactgctagtaacattctgtgtgacatgtggggtttcgctcagcagagacccagtctgtagatcagggtaatgaggctacacaatccccactggcgacagtggtgtagcctgcgtggtgccctgcccgaggttcgtcctcgggaccctccatgttagacagggtgtgaagacactagtgtgctagtcatgagtcctccggcccctgaatgcggctaatcttaaacctgcagccatcgcatgcatgccagcatgtaggtggtcgtaatgagtaattgcgggatggaaccgactactttgggtgtccgtgtttccctttttacatttgtgtgtctcttatggttacatcattggtgtaatc

SEQ ID NO: 21099 - DNA, 606 bp, synthetic construct
  source 1..606: mol_type = other DNA
aggttgttcccacctagatctcctacatggagttgtactctattattccggtaattttgtacgccagttttatctcccctcccccctaatgtaacttagaagttgaacataccgaccaataggtaacatttatccagaatgttaaaggtcaagcacttctgtttccccggtcaaagttgatatgctccaacagggcaaaaacaaccgcgatcgttatccgcaaagcaactacgcaaagcctagtatcacttttgagagtatgtggttggtcgctccactataaacccaatagtagacctggcagatgaggctagaagttccccactggtaacagtgttctagcctgcgtggctgcctgcgtgctccccgtgagcacgaagccatatatttgacaaggtgtgaagagccccgtgtgcttgttttgagtcctccggcccctgaatgtggctaaccttaaccctgcagctagcgtgtgcaacccagtacaaagctagtcgtaatgagcaattgcgggatgggaccaactactttgggtgtccgtgtttcttgtttttcctttatatttgcttatggtgacaatatatatacagcatatatattggcatc

SEQ ID NO: 21100 - DNA, 570 bp, synthetic construct
  source 1..570: mol_type = other DNA
ggagtggtacactattatcccggtaattttgtacgccagttttataacccctcccccttgcaacttagaagatgtaaacacagaccaataggtggtaactaaccaagttactaaaggtcaagcacttctgtttccccggctgatattgatatgctccaccagggcaaaaacaatagaagtcgttatccgcaaagtgcctacgcaaagcctagtagcactttagattgtgtatggttggtcgctcagctattccccctagtagacctggcagatgaggctagaaataccccactggtaacagtgttctagcctgcgtggctgcctgcgcacccttctgggtgcgaagccatatacatgacaaggtgtgaagagccccgtgtgctcactttgagtcctccggctcctgaatgtggctaaccttaaacctgcagccagtgcacataagccaatgtgtatctggtcgtaacgagtaattgcgggatgggaccaactactttggatgtccgtgtttcttgttttttccttaattttgcttatggtgacaatatatagataatatatattggcatc

SEQ ID NO: 21101 - DNA, 478 bp, synthetic construct; identical to SEQ ID NO: 507
  source 1..478: mol_type = other DNA

SEQ ID NO: 21102 - DNA, 575 bp, synthetic construct
  source 1..575: mol_type = other DNA
gggtgtagtatacttgtatcccggtacatttatacgccagttttataatccccaccccaaatgtaacttagaagcttgtacacaatgatcaataggatgatggctatccaagtcatctaagatcaagcacttctgtctccccggtgagtgtgaatatgctttacccaaggcaaaagctaatctcatcgttatccgcaaggtgcctacgggaagcctagtaatactctgaagatattttggttggtcgatcagttgcactcacccatgcaatagacctggcagatggggctaggcacacctcactggtaacagtggcctagcccgcgtggctgcctgcacaccttcgggtgtgaagccataatattgacagggtgtgaagagcctactgtgctcaccttgagtcctccggcccctgaatgtggctaatcctaaccccgtatccattgcacacaaaccagtgtgtctatggtcgtaatgggtaactacgggatggaaccaactactttgggtgtccgtgtttcttgtttttctttaatactgcttatggtgacattatatattgatatagtgtcatc

SEQ ID NO: 21103 - DNA, 524 bp, synthetic construct
  source 1..524: mol_type = other DNA
aacccctcccccttgcaacttagaagatgtaaacacagaccaataggtggtaactaaccaagttactaaaggtcaagcacttctgtttccccggctgatattgatatgctccaccagggcaaaaacaatagaagtcgttatccgcaaagtgcctacgcaaagcctagtagcactttagattgtgtatggttggtcgctcagctattccccctagtagacctggcagatgaggctagaaataccccactggtaacagtgttctagcctgcgtggctgcctgcgcacccttccgggtgcgaagccatatacatgacaaggtgtgaagagccccgtgtgctcactttgagtcctccggctcctgaatgtggctaaccttaaacctgcagccagtgcacataagccaatgtgtatctggtcgtaatgagtaattgcgggatgggaccaactactttggatgtccgtgtttcttgtttttccttaattttgcttatggtgacaatatatagataatatatattggcatc

SEQ ID NO: 21104 - DNA, 573 bp, synthetic construct
  source 1..573: mol_type = other DNA
ctgtgattccggtcaccttgtacgcctgtttgctaccctaccccgactttctttcactcttcacttccagtaacttagaagctaacacagagtccaataggatgcagctaatccaagtctgctacggacaagcacttctgtttccccgggtgtgtgaatagactccaacagggttgaagctgtagcactcgttatccgcacaactactacgcgaatgttagtaacaccctctaggtatagtgggatttcgctccgcagaaaccccatctgtagattagggcaatgaggctacacggaccccactggcgacagtggtgtagcctgcgtggtgccctacctggggtttcataccccaggattccactttactgacagggtgtgaaggcgctagtgtgctagttgtgagtcctccggtccctgaatgtggctaatcctaaccccgtggccatttcatgtaaaccaacatgcaggtggtcgtaacgagtaatcacgggatggaaccaactactttgggtaaccgtgtttcctgttttactttaatgtgtgtcttatggttacaattatagagtaacc

SEQ ID NO: 21105 - DNA, 476 bp, synthetic construct
  source 1..476: mol_type = other DNA
ccccccgcgtagatcgggctgatgggtctccgcatcccccacgggcgaccgtggcggaggccgcgtggcggcccgcctatggcgaaagccataggacgccatttcagtgacagggtgtgaagagcctattgagctagttggtagtcctccggcccctgaatgcggctaatcctaaccacggagcgtccaccagcaaaccagctggcagggcgtcgtaacgggtaactctgtggcggaaccgactactttgggtgtccgtgtttccttttgatcctattgtggctgcttatggtgacaacttacagttgttatcataaagcttttggattggccatccggaaagagttaacagtttgttcgctcatcgctttatcaaagctacctttgagaaaggcaatttatttgttaatttcattttataaacttgaagatatatcaagtgctcatttggatttactcatacaactaaatcaaac

SEQ ID NO: 21106 - DNA, 598 bp, synthetic construct
  source 1..598: mol_type = other DNA
gtacaccaactgggccatgaccaagcacttctgtgaccccggaccgagtatcaataagctgctcacgtggctgaaggagaaaacgttcgttacccggccaattacttcgagaaacctagtaccgccatgaaagttgcgcagcgtttcgctccgcacgaccccagtgtagatcaggctgatgagtcaccgcgttccccacgggtgaccgtggcggtggctgcgttggcggcctgcccttggggcaacccaagggacgcttcaatactgacatggtgcgaagagtctattgagctaattggtagtcctccggcccctgaatgcggctaatcccaactgcggagcagatacccacataccagtgggcagtctgtcgtaatgggcaactctgcagcggaaccgactactttgggtgtccgtgtttcctttatttctcacactggctgcttatggtgacaattgagagattgttgccatatagctattggattggccatccggtgtctaatagagcaattatctacctttttgttggatttatcccacttaactataaagcactcaaaacactaatatacattgtggatcttaacacaacaaa

SEQ ID NO: 21107 - DNA, 644 bp, synthetic construct; identical to SEQ ID NO: 778
  source 1..644: mol_type = other DNA

SEQ ID NO: 21108 - DNA, 565 bp, synthetic construct
  source 1..565: mol_type = other DNA
aagccagcgcttccgtgagcaagcacttctgtttccccggtgcggttgtataaactgttcccacggttgaaaacaacctatccgttatccgctatagtacttcgagaaacctagtatcacctttggattgttgatgcgttgcgctcagcacactaacccgtgtgtagcttgggtcgatgagtctggacataccccactggtgacagtggtccaggctgcgttggcggcctactcatggtgaaaaccatgagacgctagacatgaacaaggtgtgaagagtctattgagctactatagagtcctccggcccctgaatgcggctaatcttaaccatggagcaagtgctcacaaaccagtgagttgcttgtcgtaatgcgcaagtccgtggcggaaccgactactttgggtgtccgtgtttcactttttacttttatgactgcttatggtgacaatttaatattgttgccatttagctagtcaaattaatcacataaaacttcaaaccctatctaacaattcacacttggatagcttcattttgaggactttaaacctatttacaaag

SEQ ID NO: 21109 - DNA, 592 bp, synthetic construct
  source 1..592: mol_type = other DNA
caccatgattacctacgggtgtagtatacttgtattccggtacatttatacgccagttttatgatcccccaccccaaatgtaacttagaagcatgtacacaatgatcaatagggtggtggctaaccaagtcacctaagatcaagcacttctgtttccccggtgagtgtggatatgctttacccaaggcagaaactaatctcatcgttatccgcaaggtgcctacgggaagcctagtaatattctgaaggtattctggttggtcgctcagttgcattcacccgtgcaatagacctggcagatggggctaggcataccccactggtaacagtggcctagcccgcgtggctgcctgcacaccttcgggtgtgaagccataatattgacagggtgtgaagagcctactgtgctcaccttgagtcctccggcccctgaatgtggctaatcctaaccccgtatccattgcacacaagccagtgtgtttatggtcgtaatgggtaactacgggatggaaccaactactttgggtgtccgtgtttcttgtttttctttaatattgcttatggtgacattatatattgatatagtgtcatc

SEQ ID NO: 21110 - DNA, 596 bp, synthetic construct; identical to SEQ ID NO: 646
  source 1..596: mol_type = other DNA

SEQ ID NO: 21111 - DNA, 570 bp, synthetic construct
  source 1..570: mol_type = other DNA
ggagtggtacactattatcccggtaattttgtacgccagttttataacccctccccccttgtaacttagaagatgtaaacacagaccaataggtggtaactaaccaagttactaaaggtcaagcacttctgtttccccggctgatattgatatgctccaccagggcaaaaacaatagaagtcgttatccgcaaagtgcctacgcaaagcctagtagcactttagattgtgtatggttggtcactcagctattccccctagtagacctggcagatgaggctagaaataccccactggtaacagtgttctagcctgcgtggctgcctgcgcaccctttcgggtgcgaagccatatacatgacaaggtgtgaagagccccgtgtgctcactttgagtcctccggctcctgaatgtggctaaccttaaacctgcagccagtgcacataagccaatgtgtagctggtcgtaatgagtaattgcgggatgggaccaactactttggatgtccgtgtttcttgtttttccttaattttgcttatggtgacaatatatagataatatatattggcatc

SEQ ID NO: 21112 - DNA, 524 bp, synthetic construct
  source 1..524: mol_type = other DNA
ctttacgtaacttagaagttttaaacacaagaccaatagcaggcaactttccaggttgtctaaggtcaagcacttctgtttccccggttgatgttgatatgctccaacagggcaaaaacaactgatatcgttatccgcaaagtgcctacacagagcctagtaggattctgaaagatctttggttggtcgctcagctgcatacccagcagtagaccttgcagatgaggctggacattccccactggtaacagtggtccagcctgcgtggctgcctgcacacctcttacgaggtgtgaagccaaggattggacagggtgcgaagagccgcgtgtgctcactttgagtcctccggcccctgaatgcggctaaccttaaacctgcagccatagctcataagccaatgagtttatggtcgtaatgagtaattgcgggatgggaccgactactttgggtgtccgtgtttcattttttccttttatcaattgcttatggtgacaatatatatataaatatatattggcatc

SEQ ID NO: 21113 - DNA, 577 bp, synthetic construct
  source 1..577: mol_type = other DNA
tcccacagggagtggtactctgctattacggtagccttgtatgccagttttatcccccctcccccatgtaatttagaagttttacacaaagaccaatagccggtaatcagccagattactaaaggtcaagcacttctgtttccccggttaatgctgatatgctccaacagggcaaaaacagcagcaatcgttatccgcaaagcgcctacgcaaagcttagtagcatctccgaaattgtctggttggtcgttccgccatttcccccttggtagacctggcagatgaggctagaaataccccactggcgacagtgttctagcctgcgtggctgcctgcacaccctatgggtgtgaagccagataatggacaaggtgtgaagagccccgtgtgctcgctttgagtcctccggcccctgaatgtggctaaccttaaccctgcagctagagcacgcaaaccagtgtgtttctagtcgtaatgagcaattgcgggatgggaccaactactttgggtgtccgtgtttcactttttcctttatattgcttatggtgacaatatatataccatatatattgacatc

SEQ ID NO: 21114 - DNA, 522 bp, synthetic construct
  source 1..522: mol_type = other DNA
accttcctccatgtaacttagaagatgtacactcagaccaataggtgataatcctccagattatctaaggtcaagcacttctgtttccccggtctaaactgatatgctccaacagggcaaaaacagtgcagatcgttatccgcaggatgcctacgcaaagtctagtaacccctttgaagatatttggttggtcgctccactattccccatagtagacctggcagatgaggctagaaattccccactggtgacagtgttctagcctgcgtggctgcctgcacaccctattgggtgtgaagccaaatattggacaaggtgtgaagagccccgtgtgctcatcctgagtcctccggcccctgaatgtggctaaccttaaccctgcagctagtgcatgcaatccagcatgtagctagtcgtaatgagcaattgcgggatgggaccaactactttgggtgtccgtgtttcactttttaccttatatttgcttatggtgacaatatatattgcatatatattggcatc

SEQ ID NO: 21115 - DNA, 574 bp, synthetic construct; identical to SEQ ID NO: 624
  source 1..574: mol_type = other DNA

SEQ ID NO: 21116 - DNA, 532 bp, synthetic construct; identical to SEQ ID NO: 567
  source 1..532: mol_type = other DNA

SEQ ID NO: 21117 - DNA, 561 bp, synthetic construct
  source 1..561: mol_type = other DNA
ttcttgtattacggtacatttccataccagttttatataccccaccccgaaactcatagaagtttgtacacaacgaccaataggcggtggccatccaggtcactaatggtcaagcacttctgtttccccggcacccttgtatacgcttcacccgaggcgaaaaacgaggtcgtcgttatccgcaaagtgcctacgaaaagcctagtaacactttgaaaacctatggttggtcgttcagctgttcacccaacagtagacctggcagatgaggctagacactccccaccagcgatggtggtctagcctgcgtggctgcctgcacaccctaccgggtgtgaagccagaaagtggacaaggtgtgaagagcctattgtgctcactttgagtcctccggcccctgaatgtggctaaccctaaccccgtagctgttgcatgtaatccaacatgtatgcagtcgtaatgggcaactatgggatgggaccaactactttgggtgtccgtgtttcctgttttactttttcattgcttatggtgacaattgtatctgatacacttgtcacc

SEQ ID NO: 21118 - DNA, 575 bp, synthetic construct
  source 1..575: mol_type = other DNA
acgtggtgttgtgctctgttattccggtaactttgcacgccaattttataacccctttccccatgtaacttagaagttttgcacacagaccaatagcaagcagcataccagctgtataaggtcaagcacttctgtctccccggtcgatgttgatatgcttcaacaaggcaaaaacaacagagatcgttatccgcaagatgcctacacaaagcctagtacctcctttgacggtatttgtctggtcgttcaggtgtttccccagcactagacctggcagatgaggctagaaactccccactggcgacagtgttctagcctgcgtggctgcctgcacaccctactgggtgtgaagccaaatactagacaaggtgtgaagagccccgtgtgctcatcttgagtcctccggcccctgaatgcggctaaccttaaacccgcagccattgctcacaatccagtgggtagatggtcgtaatgagcaattgtgggatgggaccgactactttgggtgtccgtgtttcatgttttactttataatttgcttatggtgacaatatatagtgatatatattggcatc

SEQ ID NO: 21119 - DNA, 571 bp, synthetic construct
  source 1..571: mol_type = other DNA
gtagtggtacactattatcccggtaattttgtacgccagttttataacccctccccccttgtaacttagaagatgtaaacacagaccaataggtggtaactaaccaagttactaaaggtcaagcacttctgtttccccggctgatattgatatgctccaccagggcaaaaacaatagaagtcgttatccgcaaagtgcctacgcaaagcctagtagcactttagattgtgtatggttggtcgctcagctattccccccagtagacctggcagatgaggctagaaataccccactggtaacagtgttctagcctgcgtggctgcctgcgcaccctttcgggtgcgaagccatatacatgacaaggtgtgaagagccccgtgtgctcactttgagtcctccggctcctgaatgtggctaaccttaaacctgcagccagtgcacataagccaatgtgtagctggtcgtaatgagtaattgcgggatgggaccaactactttggatgtccgtgtttcttgtttttcctttaattttgcttatggtgacaatatatagataatatatattggcatc

SEQ ID NO: 21120 - DNA, 603 bp, synthetic construct
  source 1..603: mol_type = other DNA
catactgtgcgttgtacactggaatcacggttcctttgtatgcctgttttataatcccttcccctcttttctatcgtctccaattttccacgtaacttagaagcaaagtacatgagcccaataggagcggctaacccatagccgtatagggcaagcacttctgttaccccggatgtgtgaatagacttctcacgaggttgaagctgaagcattcgttacccgcacttgtactgcgcggaaattagtagcacctttgccagcttcatggcgtttcgctcagcgtttcccccacgtagatcagggcaatggggctacacaacccccaccggcgacggtggtgtagcccgcgtggtgccccgcccgagctatcagctcgggacgccatgatgaagacagggtgtgaaggttcgagtgcgctacaagtgagtcctccggcccctgaatgcggctaaccttaaccccgtagctgtggtatgcatgccagcataaacacagtcgtaatgggcaactacgggatgggaccgactactttgggtgtccgtgtttcactttttcctttaaatttgtcttatggttacaggtttatgcaatagatctgtaatc

SEQ ID NO: 21121 - DNA, 591 bp, synthetic construct; identical to SEQ ID NO: 643
  source 1..591: mol_type = other DNA

SEQ ID NO: 21122 - DNA, 337 bp, synthetic construct
  source 1..337: mol_type = other DNA
tacccatggctaacgccatgggacgctagttgtgaacaaggtgtgaagagcctattgagctacttaagagtcctccggcccctgaatgcggctaatcctaaccacggagcaagtgcccacaaaccagtgagtggcttgtcgtaacgcgcaagtctgtggcggaaccgactactttgggtgtccgtgtttccttttatttttatcatggctgcttatggtgacaatctaagattgttatcatatagctattggattggccatccggtgatttacagagacttgagaactaacccgcctttctacaacactcatttacttattaatctcataatacaca

SEQ ID NO: 21123 - DNA, 337 bp, synthetic construct; identical to SEQ ID NO: 322
  source 1..337: mol_type = other DNA

SEQ ID NO: 21124 - DNA, 374 bp, synthetic construct; identical to SEQ ID NO: 366
  source 1..374: mol_type = other DNA

SEQ ID NO: 21125 - DNA, 699 bp, synthetic construct
  source 1..699: mol_type = other DNA
cgctagcacactggtattacggtacctttgtgcgcctgttttatgcacccttccccgaaagaaatttagaagctcaacttgtgtggtcaatagtaaatccagtacgccaactgggtcacgaccaagcacttctgttaccccggactgagtatcaataagctgctcacgtggctgaaggagaaaacgttcgttacccggccaattacttcgagaaacccagtaccaccatggaagttgcgcggcgtttcgctccgcacgaccccagtgtagatcgggccgatgagtcaccgcgttccccacgggtgaccgtggcggtggctgcgttggcggcctgcccatggggcaacccatgggacgcttcaatactgacatggtgcgaagagtctattgagctaattggtagtcctccggcccctgaatgcggctaatcctaactgcggagcagatacccacacgccagtgggtagtctgtcgtaacgggcaactctgcagcggaaccgactactttgggtgtccgtgtttccttttatttttatactggctgcttatggtgacaattgagagattgttgccatatagctattggattggccatccggtgtctaacagagcgatcgtttatttgtttgttggattcgtacctttgaattataaggtacttgcaacgcttaaatacattatagacctcaacacaacaaa

SEQ ID NO: 21126 - DNA, 573 bp, synthetic construct
  source 1..573: mol_type = other DNA
tgtggagtagtacactgttattacggtaaccttgtacgccagttttatcaccccttcccccttgtaacttagaagttataaactcgagaccaataggcagtgatcaaccagatcactaaaggtcaagcacttctgtttccccggtcaacgctgatatgctccaccagggcaaaaacagccgcgatcgttatccgcaaagtgcctacgcaaagcctagtaatatcttgaatgatgtatggttggtcgttcagctaaaccccatagtagacctggcagatgaggctggaaattccccactggcgacagtgttccagcctgcgtggctgcctgcgcactctcacgagtgcgaagccatatatttgacaaggtgtgaagagccccgtgtgctcactttgagtcctccggcccctgaatgtggctaaccttaaccctgcagctagtgcatacaatccagtgtgtggctagtcgtaatgagcaattgcgggatgggaccaactactttgggtgtccgtgtttcactttttcctttataatttgcttatggtgacagtatatagcttatatattgttacc

SEQ ID NO: 21127 - DNA, 353 bp, synthetic construct; identical to SEQ ID NO: 333
  source 1..353: mol_type = other DNA

SEQ ID NO: 21128 - DNA, 534 bp, synthetic construct; identical to SEQ ID NO: 572
  source 1..534: mol_type = other DNA

SEQ ID NO: 21129 - DNA, 570 bp, synthetic construct
  source 1..570: mol_type = other DNA
gggagtggtactctgttattacggtaactttgtacgccagttttatcctccccttaccccatgtaacttagaagtttttcacaaagaccaatagttggtaatcatccagattacttaaggtcaagcacttctgtttccccggtcaacgttgatatgccccaacagggcaaaaacaactgcgatcgttatccgcaaagcgcctacgcaaagcttagtagcacctttgagattatttggttggtcgttccgccatttcccctggtagacctggcagatgaggctggaagtaccccactggcgacagtgttccagcctgcgtggctgcctgcacaccctatgggtgtgaagccaaataatggacaaggtgtgaagagccccgtgtgctcgctttgagtcctccggcccctgaatgcggctaaccttaaccctgcagctagagcacacaagccagtgtgtatctagtcgtaatgagcaattgcgggatgggaccgactactttgggtgtccgtgtttcactttttacttataattgcttatggtgacaatatatatatagtatatattggcacc

SEQ ID NO: 21130 - DNA, 570 bp, synthetic construct
  source 1..570: mol_type = other DNA
gggagtggtactctgttattacggtaactttgtacgccagttttatcctccccttaccccatgtaacttagaagtttttcataaagaccaatagttggtaatcatccagattacttaaggtcaagcacttctgtttccccggtcaacgttgatatgctccaacagggcaaaaacaactgcgatcgttatccgcaaagcgcctacacaaagcctagtagcgcctttgagattatttggttggtcgttccgccatttcccctggtagacctggcagatgaggctggaagtaccccactggcgacagtgttccagcctgcgtggctgcctgcacaccctatgggtgtgaagccaaataatggacaaggtgtgaagagccccgtgtgctcgctttgagtcctccggcccctgaatgcggctaaccttaaccctgcagctagagcacacaagccagtgtgtatctagtcgtaatgagcaattgcgggatgggaccgactactttgggtgtccgtgtttcactttttacttataattgcttatggtgacaatatatatatagcatatattggcacc

SEQ ID NO: 21131 - DNA, 636 bp, synthetic construct
  source 1..636: mol_type = other DNA
ttcggtacctttgtacgcctgttttatctcccttcccaatgtaacttagaagttcttaaatcaatgctcaataggtggggcgcaaaccagcgctctcatgagcaagcactcctgtctccccggtgaggttgtataaactgttcccacggttgaaaacaacctatccgttatccgctatagtacttcgagaaacctagtaccacctttggattgttgacgcgttgcgctcagcacactaacccgtgtgtagcttgggtcgatgagtctggacatacctcactggcgacagtggtccaggctgcgttggcggcctactcatggtgaaagccatgagacgctagacatgaacaaggtgtgaagagtctattgagctactatagagtcctccggcccctgaatgcggctaatcctaaccatggagcaagtgctcacaggccagtgagttgcttgtcgtaatgcgcaagtccgtggcggaaccgactactttgggtgtccgtgtttcactttttacttttatgactgcttatggtgacaattcgatattgttaccatttagcttgtcaaatcaattgcaaaagatcctaactcttatttatcaacttgcatcttgataactttaatttgaaaattttaaca

SEQ ID NO: 21132 - DNA, 553 bp, synthetic construct
  source 1..553: mol_type = other DNA
aaaccagcgctctcatgagcaagcactcctgtctccccggtatggttgtataaactgttcccacggttgaaaacaacctatccgttatccgctatagtacttcgagaaacctagtatcaccttcggattgttgacgcgttgcgctcagcacactaacccgtgtgtagcttgggtcgatgagtctggacataccccactggcgacagtggtccaggctgcgttggcggcctactcatggtgaaaaccatgagacgctagacatgaacaaggtgtgaagagtctattgagctactatagagtcctccggcccctgaatgcggctaatcctaaccatggagcaagtgctcacaggccagtgagttgcttgtcgtaatgcgtaagtccgtggcggaaccgactactttgggtgtccgtgtttcactttttacttttatgactgcttatggtgacaatttgatattgttaccatttagcttgtcaaatcaattgcaaaagatcctaaatcttatttatcaacttgcattttgataactttgatttgaaaattttaata

SEQ ID NO: 21133 - DNA, 553 bp, synthetic construct
  source 1..553: mol_type = other DNA
aaaccagcgctctcatgagcaagcactcctgtctccccggtgtggttgtataaactgttcccacggttgaaaacaacctatccgttatccgctatagtacttcgagaaacctagtatcacctttggattgttgacgcgttgcgctcagcacactaacccgtgtgtagcttgggtcgatgagtctggacgtaccccactggcgacagtggtccaggctgcgttggcggcctactcatggtgaaaaccatgagacgctagacatgaacaaggtgtgaagagtctattgagctactatagagtcctccggcccctgaatgcggctaatcctaaccatggagcaagtgctcacaggccagtgagttgcttgtcgtaatgcgcaagtccgtggcggaaccgactactttgggtgtccgtgtttcactttttacttttatgactgcttatggtgacaatttgatattgttaccatttagcttgtcaaattaattgcaaaagatcctaaatcttatttaccaacttgcattttgataaccttgatttgaaaattttaata

SEQ ID NO: 21134 - DNA, 553 bp, synthetic construct
  source 1..553: mol_type = other DNA
aaaccagcgctctcatgagcaagcacttctgtctccccggtgtggttgtataaactgttcccacggttgaaaacaacctatccgttacccgctatagtacttcgagaaacctagtatcacctttggattgttgacgcgttgcgctcagcacactaacccgtgtgtagcttgggtcgatgagtctggacgtaccccactggtgacagtggtccaggctgcgttggcggcctactcatggtgaaaaccatgagacgctagacatgaacaaggtgtgaagagtctattgagctactatagagtcctccggcccctgaatgcggctaatcctaaccatggagcaagtgctcacaggccagtgagttgcttgtcgtaatgcgcaagtccgtggcggaaccgactactttgggtgtccgtgtttcactttttacttttatgactgcttatggtgacaatttgatattgttaccatttagcttgtcaaattaattgcaaaagatcctaaatcttatttaccaacttgcattttgataaccttgatttgaaaattttaata

SEQ ID NO: 21135 - DNA, 553 bp, synthetic construct
  source 1..553: mol_type = other DNA
aaaccagcgctctcatgagcaagcactcctgtctccccggtgtggttgtataaactgttcccacggttgaaaacaacctatccgttatccgctatagtacttcgagaaacctagtatcacctttggattgttgacgcgttgcgctcagcacactaacccgtgtgtagcttgggtcgatgagtctggacgtaccccactggcgacagtggtccaggctgcgttggcggcctactcatggtgaaaaccatgagacgctagacatgaacaaggtgtgaagagtctattgagctactatagagtcctccggcccctgaatgcggctaatcctaaccatggagcaagtgctcacaggccagtgagttgcttgtcgtaatgcgcaagtctgtggcggaaccgactactttgggtgtccgtgtttcactttttacttttatgactgcttatggtgacaatttgatattgttaccatttagcttgtcaaattaattgcaaaagatcctaaatcttatttaccaacttgcattttgataaccttggtttgaaaattttaata

SEQ ID NO: 21136 - DNA, 553 bp, synthetic construct
  source 1..553: mol_type = other DNA
aaaccagcgctctcatgagcaagcactcctgtctccccggtgtggttgtataaactgttcccacggttgaaaacaacctatccgttatccgctatagtacttcgagaaacctagtatcacctttggattgttgacgcgttgcgctcagcacactaacccgtgtgtagcttgggtcgatgagtctggacgtaccccactggcgacagtggtccaggctgcgttggcggcctactcatggtgaaaaccatgagacgctagacatgaacaaggtgtgaagagtctattgagctactatagagtcctccggcccctgaatgcggctaatcctaaccatggagcaagtgctcacaggccagtgagttgcttgtcgtaatgcgcaagtccgtggcggaaccgactactttgggtgtccgtgtttcactttttacttttatgactgcttatggtgacaatttgatattgttaccatttagcttgtcaaattaattgcaaaagattctaaatcttatttaccaacttgcattttgataaccttgatttgaaaattttaaca

SEQ ID NO: 21137 - DNA, 553 bp, synthetic construct
  source 1..553: mol_type = other DNA
aaaccagcgctctcatgagcaagcactcctgtctccccggtgtggttgtataaactgttcccacggttgaaaacaacctatccgttatccgctatagtacttcgagaaacctagtatcacctttggattgttaacgcgttgcgctcagcacactaacccgtgtgtagcttgggtcgatgagtctggacgtaccccactggcgacagtggtccaggctgcattggcggcctactcatggtgaaaaccatgagacgctagacatgaacaaggtgtgaagagtctattgagctactatagagtcctccggcccctgaatgcggctaatcctaaccatggagcaagtgctcacaggccagtgagttgcttgtcgtaatgcgcaagtctgtggcggaaccgactactttgggtgtccgtgtttcactttttacttttatgactgcttatggtgacaatttgatattgttaccatttagcttgtcaaatcaattgcaaaagatcctaaatcttacttaccaacttgcattttgataaccttgatttgaaaattttaata

SEQ ID NO: 21138 - DNA, 553 bp, synthetic construct
  source 1..553: mol_type = other DNA
aaaccagcgctctcatgagcaagcactcctgtctccccggtgtggttgtataaactgttcccacggttgaaaacaacctatccgttatccgctatagtacttcgagaaacctagtatcacctttggattgttgacgcgttgcgctcagcacactaacccgtgtgtagcttgggtcgatgagtctggacgtaccccactggcgacagtggtccaggctgcgttggcggcctactcatggtgaaaaccatgagacgctagacatgaacaaggtgtgaagagtctattgagctactatagagtcctccggcccctgaatgcggctaatcctaaccatggagcaagtgctcacaggccagtgagttgcttgtcgtaatgcgcaagtccgtggcggaaccgactactttgggtgtccgtgtttcactttttacttttatgactgcttatggtgacaatttgatattgttaccatttagcttgtcaaattaattgcaaaagatcctaaatcttatttaccaacttgcattttgataacctcgatttgaaaattttaata

SEQ ID NO: 21139 - DNA, 553 bp, synthetic construct
  source 1..553: mol_type = other DNA
aaaccagcgctctcatgagcaagcactcctgtctccccggtgtggttgtataaactgttcccacggttgaaaacaacctatccgttatccgctatagtacttcgagaaacctagtatcacctttggattgttgacgcgttgcgctcagcacactaacccgtgtgtagcttgggtcgatgagtctggacgtaccccactggcgacagtggtccaggctgcgttggcggcctactcatggtgaaaaccatgagacgctagacatgaacaaggtgtgaagagtctattgagctactatagagtcctccggcccctgaatgcggctaatcctaaccatggagcaagtgctcacaggccagtgagttgcttgtcgtaatgcgcaagtctgtggcggaaccgactactttgggtgtccgtgtttcactttttacttttatgactgcttatggtgacaatttgatattgttaccatttagcttgtcaaatcaattgcaaaagatcctaaatcttacttaccaacttgcattttgataaccttgatttgaaaattttaata

SEQ ID NO: 21140 - DNA, 553 bp, synthetic construct
  source 1..553: mol_type = other DNA
aaaccagcgctctcatgagcaagcactcctgtctccccggtgtggttgtataaactgttcccacggttgaaaacaacctatccgttatccgctatagtacttcgagaaacctagtatcacctttggattgttgacgcgttgcgctcagcacactaacccgtgtgtagcttgggtcgatgagtctggacgtaccccactggcgacagtggtccaggctgcgttggcggcctactcatggtgaaaaccatgagacgctagacatgaacaaggtgtgaagagtctattgagctactatagagtcctccggcccctgaatgcggctaatcctaaccatggagcaagtgctcacaggccagtgagttgcttgtcgtaatgcgcaagtccgtggcggaaccgactactttgggtgtccgtgtttcactttttacttttgtgactgcttatggtgacaatttgatattgttaccatttagcttgtcaaattaattgcaaaagatcctaaatcttatttaccaacttgcattttgataaccttaatttgaaaattttaata

SEQ ID NO: 21141 - DNA, 553 bp, synthetic construct
  source 1..553: mol_type = other DNA
aaaccagcgctctcatgagcaagcactcctgtctccccggtgtggttgtataaactgttcccacggttgaaaacaacctatccgttatccgctatagtacttcgagaaacctagtatcacctttggattgttgacgcgttgcgctcagcacactaacccgtgtgtagcttgggtcgatgagtctggacgtacctcactggcgacagtggtccaggctgcgttggcggcctactcatggtgaaaaccatgagacgctagacatgaacaaggtgtgaagagtctattgagctactatagagtcctccggcccctgaatgcggctaatcctaaccatggagcaagtactcacatgccagtgagttgcttgtcgtaatgcgcaagtctgtggcggaaccgactactttgggtgtccgtgtttcactttttacttttatgactgcttatggtgacaatttgatattgttaccatttagcttgtcaaattaattgcaaaagatcctaaatcttatttcccaacttgcattttgataaccttgatttgaaaattttaata

SEQ ID NO: 21142 - DNA, 553 bp, synthetic construct
  source 1..553: mol_type = other DNA
aaaccagcgctcttatgagcaagcactcctgtctccccggtgtggttgtataaactgttcccacggttgaaaacaacctatccgttatccgctatagtacttcgagaaacctagtatcacctttggattgttgacgcgttgcgctcagcacactaacccgtgtgtagcttgggtcgatgagtctggacgtacctcactggcgacagtggtccaggctgcgttggcggcctactcatggtgaaaaccatgagacgctagacatgaacaaggtgtgaagagtctattgagctactatagagtcctccggcccctgaatgcggctaatcctaaccatggagcaagtgctcacaggccagtgagttgcttgtcgtaatgcgcaagtctgtggcggaaccgactactttgggtgtccgtgtttcactttttacttttatgactgcttatggtgacaatttgatattgttaccatttagcttgtcaaattaattgcaaaagatcctaaatcttatttaccaacttgcactttgataaccttgatttgaaaattttaata

SEQ ID NO: 21143 - DNA, 557 bp, synthetic construct
  source 1..557: mol_type = other DNA
gttattacggtaactttgtacgccagttttatcctccccttaccccgtgtaacttagaagttttttcacaaagaccaatagttggtaatcatccagattacttaaggtcaagcacttctgtttccccggtcaatgttgatatgctccaacagggcaaaaacaactgcgatcgttatccgcaaagcgcctacgcaaagcctagtagcacctttgagattatttggttggtcgctccaccatttcccctggtagacctggcagatgaggctggaagtaccccactggcgacagtgttccagcctgcgtggctgcctgcacaccctatgggtgtgaagccaaataatggacaaggtgtgaagagccccgtgtgctcgctttgagtcctccggcccctgaatgcggctaaccttaaccctgcagctggagcacacaaaccagtgtgtatctagtcgtaatgagcaattgcgggatgggaccgactactttgggtgtccgtgtttcactttttacttataattgcttatggtgacaatatatatatagtatatattggcact

SEQ ID NO: 21144 - DNA, 507 bp, synthetic construct
  source 1..507: mol_type = other DNA
ttgtacacatcgaccgataggtggcatttatccaaaatgttgaaggtcaagcacttctgttaccccggttgaaattgatatgctccaacagggcaaaaacagttttaatcgttatccgcaaagcaactacgcaaagcctagtatcatttttgataatatacggttggtcgctccactgtgaacccgacagtagacctggcagatgaggctggaaaccccccactggtgacagtgttccagcctgcgtggctgcctgcgtacccctttgtgggtacgaagccatatgtttgacaaggtgtgaagagccccgtgtgcttgctttgagtcctccggcccctgaatgtggctaaccttaaccctgcagctagtgtgtacaatccagtacatagctagtcgtaatgagtaattgcgggatgggaccaactactttgggtgtccgtgtttcctatttttcctttatatttgcttatggtgacaatatatatacatcacatatatattggcacc

SEQ ID NO: 21145 - DNA, 461 bp, synthetic construct
  source 1..461: mol_type = other DNA
gtggtgtagtgtacaagcacttctgtttccccggagcgaggtataagtggtacccactgctgaaagcctttaaccgttatccgccaatcaactacgtaatggctagtattatcatgtttgtaatttggcgttcgatcaggtggttccccccactagtttggtcgatgaggctaggaactccccacgggcgaccgtgtcctagcctgcgtggcggccaacccagctctagctgggacgcctttttatagacatggtgtgaagacctgcatgtgcttgattgtgagtcctccggcccctgaatgcggctaaccttaaccccggagccttgcaacataatccaatgttgttaaggtcgtaatgagtaattctgggatgggaccgactactttgggtgtccgtgtttccttttattctttatattgtcttatggtcacagcatatatagtatatatactgtgatc

SEQ ID NO: 21146 - DNA, 564 bp, synthetic construct
  source 1..564: mol_type = other DNA
aaaccagcgctttcatgagcaagcacttctgtttccccggtgcggttgtatagactgtttccacggttgaaaacaacttatccgttatccgctatagtacttcgagaaacctagtatcacctttggattgttgatgcgttgcgctcagcacactaacccgtgtgtagcttgggctgatgagtctggacgtaccccactggtgacagtggtccaggctgcgttggcggcctactcatggtgaaaaccatgagacgctagacatgaacaaggtgtgaagagtctattgagctactatagagtcctccggcccctgaatgcggctaatcttaaccatggagcaagtgctcacaagccagtgagttgcttgtcgtaacgcgcaagtccgtggcggaaccgactactttgggtgtccgtgtttcactttttacctttatgactgcttatggtgacaatttaatattgttaccatttagcttgtcagattaatcgcgtgaaatcctaaatcttgttcaccaatttgtattcggatagcttcatttgaaaattctaaactcatttataaag

SEQ ID NO: 21147 - DNA, 342 bp, synthetic construct
  source 1..342: mol_type = other DNA
cttcaaaactgacatggtgtgaagagtctattgagctaattggtagtcctccggcccctgaatgcggctaatcctaactgcggagcagatacccacatgccagtgggcggtctgtcgtaacgggcaactctgcagcggaaccgactactttgggtgtccgtgtttccttttattcctatactggctgcttatggtgacaatcgagagattgctaccatatagctattggattggccatctggtgacaaacagagcgattgtttacctatttgttggtttcgtaccattgaattttaaagttttaaaaaccctcaaccttgttttagcacttaacgcagcaaa

SEQ ID NO: 21148 - DNA, 489 bp, synthetic construct
  source 1..489: mol_type = other DNA
gaaacctagtaccgccatggacgttgcgcagcgtttcgctccacacaaccccagtgtagatcaggtcgatgagccaccgcattccccacgggcgaccgtggcggtggctgcgttggcggcctgcccatggggtaacccatgggacgcttcaatacagacatggtgcgaagagtctattgagctaattggtagtcctccggcccctgaatgcggctaatcctaactgcggagcaggtacccacaacccagtgggtcacctgtcgtaatgggcaactctgcagcggaaccgactactttgggtgtccgtgtttccttttaacctttacactggctgcttatggtgacaattgaaagattgttaccatatagctattggattggccatcctgtgagtaatagagcgattgtatacttatttgttggctttataccactcaatttgaaagctttacagacactgaattatattgtggcattaaacacagcaaa

SEQ ID NO: 21149 - DNA, 491 bp, synthetic construct; identical to SEQ ID NO: 517
  source 1..491: mol_type = other DNA

SEQ ID NO: 21150 - DNA, 541 bp, synthetic construct
  source 1..541: mol_type = other DNA
accgcacgccagtttgccaccccctacccatcgtaacttagaagctatcaactcgaccaataggcggtggcaaaccataccacttacggtcaagcactcctgtttccccggtatgcgaggaatagactcctacagggttgaagcctcaagtatcgtcatccgcattggtactacgcaaagcttagtagtgccttgaaagtcccttggttggtcgctccgctagttccccctagtagacctggcagatgaggcaggacattccccactggcgacagtggtcctgcctgcgtggctgcctgcgcacccctaggggtgcgaagccaagtgacggacaaggtgtgaagagccccgtgtgctactaatgagtcctccggcccctgaatgcggctaatccaaccccacagctattgcacacaagccagtgtgtatatagtcgtaatgagcaattgtgggacggaaccgactactttgggtgtccgtgtttccttttattcttatcattctgcttatggtgacaatactgtgaaatagtgttgttacc

SEQ ID NO: 21151 - DNA, 545 bp, synthetic construct
  source 1..545: mol_type = other DNA
gacgccagttttgaactcccttaccccttttgtaacttagaagttaaacaaaccgaccgatagcaggcaatcacccagattgcttatggtcaagcacttctgtctccccggtctcctttgatatgctccaccagggcaaaaacagagtagatcgttatccgcaagatgcctacgcaacgcctagtagcattttgaagtaattttggctggtcgctcatttacaaccccagtaatagacctggcagatgaggctagatgctccccactggcgacagtgatctagcctgcgtggctgcctgcacaccctttctgggtgtgaagccaaatttatgacaaggtgcgaagagccacgtgtgctcatcttgagtcctccggcccctgaatgcggctaaccttaaccctgcagccattgcctacaagccagtgggtatgtggtcgtaatgagaaattgcgggatgggaccgactactttgggtgtccgtgtttcactttttaccttatatttgcttatggtgacaatatatatatagatatatattgacatc

SEQ ID NO: 21152 - DNA, 543 bp, synthetic construct
  source 1..543: mol_type = other DNA
ttgagccagttttatctcccctccccccaactgtaacttagaagtttatcattacgatcaataggtggtagttatccaaactaccaaaggtcaagcacttctgtctccccggtcaaggttgatatgctccaacagggcaaaaacaactaagatcgttatccgcaaagtgcctacgcaaagcctagtaatgcctttgaaaatttatggttggtcgctccgctattccccatagtagacctggcagatgaggctagaaattccccactggtgacagtgttctagcctgcgtggctgcctgcgcaccctttaggtgcgaagccatacattggacaaggtgtgaagagccccgtgtgctcactttgagtcctccggcccctgaatgtggctaaccttaaccctgcagctagtgcatgtaatccaacatgttgctagtcgtaacgagcaattgcgggatgggaccaactactttgggtgtccgtgtttcactttttccttttattattgcttatggtgacaatatatatagatatatatattgacacc

SEQ ID NO: 21153 - DNA, 360 bp, synthetic construct
  source 1..360: mol_type = other DNA
ggggcgacccatgggacgcttcaatacggacatggtgtgaagagtcaattgagctagttagtagtcctccggcccctgaatgcggctaatcctaactgtggagcatgcgcccccactccagagggtagcgtgtcgtaacgggtaactccgcagcggaaccgactactttgggtgtccgtgtttcctattattcttatattggctgcttatggtaacaattgagaggttgttgccatatagctattggattggccacccagtgacaaacagagctataatttaccaatttgtgggatttgttccaacaagtttgaaagtcttgaagacacttaatctaatattgctactcaatatcgcaaa

SEQ ID NO: 21154 - DNA, 514 bp, synthetic construct
  source 1..514: mol_type = other DNA
acctcccctaaatgtaacttagaagcaaagcaaactgatcaatagggggcaatcatccagattgtcaaagatcaagcacttctgtttccccggtcaaagttgatatgctccacaagggcaaaaacaactgagatcgttatccgcaagatgcctacgcaaagcctagtagcacattgaaagatacttggttggtcgctcagctgttaacccaacagtagacctggcagatgaggctagagattcccctccggcgacggagttctagcctgcgtggctgcctgcacacccgttgggtgtgaagccaaatattggacaaggtgtgaagagccgcgtgtgctcatcttgagtcctccggcccctgaatgtggctaaccttaaacctgcagccagtgcacacagtccagtgtgtagctggtcgtaatgagtaattgcgggatgggaccaactactttgggtgtccgtgtttcactttttccttttatcattgcttatggtgacaatatatattgttatc

SEQ ID NO: 21155 - DNA, 587 bp, synthetic construct; identical to SEQ ID NO: 637
  source 1..587: mol_type = other DNA

SEQ ID NO: 21156 - DNA, 553 bp, synthetic construct
  source 1..553: mol_type = other DNA
aaaccagcgctctcatgagcaagcactcctgtctccccggtgtggttgtataaactgttcccacggttgaaaacaacctatccgttatccgctatagtacttcgagaaacctagtatcacctttggattgttgacgcgttgcgctcagcacactaacccgtgtgtagcttgggtcgatgagtctggacataccccactggcgacagtggtccaggctgcgttggcggcctactcatggtgaaaaccatgagacgctagacatgaacaaggtgtgaagagtctattgagctactatagagtcctccggcccctgaatgcggctaatcctaaccatggagcaagtgctcgcaggccagtgagttgcttgtcgtaatgcgcaagtccgtggcggaaccgactactttgggtgtccgtgtttcactttttacttttatgactgcttatggtgacaatttgatattgttaccatttagcttgtcaaatcaattgtaaaagatcctaaatcttatttatcaacttgcattttgataactttgatttgaaaattttaata

SEQ ID NO: 21157 - DNA, 553 bp, synthetic construct
  source 1..553: mol_type = other DNA
aaaccagcgctctcatgagcaagcactcctgtctccccggtgtggttgtataaactgttcccacggttgaaaacaacctatccgttatccgctatagtacttcgagaaacctagtatcacctttggattgttgacgcgttgcgctcagcacactaacccgtgtgtagcttgggtcgatgagtctggacataccccactggcgacagtggtccaggctgcgttggcggcctactcatggtgaaaaccatgagacgctagacatgaacaaggtgtgaagagtctattgagctactatagagtcctccggcccctgaatgcggctaatcctaaccatggagcaagtgctcacaggccagtgagttgcttgtcgtaatgcgcaagtccgtggcggaaccgactactttgggtgtccgtgtttcactttttacttttatgactgcttatggtgacaatttgatattgttaccatttagcttgtcaaatcaattgtaaaagatcctaaatcttatttatcaacttgcattttgataactttgatttgaaaattttaata

SEQ ID NO: 21158 - DNA, 459 bp, synthetic construct
  source 1..459: mol_type = other DNA
aatggtcagtgcaagcacttctgtttccccggagcggagtatagacggccaccgctgtcaaaagctcttaaccgttatccgccagttaactacgcaacagctagtaacatcttgttgttcttagggcgttcgatcaggtgagtttaccccctcactagtctggtcgatgaggctgagaaaccctcacgggcgaccgtgtctcagcctgcgtggcggccagcccagcatatgctgggacgccttaagtatgacatggtgtgaagactcgcgtgtgcttagctgtgagtcctccggcccctgaatgcggctaacctaaaccccggagccttgaggcacaatccagtgcccgcgaggtcgtaatgagtaattctgggacgggaccgactactttgggtgtccgtgtttccttttatctttttaatgatcttatggttacaatatatagagtatattgtaatc

SEQ ID NO: 21159 - DNA, 576 bp, synthetic construct
  source 1..576: mol_type = other DNA
ggtgtagtatacttgtatcccggtacatttatacgccagttttataatccccaccccaaatgtaacttagaagcttgtacacaatgatcaataggatgatggctatccaagtcatctaagatcaagcacttctgtctccccggtgagtgtgaatatgctttacccaaggcaaaagctaatctcatcgttatccgcaaggtgcctacgggaagcctagtaatactctgaagatattttggttggtcgatcagttgcactcacccatgcaatagacctggcagatggggctaggcacacctcactggtaacagtggcctagcccgcgtggctgcctgcacaccttcgggtgtgaagccataatattgacagggtgtgaagagcctactgtgctcaccttgagtcctccggcccctgaatgtggctaatcctaaccccgtatccattgcacacaaaccagtgtgtctatggtcgtaatgggtaactacgggatggaaccaactactttgggtgtccgtgtttcttgtttttctttaatactgcttatggtgacattatatattgatatatagtgtcatc

SEQ ID NO: 21160 - DNA, 685 bp, synthetic construct
  source 1..685: mol_type = other DNA
tatcacggtacctttgtgcgcctgttttatacaccctcccccgagtgcaacttagaagatatccacacacggtcaataggcggctcagtatgccaactgagtcatgaccaagcacttctgttcccccggactgagtatcaataagctgcttacgtggctgaaggagaaaacgttcgttatccggccaattacttcgagaagcttagtaccaccatggaggttgcgcagtgtttcgttccgcacaaccccagtgtagatcaggtcgatgagtcaccgcactcctcacgggcgaccgtggcggtggctgcgctggcggcctgcccatggggcaacccatgggacgctccaatactgacatggtgcgaagagcctattgagctaattggtagtcctccggcccctgaatgcggctaatcctaactgcggagcagacacccacgagccagtgggcagtctgtcgtaatgggtaactctgcagcggaaccgactactttgggtgtccgtgtttccttttattcctacattggctgcttatggtgacaattgagagattgttaccatatagctattggattggccgtccagtgacaaacagagcgattatctatctatttgttggcttcgtaccattaaaccttagagtcctaaagaccctcaatttgattatacaatttaactctgtgaa

SEQ ID NO: 21161 - DNA, 558 bp, synthetic construct
  source 1..558: mol_type = other DNA
ctggggtaactttgtgtttgacgccagttttgccacccctccccacaatgtaacttagaagttttgcacttacagaccaataggatgtgattatccaaatcactaaaggtcaagcacttctgtttccccggttagatttgatacgctccaacagggcgaaaacagatctaatcgttatccgcaaggtgcctacgcaaagcctagtagcattctgaaaactttttgactggttgttccactacaaacccagtagtaaacctggcagatgaggctagaaattccccactggtgacagtgttctagcctgcgtggctgcctgcacaccctttgggtgtgaagccaatcagttgacagggtgtgaagagccccgtgtgctcaccttgagtcctccggcccctgaatgtggctaaccttaaacccgcagccaaggtgtgcaagccagcatattcttggtcgtaacgagcaattgtgggatgggaccaactactttgggtgtccgtgtttctttttattcttttataatgcctatggtgacaatatatagtatatattgtcatt

SEQ ID NO: 21162 - DNA, 552 bp, synthetic construct; identical to SEQ ID NO: 596
  source 1..552: mol_type = other DNA

SEQ ID NO: 21163 - DNA, 495 bp, synthetic construct
  source 1..495: mol_type = other DNA
ttgaggtctttaaagtagtgcaataggaagcatcacaaccagtgatgttatgcacaagtatttctgtttccccggagcgaggtatagacggtacccaccgtcaaaagcctttaaccgttatccgccaaccaactacgaaacagctagtaataccctgtattcttgcgaggtgttcgatcagacagattccccctctgttagtctggtcgatgaggctagaagtaccccacaggtaactgtgttctagcctgcgtggcggccagcccagctcctgctgggacgcctttcaagagacatggtgtgaagactcgattgtgcttggttgtgagtcctccggcccctgaatgcggctaaccttaaacccggatccatgctatgcaatccagcatagttatggtcgtaatgggcaactctgggatgggaccgactactttgggtgtccgtgtttccatttttactttttgtgtcatttatggttacaattaagttgtaatc

SEQ ID NO: 21164 - DNA, 607 bp, synthetic construct
  source 1..607: mol_type = other DNA
gcaggcgtggcacaccagccatgtctcggtcaagcacttctgtgaccccggactgagtatcaataaactgctcacgcggtcgaaggagaaaacgtccgttacccggctagctacttcgagaaacctagtaacgccatgaaaattgcgaggtgtttcgctcagcacatccccagtgtagatcaggtcgatgagtcaccgcattccccacaggtaactgtggcggtggctgcgttggcggcctgcccatggggtaactcatgggacgcttcaatacggacatggtgtgaagagtctattgagctagttagtattcctccggcccctgaatgcggctaatcctaactgtggagcatgcgcccccattccagagggtagcatgtcgtaacgggtaactccgcagcggaaccgactactttgggtgtccgtgtttccttttattttatcattggctgcttatggtgacaattgaaagattgttgccatatagctattggattggccatccggtgacgaacagagctataatttaccaatttgtgggatttgttcctataagtttgaaagtcttaaagacccttaatttaatattactactcaatagtgcaag

SEQ ID NO: 21165 - DNA, 288 bp, synthetic construct
  source 1..288: mol_type = other DNA
cccctgaatgcggctaatcctaactgcggagcagatacccacatgccagtgggcagtctgtcgtaacgggcaactctgcagcggaaccgactactttgggtgtccgtgtttccttttattcttatactggctgcttatggtgacaatcgaaagactgttaccatatagctattggattggccatccagtgtgcaacagagctgtcatatttctttttgttgggtttgtaccactcgattacagtagttataataccttactgtacatcgttcacctgaatacaagaaa

SEQ ID NO: 21166 - DNA, 445 bp, synthetic construct
  source 1..445: mol_type = other DNA
cttctgtttccccggagcggagtatagacggccgccgctgtcaaaagctcttaaccgttatccgccaattaactacgcaacggctagtaacatcttgttatttttagggcgttcgatcaggtgagtacacccctcactagtctggtcgatgaggctgagaattccccacgggcgaccgtgtctcagcctgcgtggcggccagcccagcttatgctgggacgccttaattgtgacatggtgtgaagacccacgtgtgcttaattgtgagtcctccggcccctgaatgcggctaacctaaaccctggagccttgagacacaatccagtgttggcaaggtcgtaatgagcaattccgggacgggaccgactactttgggtgtccgtgtttcctgttatttccaaattgttcttatggtcacaatataagatatatatatattgtgatc

SEQ ID NO: 21167 - DNA, 547 bp, synthetic construct
  source 1..547: mol_type = other DNA
tggacgccagttttatatcccctttccctcaatgtaacttagaagcaaagcaaactgatcaataggggacaatcatccagattgtcaaagatcaagcacttctgtttccccggtcaaagttgatatgctccacaagggcaaaaacaactgagatcgttatccgcaagatgcctacgcaaagcctagtaacacattgaaagatacttggttggtcactcagctgttaacccgacagtagacctggcagatgaggctagagattcccctctggcgacggagttctagcctgcgtggctgcctgcacaccctttgggtgtgaagccaaatattggacaaggtgtgaagagccgcgtgtgctcatcttgagtcctccggcccctgaatgtggctaaccttaaacctgcagccagtgcacacaatccagtgtgtagctggtcgtaacgagtaattgcgggatgggaccaactactttgggtgtccgtgtttcactttttccttttattattgcttatggtgacaatatatatagcatatatatattgttatc

SEQ ID NO: 21168 - DNA, 554 bp, synthetic construct; identical to SEQ ID NO: 598
  source 1..554: mol_type = other DNA

SEQ ID NO: 21169 - DNA, 516 bp, synthetic construct
  source 1..516: mol_type = other DNA
acttagaagtttctaaacacaggaccaacagcaggcaactctccaggttgtccaaggtcaagcactcctgtttccccggttgacgttgatatgctccaacagggcaaaaacaactgatatcgttatccgcaaagtgcctacacagagcttagtagtgctctgaaagatctttggttggtcgctcggctgcatacccagcagtagaccttgcagatgaggctggacattccccactggtaacagtggtccagcctgcgtggctgcctgcgcacctctcacgaggtgcgaagccaaagattggacagggtgtgaagagccgcgtgtgctcactttgagtcctccggcccctgaatgcggctaaccttaaacccgcagccatggttcacaaaccagtgaacttatggtcgtaatgagtaattgtgggatgggaccgactactttgggtgtccgtgtttcacttttttcctttattgattgcttatggtgacaatatatatatagatatatattgtcatc

SEQ ID NO: 21170 - DNA, 540 bp, synthetic construct
  source 1..540: mol_type = other DNA
cagacgccagttttatcctccccttaccccgtgtaacttagaagtttttcataaagaccaatagttggtaatcatccagattacttaaggtcaagcacttctgtttccccggtcaatgttgatatgctccaacagggcaaaaacaactgcgatcgttatccgcaaagcgcctacgcaaagcctagtagcacctttgagattatttggttggtcgttccgccatttcccctggtagacctggcagatgaggctggaagtaccccactggtgacagtgttccagcctgcgtggctgcctgcacaccctatgggtgtgaagccaaataatggacaaggtgtgaagagccccgtgtgctcgctttgagtcctccggcccctgaatgcggctaaccttaaccctgcagctggagcacacaaaccagtgtgtatctagtcgtaatgagcaattgcgggatgggaccgactactttgggtgtccgtgtttcactttttacttataattgcttatggtgacaatatatatatagtatatattggcact

SEQ ID NO: 21171 - DNA, 523 bp, synthetic construct
  source 1..523: mol_type = other DNA
ggtaacttagaagcttgtactttatgaaggccaataggcgggtagtcaaccacactactcacggtcaagcacttctgtttccccggtatgcggagaataagctttaacaaaggctgaagcttcaattatcgttacccgcatggtaactacgcaaagcttagtaacatcttggaaatttattggttggtcgctccactggagaaccctcccagtagacctggcagatgaggctaagtaatccccactggcgacagtgtcttagcctgcgtggctgcctgcacacctggaaacaggtgtgaagccaatcaatggacaaggtgcgaagagccccgtgtgcttatcatgagtcctccggcccctgaatgcggctaatccaaccccacagctattgcacataatccaatgtgtatttagtcgtaacgggcaactgtgggacggaaccgactactttgggtgtccgtgtttcctttattctcatttaagtttcctatggtgacaaatataagtaattatatctgtcatc

SEQ ID NO: 21172 - DNA, 324 bp, synthetic construct; identical to SEQ ID NO: 310
  source 1..324: mol_type = other DNA

SEQ ID NO: 21173 - DNA, 552 bp, synthetic construct
  source 1..552: mol_type = other DNA
agtatcaataaactgctcacgcggtcgaaggagaaaacgtccgttacccggctagctacttcgagaaacctagtaacgccatgaaaattgcgaggtgtttcgctcagcacatccccagtgtagatcaggtcgatgagtcaccgcattccccacaggtaactgtggcggtggctgcgttggcggcctgcccatgggataactcatgggacgcttcaatacggacatggtgtgaagagtctattgagctagttagtactcctccggcccctgaatgcggctaatcctaactgtggagcatgcgcccccattccagagggtagcatgtcgtaacgggtaactccgcagcggaaccgactactttgggtgtccgtgtttccttttattttatcattggctgcttatggtgacaattgaaagattgttaccatatagctactggattggccatccggtgacgaacagagctataatttaccaatttgtgggatttgttcctataagtttgaaagtcttaaagacccttaatttaatattactactcaatagtgcaag

SEQ ID NO: 21174 - DNA, 571 bp, synthetic construct
  source 1..571: mol_type = other DNA
gggcgcaaaccagcgctctcatgagcaagcactcctgtctccccggtgtggttgtataaactgttcccacggttgaaaacaacctatccgttatccgctatagtacttcgagaaacctagtatcacctttggattgttgacgcgttgcgctcagcacactaacccgtgtgtagcttgggtcgatgagtctggacatacctcactggcgacagtggtccaggctgcgttggcggcctactcatggtgaaaaccatgagacgctagacatgaacaaggtgtgaagagtctattgagctactatagagtcctccggcccctgaatgcggctaatcctaaccatggagcaagtgctcacaggccagtgagttgcttgtcgtaatgcgcaagtccgtggcggaaccgactactttgggtgtccgtgtttcactttttacttttatgactgcttatggtgacaatttgatattgttaccatttagcttgtcaaatcaattgcaaaagatcctaaatcttatttatcaacttgcattttgataactttgatttgaaaattttaataccattcataaag

SEQ ID NO: 21175 - DNA, 288 bp, synthetic construct
  source 1..288: mol_type = other DNA
cccctgaatgcggctaatcctaactgcggagcacatgccctcaacccagggggtattgtgtcgtaacgggcaactctgcagcggaaccgactactttgggtgtccgtgtttccttttattcttacatcggctgcttatggtgacaattgaaaggttgttaccatatagctattggattggccatccagtgtctaatagagctattatatacctctttgttggatttataccacttaatctaaaagtagtcaagacactacaactcattatacaactgaacacagcaag

SEQ ID NO: 21176 - DNA, 327 bp, synthetic construct; identical to SEQ ID NO: 311
  source 1..327: mol_type = other DNA

SEQ ID NO: 21177 - DNA, 543 bp, synthetic construct
  source 1..543: mol_type = other DNA
cgccagttttccccacccttccccacaatgtaacttagaagtttgtacaacatgaccaataggtgacaattatccagattgtcaaaggtcaagcacttctgtttccccggtcaatgaggatatgctttacccaaggcaaaaaccttaaagatcgttatccccacactgcctacacagagcctagtaccacttttgatgtagttaggttggtcgctccctgcaaacccagcagtagacctggcagatgaggctggacattccccactggcgacagtggtccagcctgcgtggctgcctgctcaccctttatgggtgagaagcctaattattgacaaggtgtgaagagccgcgtgtgctcagtgtgcttcctccggcccctgaatgtggctaaccttaaccctgcagccgttgcccataatccaatgggtttgcggtcgtaatgcgcaagtgcgggacgggaccaactactttgggtgtccgtgtttcctgtttttcttttgattgcattttatggtgacaatttatagaatatagattgtcatc

SEQ ID NO: 21178 - DNA, 325 bp, synthetic construct
  source 1..325: mol_type = other DNA
tgtgaagagtctattgagctagttggtagtcctccggcccctgaatgcggctaatcctaactgcggagcagatccccacaagccagtgggcagtctgtcgtaatgggcaactctgcagcggaaccgactactttgggtgtccgtgtttccttttattcttacactggctgcttatggtgacaattgaaggattgttaccatatagctattggattggccatccggtgtctaacagagcaataatttatctttttgttggattcgtcccacttaactacagagcacttgtaacgctcaattacatcatagatctcaacacaacgaa

SEQ ID NO: 21179 - DNA, 312 bp, synthetic construct
  source 1..312: mol_type = other DNA
ttgagctagttggtagtcctccggcccctgaatgcggctaatcctaactgcggagcagatccccacaagccagtgggcagtctgtcgtaatgggcaactctgcagcggaaccgactactttgggtgtccgtgtttccttttattcttatactggctgcttatggtgacaattgaagaattgttgccatatagctattggattggccatccggtgtctaacagagcaataatttatctttttgttggattcgtcccacttaactacagagcacttgcaacgctcaattacatcacagatctcaacacaacaaa

SEQ ID NO: 21180 - DNA, 530 bp, synthetic construct
  source 1..530: mol_type = other DNA
aatcccctccccttgtaacttagaagcaagtacacacaggccaatagcaagtagcaagccatgctacttatggtcaagcacttctgtttccccggtctgacgggatatgcttcacccgaggcagaaactcagatgatcgttatccgcaaagtgcctacgggaagcctagtagcaccctgaaaactgttaggttggtcgctcaattgctgaccccgagcaatagacttggcagatgaggctagacataccccaccagcgatggtggtctagcctgcgtggctgcctacccaccctaatagggtgggaagcctatcaatggacagggtgtgaagagcctactgtgctcactttgactcctccggcccctgaatgtggctaatcctaaccccgtatctatcgcatgcgcaccagcatgtaggtagtcgtaatgggcaactacgggatggaaccaactactttgggtgtccgtgtttccttgttttctttattatttgcttatggtgacaattgtatgaaatacgattgacacc

SEQ ID NO: 21181 - DNA, 484 bp, synthetic construct
  source 1..484: mol_type = other DNA
gaccaataggatgtgattatccagatcactaaaggtcaagcacttctgtttccccggttagatttgatacgctccaacagggcgaaaacagatctagtcgttatccgcaaggtgcctacgcaaagcctagtagcactctgaaagctttttgactggttgttccactacaaacccagtagtaaacctggcagatgaggctagaaattccccactggtgacagtgttctagcctgcgtggctgcctgcacaccctttgggtgtgaagccaatcagttgacagggtgtgaagagcctcgtgtgctcaccttgagtcctccggcccctgaatgtggctaaccttaaacccgcagccaaggtgtgcaagccagcatattcttggtcgtaacgagcaattgtgggatgggaccaactactttgggtgtccgtgtttctttttattcttttataatgcctatggtgacaatatatagcatatattgtcatt

SEQ ID NO: 21182 - DNA, 306 bp, synthetic construct
  source 1..306: mol_type = other DNA
tagttggtagtcctccggcccctgaatgcggctaatcctaactgcggagcagatccccacaagccagtgggcagtctgtcgtaatgggcaactctgcagcggaaccgactactttgggtgtccgtgtttccttttattcttatactggctgcttatggtgacaattgaagaattgttgccatatagctattggattggccatccggtgtctaacagagcaataatttatctttttgttggattcgtcccacttaactacagagcacttgcaacgctcaattacatcacagatctcaacacaacaaa

SEQ ID NO: 21183 - DNA, 440 bp, synthetic construct
  source 1..440: mol_type = other DNA
gtacggtcaagattgatatgctctaccagggcaaaaacagtcgcgatcgttacccgcaaagcaactacgcaaagcctagtatcatttttgatgatgtatggttggtcgttccgctatgaacctgatagtagacctggcagatgaggctagaaaatccccactggtaacagtgttctagcctgcgtggctgcctgcgtaccccttgtgggtacgaagccatacatttgacaaggtgtgaagagccccgtgtgcttgctttgagtcctccggcccctgaatgtggctaaccttaaccctgcagctagtgtgcgcaaaccagtgcatggctagtcgtaatgagcaattgcgggatgggaccaactactttgggtgtccgtgtttcttgtttttcttttatatttgcttatggtgacaatatatttaatacatatattgacacc

SEQ ID NO: 21184 - DNA, 450 bp, synthetic construct
  source 1..450: mol_type = other DNA
caagcacttctgtttccccggagcgaggtataggtggtacccaccgctgaaagcctttaaccgttatccgccaatcaactacgtaacagctagtagcattttgttgttgactggacgttcgatcaggtggtttacccccccactagtttggtcgatgaggctggaaattccccacgggtgaccgtgttccagcctgcgtggcggccaacccagctcatgctgggacgccctttcaatgacatggtgtgaagactcgcatgtgcttgattgtgaatcctccggcccctgaatgcggctaaccctaaccccggagccttgcatcacaatccagtgatgttagggtcgtaatgagtaattctgggatgggaccgactactttgggtgtccgtgtttctcatttttctttgaattgtcttatggtcacagcatatagtaatatatactgtgatc

SEQ ID NO: 21185 - DNA, 489 bp, synthetic construct; identical to SEQ ID NO: 515
  source 1..489: mol_type = other DNA

SEQ ID NO: 21186 - DNA, 519 bp, synthetic construct
  source 1..519: mol_type = other DNA
ccccttttgtaacttagaagattgaacaaatgaccaataggacgcaacaaaccagttgcaataggtcaagcacttctgtttccccggtcaatgttgatatgctccaacagggcaaaaacaacagcgatcgttatccgcaaggtgcctacgcaaagcctagtagcactcttgaaattgcttggttggtcgctcaggtgcaaacccagcactagacctggcagatgaggctagaaaatccccactggtgacagtgttctagcctgcgtggctgcctgcacacccatttgggtgtgaagccaaacaatggacagggtgtgaagagccccgtgtgctcatcttgattcctccggcccctgaatgcggctaaccttaaacctgcagccattgctcacaatccagtgagttggtggtcgtaatgagtaattgcgggatgggaccgactactttgggtgtccgtgtttcactttttaccttattttatgcttatggtgacaatatattgtaatatatattgacacc

SEQ ID NO: 21187 - DNA, 290 bp, synthetic construct
  source 1..290: mol_type = other DNA
gcccctgaatgcggctaatcctaaccatggagcaggcagctgcaacccagcagccagcctgtcgtaacgcgcaagtccgtggcggaaccgactactttgggtgtccgtgtttccttttattcttgaatggctgcttatggtgacaatcatagattgttatcataaagcgagttggattggccatccagtgtgaatcagattaattactcccttgtttgttggatccactcccgaaacgttttactccttaacttattgaaattgtttgaagacaggatttcagtgtcaca

SEQ ID NO: 21188 - DNA, 312 bp, synthetic construct
  source 1..312: mol_type = other DNA
ttgagctagttggtagtcctccggcccctgaatgcggctaatcctaactgcggagcagatccccacaagccagtgggcggtctgtcgtaatgggcaactctgcagcggaaccgactactttgggtgtccgtgtttccttttactcttatactggctgcttatggtgacaattgaaagattgttgccatatagctattggattggccatccagtgtctaacagagcaataatttatctttttgttggattcgtcccacttaacttcagagcacttgcaacgctcaattacatcatagatctcaacacaacaaa

SEQ ID NO: 21189 - DNA, 546 bp, synthetic construct
  source 1..546: mol_type = other DNA
ttgtacgccagttttgccaccctcccctaacatgtaacttagaagtttgaacgataagaccaataggtgataatcatccagattatcaaaggtcaagcacttctgtttccccggtcaatgaggatatgctttacccgaggcaaaaaccttagagatcgttatccacacactgcctacacagagcctagtaccacttttgacgtaactaggttggtcgctccctgcaaacccagcagtagacctggcagatgaggctggacgctccccactggcgacagtggtccagcctgcgtggctgcctgctcaccctattgggtgagaagcctatttattgacaaggtgcgaagagccgcgtgtgctcagtgtgcttcctccggcccctgaatgtggctaaccttaaccctgcagccgctgcccataatccaatgggtttacggtcgtaacgcgtaagtgcgggatgggaccaactactttgggtgtccgtgtttcttatttttcttttatttgcattttatggtgacaatttatggtatatagattgtcatc

SEQ ID NO: 21190 - DNA, 529 bp, synthetic construct
  source 1..529: mol_type = other DNA
ccccctccccttaatgtaacttagaagcaaagcaaactgatcaatagggggcaatcatccagattgtcaaagatcaagcacttctgtttccccggtcaaagttgatatgctccacaagggcaaaaacaactgagatcgttatccgcaagatgcctacgcaaagcctagtagcacattgaaagatacttggttggtcgctcagctgttaacccaacagtagacctggcagatgaggctagagattcccctccggcgacggagttctagcctgcgtggctgcctgcacacccgtcgggtgtgaagccaaatattggacaaggtgtgaagagccgcgtgtgctcatcttgagtcctccggcccctgaatgtggctaaccttaaacctgcagccagtgcacacagtccagtgtgtagctggtcgtaatgagtaattgcgggatgggaccaactactttgggtgtccgtgtttcactttttccttttatcattgcttatggtgacaatatatatagtatatatatattgttatc

SEQ ID NO: 21191 - DNA, 546 bp, synthetic construct
  source 1..546: mol_type = other DNA
ttgtacgccagttttgccaccctcccctaacatgtaacttagaagtttgaacgataagaccaataggtgataatcatccagattatcaaaggtcaagcacttctgtttccccggtcgatgaggatatgctttacccgaggcaaaaaccttagagatcgttatccacacactgcctacacagagcctagtaccacttttgatgtaactaggttggtcgctccctgcaaacccagcagtagacctggcagatgaggctggacgttccccactggcgacagtggttcagcctgcgtggctgcctgctcaccctattgggtgagaagcctacttattgacaaggtgcgaagagccgcgtgtgctcagtgtgcttcctccggcccctgaatgtggctaaccttaaccctgcagccgctgcccataatccaatgggtttacggtcgtaacgcgtaagtgcgggatgggaccaactactttgggtgtccgtgtttcttatttttcttttatttgcattttatggtgacaatttatggtatatagattgtcatc

SEQ ID NO: 21192 - DNA, 443 bp, synthetic construct
  source 1..443: mol_type = other DNA
tttggattgttgatgcgttgcgctcagcacactaacccgtgtgtagcttgggttgatgagtctggacctaccccactggtgacagtggtccaggctgccttggccgcctactcatggtgaaagccatgagacgctagacatgaacaaggtgtgaagagtctattgagctactatagagtcctccggcccctgaatgcggctaatcttaaccatggagcaagtgctcacaagccagtgagttgcttgtcgtaacgcgcaagtccgtggcggaaccgactactttgggtgtccgtgtttcactttttacctttatgactgcttatggtgacaatttaatattgttaccatttagcttgtcaaattaatcacgtgaaatcctaaatcttatttatcaatttgtatttggatagcttcatttgagaattctaaactcattcataaag

SEQ ID NO: 21193 - DNA, 415 bp, synthetic construct; identical to SEQ ID NO: 454
  source 1..415: mol_type = other DNA

SEQ ID NO: 21194 - DNA, 568 bp, synthetic construct
  source 1..568: mol_type = other DNA
gggtactctgctattacggtagccttgtatgccggttttacctcccctcccccatgtaacttagaagttttacacaaggaccaatagtcggtaatcagccagattactaaaggtcaagcacttctgtttccccggtcaatgctgatatgctccaacagggcaaaaacagtagcgatcgttatccgcaaagcgcctacgcaaagcttagtagcatctccgaaattgtctggttggtcgttccgccattttccccttggtagaccttgcagatgaggctagaaataccccactggcgacagtgttctagcctgcgtggctgcctgcacaccctatgggtgtgaagccaaacaatggacaaggtgtgaagagccccgtgtgctcgctttgattcctccggcccctgaatgtggctaaccttaaccctgcagctagagcacgcaaaccagcgtgtttctagtcgtaatgagtaattgcgggatgggaccaactactttgggtgtccgtgtttcactttttccttttatattgcttatggtgacaatatatatacagcatatatattgacacc

SEQ ID NO: 21195 - DNA, 289 bp, synthetic construct
  source 1..289: mol_type = other DNA
aagcctttaaccgttacccgccaattgactgcgagacagctagtaacattatgttgtttgttggacgttcgatcaggcagattaccccatctgctagtttggtcgatgaggctggaagtaccccacgggtgaccgtgttccagcctgcgtggcggccaacccagctgttgctgggacgcccttcaaatgacatggtgtgaagactctattgcgctcaattgtgagtcctccggcccctgaatgcggctaaccttaaacccggagccatgctacgcaatccagcttagtt

SEQ ID NO: 21196 - DNA, 276 bp, synthetic construct
  source 1..276: mol_type = other DNA
gctaatcctaactgcggagcagatgcccacatgccagtgggtggtctgtcgtaacgggcaactctgcagcggaaccgactactttgggtgtccgtgtttccttttattattatactggctgcttatggtgacaattgagagattgttaccatatagctattggattggccatccggtgactaacagagctattatttacttatttgttggttacgtaccgctcaactttagagttctaaacactattaactttattctaatactcaacacagcaaa

SEQ ID NO: 21197 - DNA, 570 bp, synthetic construct
  source 1..570: mol_type = other DNA
gagtggtacactattatcccggtaattttgtacgccagttttataacccctccccccttgtaacttagaagatgtaaacacagaccaataggtggtaactaaccaagttactaaaggtcaagcacttctgtttccccggctgatattgatatgctccaccagggcaaaaacaatagaagtcgttatccgcaaagtgcctacgcaaagcctagtagcactttagattgtgtatggttggtcgctcagctattccccctagtagacctggcagatgaggctagaaataccccactggtaacagtgttctagcctgcgtggctgcctgcgcaccctttcgggtgcgaagccatatacatgacaaggtgtgaagagccccgtgtgctcactttgagtcctccggctcctgaatgtggctaaccttaaacctgcagccagtgcacataagccaatgtgtagctggtcgtaatgagtaattgcgggatgggaccaactactttggatgtccgtgtttcttgtttttcctttgattttgcttatggtgacaatatatagacaatatatattggcatc

SEQ ID NO: 21198 - DNA, 480 bp, synthetic construct; identical to SEQ ID NO: 509
  source 1..480: mol_type = other DNA

SEQ ID NO: 21199 - DNA, 550 bp, synthetic construct; identical to SEQ ID NO: 593
  source 1..550: mol_type = other DNA

SEQ ID NO: 21200 - DNA, 518 bp, synthetic construct
  source 1..518: mol_type = other DNA
ccgatctaacttagaagcaacgtacatgagcccaataggagcggctaatccacagccgtatagggcaagcacttctgttaccccggatgtgtgaatagacttctcacgaggttgaagctgaagcattcgttatccgcacttgtactgcacggaaattagtagcactcttgccagcctcatggtgtttcgctcagcgtttcccccacgtagatcagggcaatggggctacacaacccccaccggcgacggtggtgtagcccgcgtggtgccccgcccgagctactagctcgggacgccatgatgaagacagggtgtgaaggttcgagtgcgctacaagtgagtcctccggcccctgaatgcggctaaccttaaccccgtagctgtggtgtacatgccagtacaaacacagtcgtaatgggtaactacgggatgggaccgactactttgggtgtccgtgtttcactttttcctttaaatttgtcttatggttacaggtttatgcaaatagatctgtaatc

SEQ ID NO: 21201 - DNA, 579 bp, synthetic construct
  source 1..579: mol_type = other DNA
caccgaacgttgtactcttgtattacggtacatttgcacgccagttttatacccccctcccctcgtaacttagaagcaagtacacacagaccaatagcaagtagcaagccatgctacttacggtcaagcactcctgtttccccggtctgacgggatatgcttcacccgaggcaaaaactcagatgatcgttatccgcaaagtgcctacgggaagcctagtaacgccttagaaattgttaggttggtcgctcaattgctgaccccgagcaatagacttggcagatgaggctggacgtgccccaccagcgatggtggtccagcctgcgtggctgcctacccaccccaacggggcgggaagcctatcaatagacaaggtgtgaagagcctactgtgctcactttgattcctccggcccctgaatgtggctaatcctaaccccgtatctatcgcatgcgcaccagcatgtaggtagtcgtaatgggcaactacgggatggaaccaactactttgggtgtccgtgtttccttgttttcttattacttgcttatggtgacaattgtatgaaatacgattgacacc

SEQ ID NO: 21202 - DNA, 529 bp, synthetic construct
  source 1..529: mol_type = other DNA
caccctcccctaacatgtaacttagaagtttgaacgataagaccaataggtgataatcatccagattatcaaaggtcaagcacttctgtttccccggtcgatgaggatatgctttacccgaggcaaaaaccttagagatcgttatccacacactgcctacacagagcctagtaccacttttgacataactaggttggtcgctccctgcaaacccagcagtagacctggcagatgaggctggacattccccactggcgacagtggtccagcctgcgtggctgcctgctcaccctattgggtgagaagcctatttattgacaaggtgcgaagagccgcgtgtgctcagtgtgcttcctccggcccctgaatgtggctaaccttaaccctgcagccgctgcccataatccaatgggtttacggtcgtaacgcgtaagtgcgggatgggaccaactactttgggtgtccgtgtttcttatttttcctttatttgcattttatggtgacaatttatggtatatagattgtcatc

SEQ ID NO: 21203 - DNA, 577 bp, synthetic construct
  source 1..577: mol_type = other DNA
ctcctacgtggagttgtactctattattccggtaattttgtacgccagttttatatccccacccccatgtaacttagaagttgagcacaacgaccaataggaggcaattaaccaaattgctaaaggtcaagcacttctgtttccccggtcaagattgatacgctccaccagggcgaaaacagttgagatcgttatccgcaaagtgcctacgcgaagcctagtaacattttgaagagtttatggttggtcgctccgctattccccatagtagacctggcagatgaggctagaaattccccactggcgacagtgttctagcctgcgtggctgcctgcacacccttatgggtgtgaagccatatacttgacaaggtgtgaagagcctagtgtgctcactttgagtcctccggcccctgaatgtggctaaccttaaacccgtagctagtgcacacaatccagtgtgtggctagtcgtaatgagcaattacgggatgggaccaactactttgggtgtccgtgtttcactttttccttttatacttgcttatggtgacaatatatagactatatattggcacc

SEQ ID NO: 21204 - DNA, 581 bp, synthetic construct
  source 1..581: mol_type = other DNA
ggccaagcacttctgtatccccggactgagtatcagtaggctgctcgcgcggctgaaggagaaaacgttcgttacccggccacttacttcgagaaacctagtaacgccatgaaagttgcgcagcgtttcgctccgcacaaacccagtgtagatcaggtcgatgagtcaccgcatcccccacgggcgaccgtggcggtggctgcgttggcggcctgcccatggggtaacccatgggacgcttcaatactgacatggtgcgaagagtctattgagctaagtggtaatcctccggcccctgaatgcggctaatcctaactgcggagcagatacccacactccagtgggcagtctgtcgtaacgggtaactctgcagcggaaccgactactttgggtgtccgtgtttccttttgtcttttataccggctgcttatggtgacaattgaaagattgttaccatatagctattggattggccatccggtgtcaaacagagcaattatttacttgtttgttggttatatacctctcgacaccaaggttctaaaaacactcaactacatcttgttattgaatacgttgaa

SEQ ID NO: 21205 - DNA, 563 bp, synthetic construct
  source 1..563: mol_type = other DNA
ctgttttaaacccccctcccccactctttctatcattcttttcttcctaatgtaacttagacgttataccacagtccaataggacgtggccaatccaggccatgacggacaagcacttctgtctccccgggcgtgtgaataggcctcaacaaggctgaagctgtagcgctcgttatccgcatttgtactacgcgatggctagtatcattcttctcttggtcttggcgtttcgctcagcgtggtaaccccccacgtagatcagggcaatgaggctgcatatgccccaccggcgacggtgatgcagcctgcgtggtgccccgcctgggttaacccccaggacgccataatcaagacagggtgagaagacctgagtgtgctacagatgagtcctccggcccctgaatgcggctaatcctaaccctgcagctatcgtatgcaaaccagcatattggtagtcgtaatgagcaattgcgggacggaaccgactactttgggtgtccgtgtttctctttttatttgaaatgttgcttatggttacaagttttggtattaaacttgtgacc

SEQ ID NO: 21206 - DNA, 253 bp, synthetic construct
  source 1..253: mol_type = other DNA
atgcggctaatcctaaccacggagcaagtgctcgcaaaccagtgagtggcttgtcgtaacgcgtgagtctgtggcggaaccgactactttgggtgtccgtgtttccttttatttttatcatggctgcttatggtgacaatctaagattgttatcatatagcttttggattggccatccggtgatttaaagagatataacatttatcttattgttctattatatctaattgctcattacaaccacattatcaca

SEQ ID NO: 21207 - DNA, 465 bp, synthetic construct; identical to SEQ ID NO: 501
  source 1..465: mol_type = other DNA

SEQ ID NO: 21208 - DNA, 529 bp, synthetic construct; identical to SEQ ID NO: 560
  source 1..529: mol_type = other DNA

SEQ ID NO: 21209 - DNA, 694 bp, synthetic construct; identical to SEQ ID NO: 832
  source 1..694: mol_type = other DNA

SEQ ID NO: 21210 - DNA, 259 bp, synthetic construct
  source 1..259: mol_type = other DNA
ggcccctgaatgcggctaatcccaaccacggagcaagcgcctgcatgccagcaggtagcttgtcgtaatgcgcaagtctgtggcggaaccgactactttgggtgtccgtgtttccttttattctcattatggctgcttatggtgacaatctaagattgttatcatatagcttttggattggccatccggagattactggtatttgaacagtttgttcacttcatctcattacatatttgtttgttcatcagttttcaca

SEQ ID NO: 21211 - DNA, 540 bp, synthetic construct
  source 1..540: mol_type = other DNA
taactttgtgtttgagtctccccccccctgcaacacttagaagaaatgtacttgtagaccaataggcggcggctacccaggtcgttgacggtcaagcacttctgtctccccggtgatactggatacgctttacccaaggcgaaaaccgggctcatcgttacccgcaaagtgcctacgagaagtctagtagcactctgaaaacctatgactggtcgctccactgcaatcccagcagtagacctggcagatggggctagacataccccaccagcgatggtggtctagcccgcgtggctgcctgcacaccctatgggtgtgaagccagaaagtggacagggtgtgaagaacctattgtgctcactttgagtcctccggcccctgaatgtggctaatcctaaccctgcagccgttgcgcacaacccagtgcgtatgcggtcgtaatgagtaattgcgggatggaaccaactactttgggtgtccgtgtttcttgttattcccttatttgcttatggtgacactgtatagccatacattgtcatc

SEQ ID NO: 21212 - DNA, 523 bp, synthetic construct
  source 1..523: mol_type = other DNA
agctacatagactgtccccacggttgaaagtggcagatccgttatccgcttaagtacttcgagaagcctagtatcaccttggaatcttcgacgcgttgcgctcagcactctaccccgagtgtagcttaggctgatgagtctgggcataccccaccggcgacggtggcccaggctgcgttggcggcctacccatggctaacgccatgggacgctagttgtgaacaaggtgtgaagagcctattgagctacttaagagtcctccggcccctgaatgcggctaatcctaaccacggagcaagtgcccacaaaccagtgggtggcttgtcgtaacgcgtaagtctgtggcggaaccgactactttgggtgtccgtgtttccttttatttttatcatggctgcttatggtgacaatctaagattgttatcatatagctattggattggccatccggtgattcacagagacttgaaagctaactcaccttcctataacactcatttgtttatcaatcttatagcacaca

SEQ ID NO: 21213 - DNA, 335 bp, synthetic construct
  source 1..335: mol_type = other DNA
cgttggcggcctactcatggtgaaagccatgagacgctagacatgaacaaggtgtgaagagtctattgagctactatagagtcctccggcccctgaatgcggctaatcctaaccatggagcaagtgctcacaggccagtgagttgcttgtcgtaatgcgcaagtccgtggcggaaccgactactttgggtgtccgtgtttcactttttacttttatgactgcttatggtgacaatttgatattgttaccatttagcttgtcaaatcaattgcaaaagatcctaaatcttatttatcaacttgcatcttgataactttaatttgaaaattttaaca

SEQ ID NO: 21214 - DNA, 290 bp, synthetic construct
  source 1..290: mol_type = other DNA
ggcccctgaatgcggctaatcctaactgcggagcaggcaccctcaatccagagggcagtctgtcgtaacgggcaactctgcagcggaaccgactactttgggtgtccgtgtttccttttattcttgaactggctgcttatggtgacaattgaaaggttgttaccatatagctattggattggccacccagtgacaaatagagcaattatatatctgtttgttggttttgttccattaaactataaaattttaaacacactcaaatttgtcttactactcaactcagcaaa

SEQ ID NO: 21215 - DNA, 478 bp, synthetic construct; identical to SEQ ID NO: 508
  source 1..478: mol_type = other DNA

SEQ ID NO: 21216 - DNA, 276 bp, synthetic construct
  source 1..276: mol_type = other DNA
gctaatcctaactgcggagcagatacccacataccagtgggcagtctgtcgtaacgggcaactctgcagcggaaccgactactttgggtgtccgtgtttccttttattcttatactggctgcttatggtgacaatcgaaagactgttaccatatagctattggattggccatccagtgtgcaacagatctgtcatatttctttttgttgggtttgtaccactcgattacagtagttataacaccttactgtacatcgttcacctgaatacaagaaa

SEQ ID NO: 21217 - DNA, 445 bp, synthetic construct
  source 1..445: mol_type = other DNA
cttctgtttccccggagcggagtatagacggccaccgctgtcaaaagctcttaaccgttatccgccaattaactacgcaacggctagtaacatcttgttatttttagggcgttcgatcaggtgagtacacccctcactagtctggtcgatgaggctgagaattccccacgggcgaccgtgtctcagcctgcgtggcggccagcccagcttacgctgggacgccttaattgtgacatggtgtgaagacccacgtgtgcttaattgtgagtcctccggcccctgaatgcggctaacctaaaccctggagccttgagacacaatccagtgttggcaaggtcgtaatgagcaattccgggacgggaccgactactttgggtgtccgtgtttcctgttatttccaaattgttcttatggtcacaatataagatatacatatattgtgatc

SEQ ID NO: 21218 - DNA, 349 bp, synthetic construct
  source 1..349: mol_type = other DNA
gttatttttagggcgttcgatcaggtgagtacacccctcactagtctggtcgatgaggctgagaattccccacgggcgaccgtgtctcagcctgcgtggcggccagcccagcttatgctgggacgccttaattgtgacatggtgtgaagacccacgtgtgcttaattgtgagtcctccggcccctgaatgcggctaacctaaaccctggagccttgagacacaatccagtgttggcaaggtcgtaacgagcaattccgggacgggaccgactactttgggtgtccgtgtttcctgttatttccaaattgttcttatggtcacaatataagatatacatatattgtgatc

SEQ ID NO: 21219 - DNA, 403 bp, synthetic construct
  source 1..403: mol_type = other DNA
acccaccgtcaaaagcctttaaccgttatccgccaaccaactacgaaacagctagtaataccctgtattcttgcgaggtgttcgatcagacagattccccctctgttagtctggtcgatgaggctagaagtaccccacaggtaactgtgttctagcctgcgtggcggccagcccagcttctgctgggacgcctttcaagagacatggtgtgaagactcgattgtgcttggttgtgagtcctccggcccctgaatgcggctaaccttaaacccggatccatgctatgcaatccagcatagttatggtcgtaatgggcaactctgggatgggaccgactactttgggtgtccgtgtttccatttttactttttgtgtcatttatggttacaattaagttgtaatc

SEQ ID NO: 21220 - DNA, 338 bp, synthetic construct
  source 1..338: mol_type = other DNA
ggacgttcgatcaggtggtttacccccccactagtttggtcgatgaggctggaaattccccacgggtgaccgtgttccagcctgcgtggcggccaacccagctcatgctgggacgccctttcgatgacatggtgtgaagactcgcatgtgcttgattgtgaatcctccggcccctgaatgcggctaaccctaaccccggagccttgcatcacaatccagtgatgttagggtcgtaatgagtaattctgggatgggaccgactactttgggtgtccgtgtttctcatttttctttgaattgtcttatggtcacagcatatactaatatatactgtgatc

SEQ ID NO: 21221 - DNA, 444 bp, synthetic construct
  source 1..444: mol_type = other DNA
ttccccggttgacgttgatatgctccaacagggcaaaaacaactgatatcgttatccgcaaagtgcctacacagagcctagtaggattctgaaagatctttggttggtcgctcagctgcatacccagcagtagaccttgcagatgaggctggacattccccactggtaacagtggtccagcctgcgtggctgcctgcacacctcttatgaggtgtgaagccaaggattggacagggtgcgaagagccgcgtgtgctcactttgagtcctccggcccctgaatgcggctaaccttaaacctgcagccatagctcataagccaatgagtttatggtcgtaatgagcaattgcgggatgggaccgactactttgggtgtccgtgtttcactttttcctttatcaattgcttatggtgacaatatatataaatatatatattggcatc

SEQ ID NO: 21222 - DNA, 276 bp, synthetic construct
  source 1..276: mol_type = other DNA
gctaatcctaactgcggagcatgcgcccccgttccagagggtagcgtgtcgtaacgggcaactctgcagcggaaccgactactttgggtgtccgtgtttccttttatcttctcattggctgcttatggtgacaattgcgagattgttaccatatagctattggattggccatccggtgtctaacagagctataatataccaatttgtgggattcgttccattaagtttgaaagtcttacaaaccctcaacttgatactgcaactcaatagtgtaaa

SEQ ID NO: 21223 - DNA, 326 bp, synthetic construct
  source 1..326: mol_type = other DNA
ggtgtgaagagtctattgagctaattggtagtcctccggcccctgaatgcggctaatcctaactgcggagcagatacccacataccagtgggcagtctgtcgtaatgggtaactctgcagcggaaccgactactttgggtgtccgtgtttccttttattttatactggctgcttatggtgacaattgatagattgttaccatatagctattggattggccatccagtgacaagcagagctatcatctacctgtttgttggttttgttccattgaattttaaagttctaaaaactatcgactttatcttagcactcaatacggcaaa

SEQ ID NO: 21224 - DNA, 308 bp, synthetic construct
  source 1..308: mol_type = other DNA
tagttggtagtcctccggcccctgaatgcggctaatcctaactgcggagcagatacccacgcaccagtgggcagtctgtcgtaatgggcaactctgcagcggaaccgactactttgggtgtccgtgtttccttttattcttatactggctacttatggtgacaattgagagattgtaaccatattgctattggattggccacccggcgacgaatagaacagttgtttacctgtttgttagtttcgtatcactgaactacaaagccttaaacaccctttaatttcatcataacgctcaacacgttaaat

SEQ ID NO: 21225 - DNA, 308 bp, synthetic construct
  source 1..308: mol_type = other DNA
tagttggtagtcctccggcccctgaatgcggctaatcctaactgcggagcagatacccacgcgccagtgggcagtctgtcgtaatgggcaactctgcagcggaaccgactactttgggtgtccgtgtttccttttattcttatactggctacttatggtgacaattgagagattgtaaccatattgctattggattggccacccggcaacgaatagaacagttgtttacctgtttgttagtttcgtatcactgaactacaaagccttaaacaccctttaatttcatcataacgctcaacacgttaaat

SEQ ID NO: 21226 - DNA, 308 bp, synthetic construct; identical to SEQ ID NO: 293
  source 1..308: mol_type = other DNA

SEQ ID NO: 21227 - DNA, 307 bp, synthetic construct; identical to SEQ ID NO: 289
  source 1..307: mol_type = other DNA

SEQ ID NO: 21228 - DNA, 308 bp, synthetic construct; identical to SEQ ID NO: 294
  source 1..308: mol_type = other DNA

SEQ ID NO: 21229 - DNA, 484 bp, synthetic construct
  source 1..484: mol_type = other DNA
ccaataggtggtgaccatccaggtcactgacggtcgagcacttctgtttccccggtacccttgtatacgcttcgcccgaggcgaaaaacgaggttatcgttatccgcaaagtgcctacgagaagcctagtagcacttttgaaacctatggctggtcgctcaactgcatacccagcagtagacctggcagatgaggctagacactccccaccagcgatggtggtctagcctgcgtggctgcctgcacaccctatcgggtgtgaagccagaaagtggacaaggtgtgaagagcctattgtgctcactttgagtcctccggcccctgaatgtggctaatcctaaccccgtagctgttgcatgcaacccagcatgtatgcagtcgtaatgggcaactatgggatggaaccaactactttgggtgtccgtgtttcttgttttacttttcattgcttatggtgacaattgtaattaatacgcttgttacc

SEQ ID NO: 21230 - DNA, 307 bp, synthetic construct
  source 1..307: mol_type = other DNA
tagttggtagtcctccggcccctgaatgcggctaatcctaactgcggagcagatacccacgcaccagtgggcagtctgtcgtaatgggcaactctgcagcggaaccgactactttgggtgtccgtgtttccttttattcttatactggccacttatggtgacaattgagagattgtaaccatattgctattggattggccacccggcgacgaatagaacagtcgtttacctgtttgttggtttcgtatcactgaactacaaagccttaaacaccctttaatttcatcataacgctcaacacgttaag

SEQ ID NO: 21231 - DNA, 307 bp, synthetic construct
  source 1..307: mol_type = other DNA
tagttggtagtcctccggcccctgaatgcggctaatcctaactgcggagcagatacccacgcaccagtgggcagtctgtcgtaatgggcaactctgcagcggaaccgactactttgggtgtccgtgtttccttttattcttatactggctacttatggtgacaattgagagattgtgaccatattgctattggattgaccacccggcgacgaatagaacagttgcttacctgtttgttagtttcgtatcactgaactacaaagccttgaacaccctttaatttcatcataacgctcaatacgttaaa

SEQ ID NO: 21232 - DNA, 307 bp, synthetic construct; identical to SEQ ID NO: 290
  source 1..307: mol_type = other DNA

SEQ ID NO: 21233 - DNA, 307 bp, synthetic construct
  source 1..307: mol_type = other DNA
tagttggtagtcctccggcccctgaatgcggctaatcctaactgcggagcagatacccacgcaccagtgggcagtctgtcgtaatgggcaactctgcagcggaaccgactactttgggtgtccgtgtttccttttattcttatactggctacttatggtgacaattgagagattgtaaccatattgctattggattggccacccggcgacgaataggacagttgtttacctgtttgttagtttcgtatcactgaactacaaagccttgaacaccctttaatttcatcataacgttcaacacgttaaa

SEQ ID NO: 21234 - DNA, 307 bp, synthetic construct
  source 1..307: mol_type = other DNA
tagttggtagtcctccggcccctgaatgcggctaatcctaactgcggagcagatacccacgcaccagtgggcagtctgtcgtaatgggcaactctgcagcggaaccgactactttgggtgtccgtgtttccttttattcttatactggctacttatggtgacaattgagagattgtgaccatattgctattggattggccacccggcgacgaatagaacagttgcttacctgtttgttagtctcgtatcactgaactacaaagccttaaataccctttaatttcatcataacgctcaatacgataaa

SEQ ID NO: 21235 - DNA, 307 bp, synthetic construct
  source 1..307: mol_type = other DNA
tagttggtagtcctccggcccctgaatgcggctaatcctaactgcggagcagatacccacgcaccagtgggcagtctgtcgtaatgggcgactctgcagcggaaccgactactttgggtgtccgtgtttccttttatccttatactggctgcttatggtgacaattgagagattgttaccatattgctattggattggccacccggtgacgaatagaatagctgtttacctatttgttagtttcgtaccactgaactacaaagccttaaacaccctttaatctcatcataacgctcaatacgttaaa

SEQ ID NO: 21236 - DNA, 307 bp, synthetic construct
  source 1..307: mol_type = other DNA
tagttggtagtcctccggcccctgaatgcggctaatcctaactgcggagcagatacccacgcgccagtgggcagtctgtcgtaatgggcaactctgcagcggaaccgactactttgggtgtccgtgtttccttttactcttatactggctacttatggtgacaattgagagattgtaaccatattgctattggattggccacccggcgacgaatagaacagttgcttacctgtttgttagtctcgtatcactgaactacaaagccttaaacaccctttaattccatcataacgctcaatacgttaaa

SEQ ID NO: 21237 - DNA, 307 bp, synthetic construct
  source 1..307: mol_type = other DNA
tagttggtagtcctccggcccctgaatgcggctaatcctaactgcggagcagatacccacgcgccagtgggcagtctgtcgtaatgggcaactctgcagcggaaccgactactttgggtgtccgtgtttccttttgttcttatactggctacttatggtgacaattgagagattgtaaccatattgctattggattgaccacccggcgacgaatagaacagttgcttacctgtttgttagtctcgtatcactgaactataaatccttaaacaccctttaatttcgtcataacgctcaatacgttaaa

SEQ ID NO: 21238 - DNA, 307 bp, synthetic construct
  source 1..307: mol_type = other DNA
tagttggtagtcctccggcccctgaatgcggctaatcctaactgcggagcagatacccacgcaccagtgggcagtctgtcgtaatgggcaactctgcagcggaaccgactactttgggtgtccgtgtttccttttattcttatactggctacttatggtgacaattgagagattgttaccatattgctactggattggccacccggtgacgaacagaacagttgtttacctatttgttagtttcgtatcactgaactacaaagccttaaacaccctttaatctcatcataacgctcaatacgttaaa

SEQ ID NO: 21239 - DNA, 307 bp, synthetic construct; identical to SEQ ID NO: 291
  source 1..307: mol_type = other DNA

SEQ ID NO: 21240 - DNA, 307 bp, synthetic construct
  source 1..307: mol_type = other DNA
tagctggtagtcctccggcccctgaatgcggctaatcctaactgcggagcagatacccacgcaccagtgggcagtctgtcgtaatgggcaactctgcagcggaaccgactactttgggtgtccgtgtttccttttactctcatactggctacttatggttacaattgagagattgtgaccatattgctattggattggccatccagcgacgaatagaatagttgcttacctgtttgttaacctcgtatcactgaactacaaagccttgaataccctttaacttcatcataacgctcagtacgctaaa

SEQ ID NO: 21241 - DNA, 307 bp, synthetic construct
  source 1..307: mol_type = other DNA
taattggtagtcctccggcccctgaatgcggctaatcctaactgcggagcagatacccacgcaccagtgggcagtctgtcgtaatgggcaactctgcagcggaaccgactactttgggtgtccgtgtttccttccgttcttatactggctgcttatggtgacaattggaagattgttaccatatcgctattggattggccatccggtgacgattagaacacttgtatacctatttgttagctttgcaccgctgaactacagagccttaagcaccctttgatcacattacaacacccaacacgtcaaa

SEQ ID NO: 21242 - DNA, 307 bp, synthetic construct
  source 1..307: mol_type = other DNA
tagttggtagtcctccggcccctgaatgcggctaatcctaactgcggagcagatacccacgcaccagtgggcagtctgtcgtaatgggcaactctgcagcggaaccgactactttgggtgtccgtgtttccttttgttcttatactggctgcttatggtgacaattgagagattgtaaccatattgctattgaattggccacccggcgacgaataaaacagttgcttacctgtttgttagtctcgtatccctgaactacaaatccttaaacaccctttaatttcgtcataacgctcaatacgttaaa

SEQ ID NO: 21243 - DNA, 307 bp, synthetic construct
  source 1..307: mol_type = other DNA
tagttggtagtcctccggcccctgaatgcggctaatcccaactgcggagcagatacccacacaccagtgggcagtctgtcgtaatgggcaactctgcagcggaaccgactactttgggtgtccgtgtttcctattgttcttattctaaccacttatggtgacaattgagaggttgtgaccacattgccactgagttgaccgcccggcgacgagcagaacagttgcttacctgtctgttggtctcgtatcatcaaactacaaatccttgaacgctctcctatttcgtcataacgcccaacacgttaaa

SEQ ID NO: 21244 - DNA, 307 bp, synthetic construct
  source 1..307: mol_type = other DNA
tagttggtagtcctccggcccctgaatgcggctaatcctaactgcggagcagatacccacacaccagtgggcagtctgtcgtaatgggcaactctgcagcggaaccgactactttgggtgtccgtgtttccttttgttcttattctaaccacttatggtgacaattgagaggttgtgaccatattgccactgagttgaccacccggtgacgagcagaacagttgcttacctgtctgttggtcacgtatcattaaaccacaagtccttgaacgctctcccattttgtcataacgcccaacacgtcaaa

SEQ ID NO: 21245 - DNA, 307 bp, synthetic construct
  source 1..307: mol_type = other DNA
tagttggtagtcctccggcccctgaatgcggctaatcctaactgcggagcagatacccacacaccagtgggcagtctgtcgtaatgggcaactctgcagcggaaccgactactttgggtgtccgtgtttccttttgttcttattctaaccacttatggtgacaattgagaggttgtgatcatattgccactgagttgaccacccggtgacgagcagaacagttgcttacctgtctgttggtcacgtatcattaagccacaaatccttgaacgctctcctattttgtcataacgcccaacacgtcaaa

SEQ ID NO: 21246 - DNA, 307 bp, synthetic construct
  source 1..307: mol_type = other DNA
tagttggtagtcctccggcccctgaatgcggctaatcctaactgcggagcagatacccacgcaccagtgggcagtctgtcgtaatgggcaactctgcagcggaaccgactactttgggtgtccgtgtttccttttgttcttatactggctacttatggtgacaattgagagattgtaaccatattgctattggattggccacccggcgacgaatagaacagttgcttacctgtttgttagtctcgtatcactgaactacaaatccttaaacaccctttaatttcgtcataacgctcaatacgttaaa

SEQ ID NO: 21247 - DNA, 307 bp, synthetic construct
  source 1..307: mol_type = other DNA
tagttggtagtcctccggcccctgaatgcggctaatcctaactgcggagcagatacccacgcaccagtgggcagtctgtcgtaatgggcaactctgcagcggaaccgactactttgggtgtccgtgtttccttttgttcttatactggctacttatggtgacaattgagggattgtaaccatattgctattggattggccacccggcgacgaatagaacagttgcttacctgtttgttagtctcgtatcactgaactacaaatccttaaacaccctttaatttcgtcataacgctcaatacgttaaa

SEQ ID NO: 21248 - DNA, 307 bp, synthetic construct; identical to SEQ ID NO: 292
  source 1..307: mol_type = other DNA

SEQ ID NO: 21249 - DNA, 307 bp, synthetic construct
  source 1..307: mol_type = other DNA
tagttggtagtcctccggcccctgaatgcggctaatcctaactgcggagcagatacccacgcaccagtgggcagtctgtcgtaatgggcaactctgcagcggaaccgactactttgggtgtccgtgtttccttttattcttatactggctacttatggtgacaattgagagattgtaaccatattgctattggattggccacccggcgacgaatagaacagttgcttacctgtttgttagtctcgtatcactgaactacaaagccttaaacaccctttaatttcatcataacgctcaatacgtcaaa

SEQ ID NO: 21250 - DNA, 307 bp, synthetic construct
  source 1..307: mol_type = other DNA
tagttggtagtcctccggcccctgaatgcggctaatcctaactgcggagcagatacccacgcaccagtgggcagtctgtcgtaatgggcaactctgcagcggaaccgactactttgggtgtccgtgtttccttttattcctatactggctacttatggtgacaattgagagattgtaaccatattgctattggattggccacccggcgacgagtagaacagttgcttacctgtttgttagtttcgtatcactgaactacaaagccttaaacaccctttaatttcatcataacgctcaatgcgttaaa

SEQ ID NO: 21251 - DNA, 306 bp, synthetic construct; identical to SEQ ID NO: 284
  source 1..306: mol_type = other DNA

SEQ ID NO: 21252 - DNA, 600 bp, synthetic construct
  source 1..600: mol_type = other DNA
aagtaattcacacagttcaatagagagggggtacaaaccagtaccaccacgaacaagcacttctgtttccccggtgaagctacatagactgtccccacggttgaaagtggcagatccgttatccgcttaagtacttcgagaagcctagtatcaccttggaatcttcgacgcgttgcgctcagcactctaccccgagtgtagcttaggctgatgagtctgggcataccccaccggcgacggtggcccaggctgcgttggcggcctacccatggctaacgccatgggacgctagttgtgaacaaggtgtgaagagcctattgagctacttaagagtcctccggcccctgaatgcggctaatcctaaccacggagcaagtgcccacaaaccagtgggtggcttgtcgtaacgcgtaagtctgtggcggaaccgactactttgggtgtccgtgtttccttttatttttatcatggctgcttatggtgacaatctaagattgttatcatatagctattggattggccatccggtgattcacagagacttgaaagctaactcaccttcctataacactcatttgtttatcaatcttatagcacaca

SEQ ID NO: 21253 - DNA, 306 bp, synthetic construct
  source 1..306: mol_type = other DNA
tagttggtagtcctccggcccctgaatgcggctaatcctaactgcggagcagatacccacgcaccagtgggcagtctgtcgtaatgggcaactctgcagcggaaccgactactttgggtgtccgtgtttccttttattcttatactggctgcttatggtgacaattgagagattgttaccatattgctattggattggccatccggtgacgaatagagcaattgtttacctatttgttagttttgtaccactgaactacaaagtcttaaacacccttaatttcatcataacgctcaatacgttaaa

SEQ ID NO: 21254 - DNA, 308 bp, synthetic construct; identical to SEQ ID NO: 295
  source 1..308: mol_type = other DNA

SEQ ID NO: 21255 - DNA, 306 bp, synthetic construct; identical to SEQ ID NO: 285
  source 1..306: mol_type = other DNA

SEQ ID NO: 21256 - DNA, 306 bp, synthetic construct
  source 1..306: mol_type = other DNA
tagttggtagtcctccggcccctgaatgcggctaatcccaactgcggagcatacaccctcaagccagggggcagtgtgtcgtaacgggcaactctgcagcggaaccgactactttgggtgtccgtgtttcattttatccctatactggctgcttatggtgacaattgagaggttgttaccatatagctattggattggccatccggtgactaatagagctattatatacctctttgttggatttataccacttagcttaaaagaagtcaaaacattacaactcgttataaaattgaacacaacaaa

SEQ ID NO: 21257 - DNA, 306 bp, synthetic construct
  source 1..306: mol_type = other DNA
taattggtaatcctccggcccctgaatgcggctaatcctaactgcggagcagacacccacacaccagtgggcggtctgtcgtaacgggtaactctgcagcggaaccgactactttgggtgtccgtgtttccttttattccttttctggctgcttatggtgacaattgagagattgttgccatatagctattggattggccatccggtgacaaacagagcaattatttatctatttgttgggtttataccacttaacttaaaagaatttaaaacattacaacttattataaaattgaacacagcaaa

SEQ ID NO: 21258 - DNA, 306 bp, synthetic construct
  source 1..306: mol_type = other DNA
tagttagtagtcctccggcccctgaatgcggctaatcctaactgcggagcacacgccctcaacccagggggtagtgtgtcgtaacgggtaactctgcagcggaaccgactactttgggtgtccgtgtttccttttatctttacattggctgcttatggtgacaattgaaagattgttaccatatagctattggattggccatccagtgtctaatagagctattatatacctctttgttgggtttataccacttagcctaaaagaagttaaaacactacaacttattatacaattgaacacagcaaa

SEQ ID NO: 21259 - DNA, 306 bp, synthetic construct
  source 1..306: mol_type = other DNA
tagttagtagtcctccggcccctgaatgcggctaatcctaactgcggagcacataccctcaacccagggggcagtgtgtcgtaacgggcaactctgcagcggaaccgactactttgggtgtccgtgtttccttttatccttatattggctgcttatggtgacaattgaaagattgttaccatatagctattggattggccatccagtgtctaatagagctattatatacctctttgttgggtttataccacttagcctaaaagaagttaagacactacaacttattatacaattgaacacagcaaa

SEQ ID NO: 21260 - DNA, 306 bp, synthetic construct
  source 1..306: mol_type = other DNA
taattggtaatcctccggcccctgaatgcggctaatcctaactgcggagcagatactcacacaccagtgggcggtctgtcgtaacgggtaactctgcagcggaaccgactactttgggtgtccgtgtttccttttattccttttctggctgcttatggtgacaatagagagattgttgccatatagctattggattggccatccggtgacaaacagagcaattatttatctatttgttgggtctataccacttaacttaaaggaatttaaaacattacaacttattataaaattgaacatagcaaa

SEQ ID NO: 21261 - DNA, 306 bp, synthetic construct
  source 1..306: mol_type = other DNA
taattggtaatcctccggcccctgaatgcggctaatcctaactgcggagcagatactcacacaccagtgggcggtctgtcgtaacgggtaactctgcagcggaaccgactactttgggtgtccgtgtttccttttattccttttctggctgcttatggtgacaatagagagattgttgccatatagctattggattggccatccggtgacaaacagagcaattatttatctatttgttgggtttataccacttaacataaaggaatttaaaacattacaacttattataaaattgaacatagcaaa

SEQ ID NO: 21262 - DNA, 306 bp, synthetic construct
  source 1..306: mol_type = other DNA
tagttagtagtcctccggcccctgaatgcggctaatcctaactgcggagcatgcaccctcaacccagggggcagtatgtcgtaacgggtaactctgcagcggaaccgactactttgggtgtccgtgtttccttttatcttttcattggctgcttatggtgacaattgaaagattgttaccatatagctattggattagccatccagtgtccaatagagccattatatacctctttgttggattcataccacttagcctaaaagaagttaagacattacaacttatcacacaattgaacacagcaaa

SEQ ID NO: 21263 - DNA, 306 bp, synthetic construct
  source 1..306: mol_type = other DNA
taattggtagtcctccggcccctgaatgcggctaatcccaactgcggagcagatacccacacaccagtgggcagtctgtcgtaacgggcaactctgcagcggaaccgactactttgggtgtccgtgtttctttttattcttacactggctgcttatggtgacaattgagagattgttgccatatagctattggattggccatccggtgacaaacagagctattgtttacttatttgttggttttgtaccactgagctacaaagtcctaagcacccttaattttattataacactcaacacaacaaa

SEQ ID NO: 21264 - DNA, 306 bp, synthetic construct
  source 1..306: mol_type = other DNA
tagttagtagtcctccggcccctgaatgcggctaatcctaactgcggagcacataccctcaacccagggggcattgtgtcgtaacgggtaactctgcagcggaaccgactactttgggtgtccgtgtttccttttattcttatattggctgcttatggtgacaattgaaaggttgttgccatatagctattggattggccatccagtgtctaatagagccattatatacctctttgttggatttataccacttaatctaagagaagttaagacactacaactcattatacaactgaacacagcaaa

SEQ ID NO: 21265 - DNA, 306 bp, synthetic construct
  source 1..306: mol_type = other DNA
tagttggtagtcctccggcccctgaatgcggctaatcctaactgtggagcatacaccctcaagccagggggtagtgtgtcgtaacgggcaactctgcagcggaaccgactactttgggtgtccgtgtttcattttatcctcacactggccgcttatggtgacaattgaaaggttgttaccatatagctattggattggccatccagcgactaacagagctattatatacctctttgttggatttataccacttagcctaaaagaagttaaaacgttgcagctcatcataaaattaaacacagcaaa

SEQ ID NO: 21266 - DNA, 306 bp, synthetic construct
  source 1..306: mol_type = other DNA
tagttagtagtcctccggcccctgaatgcggctaatcctaactgcggagcacataccctcaacccagggggcattgtgtcgtaacgggtaactctgcagcggaaccgactactttgggtgtccgtgtttccttttattcttatattggctgcttatggtgacaattgaaaggttgttgccatatagctattggattggccatccagtgtctaatagagctattatatacctctttgttggatttataccacttagtctaagagaagttaagacactacaactcattatacaactgaacacagcaaa

SEQ ID NO: 21267 - DNA, 306 bp, synthetic construct
  source 1..306: mol_type = other DNA
tagttggtagtcctccggcccctgaatgcggctaatcctaactgtggagcatacaccctcaagccagggggcagtgtgtcgtgacgggcaactccgcagcggaaccgactactttgggtgtccgtgtttcattttatccctatactggctgcttatggtgacaattgagaggttgttaccatatagctattggattggccatccggtgtctaatagagctattatatacctctttgttggatttataccacttagcttaaaagaagtcaaaacattacaactcatcatatatttaaacacagcaaa

SEQ ID NO: 21268 - DNA, 436 bp, synthetic construct
  source 1..436: mol_type = other DNA
ccccggagcgaggtataggctgtacccactgccaaaagcctttaaccgttatccgccaaccaactacgtaaaagctagtaacatcatgtttgtaaatgggtgttcgatcaggtggatttcccctccactagtttggtcgatgaggctaggaattccccacgggtgaccgtgtcctagcctgcgtggcggccaacccagcgtatgctgggacgcctttttatagacatggtgcgaagactcgcatgtgcttggttgtgagtcctccggcccctgaatgcggctaaccctaaccctggagccttgagtcacaatccagtgatggcaaggtcgtaatgagcaattccgggatgggaccgactactttgggtgtccgtgtttctcatttttcttattattgtcttatggtcacagcatatatagtatatatactgtgatc

SEQ ID NO: 21269 - DNA, 492 bp, synthetic construct
  source 1..492: mol_type = other DNA
acaccgaccaataggaggtggtcatccaggccactaaaggtcaagcacttctgtttccccggttggtttggatatgcttcacccgaggcaaaaaccgggccaatcgttatccgcaaagtgcctacgagaagcctagtagcacctttgaagccaatggttggtcgctccgttgcaaccccagcaacagacctggcagatgaggctgagcattccccaccagcgatggtggctcagcctgcgtggctgcctgcgcatccttcgggatgcgaagccagaaagtggacaaggtgtgaagagcctattgtgctcactttgagtcctccggcccctgaatgtggctaatcctaaccccgcagctactacacataagccaatgtgcaggtagtcgtaacgggcaactgtgggatggaaccaactactttgggtgtccgtgtttccttgttatctttttgaatgcctatggtgacaattgtacagtatacatttgttacc

SEQ ID NO: 21270 - DNA, 276 bp, synthetic construct
  source 1..276: mol_type = other DNA
gctaatcctaactgcggagcagatacccacacaccagtgggcagtctgtcgtaacgggcaactctgcagcggaaccgactactttgggtgtccgtgtttccttttattcatatactggctgcttatggtgacaattgaaagattgttaccatatagctactggattggccatccggtgacaaatagagcggttatatatctttttgttggttttgtaccactgaaccctatagttctaaaaactctcaatctaattatattgttcaacacagcaaa

SEQ ID NO: 21271 - DNA, 512 bp, synthetic construct
  source 1..512: mol_type = other DNA
gaggttgtataaactgttcccacggttgaaaacaacctatccgttatccgctatagtacttcgagaaacctagtaccacctttggattgttgacgcgttgcgctcagcacactaacccgtgtgtagcttgggtcgatgagtctggacatacctcactggcgacagtggtccaggctgcgttggcggcctactcatggtgaaagccatgagacgctagacatgaacaaggtgtgaagagtctattgagctactatagagtcctccggcccctgaatgcggctaatcctaaccatggagcaagtgctcacaggccagtgagttgcttgtcgtaatgcgcaagtccgtggcggaaccgactactttgggtgtccgtgtttcactttttacttttatgactgcttatggtgacaatttgatattgttaccatttagcttgtcaaatcaattgcaaaagatcctaaatcttatttatcaacttgcatcttgataactttaatttgaaaattttaaca

SEQ ID NO: 21272 - DNA, 304 bp, synthetic construct; identical to SEQ ID NO: 282
  source 1..304: mol_type = other DNA

SEQ ID NO: 21273 - DNA, 457 bp, synthetic construct
  source 1..457: mol_type = other DNA
cggtcaagcacttctgtctccccggttcgaattgatacgctccaacagggcgaaaacaatttgaatcgttacccgcaaagtgcctacgcaaagcctagtagcactttagaaaatttatggttggtcgctcagctataccccctagtagacctggcagatgaggctagaagtaccccactggcgacagtgttctagcctgcgtggctgcctgcacaccctcacgggtgtgaagccatatatttgacaaggtgtgaagagccccgtgtgctcactttgagtcctccggcccctgaatgtggctaaccttaaccctgcagctagtgcatgtaatccaacatgttgctagtcgtaatgagcaattgcgggatgggaccaactactttgggtgtccgtgtttcactttttaccttttatttgcttatggtgacaatatatatataacatatatattggcatc

SEQ ID NO: 21274 - DNA, 306 bp, synthetic construct; identical to SEQ ID NO: 286
  source 1..306: mol_type = other DNA

SEQ ID NO: 21275 - DNA, 306 bp, synthetic construct; identical to SEQ ID NO: 287
  source 1..306: mol_type = other DNA

SEQ ID NO: 21276 - DNA, 306 bp, synthetic construct
  source 1..306: mol_type = other DNA
tagttagtagtcctccggcccctgaatgcggctaatcctaactgcggagcacatgcccacaaaccagtgggtggtgtgtcgtaacgggtaactctgcagcggaaccgactactttgggtgtccgtgtttctctttattccaatactggctgcttatggtgacaattgagagattgttgccatatagctattggattggccatccggtgtcgaacagagcgatcatctacctatttgttggatttgtacctttgaattttgaagtattcaagactctcaaccttgtactacaactcaattcggcaaa

SEQ ID NO: 21277 - DNA, 306 bp, synthetic construct
  source 1..306: mol_type = other DNA
tagttagtagtcctccggcccctgaatgcggctaatcctaactgcggagcacatgcccacaaaccagtgggtggtgtgtcgtaacgggtaactctgcagcggaaccgactactttgggtgtccgtgtttctctttattccaatactggctgcttatggtgacaattgagagattgttgccatatagctattggattggccatccggtgtcgaacagagcgatcatctatctatttgttggatttgtacctttgaattttgaagtattcaagactctcaaccttgtactacaactcaattcggcaaa

SEQ ID NO: 21278 - DNA, 306 bp, synthetic construct
  source 1..306: mol_type = other DNA
tagttagtagtcctccggcccctgaatgcggctaatcctaactgcagagcacatgcccacaaaccagtgggtggtgtgtcgtaacgggtaactctgcagcggaaccgactactttgggtgtccgtgtttctctttattccaatactggctgcttatggtgacaattgagagattgttgccatatagctattggattggccatccggtgtcgaacagagcgatcatctacctatttgttggatttgtacctttgaattttgaagtattcaagactctcaaccttgtactacaactcaattcggcaaa

SEQ ID NO: 21279 - DNA, 306 bp, synthetic construct
  source 1..306: mol_type = other DNA
tggttggtagtcctccggcccctgaatgcggctaatcctaactgcggagcacatgcccacaaaccagtgggtggtgtgtcgtaacgggcaactctgcagcggaaccgactactttgggtgtccgtgtttctctttatccctatactggctgcttatggtgacaattgagagattgttgccatatagctattggattggccatccggtgtcaaatagagcgattatctatctatttgttggatttatacctttgaattttgaagtatttaagaccctcaaccttatattacaactcaattcggtaaa

SEQ ID NO: 21280 - DNA, 306 bp, synthetic construct; identical to SEQ ID NO: 288
  source 1..306: mol_type = other DNA

SEQ ID NO: 21281 - DNA, 593 bp, synthetic construct
  source 1..593: mol_type = other DNA
tcacacagttcaatagagagggggtacaaaccagtaccaccacgaacaagcacttctgtttccccggtgaagctacatagactgtccccacggttgaaagtggcagatccgttatccgcttaagtacttcgagaagcctagtatcaccttggaatcttcgacgcgttgcgctcagcactctaccccgagtgtagcttaggctgatgagtctgggcataccccaccggcgacggtggcccaggctgcgttggcggcctacccatggctaacgccatgggacgctagttgtgaacaaggtgtgaagagcctattgagctacttaagagtcctccggcccctgaatgcggctaatcctaaccacggagcaagtgcccacaaaccagtgggtggcttgtcgtaacgcgtaagtctgtggcggaaccgactactttgggtgtccgtgtttccttttatttttatcatggctgcttatggtgacaatctaagattgttatcatatagctattggattggccatccggtgattcacagagacttgaaagctaactcaccttcctataacactcatttgtttatcaatcttatagcacaca

SEQ ID NO: 21282 - DNA, 276 bp, synthetic construct
  source 1..276: mol_type = other DNA
gctaatcctaactgcggagcaggcaccctcaagccagagggcagtctgtcgtaacgggcaactctgcagcggaaccgactactttgggtgtccgtgtttccttttactcttgaactggctgcttatggtgacaattgaaagattgttaccatatagctattggactggccacccggtgacaaatagagcaattatatatctgtttgttggttttgttccattaaactataaagttttaaacacacttagatttgtcttactactcaactcagcaaa

SEQ ID NO: 21283 - DNA, 438 bp, synthetic construct; identical to SEQ ID NO: 480
  source 1..438: mol_type = other DNA

SEQ ID NO: 21284 - DNA, 473 bp, synthetic construct
  source 1..473: mol_type = other DNA
ccacatccagtggtgtttagtacaagcacttctgtttccccggagcgaggtataggctgtacccactgccaaaagcctttaaccgttatccgccaaccaactacgtaaaagctagtaacatcatgtttctaaatcggcgttcgatcaggtggatttcccctccactagtttggtcgatgaggctaggaattccccacgggtgaccgtgtcctagcctgcgtggcggccaacccagcgtatgctgggacgcctttttacagacatggtgcgaagactcgcatgtgcttggttgtgagtcctccggcccctgaatgcggctaaccttaaccctggagccttgcgtcacaatccagtgatggtaaggtcgtaatgagcaattccgggatgggaccgactactttgggtgtccgtgtttctcatttttcttattattgtcttatggtcacagcatatatagtgtatatactgtgatc

SEQ ID NO: 21285 - DNA, 339 bp, synthetic construct
  source 1..339: mol_type = other DNA
aggcgttcgatcaggtggctctcccctccactagtttggtcgatgaggctaggaaatccccacgggtgaccgtgtcctagcctgcgtggcggccaacccagcatcagctgggacgccttttcagagacatggtgtgaagactcgcatgtgcttgattgtgattcctccggcccctgaatgcggctaacctcaaccccggagccttgtattgcaatccagcaatattaaggtcgtaatgagcaattctgggacgggaccgactactttgggtgtccgtgtttcctgtttttcataaatttttcttatggtcacagcatatagtacatatatactgtgatc

SEQ ID NO: 21286 - DNA, 477 bp, synthetic construct
  source 1..477: mol_type = other DNA
ggcgccacatccagtggtgttttgtacaagcacttctgtttccccggagcgaggtataggctgtacccactgccaaaagcctttaaccgttatccgccaaccaactacgtaaaagctagtaacatcttgtttgtaatctggcgttcgatcaggtggatttcccctccactagtttggtcgatgaggctaggaatccctcacgggcgaccgtgtcctagcctgcgtggcggccaacccagcatatgctgggacgtccttttatagacatggtgtgaagactcgcatgtgcttggttgtgattcctccggcccctgaatgcggctaaccttaaccctggagccttgtattacaaaccagtgatattaaggtcgtaatgagcaattccgggacgggaccgactactttgggtgtccgtgtttcttattttacttattattgtcttatggtcacagcatatttgttaaatatactgtgatc

SEQ ID NO: 21287 - DNA, 276 bp, synthetic construct
  source 1..276: mol_type = other DNA
gctaatcctaactgcggagcagatacccacataccagtgggcagtctgtcgtaacgggcaactctgcagcggaaccgactactttgggtgtccgtgtttccttttattcttatactggctgcttatggtgacaatcgaaagactgttaccatatagctattggattggccatccagtgtctaatagagcaataatttacctttttgttggatttgtcccacttgactacagagcacttgcaacgctcaattacattatagatctcaacacaacaaa

SEQ ID NO: 21288 - DNA, 276 bp, synthetic construct
  source 1..276: mol_type = other DNA
gctaatcccaactgcggagcagacacccacaagccagtgggcagtctgtcgtaacgggcaactctgcagcggaaccgactactttgggtgtccgtgtttccttttactctcatactggctgcttatggtgacaattgagagattgttaccatatagctattggattggccatccggtgactaatagagcaattatttaccaatttgttggctttgtaccattaaatttcaaagttttaagaactctcaaccttattatagcattcaatacgacaaa

SEQ ID NO: 21289 - DNA, 276 bp, synthetic construct
  source 1..276: mol_type = other DNA
gctaatcctaactgcggagcagatacccacatgccagtgggcagtctgtcgtaatgggtaactctgcagcggaaccgactactttgggtgtccgtgtttccttttattcctacattggctgcttatggtgacaattgagagattgttaccatatagctattggattggccatccagtgacaaacagagcaattgtttatctatttgttggtttcatatcactgaatttcaaagtgttaaaaacccttaacctgatcatactacttaattcagcaaa

SEQ ID NO: 21290 - DNA, 290 bp, synthetic construct
  source 1..290: mol_type = other DNA
ggcccctgaatgcggctaatcctaactgcggagcagacgctcacacaccagtgggaagtctgtcgtaatgggcaactctgcagcggaaccgactactttgggtgtccgtgtttccttttattcttaccctggctgcttatggtgacaattgaaaggttgttaccatatagctattggattggccacccggtgacaagtagagcgattatttatttgtttgttgggtttgtaccactgaactacaaggttttaaacactttagacttcattctaatccttaactcactaaa

SEQ ID NO: 21291 - DNA, 318 bp, synthetic construct
  source 1..318: mol_type = other DNA
tcccctccactagtttggtcgatgaggctaggaaatccccacgggtgaccgtgtcctagcctgcgtggcggccaacccagcatcagctgggacgccttttcagagacatggtgtgaagactcgcatgtgcttgattgtgattcctccggcccctgaatgcggctaacctcaaccccggagccttgtattgcaatccagcaatattaaggtcgtaatgagcaattctgggacgggaccgactactttgggtgtccgtgtttcctgtttttcataaatttttcttatggtcacagcatatagtacatatatactgtgatc

SEQ ID NO: 21292 - DNA, 448 bp, synthetic construct
  source 1..448: mol_type = other DNA
gatggcccggttgatgttgatatgctccaacagggcaaaaacaactgatatcgttatccgcaaagtgcctacacagagcctagtaggattctgaaagatctttggttggtcgctcagctgcatacccagcagtagaccttgcagatgaggctggacattccccactggtaacagtggtccagcctgcgtggctgcctgcacacctcttacgaggtgtgaagccaaggattggacagggtgcgaagagccgcgtgtgctcactttgagtcctccggcccctgaatgcggctaaccttaaacctgcagccatagctcataagccaatgagtttatggtcgtaatgagtaattgcgggatgggaccgactactttgggtgtccgtgtttcactttttcctttattaattgcttatggtgacaatatatatataaatatatatattggcatc

SEQ ID NO: 21293 - DNA, 299 bp, synthetic construct
  source 1..299: mol_type = other DNA
tagtcctccggcccctgaatgcggctaatcccaactgcggagcatgcgacctcaaaccagaggatggcgtgtcgtaatgggcaactctgcagcggaaccgactactttgggtgtccgtgtttccttttacctctttactggctgcttatggtgacaattgaacagttgttaccatatagctattggattggccatccggtgacaagtagagcgattgtgtacctatttgtcggttacgtacccttaaataataaagtatataccacactacaatttatattgagacttaacaaaacgaa

SEQ ID NO: 21294 - DNA, 476 bp, synthetic construct
  source 1..476: mol_type = other DNA
ggtggtaaaccataccacttacggtcaagcacttctgtttccccggtatgcgaggaatagactctcacagggttgaagcctcaagtatcgttatccgcattggtactacgcaaagcctagtagcgcctcggaaatcccttggttggtcgttccgctagtttcccctagtagacctggcagatgaggcaggacattccccactggtgacagtggtcctgcctgcgtggctgcctgcgcacccttcggggtgcgaagccaagtgatggacaaggtgtgaagagccccgtgtgctactaatgagtcctccggcccctgaatgcggctaatccaaccccacagctattgcacacaaaccagtgtgtatatagtcgtaatgagcaattgtgggacggaaccgactactttgggtgtccgtgtttccttttattctcattatcttgcttatggtgacaatactgtgatatagtgttgttacc

SEQ ID NO: 21295 - DNA, 501 bp, synthetic construct
  source 1..501: mol_type = other DNA
ggttatcaatacgaccaataggtggtagttagccaaactaccaaaggtcaagcacttctgtttccccggtcaaagttgatatgctccaacagggcaaaaacaactgagatcgttatccgcaaagtgcctacgcaaagcctagtaacacctttgaagatttatggttggtcgttccgctatttcccatagtagacctggcagatgaggctagaaatcccccactggcgacagtgttctagcctgcgtggctgcctgcgcaccccttgggtgcgaagccatacattggacaaggtgtgaagagccccgtgtgctcactttgagtcctccggcccctgaatgtggctaaccttaaccctgcagctagtgcatgtaatccaacatgttgctagtcgtaatgagtaattgcgggacgggaccaactactttgggtgtccgtgtttcactttttttcttttaatattgcttatggtgacaatatatatagctatatatattgacacc

SEQ ID NO: 21296 - DNA, 554 bp, synthetic construct
  source 1..554: mol_type = other DNA
agtatcatacggctgctcgcgcggctgaaggagaaaacgttcgttacccggccaactacttcgagaagcctagtaccaccatgaacgaggcagagtgtttcgctcagcacaaccccagtgtagatcaggctgatgagtcactgcaacccccatgggcgaccatggcagtggctgcgttggcggcctgcccatggagaaatccatgggacgctctaattctgacatggtgtgaagagcctattgagctagctggtagtcctccggcccctgaatgcggctaatcctaactgcggagcacatgctcacaaaccagtgggtggtgtgtcgtaacgggcaactctgcagcggaaccgactactttgggtgtccgtgtttccttttattcttatattggctgcttatggtgacaatcaaggagttgttaccatatagctattggattggccatccggtgtgcaacagagcaattatttacctatttattggttttgtaccattgtcactgaagtctgtgatcactctcgagttcattttgaccctcaacacaatcaaac

SEQ ID NO: 21297 - DNA, 347 bp, synthetic construct
  source 1..347: mol_type = other DNA
gttgttgactggacgttcgatcaggtggtttaccccccactagtttggtcgatgaggctggaaattccccacgggtgaccgtgttccagcctgcgtggcggccaacccagctcatgctgggacgccctttcaatgacatggtgtgaagactcgcatgtgcttgattgtgaatcctccggcccctgaatgcggctaaccctaaccccggagccttgcatcacaatccagtgatgttagggtcgtaatgagtaattctgggatgggaccgactactttgggtgtccgtgtttctcatttttctttgaattgtcttatggtcacagcatatagtaatatatactgtgatc

SEQ ID NO: 21298 - DNA, 494 bp, synthetic construct; identical to SEQ ID NO: 522
  source 1..494: mol_type = other DNA

SEQ ID NO: 21299 - DNA, 374 bp, synthetic construct
  source 1..374: mol_type = other DNA
tcgccaaccaactacgaaacagctagtaataccctgtattcttgcgaggtgttcgatcagacagattccccctctgttagtctggtcgatgaggctagaagtaccccacaggtaactgtgttctagcctgcgtggcggccagcccagctcctgctgggacgcctttcaagagacatggtgtgaagactcgattgtgcttggttgtgagtcctccggcccctgaatgcggctaaccttaaacccggatccatgctatgcaatccagcatagttatggtcgtaatgggcaactctgggatgggaccgactactttgggtgtccgtgtttccatttttactttttgtgtcatttatggttacaattaagttgtaatc

SEQ ID NO: 21300 - DNA, 281 bp, synthetic construct
  source 1..281: mol_type = other DNA
tagttggtagtcctccggcccctgaatgcggctaatcccaactgcggagcagatacccacacaccagtgggcagtctgtcgtaatgggcaactctgcagcggaaccgactactttgggtgtccgtgtttccttttactcttatactggctgcttatggtgacaattgagagattgttaccatattgctattggattggccacccggtgacgaatagaacagttgtttacctatttgttagcctcgttccactgaactgcaaagccttgaataccctttaag

SEQ ID NO: 21301 - DNA, 406 bp, synthetic construct
  source 1..406: mol_type = other DNA
ggctgaagctgtagcgttcgttatccgcatgtctactgcgcaaaggctagtaactaactagatacttagtggtgtttcgttcagcagtaccccactgtagatcagggcaatgaggctacgcatcccccactggcgacagtggcgtagcctgcgtggtgccctgcccaggttcacgcctgggacaccactatctggacagggtgtgaagaccggcgtgcgctaggcatgagtcctccggcccctgaatgcggctaatcctaaccctgcagccattgcatgcaagccagcatgttggtggtcgtaatgagcaattgcgggatggaaccgactactttgggtgtccgtgtttcttgtttttccatttaattgtcttatggttacaagtttgtgcaacaaatttgtgacc

SEQ ID NO: 21302 - DNA, 434 bp, synthetic construct
  source 1..434: mol_type = other DNA
actagggtgttaaacttccccagaggttgaagcccgatgtatcgttatccgcatgattactaagcagagcctagtaacatcttactttatatatgggttggtcgctcagtcagttaccccctgatagacctggcagatgaggctggaaacaccccactggtaacagtgttccagcctgcgtggctgcctgcccctcttctgaggggaagcccatatgtagacaaggtgagaagagccgcgtttgctaatcatgagtcctccggcccctgaatgcggctaatccaaccccacagctactgcgcagaaaccactgcgtgggtagtcgtaatgagcaattgtgggacggaaccgactactttgggtgtccgtgtttcctgttttaccttacattgcttatggtcacaacatatattaaatcgtatatgttgttcacc

SEQ ID NO: 21303 - DNA, 276 bp, synthetic construct
  source 1..276: mol_type = other DNA
gctaatcctaactgcggagcagattcccacacgccagtgggcagtctgtcgtaatgggtaactctgcagcggaaccgactactttgggtgtccgtgtttccttttattctcatactggctgcttatggtgacaattgaaggattgttaccatatagctattggattggccatccagtgtctaatagagcaataatttacctttttgttggatttgtcccacttgactacagagcacttgcaacgctcaattacattatagatctcaacacaacaaa

SEQ ID NO: 21304 - DNA, 290 bp, synthetic construct
  source 1..290: mol_type = other DNA
ggcccctgaatgcggctaatcctaactgcggagcagatacccacaaaccagtgggcagtctgtcgtaacgggcaactctgcagcggaaccgactactttgggtgtccgtgtttccttttattcttatattggctgcttatggtgacaattgggaaattgttaccatatagctattggattggccatccggtgacaaatagagcgatcatttatctatttgttggtttcgtaccgctaaactttaaagctctaaaaactttaaatttcattttagtcctaaacacagcaaa

SEQ ID NO: 21305 - DNA, 276 bp, synthetic construct
  source 1..276: mol_type = other DNA
gctaatcccaactgcggggcagatacccacatgccagtgggcagtctgtcgtaacgggcaactctgcagcggaaccgactactttgggtgtccgtgtttccttttattattatattggctgcttatggtgacaattgagagattgttaccatatagctattggattggccatccggtatcaaatagagcaatcatttatctatttgttggatttgttccattaaattttaaagttttgcaaactctcaatttaattacattacttaattcagtgaa

SEQ ID NO: 21306 - DNA, 336 bp, synthetic construct
  source 1..336: mol_type = other DNA
gggtgttcgatcaggtggtatcccccactagtctggtcgatgaggctaggaattccccacgggcgaccgtgtcctagcctgcgtggcggccagcccagcttttgctgggacgccttttcaaagacatggtgtgaagacctgcatgtgcttggttgtgagtcctccggcccctgaatgcggctaaccctaaccctggagcccagtgacataatccaatgttatttgggtcgtaatgagtaattccgggatgggaccgactactttgggtgtccgtgtttccttttattctttatattgtcttatggtcacagcatatatagtatatatactgtgatc

SEQ ID NO: 21307 - DNA, 481 bp, synthetic construct
  source 1..481: mol_type = other DNA
aagtacctatccgttatccgctatagtacttcgagaaacctagtatcacctttggattgttgacgcgttgcgctcagcacactaacccgtgtgtagcttgggtcgatgagtctggacataccccactggcgacagtggtccaggctgcgttggcggcctactcatggtgaaaaccatgagacgctagacatgaacaaggtgtgaagagtctattgagctactatagagtcctccggcccctgaatgcggctaatcctaaccatggagcaagtgctcacagaccagtgagttgcttgtcgtaatgcgcaagtccgtggcggaaccgactactttgggtgtccgtgtttcactttttacccttatgactgcttatggtgacaatttgatattgttaccatttagcttgtcaaatcaattgcgaaagatcctaaatcttatttatcaacttgcattttgataactctaatttgaagatttaata

SEQ ID NO: 21308 - DNA, 289 bp, synthetic construct
  source 1..289: mol_type = other DNA
ggcccctgaatgcggctaatcctaactgcggagcagatacccacataccagtgggcagtctgtcgtaatgggtaactctgcagcggaaccgactactttgggtgtccgtgtttccttttattttatactggctgcttatggtgacaattgatagattgttaccatatagctattggattggccatccagtgacaagcagagctatcatctacctgtttgttggttttgttccattgaattttaaagttctaaaaactatcgactttatcttagcactcaatacggcaaa

SEQ ID NO: 21309 - DNA, 482 bp, synthetic construct
  source 1..482: mol_type = other DNA
aacaacctatccgttatccgctatagtacttcgagaaacctagtatcacctttggattgttgacgcgttgcgctcagcacactaacccgtgtgtagcttgggtcgatgagtctggacgtaccccactggcgacagtggtccaggctgcgttggcggcctactcatggtgaaaaccatgagacgctagacatgaacaaggtgtgaagagtctattgagctactatagagtcctccggcccctgaatgcggctaatcctaaccatggagcaagtgctcacaggccagtgagttgcttgtcgtaatgcgcaagtctgtggcggaaccgactactttgggtgtccgtgtttcactttttacttttatgactgcttatggtgacaatttgatattgttaccatttagcttgtcaaatcaattgcaaaagatcctaaatcttacttaccaacttgcattttgataaccttgatttgaaaattttaata

SEQ ID NO: 21310 - DNA, 276 bp, synthetic construct
  source 1..276: mol_type = other DNA
gctaatcctaactgcggagcagatacccacataccagtgggcagtctgtcgtaacgggtaactctgcagcggaaccgactactttgggtgtccgtgtttccttttattcctgatctggctgcttatggtgacaattgagaaattgttaccatatagctattggattggccatccggtgactaacagagcggttatttacttattcgttggtttcattccattgagctataaagtgctaaacactctgaattacatcctaatacttaacacaacaaa

SEQ ID NO: 21311 - DNA, 548 bp, synthetic construct
  source 1..548: mol_type = other DNA
tcgaacgccagttttatatccccctccccttaatgtaacttagaagcaaagcaaactgatcaatagggggcaatcatccagattgtcaaagatcaagcacttctgtttccccggtcaaagttgatatgctccacaagggcaaaaacaactgagatcgttatccgcaagatgcctacgcaaagcccagtagcacattgaaagatacttggttggtcgctcagctgttaacccaacagtagacctggcagatgaggctagagattcccctccggcgacggagttctagcctgcgtggctgcctgcacacccgttgggtgtgaagccaaatattggacaaggtgtgaagagccgcgtgtgctcatcttgagtcctccggcccctgaatgtggctaaccttaaacctgcagccagtgcacacagtccagtgtgtagctggtcgtaatgagtaattgcgggatgggaccaactactttgggtgtccgtgtttcactttttccttttatcattgcttatggtgacaatatatatagcatatatatattgttatc

SEQ ID NO: 21312 - DNA, 335 bp, synthetic construct
  source 1..335: mol_type = other DNA
gttcgatcaggtggattccccctccactagtttggtcgatgaggctaggaattccccacgggtgaccgtgtcctagcctgcgtggcggccaacccagcacttgctgggacgcccttttatggacatggtgtgaagactcgcatgtgcttggttgtgactcctccggcccctgaatgcggctaacctcaaccccggagccttgtgttgcaaaccagcagcattaaggtcgtaatgagtaattctgggacgggaccgactactttgggtgtccgtgtttccaatttttcttattattgtcttatggtcacagcatatttgataaatatactgtgatc

SEQ ID NO: 21313 - DNA, 530 bp, synthetic construct; identical to SEQ ID NO: 563
  source 1..530: mol_type = other DNA

SEQ ID NO: 21314 - DNA, 341 bp, synthetic construct
  source 1..341: mol_type = other DNA
tctggcgttcgatcaggtggatttcccctccactagtttggtcgatgaggctaggaatccctcacgggcgaccgtgtcctagcctgcgtggcggccaacccagcatatgctgggacgcccttttatagacatggtgtgaagactcgcatgtgcttggttgtgattcctccggcccctgaatgcggctaaccttaaccctggagccttgtattacaaaccagtaatattaaggtcgtaatgagcaattccgggacgggaccgactactttgggtgtccgtgtttcttattttacttattattgtcttatggtcacagcatatttgttaaatatactgtgatc

SEQ ID NO: 21315 - DNA, 425 bp, synthetic construct
  source 1..425: mol_type = other DNA
ggtataggctgtacccactgccaaaagcctttaaccgttatccgccaaccaactacgtaaaagctagtaacatcttgtttgtaatttggcgttcgatcaggtggattccccctccactagtttggtcgatgaggctaggaattccccacgggtgaccgtgtcctagcctgcgtggcggccaacccagcacctgctgggacgcccttttatggacatggtgtgaagactcgcatgtgcttggttgtgactcctccggcccctgaatgcggctaaccttaaccccggagccttgtgttgcaaaccagcaacattaaggtcgtaatgagtaattctgggacgggaccgactactttgggtgtccgtgtttccaatttttcttattattgtcttatggtcacagcatatttgataaatatactgtgatc

SEQ ID NO: 21316 - DNA, 339 bp, synthetic construct
  source 1..339: mol_type = other DNA
aggcgttcgatcaggtggatttcccctccactagtttggtcgatgaggctaggaatccctcacgggcgaccgtgtcctagcctgcgtggcggccaacccagcatatgctgggacgcccttttatagacatggtgtgaagactcgcatgtgcttggttgtgattcctccggcccctgaatgcggctaaccttaaccctggagccttgtattacaaaccagtgatattaaggtcgtaatgagcaattccgggacgggaccgactactttgggtgtccgtgtttctctttttactcattattgtcttatggtcacagcatatttgttaaatatactgtgatc

SEQ ID NO: 21317 - DNA, 276 bp, synthetic construct
  source 1..276: mol_type = other DNA
gctaatcccaactgcggagcagatacccacacaccagtgggcagtctgtcgtaatgggcaactctgcagcggaaccgactactttgggtgtccgtgtttccttttattcgaaaactggctgcttatggtgacaattgagagattgttaccatatagctattggattggccacccggtgacaaatagagcaatcgtttgcctatttgttggctttgttccattgaacttcaaatttttaaaaacccttaattacatcctaatacttaacacatcaaa

SEQ ID NO: 21318 - DNA, 290 bp, synthetic construct
  source 1..290: mol_type = other DNA
ggcccctgaatgcggctaatcctaactgcggagcacatgccctcaacccagggggtattgtgtcgtaacgggcaactctgcagcggaaccgactactttgggtgtccgtgtttccttttattcttacattggctgcttatggtgacaattgaaaggttgttgccatatagctattggattggccatccagcgtctaatagagctattatatacctctttgttggatttataccacttaatctaaaagaaatcaagacactacaactcattatacaactgaacacagcaag

SEQ ID NO: 21319 - DNA, 276 bp, synthetic construct
  source 1..276: mol_type = other DNA
gctaatcctaactgcggagcagatgcccacgcaccagtgggaagtctgtcgtaatgggtaactctgcagcggaaccgactactttgggtgtccgtgtttccttttattcttactatggctgcttatggtgacaattgaaaggttgttaccatatagctattggattggccatccggtgacaagtagagcgattatttacttgtttgttgggttcgtaccactgaactacaaagctctaaacactcttaactttattctaacccttaactcactaaa

SEQ ID NO: 21320 - DNA, 376 bp, synthetic construct
  source 1..376: mol_type = other DNA
taactacgtaacggctagtaacatcttgtcgtgcttagggtgttcgatcaggtgaagaaaaacccccttcactagtctggtcgatgaggctgagaagtccccacgggtaaccgtgtctcagcctgcgtggcggccagcccagcatatgctgggacgccttaagtatgacatggtgtgaagacccgcatgtgcttagctgtgagtcctccggcccctgaatgcggctaacctaaaccctggagccttggagcacaagccagtgcttgcaaggtcgtaatgagcaattccgggacgggaccgactactttgggtgtccgtgtttccttttatctcattattgttcttatggttacaatatatagagtatattgtaatc

SEQ ID NO: 21321 - DNA, 263 bp, synthetic construct
  source 1..263: mol_type = other DNA
tagttggtagtcctccggcccctgaatgcggctaatcctaactgcggagcagatacccacgcaccagtgggcagtctgtcgtaatgggcaactctgcagcggaaccgactactttgggtgtccgtgtttccttttattcttatactggctgcttatggtgacaattgagagattgttaccatattgctattggattggccacccggtgacgaatagaatagttaaacaccctttagcctcatcataacgctcaatacgttaaa

SEQ ID NO: 21322 - DNA, 276 bp, synthetic construct
  source 1..276: mol_type = other DNA
gctaatcctaactgcggagcacatgccctcaacccagggggtattgtgtcgtaacgggcaactctgcagcggaaccgactactttgggtgtccgtgtttccttttattcttacatcggctgcttatggtgacaattgaaaggttgttaccatatagctattggattggccatccagtgtctaatagagctattatatacctctttgttggatttataccacttaatctaaaagaagtcaagacactacaactcattatacaactgaacacagcaag

SEQ ID NO: 21323 - DNA, 276 bp, synthetic construct
  source 1..276: mol_type = other DNA
gctaatcctaactgcggagcacatgccctcaacccagggggtattgtgtcgtaacgggcaactctgcagcggaaccgactactttgggtgtccgtgtttccttttattcttacattggctgcttatggtgacaattgaaaggttgttgccatatagctattggattggccatccagcgtctaatagagctattatatacctctttgttggatttataccacttaatctaaaagaaatcaagacactacaactcattatacaactgaacacagcaag

SEQ ID NO: 21324 - DNA, 574 bp, synthetic construct
  source 1..574: mol_type = other DNA
tccacgtggagttgtacactgttattccggtaattttgtacgccagttttatgtacccttcccctgtaacttagaagttttgaacaaggaccaataggcagtggccagccaagctactaaaggtcaagcacttctgtttccccggtcaaagttgatatgctccaacagggcaaaaacagctgagatcgttatccgcaaggtgcctacgcaaagcctagtaaccccttgaacgatgtatggttggtcgctcagctgtaccccacagtagacctggcagatgaggctagatgttccccactggcgacagtgttctagcctgcgtggctgcctgcgcactctttgagtgcgaagccatacatttgacaaggtgtgaagagccccgtgtgctcaccttgagtcctccggcccctgaatgtggctaaccttaaccctgcagctagtacatgcaatccagcatgcagctagtcgtaatgagcaattgcgggacgggaccaactactttgggtgtccgtgtttcactttttccttttatatttgcttatggtgacaatatatagatttatatattgacacc

SEQ ID NO: 21325 - DNA, 465 bp, synthetic construct
  source 1..465: mol_type = other DNA
ggtcaaaggtcaagtacttctgtttccccggtcaaggttgatatgctccaacagggcaaaaacaaccgcgatcgttatccgcaaagcaactacgcaaagcctagtatcacttttgagaatatatggttggtcgctccactataaacccaatagtagacctggcagatgaggctagaagttccccactggtaacagtgttctagcctgcgtggctgcctgcgtgctccttgtgggcacgaagccatatatttgacaaggtgtgaagagccccgtgtgcttgttttgattcctccggcccctgaatgtggctaaccttaaccctgcagctagcgtgtgcaatccagcacaaagctagtcgtaatgagcaattgcgggatgggaccaactactttgggtgtccgtgtttcttgtttttcttttatacttgcttatggtgacaatatatataatatatatattggcatc

SEQ ID NO: 21326 - DNA, 504 bp, synthetic construct
  source 1..504: mol_type = other DNA
tagaagataaacacacagaccaataggagatgatcagccagatcattatgggtcaagcacttctgtttccccggtcgaggttgatatgctccaacagggcaaaaacaactgagatcgttatccgcaaagcgcctacgcaaagcctagtaactatctggaaattgcttggttggtcgctccgccataccccatggtagacctggcagatgaggctagaaattccccactggcgacagtgttctagcctgcgtggctgcctgcacacccttttgggtgtgaagccaagtaacggacagggtgtgaagagccccgtgtgctcgctttgagtcctccggcccctgaatgtggctaaccttaaccctgcagctagagcacacaacccagtgtgtatctagtcgtaatgagcaattgcgggatgggaccaactactttgggtgtccgtgtttcttgtttttcttttatatttgcttatggtgacaatatatagtgatatatattggcatc

SEQ ID NO: 21327 - DNA, 276 bp, synthetic construct
  source 1..276: mol_type = other DNA
gctaatcccaactgcggagcagatacccacacaccagtgggcagtctgtcgtaatgggtaactctgcagcggaaccgactactttgggtgtccgtgtttccttttattccaaaactggctgcttatggtgacaattgagagattgttaccatatagctattggattggccacccggtgataaatagagcaatcgtttacctatttgttggttttgttccattgaacttcaaagttttaaaaacccttaattacatcctaatactcaacacattaaa

SEQ ID NO: 21328 - DNA, 276 bp, synthetic construct
  source 1..276: mol_type = other DNA
gctaatcccaactgcggagcatgcgacctcaaaccagaggatggcgtgtcgtaatgggcaactctgcagcggaaccgactactttgggtgtccgtgtttccttttacctctttactggctgcttatggtgacaattgaacagttgttaccatatagctattggattggccatccggtgacaagtagagcgattgtgtacctatttgtcggttacgtacccttaaataataaagtatataccacactacaatttatattgagacttaacaaaacgaa

SEQ ID NO: 21329 - DNA, 276 bp, synthetic construct
  source 1..276: mol_type = other DNA
gctaatcccaactgcggagcagatacccacacaccagtgggcagtctgtcgtaatgggtaactctgcagcggaaccgactactttgggtgtccgtgtttccttttattccaaaactggctgcttatggtgacaattgagagactgttaccatatagctattggattggccacccggtgataaatagagcaatcgtttacctatttgttggttttgttccattgaacttcaaagttttaaaaacccttaattacatcctaatactcaacacattaaa

SEQ ID NO: 21330 - DNA, 276 bp, synthetic construct
  source 1..276: mol_type = other DNA
gctaatcccaactgcggagcagacacccacacaccagtgggcagtctgtcgtaatgggcaactctgcagcggaaccgactactttgggtgtccgtgtttccttttattccaaaactggctgcttatggtgacaattgagagattgttaccatatagctattggattggccacccggtgacaaatagagcaatcgtttacctatttgttggttttgttccattgaacttcaaagttttaaaaacccttaattacatcctaatacttaacacatcaaa

SEQ ID NO: 21331 - DNA, 311 bp, synthetic construct
  source 1..311: mol_type = other DNA
gattccccctctgttagtctggtcgatgaggctagaagtaccccacaggtaactgtgttctagcctgcgtggcggccagcccagcttctgctgggacgcctttcaagagacatggtgtgaagactcgattgtgcttggttgtgagtcctccggcccctgaatgcggctaaccttaaacccggatccatgctatgcaatccagcatagttatggtcgtaatgggcaactctgggatgggaccgactactttgggtgtccgtgtttccatttttactttttgtgtcatttatggttacaattaagttgtaatc

SEQ ID NO: 21332 - DNA, 697 bp, synthetic construct; identical to SEQ ID NO: 838
  source 1..697: mol_type = other DNA

SEQ ID NO: 21333 - DNA, 335 bp, synthetic construct
  source 1..335: mol_type = other DNA
cacgttcgatcaggtggtaacccccactagtttggtcgatgaggctaggaatcccccacgggtaaccgtgtcctagcctgcgtggcggccaacccagcgtttgctgggacgccaattcactgacatggtgcgaagacttgcatgtgcttgattgtgattcctccggcccctgaatgcggctaaccttaaccccggagccttgcagcacaatccaatgttgtggaggtcgtaatgagcaattctgggatgggaccgactactttgggtgtccgtgtttcctgtttttctcaaaattgtcttatggtcacagcatatatattgtatatactgtgatc

SEQ ID NO: 21334 - DNA, 276 bp, synthetic construct
  source 1..276: mol_type = other DNA
gctaatcctaactgtggagcatgcgcccccattccagagggtagcgtgtcgtaacgggtaactccgcagcggaaccgactactttgggtgtccgtgtttccttttattttatcactggctgcttatggtgacaattgaaagattgttgccatatagctattggattggccatccggtgacgaacagagctataatttaccaatttgtgggatttgttcctataagtttgaaagctttaaagacccttagtttaatattactactcaatagtgcaag

SEQ ID NO: 21335 - DNA, 521 bp, synthetic construct
  source 1..521: mol_type = other DNA
cccaacccccgtaacttagaagaaaagcacacagaccaataggaggtggtcacccagaccacttacggtcaagcacttctgtttccccggttgaactagatatgcttcacccgaggcaaaaactaaatcaatcgttacccgcaaagtgcctacgggaagcctagtaacactctaaaaacctatggttggtcgctccattgcaaacccagcaatagacctggcagatgaggctagacgtaccccaccagcgatggtggtctagcctgcgtggctgcctgcacaccctcatcgggtgtgaagccagaaagtggacagggtgtgaagagcctactgtgctcactttgagtcctccggcccctgaatgtggctaatcctaaccctgcagctgttgcacgcaagccagtgtgtatgcagtcgtaacgagcaattgcgggatggaaccaactactttgggtgtccgtgtttctctttattccttatgttgacctatggtgacaagtgtgcaattcacgtttgtcact

SEQ ID NO: 21336 - DNA, 430 bp, synthetic construct; identical to SEQ ID NO: 475
  source 1..430: mol_type = other DNA

SEQ ID NO: 21337 - DNA, 275 bp, synthetic construct
  source 1..275: mol_type = other DNA
gctaatcctaactgcggagcagatacccacataccagtgggcagtctgtcgtaatgggtaactctgcagcggaaccgactactttgggtgtccgtgtttccttttattttatactggctgcttatggtgacaattgatagattgttaccatatagctattggattggccatccagtgacaagcagagctatcatctacctgtttgttggttttgttccattgaattttaaagttctaaaaactattgactttatcttagcactcaatacggcaaa

SEQ ID NO: 21338 - DNA, 275 bp, synthetic construct
  source 1..275: mol_type = other DNA
gctaatcctaactgcggagcagatacccacatgccagtgggcagtctgtcgtaatgggtaactctgcagcggaaccgactactttgggtgtccgtgtttccttttattctgtattggctgcttatggtgacaattgatagattgttaccatatagctattggattggccatccagtgacaagcagagctatcatttacctgtttgttggttttgttccactgaattttaaagttctaaaaactattgactttattctagcacttaatacggcaaa

SEQ ID NO: 21339 - DNA, 275 bp, synthetic construct
  source 1..275: mol_type = other DNA
gctaatcctaactgcggagcagatacccacataccagtgggcagtctgtcgtaatgggtaactctgcagcggaaccgactactttgggtgtccgtgtttccttttattttatactggctgcttatggtgacaattgatagattgttaccatatagctattggattggccatccagtgacaagcagagctatcatctacctgtttgttggttttgttccattgaattttaaagttctaaaaactatcgactttatcttagcactcaatacggcaaa

SEQ ID NO: 21340 - DNA, 404 bp, synthetic construct
  source 1..404: mol_type = other DNA
ccaaaacagctgagatcgttatccgcaaagtgcctacgcaaagcctagtaacattttcgaagttatatggttggtcgttcagccaaaccccatggtagacctggcagatgaggctagaaataccccactggcgacagtgttctagcctgcgtggctgcctgcacaccctctgggtgtgaagccatataatagacaaggtgtgaagagccccgtgtgctcactttgagtcctccggcccctgaatgtggctaaccttaaccctgcagctagtgcatgcaatccagcatgtgtctagtcgtaatgagcaattgcgggatgggaccaactactttgggtgtccgtgcttcctttttatctctattgattgcttatggtgacaatatatagtactatatattgacacc

SEQ ID NO: 21341 - DNA, 276 bp, synthetic construct
  source 1..276: mol_type = other DNA
gctaatcctaactgtggagcatgcgcccccactccagagggtagcgtgtcgtaacgggtaactccgcagcggaaccgactactttgggtgtccgtgtttcctattattcttatattggctgcttatggtaacaattgagaggttgttgccatatagctattggattggccacccagtgacaaacagagctataatttaccaatttgtgggatttgttccaacaagtttgaaagtcttgaagacacttaatctaatattgctactcaatatcgcaaa

SEQ ID NO: 21342 - DNA, 438 bp, synthetic construct
  source 1..438: mol_type = other DNA
accccggtcaaagttgatatgctccaacagggcaaaaacagctgagatcgttatccgcaaagtgcctacgcaaagcctagtaatgcctttgaaaatttatggttggtcgttccgctattccccatagtagacctggcagatgaggctagaaactccccactggcgacagtgttctagcctgcgtggctgcctgcgcaccctttgggtgcgaagccatacattggacaaggtgtgaagagccccgtgtgctcactttgagtcctccggcccctgaatgtggctaaccttaaccctgcagctagtgcatgtaatccaacatgttgctagtcgtaatgagcaattgcgggacgggaccaactactttgggtgtccgtgtttcactttttccttttaatattgcttatggtgacagtatatatagatatatatattgacacc

SEQ ID NO: 21343 - DNA, 415 bp, synthetic construct
  source 1..415: mol_type = other DNA
ttacccaaggcaaaagctaatctcatcgttatccgcaaggtgcctacgggaagcctagtaacattctgaagatattatggttggtcgatcagttgcactcacccatgcaatagacctggcagatggggctaggcatacctcactggtaacagtggcctagcccgcgtggctgcctgcacaccttcgggtgtgaagccataatattgacagggtgcgaagagcctactgtgctcaccttgagtcctccggcccctgaatgtggctaatcctaaccccgtatccattgcacacaaaccagtgtgtctatggtcgtaatgggcaactacgggatggaaccaactactttgggtgtccgtgtttcttgtttttctttaatactgcttatggtgacattatatattgatatagtgtcatc

SEQ ID NO: 21344 - DNA, 551 bp, synthetic construct
  source 1..551: mol_type = other DNA
ggtgtacgccagttttatcacccctcccccctaatgtaacttagaagttgaacatatcgaccaacaggtaacatttatccagaatgttaaaggtcaagcacttctgtttccccggtcaaagttgatatgctccaacagggcaaaaacaaccgcgatcgttatccgcaaagcaactacgcaaagcctagtatcactttcgagagtatgtggttggtcgctccactataaacccaatagtagacctggcagatgaggctagaagttccccactggtgacagtgttctagcctgcgtggctgcctgcgtgctccttgcgagcacgaagccatatatttgacaaggtgtgaagagccccgtgtgcttgttttgagtcctccggcccctgaatgtggctaaccttaaccctgcagctagcgtgtacaatccagtacaaagctagtcgtaatgagcaattgcgggacgggaccaactactttgggtgtccgtgtttcttgtttttcttttatacttgcttatggtgacaatatatatacagcatatatattggcatc

SEQ ID NO: 21345 - DNA, 563 bp, synthetic construct
  source 1..563: mol_type = other DNA
cccccggactgagtatcaataagctgcttacgtggctgaaggagaaaacgttcgttatccggccaattacttcgagaagcttagtaccaccatggaggttgcgcagtgtttcgttccgcacaaccccagtgtagatcaggtcgatgagtcaccgcactcctcacgggcgaccgtggcggtggctgcgctggcggcctgcccatggggcaacccatgggacgcttcaatactgacatggtgcgaagagcctattgagctaattggtagtcctccggcccctgaatgcggctaatcctaactgcggagcagatacccacgagccagtgggcagtctgtcgtaatgggtaactctgcagcggaaccgactactttgggtgtccgtgtttccttttattcctacattggctgcttatggtgacaattgagagattgttaccatatagctattggattggccgtccagtgacaaacagagcgattatctatctatttgttggtttcgtaccattaaaccttagagtcctaaagaccctcaatttgattatacaattaaactctgcgaa

SEQ ID NO: 21346 - DNA, 523 bp, synthetic construct
  source 1..523: mol_type = other DNA
aacccctacccccaagtaacttagaagataagcacactcgaccaatagtgggtgattatccaaatcatcaaaggtcaagcacttctgtttccccggttgaagttgatatgctccaccagggcaaaaacaactgagatcgttatccgcaaaatgcctacacaaagcctagtatcatcttgaaaggcgcagagttggtcgttccactattccccatagtagacctggcagatgaggctagaaaacccccactggcgacagtgttctagcctgcgtggctgcctgcgtgccttgcaaggcacgaagccctgtgtttgacaaggtgtgaagagccccgtgtgctcattttgattcctccggcccctgaatgtggctaaccttaaccctgcagctagtgcacacaaaccagtgtgtatctagtcgtaatgagtaattgcgggacgggaccaactactttgggtgtccgtgtttctctttttactttttacttgcttatggtgacaatatatagatatatattgacacc

SEQ ID NO: 21347 - DNA, 449 bp, synthetic construct; identical to SEQ ID NO: 491
  source 1..449: mol_type = other DNA

SEQ ID NO: 21348 - DNA, 531 bp, synthetic construct
  source 1..531: mol_type = other DNA
gccaccctcccctaacatgtaacttagaagtttgaacgataagaccaataggtgataatcatccagattatcaaaggtcaagcacttctgtttccccggtcgatgaggatatgctttacccgaggcaaaaaccttagagatcgttatccacacactgcctacacagagcctagtaccacttttgacgtaactaggttggtcgctccctgcaaacccagcagtagacctggcagatgaggctggacgttccccactggcgacagtggtccagcctgcgtggctgcctgctcaccctattgggtgagaagcctacttattgacaaggtgcgaagagccgcgtgtgctcagtgtgcttcctccggcccctgaatgtggctaaccttaaccctgcagccgctgcccataatccaatgggtttacggtcgtaacgcgtaagtgcgggatgggaccaactactttgggtgtccgtgtttcttatttttcctttatttgcattttatggtgacaatttatggtatatagattgtcatc

SEQ ID NO: 21349 - DNA, 485 bp, synthetic construct
  source 1..485: mol_type = other DNA
taggatggtaactaaccaagttatcaaaggtcaagcacttctgtttccccggtcaaaattgatatgctccaccagggcaaaaacagttttggtcgttatccgcaaagtgcctacgcaaagcttagtaacactttgaagaatgtatggttggtcgttccgctattccccatagtagacctggcagatgaggctagaaaatccccactggtgacagtgttctagcctgcgtggctgcctgcgcacctctttgaggtgcgaagccattcctttgacaaggtgcgaagagccccgtgtgctcactttgagtcctccggcccctgaatgtggctaaccttaaccctgcagctagtgcatgcaaaccagcatgtttctagtcgtaatgagcaattgcgggatgggaccaactactttgggtgtccgtgtttctctttttacttttaaattgcttatggtgacaatatatataacacatatatattgacacc

SEQ ID NO: 21350 - DNA, 310 bp, synthetic construct; identical to SEQ ID NO: 298
  source 1..310: mol_type = other DNA

SEQ ID NO: 21351 - DNA, 413 bp, synthetic construct
  source 1..413: mol_type = other DNA
cgggaactttgtgtttgagtcgttatccgcaaagtgcctacgcaaagcttagtaacactttgaagaatgtatggttggtcgttccgctattccccatagtagacctggcagatgaggctagaaaatccccactggcgacagtgttctagcctgcgtggctgcctgcgcacctctttgaggtgcgaagccattcctttgacaaggtgcgaagagccccgtgtgctcactttgagtcctccggcccctgaatgtggctaaccttaaccctgcagctagtgcatgcaatccagcatgtctctagtcgtaatgagcaattgcgggatgggaccaactactttgggtgtccgtgtttctcttttttacttttaaattgcttatggtgacaatatatataacacatatatattgacacc

SEQ ID NO: 21352 - DNA, 439 bp, synthetic construct; identical to SEQ ID NO: 481
  source 1..439: mol_type = other DNA

SEQ ID NO: 21353 - DNA, 313 bp, synthetic construct
  source 1..313: mol_type = other DNA
cagattccccctctgttagtctggtcgatgaggctagaagtaccccacaggtaactgtgttctagcctgcgtggcggccagcccagcttctgctgggacgcctttcaagagacatggtgtgaagactcgattgtgcttggttgagagtcctccggcccctgaatgcggctaaccttaaacccggatccatgctatgcaatccagcatagttatggtcgtaatgggcaactctgggatgggaccgactactttgggtgtccgtgtttccatttttactttttgtgtcatttatggttacaattaagttgtaatc

SEQ ID NO: 21354 - DNA, 535 bp, synthetic construct
  source 1..535: mol_type = other DNA
atgccagttttatatcccctccccatgtaacttagaagataagcacacagaccaatagctggcaatcatccagattgttaatggtcaagcacttctgtctccccggtcaatgttgatatgctccaacagggcaaaaacagctgagatcgttatccgcaaagtgcctacgcaaagcctagtagcacttttgaagttatctggttggtcgctccgctgtaccccacagtagacctggcagatgaggctagagattccccgctggcgacagtgttctagcctgcgtggctgcctgcacacccttttgggtgtgaagccaaattacagacaaggtgtgaagagccccgtgtgctcactttgagtcctccggcccctgaatgtggctaaccttaaccctgcagctagagtacacaatccagtgtatttctagtcgtaatgagcaattgcgggatgggaccaactactttgggtgtccgtgtttcactttttaccttttatttgcttatggtgacaatatattgaattatatattgacacc

SEQ ID NO: 21355 - DNA, 527 bp, synthetic construct
  source 1..527: mol_type = other DNA
gcctcccctaacatgtaacttagaagtttgaacgataagaccaataggtgataatcatccagattatcaaaggtcaagcacttctgtttccccggtcgatgaggatatgctttacccgaggcaaaaaccttagagatcgttatccacacactgcctacacagagcctagtaccacttttgacgtaactaggttggtcgctccctgcaaacccagcagtagacctggcagatgaggctggacgttccccactggcgacagtggtccagcctgcgtggctgcctgctcaccctattgggtgagaagcctacttattgacaaggtgcgaagagccgcgtgtgctcagtgtgcttcctccggcccctgaatgtggctaaccttaaccctgcagccgctgcccataatccaatgggtttacggtcgtaacgcgtaagtgcgggatgggaccaactactttgggtgtccgtgtttcttatttttcctttatttgcattttatggtgacaatttatggtatatagattgtcatc

SEQ ID NO: 21356 - DNA, 548 bp, synthetic construct
  source 1..548: mol_type = other DNA
ttgtacgccagttttatatcccctttccctcaatgtaacttagaagcaaagcaaactgatcaataggggacaatcatccagattgtcaaagatcaagcacttctgtttccccggtcaaagttgatatgctccacaagggcaaaaacaactgagatcgttatccgcaagatgcctacgcaaagcctagtaacacattgaaagatacttggttggtcactcagctgttaacccgacagtagacctggcagatgaggctagagattcccctctggcgacggagttctagcctgcgtggctgcctgcacaccctttgggtgtgaagccaaatattggacaaggtgtgaagagccgcgtgtgctcatcttgagtcctccggcccctgaatgtggctaaccttaaacctgcagccagtgcacacaatccagtgtgtagctggtcgtaacgagtaattgcgggatgggaccaactactttgggtgtccgtgtttcactttttccttttattattgcttatggtgacaatatatatagcatatatatattgttatc

SEQ ID NO: 21357 - DNA, 548 bp, synthetic construct; identical to SEQ ID NO: 590
  source 1..548: mol_type = other DNA

SEQ ID NO: 21358 - DNA, 389 bp, synthetic construct
  source 1..389: mol_type = other DNA
atccgcaaagcaactacgcaaagcctagtatcacttttgagaatatatggttggtcgctccactataaacccaatagtagacctggcagatgaggctagaagttccccactggtaacagtgttctagcctgcgtggctgcctgcgtgctccttgtgggcacgaagccatatatttgacaaggtgtgaagagccccgtgtgcttgttttgattcctccggcccctgaatgtggctaaccttaaccctgcagctagcgtgtgcaatccagcacaaagctagtcgtaatgagcaattgcgggatgggaccaactactttgggtgtccgtgtttcttgtttttcttttatacttgcttatggtgacaatatatataatatatatattggcatc

SEQ ID NO: 21359 - DNA, 468 bp, synthetic construct
  source 1..468: mol_type = other DNA
tatccgctatagtacttcgagaaacctagtaccacctttggattgttgacgcgttgcgctcagcacactaacccgtgtgtagcttgggtcgatgagtctggacatacctcactggcgacagtggtccaggctgcgttggcggcctactcatggtgaaaaccatgagacgctagacatgaacaaggtgtgaagagtctattgagctactatagagtcctccggcccctgaatgcggctaatcctaaccatggagcaagtgctcacaggccagtgagttgcttgtcgtaatgcgcaagtccgtggcggaaccgactactttgggtgtccgtgtttcactttttacttttatgactgcttatggtgacaatttgatattgttaccatttagcttgtcaaatcaattacaaaagatcctaaatcttatttatcaatttgcatcttgataactttaatttgaaaatttcaaca

SEQ ID NO: 21360 - DNA, 519 bp, synthetic construct
  source 1..519: mol_type = other DNA
cccttcccctgtaacttagaagttttgaacaaggaccaataggcagtggccagccaagctactaaaggtcaagcacttctgtttccccggtcaaagttgatatgctccaacagggcaaaaacagctgagatcgttatccgcaaggtgcctacacaaagcctagtaaccccttgaacaatgtatggttggtcgctcagctgtaccccacagtagacctggcagatgaggctagatgttccccactggcgacagtgttctagcctgcgtggctgcctgcgcactctttgagtgcgaagccatacatttgacaaggtgtgaagagccccgtgtgctcaccttgagtcctccggcccctgaatgtggctaaccttaaccctgcagctagtacatgcaatccagcatgcagctagtcgtaatgagcaattgcgggacgggaccaactactttgggtgtccgtgtttcactttttccttttatatttgcttatggtgacaatatatagatttatatattgacacc

SEQ ID NO: 21361 - DNA, 348 bp, synthetic construct
  source 1..348: mol_type = other DNA
tttattggttggtcgctccactggaaaacccccccagtagacctggcagatgaggctaagtaatccccactggcgacagtgacttagcctgcgtggctgcctgcacacctggaaacaggtgtgaagccaagtaatggacaaggtgtgaagagccccgtgtgcttatcatgagtcctccggcccctgaatgcggctaatccaaccccacagctattgcacataatccaatgtgtatttagtcgtaacgggtaactgtgggacggaaccgactactttgggtgtccgtgtttcctttattctcatttaagtttcctatggtgacaaatataagtgattatatctgtcatc

SEQ ID NO: 21362 - DNA, 524 bp, synthetic construct
  source 1..524: mol_type = other DNA
tccccttatgtaacataagaagcttaaacacaatgaccaacaggtggtaacaagccatgttacttacggtcaagcactcctgtctccccggtacaaagggtgttaagtcttacccaagactgaagccttgagtatcgttacccgcataactactgaacaaagcctagtaacaccctacgatataggatggttagtcgctccaccagtgtacctcctggtagacctggcagatgaggctagagtttccccactggcgacagtgttctagcctgcgtggctgcctgctcccttatgggagaagccattctattgacaaggtgtgaagagccccgtgcgctagttatgagtcctccggcccctgaatgcggctaatccaaccccgcagccattgcatggaaaccaccatgtagatggtcgtaatgagcaattgcgggacggaaccgactactttgggtgtccgtgtttcttgtttttcttatcaattgcttatggtgacaatatatactgctaatatattgttcacc

SEQ ID NO: 21363 - DNA, 439 bp, synthetic construct; identical to SEQ ID NO: 482
  source 1..439: mol_type = other DNA

SEQ ID NO: 21364 - DNA, 311 bp, synthetic construct
  source 1..311: mol_type = other DNA
gattccccctctgttagtctggtcgatgaggctagaagtaccccacaggtaactgtgttctagcctgcgtggcggccagcccagctcctgctgggacgcctttcaagagacatggtgtgaagactcgattgtgcttggttgtgagtcctccggcccctgaatgcggctaaccttaaacccggatccatgctatgcaatccagcatagttatggtcgtaatgggcaactctgggatgggaccgactactttgggtgtccgtgtttccatttttactttttgtgtcatttatggttacaattaagttgtaatc

SEQ ID NO: 21365 - DNA, 442 bp, synthetic construct
  source 1..442: mol_type = other DNA
ggtggttatccaaaccatcaacggtcaagcacttctgtttccccggttagattgatacgctccaacagggcgaaaacaactctaatcgttatccgcaagatgcctacgcaaagcttagtatcatctttgattctatttggttggtcgttcagctacaaacccagtagtagacctggcagatgaggctagaaacaccccactggtaacagtgttctagcctgcgtggctgcctgcacaccctacgggtgtgaagccgactagttgacaaggtgtgaagagccccgtgtgctcatcttgattcctccggcccctgaatgtggctaaccttaaacctgcagccaatgtacacaatccagtgtgctgttggtcgtaatgagtaattgcgggatgggaccaactactttgggtgtccgtgtttctctttttaccttcattattgctt

SEQ ID NO: 21366 - DNA, 527 bp, synthetic construct
  source 1..527: mol_type = other DNA
atcccctccccaaatgtaacctagaagttatacacacagaccaataggcggtgatcctccagatcactaacggtcaagcacttctgtctccccggtttgaattgatacgctccaacagggcgaaaacaatttgaatcgtcacccgcaaagtgcctacgcaaagcctagtagcactttagaaaatttatggttggtcgctcagctataccccctagtagacctggcagatgaggctagaagtaccccactggcgacagtgttctagcctgcgtggctgcctgcacaccctcacgggtgtgaagccatatatttgacaaggtgtgaagagccccgtgtgctcactttgagtcctccggcccctgaatgtggctaaccttaaccctgcagctagtacatgtaatccaacatgttgctagtcgtaatgagcaattgcgggatgggaccaactactttgggtgtccgtgtttcactttttaccttttatttgcttatggtgacaatatatatataacatatatattggcatc

SEQ ID NO: 21367 - DNA, 531 bp, synthetic construct; identical to SEQ ID NO: 565
  source 1..531: mol_type = other DNA

SEQ ID NO: 21368 - DNA, 423 bp, synthetic construct
  source 1..423: mol_type = other DNA
tggagcgaggtatagacggtacccaccgtcaaaagcctttaaccgttatccgccaaccaactacgaaacagctagtaataccctgtattcttgcgaggtgttcgatcagacagattccccctctgttagtctggtcgatgaggctagaagtaccccacaggtaactgtgttctagcctgcgtggcggccagcccagcttctgctgggacgcctttcaagagacatggtgtgaagactcgattgtgcttggttgtgagtcctccggcccctgaatgcggctaaccttaaacccggatccatgctatgcaatccagcatagttatggtcgtaatgggcaactctgggatgggaccgactactttgggtgtccgtgtttccatttttactttttgtgtcatttatggttacaattaagttgtaatc

SEQ ID NO: 21369 - DNA, 644 bp, synthetic construct; identical to SEQ ID NO: 779
  source 1..644: mol_type = other DNA

SEQ ID NO: 21370 - DNA, 606 bp, synthetic construct
  source 1..606: mol_type = other DNA
gatctgggttgtccccacccagatcacccaagtggtgtagtgctctgttattccggtaaccttgcacgccagttttatcaccccttcccccacgtaacttagaagcttttaaacatagaccaacagggagcgacaaaccagtcgtgaaaggtcaagcacctctgtttccccggtcaacgttgatatgctctcccagggcaaaaacaacagcgatcgttacccgcaagatgcctacgcaaagcttagtaacgccctcgaagatactcggttggtcattcatgtgcaaccccagcattagacctggcagatgaggctagaagttccccactggcgacagtgttctagcctgcgtggctgcctgcacaccctaacgggtgtgaagcctagtattggacaaggtgtgaagagccccgtgtgctcatcttgagtcctccggcccctgaatgcggctaaccttaaacctgcagccattgctcacaatccagtgagtctatggtcgtaatgagcaattgcgggatgggaccgactactttgggtgtccgtgtttctctttttaccttacatttgagcttatggtgacaatatatagtgatatatattggcatc

SEQ ID NO: 21371 - DNA, 609 bp, synthetic construct; identical to SEQ ID NO: 664
  source 1..609: mol_type = other DNA

SEQ ID NO: 21372 - DNA, 554 bp, synthetic construct
  source 1..554: mol_type = other DNA
gagtaccaataagctgctcgcgcggctgaaggggaaaacgttcgttacccggccaattacttcgagaaacctagtaccgccatggacgttgcgcagcgtttcgctccacacaaccccagtgtagatcaggtcgatgagccaccgcattccccacgggcgaccgtggcggtggctgcgttggcggcctgcccatggggtaacccatgggacgcttcaatacagacatggtgcgaagagtctattgagctaattggtagtcctccggcccctgaatgcggctaatcctaactgcggagcaggtacccacaacccagtgggttacctgtcgtaatgggcaactctgcagcggaaccgactactttgggtgtccgtgtttccttttaacctttacactggctgcttatggtgacaattgaaagattgttaccatatagctattggattggccatcctgtgagtaatagagcgattgtatacttatttgttggctttataccactcaatttgaaagctttacagacactgaattatattgtggcattaaacacagcaaa

SEQ ID NO: 21373 - DNA, 341 bp, synthetic construct
  source 1..341: mol_type = other DNA
cttggcgttcgatcaggtggattccccctccactagtttggtcgatgaggctaggaataccccacgggtgaccgtgtcctagcctgcgtggcggccaacccagcacttgctgggacgcccttttatggacatggtgtgaagactcgcatgtgcttggttgtgactcctccggcccctgaatgcggctaaccttaaccccggagccttgtgttgcaaaccagcaacattaaggtcgtaatgagtaattctgggacgggaccgactactttgggtgtccgtgtttccaatttttctttttattgtcttatggtcacagcatatttgataaatatactgtgatc

SEQ ID NO: 21374 - DNA, 404 bp, synthetic construct
  source 1..404: mol_type = other DNA
agcccgatgtatcgttatccgcatgattactaagcagagcctagtaacatcttactttatatatgggttggtcgctcagtcagttaccccctgatagacctggcagatgaggctggaaacaccccactggtaacagtgttccagcctgcgtggctgcctgcccctcttctgaggggaagcccatatgtagacaaggtgagaagagccgcgtttgctaatcatgagtcctccggcccctgaatgcggctaatccaaccccacagctactgcgcagaaaccactgcgtgggtagtcgtaatgagcaattgtgggacggaaccgactactttgggtgtccgtgtttcctgttttaccttacattgcttatggtcacaacatatataaaatcgtatatgttgttcacc

SEQ ID NO: 21375 - DNA, 677 bp, synthetic construct
  source 1..677: mol_type = other DNA
ttctgctgtcccactcccctggtcccgtggcggctagtactctgtactcggtacctttgtacgctgtttatctccttccaatgtaatttagaagctcttaaatcaaggctcataggtggggcgcaaaccagcgctctcatgagcaagcactcctgtctccccggtgtggttgtataaactgttcccacggttgaaaacaacctatccgttatccgctatagtacttcgagaaacctagtatcacctttggattgttgacgcgttgcgctcagcacactaacccgtgtgtagcttgggtcgatgagtctggacataccccactggcgacagtggtccaggctgcgttggcggcctactcatggtgaaaaccatgagacgctagacatgaacaaggtgtgaagagtctattgagctactatagagtcctccggcccctgaatgcggctaatcctaaccatggagcaagtgctcacaggccagtgagttgcttgtcgtaatgcgcaagtccgtggcggaaccgactactttgggtgtccgtgtttcactttttacttttatgactgcttatggtgacaatttgatattgttaccatttagcttgtcaaattaattgcaaaagatcctaaatcttatttaccaacttgcattttgataaccttgatttgaaaattttaata

SEQ ID NO: 21376 - DNA, 360 bp, synthetic construct
  source 1..360: mol_type = other DNA
gggtaacccatgggacgcttcaatacagacatggtgcgaagagtctattgagctaattggtagtcctccggcccctgaatgcggctaatcctaactgcggagcaggtacccacaacccagtgggtcacctgtcgtaatgggcaactctgcagcggaaccgactactttgggtgtccgtgtttccttttaacctttacactggctgcttatggtgacaattgaaagattgttaccatatagctattggattggccatcctgtgagtaatagagcgattgtatacttatttgttggctttataccactcaatttgaaagctttacagacactgaattatattgtggcattaaacacagcaaa

SEQ ID NO: 21377 - DNA, 480 bp, synthetic construct
  source 1..480: mol_type = other DNA
aacaatcagccagattgttttaggtcaagcactcctgtttccccggtcaacgttgatatgctccaacagggcaaaaacaacagcgatcgttatccgcaaggtgcctacacagagcctagtatcatcttagaagaattgtggttggtcgctcagttgcaaacccagcaatagacctggcagatgaggctggacattccccactggtgacagtggtccagcctgcgtggctgcctgcacacctctatgaggtgtgaagccagaatttcgacaaggtgtgaagagccgcgtgtgctcaccttgagtcctccggcccctgaatgcggctaaccttaaacccgcagccatggtccacaaaccagtggatgtgtggtcgtaatgagtaattgtgggatgggaccgactactttgggtgtccgtgtttcctgtttttctttttatactgcttatggtgacaatatatataggatatatattgacacc

SEQ ID NO: 21378 - DNA, 306 bp, synthetic construct
  source 1..306: mol_type = other DNA
cttggcagatgaggctgggtattccccactggcgacagtgacccagcctgcgtggctgcctacacacctggcgacaggtgtgaagccaaaagtggacaaggtgcgaagagccccgtgtgctaattgtgattcctccggcccctgaatgcggctaatctaaccccacagccaatgcatgtaaaccaacatgtatttggtcgtaacgggtaactgtgggacggaaccgactactttgggtgtccgtgtttccttttatttttaaaatgacttgcttatggtgacaaatattggtatatatttgtcatc

SEQ ID NO: 21379 - DNA, 499 bp, synthetic construct
  source 1..499: mol_type = other DNA
agttttaaacaaagaccaataggtggtagccttccaggttactaaaggtcaagcacttctgtttccccggtcaaagttgatatgctccaacagggcaaaaacaactgagatcgttacccgcaaggtgcctacacaaagcttagtaaccccttgaacggtatatggttggtcgttcagctgtaccccacagtagacctggcagatgaggctagatgttccccactggcgacagtgttctagcctgcgtggctgcctgcgcactctctgagtgcgaagccatatatttgacaaggtgtgaagagccccgtgtgctcaccttgagtcctccggcccctgaatgtggctaaccttaaccctgcagctagtacatgcaatccagcatgcagctagtcgtaatgagcaattgcgggacgggaccaactactttgggtgtccgtgtttcactttttccttttatatttgcttatggtgacaatatatagatttatatattgacacc

SEQ ID NO: 21380 - DNA, 322 bp, synthetic construct; identical to SEQ ID NO: 307
  source 1..322: mol_type = other DNA

SEQ ID NO: 21381 - DNA, 545 bp, synthetic construct
  source 1..545: mol_type = other DNA
atcttcactttctatcattcttttcttccaagtaacttagaagctgaacaacagtccaataggaagtgaccaacccatggtcactaaggacaagcacttctgtttccccggatgcgtgaatagactctaaaagggttgaagctgtagcattcgttatccgcacttgtactacgcgatggctagtatcatcctgctctttccattggcgtttcgctcagcgtggtatcccccacgtagatcagggcaatgaggctacatgtaccccaccggcgacggtgatgtagcctgcgtggtgccccgcctgggtcttgtgcccaggacgccataggtcagacagggtgtgaagacttgagtgtgctacaagtgagtcctccggcccctgaatgcggctaatcctaaccccgcagctatcgtacgcaatccagcgtattggtagtcgtaatgagcaattgtgggatggaaccgactactttgggtgtccgtgtttcctttatttcttgacatgttgcttatggtcacaagtttatggttataaatttgtgatc

SEQ ID NO: 21382 - DNA, 588 bp, synthetic construct; identical to SEQ ID NO: 639
  source 1..588: mol_type = other DNA

SEQ ID NO: 21383 - DNA, 353 bp, synthetic construct
  source 1..353: mol_type = other DNA
cccgtaggacgcttcaatacagacatggtgcgaagagtcgattgagctagttagtagtcctccggcccctgaatgcggctaatcctaactgcggagcacatgccctcaacccagggggtattgtgtcgtaacgggcaactctgcagcggaaccgactactttgggtgtccgtgtttccttttattcttatactggctgcttatggtgacaattgaaagattgttaccatatagctattggattggccatccagtgtctaatagagctattatttacctctttgctggatttataccactcaacctaaaagaagttaaaacactacagctcattatacaactgaatacagcaaa

SEQ ID NO: 21384 - DNA, 530 bp, synthetic construct
  source 1..530: mol_type = other DNA
ccaccctcccctaacatgtaacttagaagtttgaacgataagaccaataggtgataatcatccagattatcaaaggtcaagcacttctgtttccccggtcgatgaggatatgctttacccgaggcaaaaaccttagagatcgttatccacacactgcctacacagagcctagtaccacttttgacgtaactaggttggtcgctccctgcaaacccagcagtagacctggcagatgaggctggacgttccccactggcgacagtggtccagcctgcgtggctgcctgctcaccctattgggtgagaagcctatttattgacaaggtgcgaagagccgcgtgtgctcagtgtgcttcctccggcccctgaatgtggctaaccttaaccctgcagccgctgcccataatccaatgggtttacggtcgtaacgcgtaagtgcgggatgggaccaactactttgggtgtccgtgtttcttgtttttcctttatttgcattttatggtgacaatttatggtatatagattgtcatc

SEQ ID NO: 21385 - DNA, 363 bp, synthetic construct; identical to SEQ ID NO: 340
  source 1..363: mol_type = other DNA

SEQ ID NO: 21386 - DNA, 350 bp, synthetic construct
  source 1..350: mol_type = other DNA
ggatggtatgtggttggtcgttccgctatttcccatagtagacctggcagatgaggctggaaattccccactggcgacagtgttctagcctgcgtggctgcctgcgtgtcccaacggacacgaagccatatacttgacaaggtgtgaagagccccgtgtgctcactttgagtcctccggcccctgaatgtggctaaccttaaccctgcagctaaggcacacaacccagtgtgaacttagtcgtaatgagcaattgcgggacgggaccaactactttgggtgtccgtgtttcactttttcccttttataatgcttatggtgacaatatataataacttgtatattggcacc

SEQ ID NO: 21387 - DNA, 401 bp, synthetic construct; identical to SEQ ID NO: 437
  source 1..401: mol_type = other DNA

SEQ ID NO: 21388 - DNA, 554 bp, synthetic construct; identical to SEQ ID NO: 599
  source 1..554: mol_type = other DNA

SEQ ID NO: 21389 - DNA, 554 bp, synthetic construct
  source 1..554: mol_type = other DNA
ttataggctgtactcacggctgaaaacaaacgatccgttatccgcttaggtacttcgagaagcctattaccatcttggaatcttcgacgcgttgcgctcagcactctaccccgagtgtagcttaggctgatgagtctgggcgttccccaccggtgacggtggcccaggctgcgttggcggcctacccatggctcacgccatgggacgctagttgtgaacaaggtgtgaagagcctattgagctacctaagagtcctccggcccctgaatgcggctaatcctaaccacggagcaagtgccttcagcccagaaggtagcttgtcgtaacgcgcaaggtctgtggcggaaccgactactttgggtgtcccgtgtttccccttattttcattgtggctgcttgcgggactataattgattgccatcataaagcgatttggattggccatccggagaaagttaaacacgttgtttatttattcgttggattcacctcattaacccaaattacacccagcttgatatatatagtgttgccgactagacaaaatcaccaca

SEQ ID NO: 21390 - DNA, 554 bp, synthetic construct
  source 1..554: mol_type = other DNA
gtataggctgtactcacggctgaaaacgaacgatccgttatccgcttaggtacttcgagaagcctattaccatcttggaatcttcgacgcgttgcgctcagcactctaccccgagtgtagcttaggctgatgagtctgggcgttccccaccggtgacggtggcccaggctgcgttggcggcctacccatggctcacgccatgggacgctagttgtgaacaaggtgtgaagagcctattgagctacctaagagtcctccggcccctgaatgcggctaatcctaaccacggagcaagtgccttcagcccagaaggtagcttgtcgtaacgcgcaaggtctgtggcggaaccgactactttgggtgtcccgtgtttccccttattttcattgtggctgcttgcgggactataattgattgccatcataaagcgatttggattggccatccggagaaagttaaacacgttgtttatttattcgttgcattcaccacattatcccaaattacacccacgttgatatatatagtgttgcagactagacaaaatcaccaca

SEQ ID NO: 21391 - DNA, 526 bp, synthetic construct
  source 1..526: mol_type = other DNA
cccctcccctcgtaacttagaagcaagtacacatagaccaatagcaagtagcaagccatgctacttacggtcaagcactcctgtttccccggtctgatgggatatgcttcacccgaggcaaaaactcagatgatcgttatccgcaaagtgcctacgggaagcctagtaacgccttagaaattgttaggttggtcgctcaattgctgaccccgagcaatagacttggcagatgaggctggacgtgccccaccagcgatggtggtccagcctgcgtggctgcctacccaccccaacggggtgggaagcctatcaatagacaaggtgtgaagagcctactgtgctcactttgattcctccggcccctgaatgtggctaatcctaaccccgtatctatcgcatgcgcaccagcatgtaggtagtcgtaatgggcaactacgggatggaaccaactactttgggtgtccgtgtttccttgttttcttattacttgcttatggtgacaattgtatgaaatacgattgacacc

SEQ ID NO: 21392 - DNA, 339 bp, synthetic construct
  source 1..339: mol_type = other DNA
ggttggtcgctccgttgcaaccccagcaacagacctggcagatgaggctgagcattccccaccagcgatggtggctcagcctgcgtggctgcctgcgcacccttcggggtgcgaagccagaaagtggacaaggtgtgaagagcctattgtgctcactttgagtcctccggcccctgaatgtggctaatcctaaccccgcagctactacacataagccaatgtgcaggtagtcgtaacgggtaactgtgggatggaaccaactactttgggtgtccgtgtttccttgttatccttttttaaatgcctatggtgacaattgtacagtatacacttgttacc

SEQ ID NO: 21393 - DNA, 699 bp, synthetic construct
  source 1..699: mol_type = other DNA
cgctagcacactggtatcccggtacctttgtgcgcctgttttatacaccctcccccgacagcaacttagaagatttccacacacggtcaataggcggctcagtatgccaactgggtcatgaccaagtacttctgtctccccggactgagtatcaataagctgctcacgtggctgaaggagaaaacgttcgttatccggccaattacttcgagaagcttagtaccaccatggaggttgcgcagtgtttcgttccgcacaaccccagtgtagatcaggtcgatgagtcaccgcactcctcacgggcgaccgtggcggtggctgcgctggcggcctgcccatggggcaccccatgggacgcttcaatactgacatggtgcgaagagcctattgagctaattggtaatcctccggcccctgaatgcggctaatcctaactgcggagcagataccctcgagccagtgggcagtctgtcgtaatgggcaactctgcagcggaaccgactactttgggtgtccgtgtttccttttattcctatattggctgcctatggtgacaattgagagattgttaccatatagctattggattggccatccagtgacaaacagagcgattatctacttatttgttggcttcataccattaaatcttagagtcctaaagaccctcaacttgattgtaaaatttaactctgtgaa

SEQ ID NO: 21394 - DNA, 502 bp, synthetic construct; identical to SEQ ID NO: 529
  source 1..502: mol_type = other DNA

SEQ ID NO: 21395 - DNA, 261 bp, synthetic construct
  source 1..261: mol_type = other DNA
tagcctgcgtggctgcctgcacaccctgccgggtgtgaagccagaaagtggacaaggtgtgaagagcctattgtgctcactttgagtcctccggcccctgaatgtggctaaccctaaccccgtagctgttgcatgtaacccaacatgtatgcagtcgtaatgggcaactatgggatgggaccaactactttgggtgtccgtgtttcctgttttactttttcattgcttatggtgacaattgtatctgatacacttgttacc

SEQ ID NO: 21396 - DNA, 534 bp, synthetic construct
  source 1..534: mol_type = other DNA
gccagttttatcctcccctcccccatgtaacttagaagttttgcacacagaccaataggcagtaatcatccagattacttacggtcaagcacttctgtttccccggtcaaagttgatatgctccaccagggcaaaaacagctgcgatcgttatccgcaaagcgcctacgcaaagcttagtagcattctggaagttgtctggctggtcgctccaccatttcccctggtagacctggcagatgaggctagaaattccccactggcgacagtgttctagcctgcgtggctgcctgcacaccctctgggtgtgaagccatacaatggacagggtgtgaagagccccgtgtgctcgctttgagtcctccggcccctgaatgtggctaaccttaaccctgcagctagagcacacaatccagtgtgtttctagtcgtaacgagcaattgcgggatgggaccaactactttgggtgtccgtgtttccttgttttctttaaatatttgcttatggtgacaatatatacgcatatattgacacc

SEQ ID NO: 21397 - DNA, 296 bp, synthetic construct
  source 1..296: mol_type = other DNA
cctccggcccctgaatgcggctaatcctaactgcggagcagatgctcacatgccagtgggcggtctgtcgtaacgggcaactctgcagcggaaccgactactttgggtgtccgtgtttcctttttaactttgtattggctgcatatggtgacaattgaaagattgttaccatatagctattggattggccatccggtgacgaacagagcaatcatttatttgttcgttggctttattccattgaatctcagagtttggaacactctaaattttattatctcactcaacacaacaaa

SEQ ID NO: 21398 - DNA, 296 bp, synthetic construct
  source 1..296: mol_type = other DNA
cctccggcccctgaatgcggctaatcctaactgcggagcagatgcccacatgccagtgggtagtctgtcgtaacgggcaactctgcagcggaaccgactactttgggtgtccgtgtttcctttttaaccttgtattggctgcatatggtgacaattgtaagattgttaccatatagctattggattggccatccggtgacgaacagagcaatcatttacttgttcgttggttttattccattgaatctcaaagtttggaacactctaaattttattatttcactcaacacaacaaa

SEQ ID NO: 21399 - DNA, 296 bp, synthetic construct
  source 1..296: mol_type = other DNA
cctccggcccctgaatgcggctaatcctaactgcggagcagatacccacacaccagtgggcagtctgtcgtaacgggcaactctgcagcggaaccgactactttgggtgtccgtgtttcctttttaaccttatattggctgcatatggtgacaattgaaaggttgttaccatatagctattggattggccatccggtgacgaacagagcaatcatttatttgttcgttggttttattccattgaatttcaaagtttggatctctcaaaatttcattatttcactcaacacgacaaa

SEQ ID NO: 21400 - DNA, 296 bp, synthetic construct
  source 1..296: mol_type = other DNA
cctccggcccctgaatgcggctaatcctaactgcggagcagacacccacacgccagtgggcggtctgtcgtaacgggcaactctgcagcggaaccgactactttgggtgtccgtgtttcctatttattcctattttggctgcttatggtgacaattgagagattgttaccatatagctactggattggccatccggtgacgaacagagcaatcatttatttgttcgttggttttattccattgcatctcaaagtttggaacactctaaattttattatctcactcaactcaatgaa

SEQ ID NO: 21401 - DNA, 296 bp, synthetic construct
  source 1..296: mol_type = other DNA
cctccggcccctgaatgcggctaatcctaactgcggagcagatacccacgtgccagtgggcagtctgtcgtaacgggcaactctgcagcggaaccgactactttgggtgtccgtgtttcccttttattcttacattggctgcttatggtgacaattgacagattgttaccatatagctattggattggccacccggtgacaaacagagcgatcatatacttgttcgtaggctttgttccattaaactttaaggtcttgaacaccctaaacttcattatatcactcaacacaacaaa

SEQ ID NO: 21402 - DNA, 296 bp, synthetic construct
  source 1..296: mol_type = other DNA
cctccggcccctgaatgcggctaatcctaactgcggagcagatgctcacatgccagtgggcggtctgtcgtaacgggcaactctgcagcggaaccgactactttgggtgtccgtgtttcctttttaaccttgtgttggctacatatggtgacaattgaaagattgttaccatatagctattggattggccatccggtgacgaacagatcaatcatttatttgttcgttggttttattccattgaatctcaaagtttggaacactctaaattttattatctcactcaacacaataaa

SEQ ID NO: 21403 - DNA, 296 bp, synthetic construct
  source 1..296: mol_type = other DNA
cctccggcccctgaatgcggctaatcctaactgcggagcagatgctcacatgccagtgggcggtctgtcgtaacgggcaactctgcagcggaaccgactactttgggtgtccgtgtttcctttttaaccttgtattggctgcatatggtgacaattgaaagattgttaccatatagctattggattggccatccggtgacgaacagagcaatcatttatttgttcgttggttttattcctttgaatctcaaagtttggaacactctaaattttattatctcacttaacacaacaaa

SEQ ID NO: 21404 - DNA, 296 bp, synthetic construct
  source 1..296: mol_type = other DNA
cctccggcccctgaatgcggctaatcctaactgcggagcagatgctcacatgccagtgggcggtctgtcgtaacgggcaactctgcagcggaaccgactactttgggtgtccgtgtttcctttttaaccttgtattggctgcatatggtgacaattgaaagattgttaccatatagctattggattggccatccggtgacaaacagagcaatcatttatttgttcgttggttttattccattgaatctcaaagtttgggacactctaaattttattatctcactcaacacaacaaa

SEQ ID NO: 21405 - DNA, 296 bp, synthetic construct
  source 1..296: mol_type = other DNA
cctccggcccctgaatgcggctaatcctaactgcggagcagatgctcacatgccagtgggcggtctgtcgtaacgggcaactctgcagcggaaccgactactttgggtgtccgtgtttcctttttaaccttgtactggctgcatatggtgacaattgaaagattgttaccatatagctattggattggccatccggtgacgaacagagcaatcatttatttgttcgttggttttattccattgaatctcaaagtttggaacactctaaattttattatctcactcaacacaacaaa

SEQ ID NO: 21406 - DNA, 296 bp, synthetic construct
  source 1..296: mol_type = other DNA
cctccggcccctgaatgcggctaatcctaactgcggagcagatgctcacatgccagtgggcggtctgtcgtaacgggcaactctgcagcggaaccgactactttgggtgtccgtgtttcctttttaaccttgtattggctgcatatggtgacaattgaaagattgttaccatatagctattggattggccatccggtgacgaacagagcaatcatttatttgttcgttggttttattccattgaatctcaaagtttggaacactctaaattttattatctcactcaacacaacaaa

SEQ ID NO: 21407 - DNA, 296 bp, synthetic construct
  source 1..296: mol_type = other DNA
cctccggcccctgaatgcggctaatcctaactgcggagcagatgctcacataccagtgggcggtctgtcgtaacgggcaactctgcagcggaaccgactactttgggtgtccgtgtttcctttttaaccttgtattggctgcatatggtgacaattgaaagattgttaccatatagctattggattggccatccggtgacgaacagagcaatcatttatttgttcgttggttttattccattgaatctcaaagtttggaacactctaaatttcattatctcactcaacacaacaaa

SEQ ID NO: 21408 - DNA, 296 bp, synthetic construct
  source 1..296: mol_type = other DNA
cctccggcccctgaatgcggctaatcctaactgcggagcagatgctcacatgccagtgggcggtctgtcgtaacgggcaactctgcagcggaaccgactactttgggtgtccgtgtttcctttttaaccttgtattggctgcatatggtgacaattgaaagattgttaccatatagctattggattggccatccagtgacgaacagagcaatcatttatttgttcgttggttttattcctttgaatctcaaagtttggagcactctaaattttattatcttactcaacacaacaaa

SEQ ID NO: 21409 - DNA, 296 bp, synthetic construct
  source 1..296: mol_type = other DNA
cctccggcccctgaatgcggctaatcctaactgcggagcagatgctcacacgccagtgggcggtctgtcgtaacgggcaactctgcagcggaaccgactactttgggtgtccgtgtttcctttttaaccttgtattggctgcatatggtgacaattgaaagattgttaccatatagctattggattggccatccggtgacgaacagagcaatcatttatttgttcgttggttttattccattgaatctcaaagtttggaacactctaaattttattatctcactcaacacaacaaa

SEQ ID NO: 21410 - DNA, 296 bp, synthetic construct
  source 1..296: mol_type = other DNA
cctccggcccctgaatgcggctaatcctaactgcggagcagatgctcacatgccagtgggtggtctgtcgtaacgggcaactctgcagcggaaccgactactttgggtgtccgtgtttcctttttaaccttgagttggctgcatatggtgacaattgaaagattgttaccatatagctattggattggccatccggtgacaaacagagcaatcatttatttgttcgttggttttattccattgaatctcaaagtttggaacactctaaattttattatctcactcaacacaacaag

SEQ ID NO: 21411 - DNA, 296 bp, synthetic construct
  source 1..296: mol_type = other DNA
cctccggcccctgaatgcggctaatcctaactgcggagcagatgctcacatgccagtgggtggtctgtcgtaacgggcaactctgcagcggaaccgactactttgggtgtccgtgtttcctttttaaccttgtattggctgcatatggtgacaattgaaagattgttaccatatagctattggattggccatccggtgacgaacagagctatcatttatttgttcgttggttttatcccactgaatctcaaagtttggaacactctaaattttattatctcactcaacacaacaaa

SEQ ID NO: 21412 - DNA, 296 bp, synthetic construct
  source 1..296: mol_type = other DNA
cctccggcccctgaatgcggctaatcctaactgcggagcagatactcacatgccagtgggcagtctgtcgtaacgggcaactctgcagcggaaccgactactttgggtgtccgtgtttcctttctaaccttgtattggctgcatatggtgacaattgaaagattgttaccatatagctattggattggccatccggtgacgaacagagcaatcatttatttgttcgttggttttattccattgaatctcaaagtttggaacactctaaattttattatcttactcatcacaacaaa

SEQ ID NO: 21413 - DNA, 296 bp, synthetic construct
  source 1..296: mol_type = other DNA
cctccggcccctgaatgcggctaatcctaactgcagagcagatgctcacacgccagtgggcggtctgtcgtaacgggcaactctgcagcggaaccgactactttgggtgtccgtgtttcctttttaaccttgtattggctgcatatggtgacaattgaaagattgttaccatatagctattggattggccatccggtgacgagcagaacaatcatttatttgttcgttggttttgttccattgaatctcaaagtttggaacactctaaattttattatctcactcaacacaacaaa

SEQ ID NO: 21414 - DNA, 296 bp, synthetic construct
  source 1..296: mol_type = other DNA
cctccggcccctgaatgcggctaatcctaactgcggagcagatgctcacatgccagtgggcggtctgtcgtaacgggcaactctgcagcggaaccgactactttgggtgtccgtgtttcctttttaaccttgtattggctgcatatggtgacaattgaaagattgttaccatatagctattggattggccatccggtgacgaacagagcaatcatttatttgttcgttggttttattccattgaatctcaaagtttggaacactctaaattttattatctcactcaacacaataaa

SEQ ID NO: 21415 - DNA, 296 bp, synthetic construct
  source 1..296: mol_type = other DNA
cctccggcccctgaatgcggctaatcctaactgcggagcagataccctcatgccagtgggcagtctgtcgtaacgggcaactctgcagcggaaccgactactttgggtgtccgtgtttcctttttaaccttatactggctgcatatggtgacaattgaaagattgttaccatatagctattggattggccatccggtgacgaacagagcaatcatttatttgttcgttggttttattccattgaatctcaaagcttggaaaactctaaattttattatttcactcaacacaacgaa

SEQ ID NO: 21416 - DNA, 296 bp, synthetic construct
  source 1..296: mol_type = other DNA
cctccggcccctgaatgcggctaatcctaactgcggagcagatgctcacatgccagtgggcggtctgtcgtaacgggcaactctgcagcggaaccgactactttgggtgtccgtgtttcctttttaaccttgtactggctgcatatggtgacaattgaaagattgttaccatatagctattggattggccatccggtgacgaacagagcaatcatttatttgttcgttggctttattccattgaatctcaaagtttggagcactctaaattttattatcttactcaacacaacaaa

SEQ ID NO: 21417 - DNA, 544 bp, synthetic construct
  source 1..544: mol_type = other DNA
ttgtttgatgccagttttatctccccccccaattgcaacttagaagatgtacacaaagaccaataggcagtggtcacccagaccactgaaggtcaagcacttctgtctccccggtcaaagttgatatgctccaacagggcaaaaacaacttagatcgttatccgcaaagtgcctacgcaaagcttagtaccatctttgagagcctatggttggtcgctccactgaaccccacagtagacctggcagatgaggctagaagacccccactggcgacagtgttctagcctgcgtggctgcctgcacacccttacgggtgtgaagccatatgtttgacaaggtgcgaagagccccgtgtgctcactttgagtcctccggcccctgaatgtggctaaccttaaccctgcagctagtgcacacaagccagtgtgttgctagtcgtaatgagcaattgcgggatgggaccaactactttgggtgtccgtgtttcactttttacctttattttgcttatggtgacaatatatatagtatatatattggcacc

SEQ ID NO: 21418 - DNA, 306 bp, synthetic construct
  source 1..306: mol_type = other DNA
acatgagagtcctccggcccctgaatgcggctaatcctaaccatggagcaggcagctgcaacccagcagccagcctgtcgtaacgcgcaagtccgtggcggaaccgactactttgggtgtccgtgtttccttttattcttgaatggctgcttatggtgacaatcatagattgttatcataaagcgagttggattggccatccagtgtgaatcagattaattactcccttgtttgttggatccactcccgaaacgttttactccttaacttattgaaattgtttgaagacaggatttcagtgtcaca

SEQ ID NO: 21419 - DNA, 258 bp, synthetic construct
  source 1..258: mol_type = other DNA
cgtggctgcctgtccccctccttgggggaaagccattatacagacaaggtgtgaagagccgcgtttgctaattgtgagtcctccggcccctgaatgcggctaatccaaccccacagctatcgcatggaaaccaccatgtggatagtcgtaacgggcaactgtgggacggaaccgactactttgggtgtccgtgtttccttttatattttactctatctcatggtgacaacatatagtgataaatatatgttgttaacc

SEQ ID NO: 21420 - DNA, 296 bp, synthetic construct
  source 1..296: mol_type = other DNA
cctccggcccctgaatgcggctaatcctaactgcggagcagatgctcacatgccagtgggcagtctgtcgtaacgggcaactctgcagcggaaccgactactttgggtgtccgtgtttcctttttaaccttgtattggctgcatatggtgacaattgaaagattgttaccatatagctattggattggccatccggtgacgaacagagcaatcatttacttgttcgttggttttattccattgaatatcaaagtttggaacactctaaatttcattatttcactcaacacaacaaa

SEQ ID NO: 21421 - DNA, 407 bp, synthetic construct
  source 1..407: mol_type = other DNA
aagggttgaagccacgaaagtcgttatccgcacacatactacgcaaagcctagtatttccttgaaagctcgtcggttggtcgttccgttaataccccattaacagacctggcagatgaggcaggaaactccccactggcgacagtgttcctgcctgcgtggctgcctgcacaccctttcgggtgtgaagccgactagtggacaaggtgagaagagccccgtgtgctatgtgtgagtcctccggcccctgaatgcggctaatccaaccccacatctgccgcacacaatccagtgtgtaggcagtcgtaatgggtaactgtgggacggaaccgactactttgggtgtccgtgtttcctttatttcttttatgattgcttatggtgacaatatcaagtaatattgttacc

SEQ ID NO: 21422 - DNA, 355 bp, synthetic construct
  source 1..355: mol_type = other DNA
agcgccttgaaagtctcttggttggtcgctccgctagtttcccctagtagacctggcagatgaggcaggacattccccactggcgacagtggtcctgcctgcgtggctgcctgcgcacccctaggggtgcgaagccaagtgacggacaaggtgtgaagagccccgtgtgctaccaatgagtcctccggcccctgaatgcggctaatccaaccccacagctattgcacacaagccagtgtgtatatagtcgtaatgagcaattgtgggacggaaccgactactttgggtgtccgtgtttccttttattcttattattttgcctatggtgacaatactgtgaaatagtgttgttacc

SEQ ID NO: 21423 - DNA, 512 bp, synthetic construct
  source 1..512: mol_type = other DNA
caccctgcgtaacttagaagctatgcacaagaccaataggtggtaacaatccatgttactaaaggtcaagtacttctgtttccccggcatgcgtggaataaacagtgcaaacggttgaggccacaaatgtcgttacccgcgcatgaactacgcagagcctagtatccccctgaaagtccattggttggtcgctcagctaatccccatagtagacctggcagatgaggcaagacgcaccccactggcgacagtggtcttgcctgcgtggctgcctgcacacccttcggggtgtgaagccaattgatagacagggtgtgaagagccgagtgtgcttcatgtgagtcctccggcccctgaatgcggctaatccaaccccgcagctgtggcacacaatccagtgtgtatgcagtcgtaacgggcaactgcgggacggaaccgactactttgggtgtccgtgtttccttttattctttaatcaagtacttatggtgacaataataaatattgttacc

SEQ ID NO: 21424 - DNA, 520 bp, synthetic construct
  source 1..520: mol_type = other DNA
aaataattaatgttgaagaagtttaaacacagaccaatagggagcgacaaaccagtcgtgaaaggtcaagcacctctgtttccccggtcaacgttgatatgctctcccagggcaaaaacaacagcgatcgttacccgcaagatgcctacgcaaagcttagtaacgccctcgaagatactcggttggtcattcatgtgcaaccccagcattagacctggcagatgaggctagaagttccccactggcgacagtgttctagcctgcgtggctgcctgcacaccctaacgggtgtgaagcctagtattggacaaggtgtgaagagccccgtgtgctcatcttgagtcctccggcccctgaatgcggctaaccttaaacctgcagccatagctcacaatccagtgagtctatggtcgtaatgagcaattgcgggatgggaccgactactttgggtgtccgtgtttctctttttaccttacatttgagcttatggtgacaatatatagtgatatatattggcatc

SEQ ID NO: 21425 - DNA, 438 bp, synthetic construct
  source 1..438: mol_type = other DNA
acccggcatgagaggaatagactctttcagggttgaagccacgagtgtcgttacccgcactggtactacgcaaagcctagtaacatcttgaaactctttttggttggtcgttccactagttaccccctagtagacctggcagatgaggcaggacgctccccactggcgacagtggtcctgcctgcgtggctgcctgcacacccttcggggtgtgaagccaaaagaaagacaaggtgtgaagagccccgtgtgctaccagtgaatcctccggcccctgaatgcggctaatcttaccccacagctattgcacacaatccagtgtgtatgtagtcgtaatgagcaattgtgggacggaaccgactactttgggtgtccgtgtttccttttattcccatgtttctgcttatggtgacaatactgacgtatagtgttgttacc

SEQ ID NO: 21426 - DNA, 673 bp, synthetic construct
  source 1..673: mol_type = other DNA
cataccaagggcccacgtggcggctagtactctggtacttcggtacctttgtacgcctgttttatctcccttcccaatgtaatttagaagcttttaaatcaaggctcaataggtggggcgcaaaccagcgctctcatgagcaagcactcctgtctccccggtgtggttgtataaactgttcccacggttgaaaacaacctatccgttatccgctatagtacttcgagaaacctagtatcacctttggattgttgacgcgttgcgctcagcacactaacccgtgtgtagcttgggtcgatgagtctggacataccccactggcgacagtggtccaggctgcgttggcggcctactcatggtgaaaaccatgagacgctagacatgaacaaggtgtgaagagtctattgagctactatagagtcctccggcccctgaatgcggctaatcctaaccatggagcaagtgctcacaggccagtgagttgcttgtcgtaatgcgcaagtccgtggcggaaccgactactttgggtgtccgtgtttcactttttacttttatgactgcttatggtgacaatttgatattgttaccatttagctgtcaaattaattgcaaaagatcctaagtcttacttaccaatttgcactttgataaccttgatttgaaaactttaata

SEQ ID NO: 21427 - DNA, 444 bp, synthetic construct
  source 1..444: mol_type = other DNA
gaccccggtatgcggagaataggctctcaaaagggctgaaacttcaattatcgttatccgcgcaattactacgcaaagcttagtaacttcccaagagattctttggttggccgctccgctggtaccccaccagtaggcttggcagatgaggctgagtaatccccactggcgacagtgactcagcctgcgtggctgcctacacacctggcaacaggtgtgaagccatagaaaggacagggtgtgaagagccccgtgtgctaattgtgattcctccggcccctgaatgcggctaatccaaccccacatccaatgcgcataaaccaatgcgtagttggtcgtaatgggcaactgtgggacggaaccgactactttgggtgtccgtgtttccttttattccttattattagttcatggtgacaagtataagtgtttatatttgtcatc

SEQ ID NO: 21428 - DNA, 386 bp, synthetic construct
  source 1..386: mol_type = other DNA
gacccgcactagtactacgcaaagcctagtaatatcttgaagctcttctggttggtcgttccactagtcaccccctagtagacctggcagatgaggcaggacactccccactggtgacagtggtcctgcctgcgtggctgcctgcacaccctccggggtgtgaagccaaaagaaggacaaggtgtgaagagccccgtgtgctactagtgagtcctccggcccctgaatgcggctaatcttaccccacagctattgcacacaatccagtgtgtatgtagtcgtaatgagtaattgtgggacggaaccgactactttgggtgtccgtgtttccttttattctcatgtttttgcttatggtgacaatactgacatatagtgttgttacc

SEQ ID NO: 21429 - DNA, 298 bp, synthetic construct
  source 1..298: mol_type = other DNA
gcccctgaatgcggctaatcctaaccacggagcaggcggtcgcgaaccagtgactggcttgtcgtaacgcgcaagtctgtggcggaaccgactactttgggtgtccgtgtttcctgttatttttatcatggctgcttatggtgacaatcagagattgttatcataaagcgaattggattggccatccggtgagtgttgtgtcaggtatacaactgtttgttggaaccactgtgttagctttacttctcatttaaccaattaatcaaaaacaatacgaggataaaacaacaatactaca

SEQ ID NO: 21430 - DNA, 578 bp, synthetic construct
  source 1..578: mol_type = other DNA
cttccgatctgggttgtactctattattccggtaattttgtacgccagttttatatccccacccccatgtaacttagaagttgaacacaacgaccaataggaggcaattaaccaaattgctaaaggtcaagcacttctgtttccccggtcaagattgatacgctccaccagggcgaaaacagttgagatcgttatccgcaaagtgcctacgcgaagcctagtaacattttgaagagtttatggttggtcgctccgctatttcccatagtagacctggcagatgaggctagaaattccccactggcgacagtgttctagcctgcgtggctgcctgcacacccttatgggtgtgaagccatatacttgacaaggtgtgaagagcctagtgtgctcactttgagtcctccggcccctgaatgtggctaaccttaaacccgtagctagtgcacacaatccagtgtgtggctagtcgtaatgagcaattacgggatgggaccaactactttgggtgtccgtgtttcacttttttccttttatacttgcttatggtgacaatatatagactatatattggcacc

SEQ ID NO: 21431 - DNA, 348 bp, synthetic construct
  source 1..348: mol_type = other DNA
ggtgtatggttggtcgttccgctatgaacctgatagtagacctggcagatgaggctagaaaatccccactggtaacagtgttctagcctgcgtggctgcctgcgtaccccttgtgggtacgaagccgtacatttgacaaggtgtgaagagccccgtgtgcttgctttgagtcctccggcccctgaatgtggctaaccttaaccctgcagctagtgtgcacaagccagtgcatagctagtcgtaatgagcaattgcgggatgggaccaactactttgggtgtccgtgtttcttgtttttcttttatatttgcttatggtgacaatatattcaatacatatattgacacc

SEQ ID NO: 21432 - DNA, 510 bp, synthetic construct
  source 1..510: mol_type = other DNA
taacttagaagttttgcacacagaccaatagcaagcagcataccagctgtataaggtcaagcacttctgtttccccggtcgacgttgatatgcttcaacaaggcaaaaacaacagagatcgttatccgcaagatgcctacacaaagcctagtacctcctttgacggtgtttgtctggtcgttcaggtgtttccccagcactagacctggcagatgaggctagaaactccccactggcgacagtgttctagcctgcgtggctgcctgcacacccttctgggtgtgaagccaaatactagacaaggtgtgaagagccccgtgtgctcatcttgagtcctccggcccctgaatgcggctaaccttaaacccgcagccattgctcacaatccagtgggtagatggtcgtaatgagcaattgtgggatgggaccgactactttgggtgtccgtgtttcatgttttactttatgatttgcttatggtgacaatatatagtgatatatattggcatc

SEQ ID NO: 21433 - DNA, 409 bp, synthetic construct
  source 1..409: mol_type = other DNA
caaaaacagagtagatcgttacccgcaagatgcctacgcaacgcctagtaacactttgaagtaaccttggttggtcgctcatttacaaccccagtaatagacctggcagatgaggctagatgttccccactggtgacagtgatctagcctgcgtggctgcctgcacaccctttgtgggtgtgaagccaagtttatgacaaggtgcgaagagccacgtgtgctcatcttgagtcctccggcccctgaatgcggctaaccttaaccctgcagccattgctcacaaaccagtgagtatgtggtcgtaatgagaaattgcgggacgggaccgactactttgggtgtccgtgtttcactttttaccttatttttgcttatggtgacaatatatatatagatatatattgacacc

SEQ ID NO: 21434 - DNA, 405 bp, synthetic construct; identical to SEQ ID NO: 442
  source 1..405: mol_type = other DNA

SEQ ID NO: 21435 - DNA, 484 bp, synthetic construct
  source 1..484: mol_type = other DNA
agcgcgttccccccgcgtagatcgggctgatgggtctccgcatcccccacgggcgaccgtggcggaggccgcgtggcggcccgcctatggcgaaagccataggacgccatttcagtgacagggtgtgaagagcctattgagctagttggtagtcctccggcccctgaatgcggctaatcctaaccactgagcgtccaccaacaaaccagttgggagggcgtcgtaatgggcaactcggtggcggaaccgactactttgggtgtccgtgtttcctgttgatcctattttggctgcttatggtgacaacgataagttgttatcataaagcttttgggttggccacctggaaaaagttgtcagtgtttgatattgttcggctttcacgcctaccaataagacaatcactttactacttggtttccttttatccaaaagaggaaatctctgaattttatcttcaattgctcttaaccttaacagcaaa

SEQ ID NO: 21436 - DNA, 396 bp, synthetic construct
  source 1..396: mol_type = other DNA
ccgttatccgcaaagtgcctacacagagcttagtagtattctgaaagatctttggttggtcgctcagctgcatacccagcagtagaccttgcagatgaggctggacattccccactggtaacagtggtccagcctgcgtggctgcctgcacacctctcacgaggtgtgaagccaaagattggacagggtgcgaagagccgcgtgtgctcactttgagtcctccggcccctgaatgcggctaaccttaaacccgcagccatggttcacaaaccagtgaacttatggtcgtaatgagcaattgtgggatgggaccgactactttgggtgtccgtgtttcactttttcctttattgattgcttatggtgacaatatatatatagatatatattggcatc

SEQ ID NO: 21437 - DNA, 403 bp, synthetic construct
  source 1..403: mol_type = other DNA
caaaaacagccgcgatcgttatccgcaaagcgcctacgcaaagcttagtagcactctggaagttgtctggctggtcgctccaccattccccctggtagacctggcagatgaggctagaaattccccactggcgacagtgttctagcctgcgtggctgcctgcacaccctctgggtgtgaagccatacaatggacagggtgtgaagagccccgtgtgctcgctttgagtcctccggcccctgaatgtggctaaccttaaccctgcagctagagcacacaatccagtgtgtttctagtcgtaacgagtaattgcgggatgggaccaactactttgggtgtccgtgtttccttgttttctttaaatatttgcttatggtgacaatatatacgtatatattgacacc

SEQ ID NO: 21438 - DNA, 410 bp, synthetic construct; identical to SEQ ID NO: 447
  source 1..410: mol_type = other DNA

SEQ ID NO: 21439 - DNA, 439 bp, synthetic construct; identical to SEQ ID NO: 483
  source 1..439: mol_type = other DNA

SEQ ID NO: 21440 - DNA, 259 bp, synthetic construct
  source 1..259: mol_type = other DNA
cctgcgtggctgcctgcgcacccttcggggtgcgaagccagaaagtggacaaggtgtgaagagcctattgtgctcactttgagtcctccggcccctgaatgtggctaatcctaaccccgcagctactacacataagccaatgtgcaggtagtcgtaacgggcaactgtgggatggaaccaactactttgggtgtccgtgtttccttgttatcctttttgaatgcctatggtgacaattgtacagtatacatttgttacc

SEQ ID NO: 21441 - DNA, 401 bp, synthetic construct
  source 1..401: mol_type = other DNA
ttgaagccataagcatcgttatccgctacgtgcctacgcaaaacctagtagcattttgaagcttacttggttggccgctcagccactaacccgtggtaggcctggcagatgaggctgggcacaccccactggcgacagtggcccagcctgcgtggctgcctgcccctcttcgaggggaagccatttaagtgacaaggtgtgaagagtctcgtgtgctcacgtggagtcctccggcccctgaatgtggctaatcctaaccccgcagctatcgcacacaatccagtgtgttggtagtcgtaatgggcaactgtgggatggaaccaactactttgggtgtccgtgtttcctgttttctttaaatacttgcttatggtgacaaatagtgtatactgtttgacacc

SEQ ID NO: 21442 - DNA, 385 bp, synthetic construct
  source 1..385: mol_type = other DNA
atccgcaaagtgcctacgcaaagcttagtaccatctttgagagcctatggttggtcgctccgctgaaccccacagtagacctggcagatgaggctagaagacccccactggcgacagtgttctagcctgcgtggctgcctgcacacccttacgggtgtgaagccatatgtttgacaaggtgtgaagagccccgtgtgctcactttgagtcctccggcccctgaatgtggctaaccttaaccctgcagctagtgcacacaagccagtgtgttgctagtcgtaatgagcaattgcgggatgggaccaactactttgggtgtccgtgtttcactttttacctttactttgcttatggtgacaatatatatagtatatatattgacacc

SEQ ID NO: 21443 - DNA, 265 bp, synthetic construct
  source 1..265: mol_type = other DNA
gttctagcctgcgtggctgcctgcacaccccatgggtgtgaagccaagtagttgacaaggtgtgaagagccccgtgtgctcatcttgattcctccggcccctgaatgtggctaaccttaaacctgcagccaatgtacacaatccagtgtattgttggtcgtaatgagtaattgcgggatgggaccaactactttgggtgtccgtgtttctctttttacctttattattgcttatggtgacagtatatagtgtatatattgtcact

SEQ ID NO: 21444 - DNA, 716 bp, synthetic construct
  source 1..716: mol_type = other DNA
ccatagggcccattgggcgctagcacactggtatcacggtaactttgtgcgcctgttttatctaccccctccccaatgtaacgtagaagcacgagccaagtggtcaataggtggcccagtaaaccaactgggcttagaccaagcactcctgttaccccggactgagtatcaataggctgctcacgcggctgaaggagaaaacgttcgttacccggccaactacttcgagaagcccagtaccaccatgaaggatgcgcagtgtttcgttcagcacaaccccagtgtagatcaggccgatgagtcaccgcaatccccacgggtgaccgtggcggtggctgcgctggcggcctgcccatggggcaacccgtgggacgcttcaatttcgacatggtgcgaagagtctattgagctagttggtagtcctccggcccctgaatgcggctaatcccaactgcggagcagacacccacgaaccagtgggcagtttgtcgtaatgggtaactctgcagcggaaccgactactttgggtgtccgtgtttccttttattcctacattggctgcttatggtgacaattgacagattgttaccatatagctattggattggccatccggtaacaaacagagctattatttatctttttgttggcttcgtgccgttgaatttcaaagttataacaactataaacttcatcttgacactcaatacagcaaa

SEQ ID NO: 21445 - DNA, 699 bp, synthetic construct
  source 1..699: mol_type = other DNA
cgccagcacactggtatcacggtacccttgtgcgcctgttttatccaccctctccccagcgcaacttagaagcacatatcatgcggtcaataggcggctcagtatgccaactgagttttgaccaagtacttctgttgccccggaccgagtatcaataagctactcacgtggctgaaggagaaaacgttcgttatccggccaattacttcgagaaacctagtaccaccatgaatgttgcgcggcgtttcgctccgcacaatcccagtgtagatcaggtcgatgagtcaccgcgtccctcacgggcgaccgtggcggtggctgcgctggcggcctgcccatggggcaacccatgggacgcttcaatacagacatggtgtgaagagtctattgaaataattgatagttatccggcccctgaatgcggctaatcctaactgcggagcagattcccacatgccagtgggcagtctgtcgtaatgggtaactctgcagcggaaccgactactttgggtgtccgtgtttccttttattcttgtgctggctgctaatggtgacaattgaaagattgttaccatatagctattggattggccacccagtgtctaacagagcaattgtttacctttttgttggattcatcccacttgattgtaaagcacttgtaacactcaaatacatcatagacctcaacacaacgaa

SEQ ID NO: 21446 - DNA, 480 bp, synthetic construct; identical to SEQ ID NO: 510
  source 1..480: mol_type = other DNA

SEQ ID NO: 21447 - DNA, 261 bp, synthetic construct
  source 1..261: mol_type = other DNA
agcccgcgtggctgcctgtcccccactctgggggaaagccgatgttaagacagggtgtgaagagccgcgtttgctaactgtgagtcctccggcccctgaatgcggctaatcttaccccacagctattgcatggaaaccaccatgtggatagtcgtaatgggcaactgtgggacggaaccgactactttgggtgtccgtgtttccttttattccatttattatctcatggtgacaacgtataagagttatatgttgtttacc

SEQ ID NO: 21448 - DNA, 264 bp, synthetic construct
  source 1..264: mol_type = other DNA
tgcggagcagacgcccaagctccagtgggtagtctgtcgtaacgggtaactctgcagcggaaccgactactttgggtgtccgtgtttccttttattcttacattggctgcttatggtgacaattgagagattgttaccatatagctattggattggccatccggtgacaaatagagcaattgtatatctttttgttggattcataccactcgacaaaacaaatttcagaaccttgtgttatattattagattaaatacagcaaa

SEQ ID NO: 21449 - DNA, 405 bp, synthetic construct; identical to SEQ ID NO: 443
  source 1..405: mol_type = other DNA

SEQ ID NO: 21450 - DNA, 535 bp, synthetic construct
  source 1..535: mol_type = other DNA
gttttgtcacccttccccgtaacgtaacttagaagtttgtacacttagaccaataggtgataattatccagattatcaacggtcaagcacttctgtttccccggtcaatgaggatatgcttttcccaaggcaaaaaccttagagatcgttatccccgcattgcctacacagagcctagtaccgcctttgatgtatttagactggtcgttccctgcaaacccagcagtagacctggcagatgaggctggacgttccccactggcgacagtggtccagcctgcgtggctgcctgcccacccatttgggtgggaagcctaattactgacatggtgtgaagagccgcgtgtgctcaatgtgtctcctccggcccctgaatgtggctaaccttaaccctgcagccgctgtccacaagccagtggatatacggtcgtaatgcgtaagtgcgggatgggaccaactactttgggtgtccgtgtttcctgtttttctttatacgcattttatggtgacaatttatggtatatagattgtcatc

SEQ ID NO: 21451 - DNA, 488 bp, synthetic construct
  source 1..488: mol_type = other DNA
caataggggacaatcatccagattgtcaaagatcaagcacttctgtttccccggtcaaagttgatatgctccacaagggcaaaaacaactgagatcgttatccgcaagatgcctacgcaaagcctagtaacacattgaaagatacttggttggtcactcagctgttaacccgacagtagacctggcagatgaggctagagattcccctctggcgacggagttctagcctgcgtggctgcctgcacaccctttgggtgtgaagccaaatattggacaaggtgtgaagagccgcgtgtgctcatcttgagtcctccggcccctgaatgtggctaaccttaaacctgcagccagtgcacacaatccagtgtgtagctggtcgtaacgagtaattgcgggatgggaccaactactttgggtgtccgtgtttcactttttccttttattattgcttatggtgacaatatatatagcatatatatattgttatc

SEQ ID NO: 21452 - DNA, 471 bp, synthetic construct
  source 1..471: mol_type = other DNA
tggttggtcgttccgctatgaacctgatagtagacctggcagatgaggctagaaaatccccactggtaacagtgttctagcctgcgtggctgcctgcgtaccccttgtgggtacgaagccgtacatttgacaaggtgtgaagagccccgtgtgcttgctttgagtcctccggcccctgaatgtggctaaccttaaccctgcagctagtgtgcacaagccagcgcatagctagtcgtaatgagcaattgcgggatgggaccaactactttgggtgtccgtgtgcttgctttgagtcctccggcccctgaatgtggctaaccttaaccctgcagctagtgtgcacaagccagcgcatagctagtcgtaatgagcaattgcgggatgggaccaactactttgggtgtccgtgtttcttgtttttcttttatatttgcttatggtgacaatatatttaatacatatattgacacc

SEQ ID NO: 21453 - DNA, 344 bp, synthetic construct
  source 1..344: mol_type = other DNA
ggatctggcgttcgatcaggtggatttcccctccactagtttggtcgatgaggctaggaatccctcacgggcgaccgtgtcctagcctgcgtggcggccaacccagcatatgctgggacgcccttttatagacatggtgtgaagactcgcatgtgcttggttgtgattcctccggcccctgaatgcggctaaccttaaccctggagccttgtattacaaaccagtaatattaaggtcgtaatgagcaattccgggacgggaccgactactttgggtgtccgtgtttcttattttacttattattgtcttatggtcacagcatatttgttaaatatactgtgatc

SEQ ID NO: 21454 - DNA, 336 bp, synthetic construct
  source 1..336: mol_type = other DNA
agggtcgttcaatgagaaacccactcatagacctggcagatggggctggaagtaccccactggcgacagtgttccagcccgcgtggctgcctgtcccccactctgggggaaagccgatgttaagacagggtgtgaagagccgcgtttgctaactgtgagtcctccggcccctgaatgcggctaatcttaccccacagctattgcatggaaaccaccatgtggatagtcgtaatgggcaactgtgggacggaaccgactactttgggtgtccgtgtttccttttattccatttattatctcatggtgacaacgtataagagttatatgttgtttacc

SEQ ID NO: 21455 - DNA, 464 bp, synthetic construct
  source 1..464: mol_type = other DNA
ctaaggtcaagcacttctgtttccccggttgacgttgatatgctccaacagggcaaaaacaactgatatcgttatccgcaaagtgcctacacagagcttagtaggattctgaaagatctttggttggtcgctcagctgcatacccagcagtagaccttgcagatgaggctggacattccccactggtaacagtggtccagcctgcgtggctgcctgcacacctcttatgaggtgtgaagccaaggattggacagggtgtgaagagccgcgtgtgctcactttgagtcctccggcccctgaatgcggctaaccttaaacctgcagccatggctcataaaccaatgagtttgtggtcgtaatgagtaattgcgggatgggaccgactactttgggtgtccgtgtttcactttttcctttattaattgcttatggtgacaatatatacatagatatatattggcatc

SEQ ID NO: 21456 - DNA, 308 bp, synthetic construct; identical to SEQ ID NO: 296
  source 1..308: mol_type = other DNA

SEQ ID NO: 21457 - DNA, 610 bp, synthetic construct
  source 1..610: mol_type = other DNA
ataggcggctcagtatgccaactgggtcatgaccaagcacttctgtctccccggactgagtatcaataagctgctcacgtggctgaaggagaaaacgttcgttatccggccaattacttcgagaagcttagtaccaccatggaggttgcgcagtgtttcgttccgcacaaccccagtgtagatcaggtcgatgagtcaccgcactcctcacgggcgactgtggcggtggctgcgctggcggcctgcccatggggcaccccatgggacgcttcaatactgacatggtgcgaagagcctattgagctaattggtaatcctccggcccctgaatgcggctaatcctaactgcggagcagataccctcgagccagtgggcagtctgtcgtaatgggcaactctgcagcggaaccgactactttgggtgtccgtgtttccttttattcctatattggctgcttatggtgacaattgagagattgttaccatatagctattggattggccatccagtgacaaacagagcgattatctacttatttgttggctttgtaccattaaatcttagagtccttaagaccctcaacttgattatacaatttaactctgcgaa

SEQ ID NO: 21458 - DNA, 680 bp, synthetic construct
  source 1..680: mol_type = other DNA
cggtaactttgtgcgcctgttttatctaccccctccccaatgtaacgtagaagcacgagccaagtggtcaataggtggcccagtaaaccaactgggcttagaccaagcactcctgttaccccggactgagtatcaataggctgctcacgcggctgaaggagaaaacgttcgttacccggccaactacttcgagaagcccagtaccaccatgaaggatgcgcagtgtttcgttcagcacaaccccagtgtagatcaggccgatgagtcaccgcaatccccacgggtgaccgtggcggtggctgcgctggcggcctgcccatggggcaacccgtgggacgcttcaatttcgacatggtgcgaagagtctattgagctagttggtagtcctccggcccctgaatgcggctaatcccaactgcggagcagacacccacgaaccagtgggcagtttgtcgtaatgggtaactctgcagcggaaccgactactttgggtgtccgtgtttccttttattcctacattggctgcttatggtgacaattgacagattgttaccatatagctattggattggccatccggtaacaaacagagctattatttatctttttgttggcttcgtgccgttgaatttcaaagttataacaactataaacttcatcttgacactcaatacagcaaa

SEQ ID NO: 21459 - DNA, 305 bp, synthetic construct
  source 1..305: mol_type = other DNA
ttgacctggcagatggggctagacataccccaccagcgatggtggtctagcccgcgtggctgcctgcacaccctatgggtgtgaagccagaaagtggacagggtgtgaagaacctattgtgctcactttgagtcctccggcccctgaatgtggctaatcctaaccctgcagccgttgcgcacaatccagtgtgtatgcggtcgtaatgagcaattgcgggatggaaccaactactttgggtgtccgtgtttcttgttattcctttatttgcttatggtgacactgtatagatatacattgtcatc

SEQ ID NO: 21460 - DNA, 321 bp, synthetic construct; identical to SEQ ID NO: 306
  source 1..321: mol_type = other DNA

SEQ ID NO: 21461 - DNA, 560 bp, synthetic construct; identical to SEQ ID NO: 609
  source 1..560: mol_type = other DNA

SEQ ID NO: 21462 - DNA, 620 bp, synthetic construct
  source 1..620: mol_type = other DNA
caagcggtcaatagatggctcagtgaaccaactgggcttggaccaagcacttctgttaccccggactgagtatcaataggctgctcacgcggctgaaggagaaaacgttcgttacccggccgactacttcgagaaacccagtaccaccatgaaggatgcgcagtgtttcgttcagcacaaccccagtgtagatcaggccgatgagtcaccgcaatccccacgggtgaccgtggcggtggctgcgctggcggcctgcccatggggcaacccatgggacgcttcaatttcgacatggtgcgaagagtctattgagctagttggtagtcctccggcccctgaatgcggctaatcccaactgcggagcagacacccacaaaccagtgggcagtttgtcgtaatgggtaactctgcagcggaaccgactactttgggtgtccgtgtttccttttattcctacattggctgcttatggtgacaattgatagattgttaccatatagctattggattggccatccggtaacaaacagagctattatttatctttttgttggcttcgtaccgttaaatttcaaggttataacaactataaacttcattttgacactcaatacagcaaa

SEQ ID NO: 21463 - DNA, 698 bp, synthetic construct
  source 1..698: mol_type = other DNA
ttaaaacagccttggggttgttcccactccaagggcccacgtggcggctagtactctggtacttcggtacctttgtacgcctgttttatctcccttcccaatgtaacttagaagctcttaaatcaatgctcaataggtggggcgcaaaccagcgctctcatgagcaagcactcctgtctccccggtgaggttgtataaactgttcccacggttgaaaacaacctatccgttatccgctatagtacttcgagaaacctagtaccacctttggattgttgacgcgttgcgctcagcacactaacccgtgtgtagcttgggtcgatgagtctggacatacctcactggcgacagtggtccaggctgcgttggcggcctactcatggtgaaaaccatgagacgctagacatgaacaaggtgtgaagagtctattgagctactatagagtcctccggcccctgaatgcggctaatcctaaccatggagcaagtgctcacaggccagtgagttgcttgtcgtaatgcgcaagtccgtggcggaaccgactactttgggtgtccgtgtttcactttttacttttatgactgcttatggtgacaatttgatattgttaccatttagcttgtcaaatcaattgcaaaagatcctaaatcttatttatcaacttgcatcttgataactttgatttgaaaattttaaca

SEQ ID NO: 21464 - DNA, 422 bp, synthetic construct
  source 1..422: mol_type = other DNA
gtatacgcttcaccagaggcgaaaaacgaggttatcgttatccgcaaagtgcctacgagaagcctagtagcactctcgaaacctatggctggtcgctcagctgcttgcccagcagtagacctggcagatgaggctagacattccccaccagcgatggtggtctagcctgcgtggctgcctgcacacccaatcgggtgtgaagccagaaagtggacaaggtgtgaagagcctattgtgctcactttgagtcctccggcccctgaatgtggctaatcctaaccccgtagctgttgcatgcaacccagcatgtatgcagtcgtaatgggcaactatgggatggaaccaactactttgggtgtccgtgtttcttgttttacttttcattgcttatggtgacaattgtagttgatacacttgttacc

SEQ ID NO: 21465 - DNA, 534 bp, synthetic construct
  source 1..534: mol_type = other DNA
caagcacttctgtttccccggtgtggttgtataaactgttcccacggttgaaaacaacctatccgttatccgctatagtacttcgagaaacctagtatcacctttggattgttgacgcgttgcgctcagcacactaacccgtgtgtagcttgggtcgatgagtctggacgtaccccactggcgacagtggtccaggctgcgttggcggcctactcatggtgaaaaccatgagacgctagacatgaacaaggtgtgaagagtctattgagctactatagagtcctccggcccctgaatgcggctaatcctaaccatggagcaagtgctcacaggccagtgagttgcttgtcgtaatgcgcaagtccgtggcggaaccgactactttgggtgtccgtgtttcactttttacttttatgactgcttatggtgacaatttgatattgttaccatttagcttgtcaaattaattgcaaaagatcctaaatcttatttgccaacttgcattttaataaccttgatttgaaaattttaata

SEQ ID NO: 21466 - DNA, 534 bp, synthetic construct; identical to SEQ ID NO: 573
  source 1..534: mol_type = other DNA

SEQ ID NO: 21467 - DNA, 694 bp, synthetic construct
  source 1..694: mol_type = other DNA
gcacactggtatcaaggtacctttgtgcgcctgttttatagccccttccccgaatgtaacgtagaagctgaacccaagcggtcaacaggcggctcagaacaccatctgggtcttgaccaagcacttctgttaccccggactgagtatcaataagctgctcacgcggctgaaggagaaaatgttcgttatccggccaattacttcgagaaacctagtaccaccatgaaggttgcgcagtgtttcgctccgcacaatcccagtgtagatcaggtcgatgagtcaccgcattcctcacgggcgaccgtggcggtggctgcgctggcggcctgcccatggggcaacccatgggacgcttcaatactgacatggtgcgaagagtcaattgagctaattggtagtcctccggcccctgaatgcggctaatcctaactgcggagcagatgcccaagctccagtgggtagtctgtcgtaacgggtaactctgcagcggaaccgactactttgggtgtccgtgtttccttttattcttacattggctgcttatggtgacaattgagagattgttaccatatagctattggattggccatccggtgacgaatagagcaattgtgtatctttttgttggattcataccactagacaatacaaacttcaaaaccttgtgttacatcattagattaaacacagcaag

SEQ ID NO: 21468 - DNA, 525 bp, synthetic construct
  source 1..525: mol_type = other DNA
ctgtttccccggtgtggttgtataaactgttcccacggttgaaaacaacctatccgttatccgctatagtacttcgagaaacctagtatcacctttggattgttgacgcgttgcgctcagcacactaacccgtgtgtagcttgggtcgatgagtctggacgtaccccactggcgacagtggtccaggctgcgttggcggcctactcatggtgaaaaccatgagacgctagacatgaacaaggtgtgaagagtctattgagctactatagagtcctccggcccctgaatgcggctaatcctaaccatggagcaagtgctcacaggccagtgagttgcttgtcgtaatgcgcaagtccgtggcggaaccgactactttgggtgtccgtgtttcactttttacttttatgactgcttatggtgacaatttgatattgttaccatttagcttgtcaaattaattgcaaaagatcctaaatcttatttaccaacttgcattttaataaccttgatttgaaaattttaata

SEQ ID NO: 21469 - DNA, 721 bp, synthetic construct
  source 1..721: mol_type = other DNA
cccacccacaaggcccaccgggcgttggcacactggtatcacggtacctttgtgcgcctgttttaaaacccctacccccaagcgcaacttagaagataagcacacagtccaatagagggcgtggcactccagccatgtcttggacaggcactcctgttaccccggactaagtaccaataaactgctcacgcggttgaaggggaaaacgttcgttatccggctaactacttcgaggaacctagtaacaccgtgaaagttgcagagtgtttcgctcagcacaaccccagtgtagatcaggtcgatgagtcaccacgttccccacgggcgaccgtggtggtggctgcgctggcggcctgcctatgggtcaacccataggacgctctaacatagacacggtgtgaagagtcgattgagctagttagtagtcctccggcccctgaatgcggctaatcctaactgcggagcgtgcgtccccaaaccaggagatagcgcgtcgtaacgggcaactctgcagcggaaccgactactttgggtgtccgtgtttcctttttacctctatttggctgcttatggtgacaattgaagaattgttaccatatagctattggattggccatccggtgaccaatagagctattatttacctctttgttggttttgtaccactgaaccacatagttctaaataccctaaatttgattttagtgctcaacacatcaaa

SEQ ID NO: 21470 - DNA, 557 bp, synthetic construct
  source 1..557: mol_type = other DNA
ctattattccggtaattttgtacaccagttttatatccccacccccatgtaacttagaagttgagcacaacgaccaataggaggcaattaaccaaattgctaaaggtcaagcacttctgtttccccggtcaagattgatacgctccaccagggcgaaaacagttgagatcgttatccgcaaagtgcctacgcgaagcctagtaacattttgaagagtttatggttggtcgctccgctattccccatagtagacctggcagatgaggctagaaattccccactggcgacagtgttctagcctgcgtggctgcctgcacacccttatgggtgtgaagccatatacttgacaaggtgtgaagagcctagtgtgctcactttgagtcctccggcccctgaatgtggctaaccttaaacccgtagctagtgcacacaatccagtgtgtggctagtcgtaatgagcaattacgggatgggaccaactactttgggtgtccgtgtttcactttttccttttatacttgcttatggtgacaatatatagactatatattggcacc

SEQ ID NO: 21471 - DNA, 689 bp, synthetic construct
  source 1..689: mol_type = other DNA
gccttggggttgttcccactccaagggcccacgtggcggctagtactctggtacttcggtacctttgtacgcctgttttatctcccttcccaatgtaatttagaagcttttaaatcaaggctcaataggtggggcgcaaaccagcgctctcatgagcaagcactcctgtctccccggtgtggttgtataaactgttcccacggttgaaaacaacctatccgttatccgctatagtacttcgaaaaacctagtatcacctttggattgttgacgcgttgcgctcagcacactaacccgtgtgtagcttgggtcgatgagtctggacataccccactggcgacagtggtccaggctgcgttggcggcctactcatggtgaaaaccatgagacgctagacatgaacaaggtgtgaagagtctattgagctactatagagtcctccggcccctgaatgcggctaatcctaaccatggagcaagtgcccacaggccagtgagttgcttgtcgtaatgcgcaagtccgtggcggaaccgactactttgggtgtccgtgtttcactttttacttttatgactgcttatggtgacaatttgatattgttaccatttagctgtcaaattaattgcaaaagatcctaagtcttacttaccaatttgcattttgataaccttgatttgaaaattttaata

SEQ ID NO: 21472 - DNA, 689 bp, synthetic construct
  source 1..689: mol_type = other DNA
gccttggggttgttcccactccaagggcccacgtggcggctagtactctggtacttcggtacctttgtacgcctgttttatcccccttcccaatgtaatttagaagcttttaaatcaaggctcaataggtggggcgcaaaccagcgctctcatgagcaagcactcctgtctccccggtgtggttgtataaactgttcccacggttgaaaacaacctatccgttatccgctatagtacttcgagaaacctagtatcacctttggattgttgatgcgttgcgctcagcacactaacccgtgtgtagcttgggtcgatgagtctggacataccccactggcgacagtggtccaggctgcgttggcggcctactcatggtgaaaaccatgagacgctagacatgaacaaggtgtgaagagtctattgagctactatagagtcctccggcccctgaatgcggctaatcctaaccatggagcaagtgctcgcaggccagtgagttgcttgtcgtaatgcgcaagtccgtggcggaaccgactactttgggtgtccgtgtttcactttttacttttatgactgcttatggtgacaatttgatattgttaccatttagctgtcaaattaattgcaaaagatcctaagtcttacttaccaatttgcattttgataaccttgatttgaaaattttaata

SEQ ID NO: 21473 - DNA, 693 bp, synthetic construct
  source 1..693: mol_type = other DNA
cagccttggggttgttcccactccaagggcccacgtggcggctagtactctggtacctcggtacctttgtacgcctgttttatctcccttcccaatgtaatttagaagctcttaaatcaaggctcaataggtggggcgcaaaccagcgctctcatgagcaagcactcctgtctccccggtgtggttgtataaactgttcccacggttgaaaacaacctatccgttatccggtatagtacttcgagaaacctagtatcacctttggattgttgacgcgttgcgctcagcacactaacccgtgtgtagcttgggtcgatgagtctggacataccccactggcaacagtggtccaggctgcgttggcggcctactcatggtgaaaaccatgagacgctagacatgaacaaggtgtgaagagtctattgagctactatacagtcctccggcccctgaatgcggctaatcctaaccatggagcaagtgctcacaggccagtgagttgcttgtcgtaatgcgcaagttcgtggcggaaccgactactttgggtgtccgtgtttcactttttacttttatgactgcttatggtgacaatttgatattgttaccatttagcttgtcaaattaattacaaaagatcctaaatcttacttaccaacttgcattttgacaaccttgatttgaaaatttttaata

SEQ ID NO: 21474 - DNA, 697 bp, synthetic construct
  source 1..697: mol_type = other DNA
ttaaaacagccttggggttgttcccactccaagggcccacgtggcggctagtactctggtacttcggtacctttgtacgcctgttttatctcccttcccaatgtaatttagaagcttttaaatcaaggctcaataggtggggcgcaaaccagcgctctcatgagcaagcactcctgtctccccggtgtggttgtataaactgttcccacggttgaaaacaacctatccgttatccgctatagtacttcgagaaacctagtatcacctttggattgttgacgcgttgcgctcagcacactaacccgtgtgtagcttgggtcgatgagtctggacatgccccactggcgacagtggtccaggctgcgttggcggcctactcatggtgaaaaccatgagacgctagacatgaacaaggtgtgaagagtctattgagctactatagagtcctccggcccctgaatgcggctaatcctaaccatggagcaagtgctcacaggccagtgagttgcttgtcgtaatgcgcaagtccgtggcggaaccgactactttgggtgtccgtgtttcactttttacttttatgactgcttatggtgacaatttgatattgttaccatttagctgtcaaattaattgcaaaagatcctaagtcttacttaccaatttgcattttgataaccttgatttgaaaactttaata

SEQ ID NO: 21475 - DNA, 689 bp, synthetic construct
  source 1..689: mol_type = other DNA
gccttggggttgttcccactccaagggcccacgtggcggctagtactctggtacttcggtacctttgtacgcctgttttatctcccttcccaatgtaatttagaagctttcaaatcaaggctcaataggtggggcgcaaaccagcgctctcatgagcaagcactcctgtctccccggtgtggttgtataaactgttcccacggttgaaaacaacctatccgttatccgctatagtacttcgagaaacctagtatcacctttggattgttgacgcgttgcgctcagcacactaacccgtgtgtagcttgggtcgatgagtctggacataccccactggcgacagtggtccaggctgcgttggcggcctactcatggtgaaaaccatgagacgctagacatgaacaaggtgtgaagagtctattgagctactatagagtcctccggcccctgaatgcggctaatcctaaccatggagcgagtgctcacaggccagtgagttgcttgtcgtaatgcgcaagtccgtggcggaaccgactactttgggtgtccgtgtttcactttttacttttatgactgcttatggtgacaatttgatattgttaccatttagctgtcaaattaattgcaaaagatcctaagttttacttaccaatttgcattttgataaccttgatttgaaaactttaata

SEQ ID NO: 21476 - DNA, 693 bp, synthetic construct
  source 1..693: mol_type = other DNA
aacagccttggggttgttcccactccaagggcccacgtggcggctagtactctggtacttcggtacctttgtacgcctgttttatctcccttccccatgtaatttagaagcttttaaatcaaggctcaataggtggggcgcaaaccagcgctctcatgagcaaacactcctgtctccccggtgtggttgtataaactgttcccacggttgaaaacaacctatccgttatccgctatagtacttcgagaaacctagtatcacctttggattgttgacgcgttgcgctcagcacactaacccgtgtgtagcttgggtcgatgagtctggacataccccactggcgacagtggtccaggctgcgttggcggcctactcatggtgaaaaccatgagacgctagacatgaacaaggtgtgaagagtctattgagctactatagagtcctccggcccctgaatgcggctaatcctaaccatggagcaagtgctcacaggccagtgagttgcttgtcgtaatgcgcaagtccgtggcggaaccgactactttgggtgtccgtgtttcactttttacttttatgactgcttatggtgacaatttgatattgttaccatttagctgtcaaattaattgcaaaagatcctaagtcttacttaccaatttgcattttgataaccttgatttgaaaattttaata

SEQ ID NO: 21477 - DNA, 689 bp, synthetic construct
  source 1..689: mol_type = other DNA
gccttggggttgttcccactccaagggcccacgtggcggctagtactctggtacttcggtacctttgtacgcctgttttatctcccttcccaatgtaatttagaagcttttaaatcaaggctcaataggtggggcgcaaaccagcgctctcgtgagcaagcactcctgtctccccggtgtggttgtataaactgttcccacggttgaaaacaacctatccgttatccgctatagtacttcgagaaacctagtatcacctttggattgttgacgcgttgcgctcagcacactaacccgtgtgtagcttgggtcgatgagtctggacataccccactggtgacagtggtccaggctgcgttggcggcctactcatggtgaaaaccatgagacgctagacatgaacaaggtgtgaagagtctattgagctactatagagtcctccggcccctgaatgcggctaatcctaaccatggagcaagtgctcacaggccagtgagttgcttgtcgtaatgcgcaagtccgtggcggaaccgactactttgggtgtccgtgtttcactttttacttttacgactgcttatggtgacaatttgatattgttaccatttagctgtcaaattaattgcaaaagatcctaagtcttacttatcaatttgcattttgataaccttgatttgaaaattttaata

SEQ ID NO: 21478 - DNA, 689 bp, synthetic construct
  source 1..689: mol_type = other DNA
gccttggggttgttcccactccaagggcccacgtggcggctagtactctggtacttcggtacctttgtacgcctgttttatctcccttcccaatgtaatttagaagcttttacatcaaggctcaataggtggggcgcaaaccagcgctctcatgagcaagcactcctgtctccccggtgtggttgtataaactgttcccacggttgaaaacaacctatccgttatccgctatagtacttcgagaaacctagtatcacctttggattgttgacgcgttgcgctcagcacactaacccgtgtgtagcttgggtcgatgagtctggacataccccactggcgacagtggtccaggctgcgttggcggcctactcatggtgaaaaccatgagacgctagacatgaacaaggtgtgaagagtctattgagctactatagagtcctccggcccctgaatgcggctaatcctaaccatggagcaagtgctcacaggccagtgagttgcttgtcgtaatgcgcaagtccgtggcggaaccgactactttgggtgtccgtgtttcactttttacttttatgactgcttatggtgacaatttgatattgttaccatttagctgtcaaattaattgcaaaagatcctaagtcttacttaccaatttgcattttgataaccttgatttgaaaattttaata

SEQ ID NO: 21479 - DNA, 689 bp, synthetic construct
  source 1..689: mol_type = other DNA
gccttggggttgttcccactccaagggcccacgtggcggctagtactctggtacttcggtacctttgtacgcctgttttatctcccttcccagtgtaatttagaagcttttaaatcaaggctcaataggtggggcgcaaaccagcgctctcatgagcaagcactcctgtctccccggtgtggttgtataaactgttcccacggttgaaaacaacctatccgttatccgctatagtacttcgagaaacctagtatcacctttggattgttgacgcgttgcgctcagcacactaacccgtgtgtagcttgggtcgatgagtctggacacaccccactggcgacagtggtccaggctgcgttggcggcctactcatggtgaaaaccatgagacgctagacatgaacaaggtgtgaagagtctattgagctactatagagtcctccggcccctgaatgcggctaatcctaaccatggagcaagtgctcacaggccagtgagttgcttgtcgtaatgcgcaagtccgtggcggaaccgactactttgggtgtccgtgtttcactttttacttttatgactgcttatggtgacaatttgatattgttaccatttagctgtcaaattaattgcaaaagatcctaagtcttacttaccaatttgcattttgataaccttgatttgaaaattttaata

SEQ ID NO: 21480 - DNA, 689 bp, synthetic construct
  source 1..689: mol_type = other DNA
gccttggggttgttcccactccaagggcccacgtggcggctagtactctggtacttcggtacctttgtacgcctgttttatctcccttcccaatgtaatttagaagcttttaaatcaaggctcaataggtggggcgcaaaccagcgctctcatgagcaagcactcctgtctccccggtgtggttgtataaactgttcccacggttgaaaacaacctatccgttatccgctatagtacttcgagaaacctagtatcacctttggattgttgacgcgttgcgctcagcacactaacccgtgtgtagcttgggtcgatgagtctggacataccccactggcgacagtggtccaggctgcgttggcggcctactcatggtgaaaaccatgagacgctagacatgaacaaggtgtgaagagtctattgagctactatagagtcctccggcccctgaatgcggctaatcctaaccatggagcaagtgctcacaggccagtgagttgcttgtcgtaatgcgcaagttcgtggcggaaccgactactttgggtgtccgtgtttcactttttacttttatgactgcttatggtgacaatttgatattgttaccatttagctgtcaaattaattgcaaaagatcctaagtcttacttaccaatttgcattttgataaccttgatttgaaaattttaata

SEQ ID NO: 21481 - DNA, 498 bp, synthetic construct
  source 1..498: mol_type = other DNA
aattacttcgagaaacccagtaccaccatgaaggttgcgcagcgtttcgctccgcacaaccccagtgtagatcaggtcgatgggtcaccgcatccctcacgggcgaccgtggcggtggccgcgttggcggcctgcccatggggtatcccatgggacgcttcaatactgacatggtgcgaagagtctattgagctaattggtagtcctccggcccctgaatgcggctaatcctaactgcggagcagatacccacataccagtgggcagtctgtcgtaatgggcaactctgcagcggaaccgactactttgggtgtccgtgtttctttttattcctatttggctgcttatggtgacaattgaagaattgttaccatatagctattggattggccatccggtgaccaatagagctattgtttacctctttgttggttttgtaccactgaaccacatagttctaaataccctaaatttgattttagtgctcaacacatcaaa

SEQ ID NO: 21482 - DNA, 676 bp, synthetic construct
  source 1..676: mol_type = other DNA
tcccactccaagggcccacgtggcggctagtactctggtacttcggtacctttgtacgcctgttttatctcccttcccaatgtaatttagaagcttttaaatcaaggctcaataggtggggcgcaaaccagcgctctcatgagcaagcactcctgtctccccggtgtggttgtataaactgttcccacggttgaaaacaacctatccgttatccgctatagtacttcgagaaacctagtatcacctttggattgttgacgcgttgcgctcagcacactaacccgtgtgtagcttgggtcgatgagtctggacataccccactggcgacagtggtccaggctgcgttggcggcctactcatggtgaaaaccatgagacgctagacatgaacaaggtgtgaagagtctattgagctactatagagtcctccggcccctgaatgcggctaatcctaaccatggagcaagtgctcacaggccagtgagttgcttgtcgtaatgcgcaagtccgtggcggaaccgactactttgggtgtccgtgtttcactttttacttttatgactgcttatggtgacaatttgatattgttaccatttagctgtcaaattaattgcaaaagatcctaagtcttacttaccaatttgcattttgataaccttgatttgaaaactttaata

SEQ ID NO: 21483 - DNA, 689 bp, synthetic construct
  source 1..689: mol_type = other DNA
gccttggggttgttcccactccaagggcccacgtggcggctagtactctggtacttcggtacctttgtacgcctgttttatctcccttcccaatgtaatttagaagcttttaaatcaaggctcaataggtggggcgcaaaccagcgctctcatgagcaagcactcctgtctccccggtgtggttgtataaactgttcccacggttgaaaacaacctatccgttatccgctatagtacttcgagaaacctagtatcacctttggattgttgacgcgttgcgctcagcacactaacccgtgtgtagcttgggtcgatgagtctggacacaccccactggcgacagtggtccaggctgcgttggcggcctactcatggtgaaaaccatgagacgctagacatgaacaaggtgtgaagagtctattgagctactatagagtcctccggcccctgaatgcggctaatcctaaccatggagcgagtgctcacaggccagtgagttgcttgtcgtaatgcgcaagtccgtggcggaaccgactactttgggtgtccgtgtttcactttttacttttatgactgcttatggtgacaatttgatattgttaccatttagctgtcaaattaattgcaaaagatcctaagttttacttaccaatttgcattttgataaccttgatttgaaaactttaata

SEQ ID NO: 21484 - DNA, 689 bp, synthetic construct
  source 1..689: mol_type = other DNA
gccttggggttgttcccactccaagggcccacgtggcggctagtactctggtacttcggtacctttgtacgcctgttttatctcccttcccaatgtaatttagaagcttttaaatcaaggctcaataggtggggcgcaaaccagcgctctcatgagcaagcactcctgtctccccggtgtggctgtataaactgttcccacggttgaaaacaacctatccgttatccgctatagtacttcgagaaacctagtatcacctttggattgttgacgcgttgcgctcagcacactaacccgtgtgtagcttgggtcgatgagtctggacataccccactggcgacagtggtccaggctgcgttggcggcctactcatggtgaaaaccatgagacgctagacatgaacaaggtgtgaagagtctattgagctactatagagtcctccggcccctgaatgcggctaatcctaaccatggagcaagtgctcacaggccagtgagttgcttgtcgtaatgcgcaagtccgtggcggaaccgactactttgggtgtccgtgtttcactttttacttttatgactgcttatggtgacaatttgatattgttaccatttagctgtcaaattaattgcaaaagatcctaagttttacttaccaatttgcattttgataaccttgatttgaaaactttaata

SEQ ID NO: 21485 - DNA, 678 bp, synthetic construct
  source 1..678: mol_type = other DNA
gttcccactccaagggcccacgtggcggctagtactctggtacttcggtacctttgtacgcctgttttatctcccttcccaacgtaacttagaagctcttaaatcaaggctcaataggtggagtgcaaaccagcactcttatgagcaagtactcctgtttccccggtgcggttatataaactgttcccacggttgaaagtaacctatccgttatccgctatagtacttcgagaaacctagtaccacctttggattgttgacgcgttgcgctcagcacactaacccgtgtgtagcttgggtcgatgagtctggacataccccactggcgacagtggtccaggctgcgttggcggcctactcatggtgaaaaccatgagacgctagacatgaacaaggtgtgaagagtctattgagctactatagagtcctccggcccctgaatgcggctaatcctaaccatggagcaagtgctcacagaccagtgagttgcttgtcgtaatgcgcaagtccgtggcggaaccgactactttgggtgtccgtgtttcactttttacccttatgactgcttatggtgacaatttgatattgttaccatttagcttgtcaaatcaattgcgaaagatcctaaatcttatttgtcaacttgcattttgataactctaatttgaagatttaata

SEQ ID NO: 21486 - DNA, 549 bp, synthetic construct
  source 1..549: mol_type = other DNA
gctcaataggctgctcacgcggctgaaggagaaaacgttcgttacccggccaactacttcgagaagcccagtaccaccatgaaggttgcgcagcgtttcgctccgcacaaccccagtgtagatcaggtcgatgggtcaccgcatccctcacgggcgaccgtggcggtggccgcgttggcggcctgcccatggggtatcccatgggacgcttcaatactgacatggtgcgaagagtctattgagctaattggtagtcctccggcccctgaatgcggctaatcctaactgcggagcagatacccacataccagtgggcagtctgtcgtaatgggcaactctgcagcggaaccgactactttgggtgtccgtgtttctttttattcctatttggctgcttatggtgacaattgaagaattgttaccatatagctattggattggccatccggtgaccaatagagctattgtttacctctttgttggttttgtaccactgaaccacatagttctaaataccctaaatttgattttagtgctcaacacatcaaa

SEQ ID NO: 21487 - DNA, 564 bp, synthetic construct; identical to SEQ ID NO: 611
  source 1..564: mol_type = other DNA

SEQ ID NO: 21488 - DNA, 461 bp, synthetic construct
  source 1..461: mol_type = other DNA
gtatagggcaagcacttctgttaccccggatgtgtgaatagacttcttacgaggttgaagctgaagcattcgttatccgcacttgtactgcgcggaaattagtagcacctttgccagcttcatggcgtttcgctcagcgtttcccccacgtagatcagggcaatggggctacacaacccccactggcgacggtggtgtagcccgcgtggtgccccgcccgagctatcagctcgggacgccatgatgaagacagggtgtgaaggttcgagtgcgctacaagtgagtcctccggcccctgaatgcggctaaccttaaccccgtagctgtggtatgcatgccagcataaacacagtcgtaatgggtaactacgggatgggaccgactactttgggtgtccgtgtttcactttttcttttaaatttgtcttatggttacaggtttatgtaaatagatctgtaatc

SEQ ID NO: 21489 - DNA, 565 bp, synthetic construct; identical to SEQ ID NO: 613
  source 1..565: mol_type = other DNA

SEQ ID NO: 21490 - DNA, 565 bp, synthetic construct; identical to SEQ ID NO: 614
  source 1..565: mol_type = other DNA

SEQ ID NO: 21491 - DNA, 552 bp, synthetic construct
  source 1..552: mol_type = other DNA
actgctcacgcggttgaaagcgatcgatccgttacccgctcgcgtacttcgagaagcctagtatcaccttggaatcttcgatgcgttgcgctcagcgctcgaccccggggcgtagcttaggctgatgagtctggacgttcctcaccggtgacggtggtccaggctgcgttggcggcctacctgtggctaatgccataggacgctagatgtgaacaaggtgtgaagagcctattgagctacacgagagtcctccggcccctgaatgcggctaatcctaaccacggagcaagcggtcacaaaccagtggctggcttgtcgtaatgcgcaagtctgtggcggaaccgactactttgggtgtccgtgtttcctgttatttttatcatggctgcttatggtgacaatctgtgattgttatcataaagcaatttggattggccatccggtgagtgtcgtatcgaatacttgactatttgccaggactactatattatattcatttcatatttgagaaatcagttaaaaacagtaggaagataaaacaataataccaca

SEQ ID NO: 21492 - DNA, 552 bp, synthetic construct
  source 1..552: mol_type = other DNA
actgctcacgcggttgaaagcgatcgatccgttatccgctcgcgtacttcgagaagcctagtatcaccttggaatcttcgatgcgttgcgctcagcgctcgaccccggggcgtagcttaggctgatgagtctggacgttcctcaccggtgacggtggtccaggctgcgttggcggcctacctgtggctaatgccataggacgctagatgtgaacaaggtgtgaagagcctattgagctacacgagagtcctccggcccctgaatgcggctaatcctaaccacggagcaagcggtcacaaaccagtgactggcttgtcgtaatgcgcaagtctgtggcggaaccgactactttgggtgtccgtgtttcctgttatttttatcatggctgcttatggtgacaatctgtgattgttatcataaagcaatttggattggccatccggtgagtgttgtatcgaatacttgactatttgccaggactactatattatattcatttcacatttgagaaatcagtcaaaaacagtaggaagataaaacaataataccaca

SEQ ID NO: 21493 - DNA, 742 bp, synthetic construct; identical to SEQ ID NO: 1022
  source 1..742: mol_type = other DNA

SEQ ID NO: 21494 - DNA, 744 bp, synthetic construct
  source 1..744: mol_type = other DNA
ttaaaacagcctgtgggttgttcccacccacagggcccactgggcgccagcacactggtatcacggtacctttgtgcgcctgttttatccacccccacccccagtgtaacttagaagcacgtttcacacggtcaataggtgactcagcatgccagctgagttttgaccaagcacttctgttaccccggaccgagtatcaataagctactcacgtggctgaaggagaaagcgttcgttatccggccaattacttcgagaaacctagtatcaccatgaaggttgcgtggcgtttcgctccgcacaaccccagtgtagatcaggtcgatgagtcaccgcgtccctcacgggcgaccgtggcggtggctgcgctggcggcctgcccatggggcaacccatgggacgcttcaatactgacatggtgtgaagagtctattgagctaattggtagtcctccggcccctgaatgcggctaatcctaactgcggagcagatacccacacgccagtgggcagtctgtcgtaatgggcaactctgcagcggaaccgactactttgggtgtccgtgtttccttttattcttatattggctgcttatggtgacaattaaaagattgttaccatatagctattggattggccatccagtgtctaatagagcgatcatttacctttttgttgggtttgttccactcaactataaagcactcacaacgctcgaatatattataaacctcaatacaacaaa

SEQ ID NO: 21495 - DNA, 617 bp, synthetic construct
  source 1..617: mol_type = other DNA
catcggtcaatagcggctcagtataccaactgagtctcgaccaagcacttctgttaccccggaccgagtatcaataagctactcacgtggctgaaggagaaaacgtccgttacccggccaactacttcgagaaacctagtaccaccatgaatgttgcgcggcgtttcgctccgcacaaccccagtgtagatcaggtcgatgagtcaccgcatccctcacgggcaaccgtggcggtggctgcgctggcggcctgcctatggggcaacccataggacgcttcaatacggacatggtgagaagagtctattgagctagttggtagtcctccggcccctgaatgcggctaatcctaactgcagagcagattcccacacgccagtgggtagtctgtcgtaacgggcaactctgcagcggaaccgactactttgggtgtccgtgtttccttttattcttgtactggctgcttatggtgacaattgaaagattgttaccatatagctattggattggccacccagtgtctaatagagcaattatttatctttttgttggatttatcccacttgactataaagcacttgtaacgctcaagtatattatagatctcaacacaacaa

SEQ ID NO: 21496 - DNA, 660 bp, synthetic construct
  source 1..660: mol_type = other DNA
gtactctggtatttcggtacctttgtacgcctgttttatctccctccccaatgtaacttagaagctttcaaatcaaagctcaataggtggagcgcaagccagcgcttccatgagcaagtacttctgtttccccggtgcggttgtatagactgttcccacggttgaaaacaacctatccgttatccgctatagtacttcgagaaacctagtatcacctttggattgtcgatgcgttgcgctcaacacactaacccgtgtgtagcttgggtcgatgagtctggacataccccactggtgacagtggtccaggctgcgttggcggcctactcatggtgaaaaccatgagacgctagacatgaacaaggtgtgaagagtctattgagctactatagagtcctccggcccctgaatgcggctaatcttaaccatggagcaagtgctcacaaaccagtgagttgcttgtcgtaatgcgcaagtccgtggcggaaccgactactttgggtgtccgtgtttcactttttacttttatgactgcttatggtgacaatttaatattgttaccattcagctagtcgaaataatcgcataaagctttaaatcttatctaacagttcacatttggatagtttcattttgaggacttcaaacctacttacaaag

SEQ ID NO: 21497 - DNA, 696 bp, synthetic construct
  source 1..696: mol_type = other DNA
cagcacactggtattgcggtacccttgtgcgcctgttttatgcaccccctccccaaacgtaacctagaagccaaccactgaagaccaaaagcaagcgcagcacaccagctgcgtaccggtcaagcacttctgttgccccggactgagtatcaataggctgctcacgcggctgaaggagaaaacgttcgttacccggccaattacttcgagaaacctagtaccaccatgaaggttgcgcagtgtttcgctccgcacaaacccagtgtagatcaggtcgatgagccaccgcattccccacgggagaccgtggcggtggctgcgctggcggcctgcccatgggccaacccatgggacgcttcaatactgacatggtgcgaagagtctattgagctaattggtagtcctccggcccctgaatgcggctaatcctaactgcggagcagatacccacatgccagtgggcagtctgtcgtaatgggcaactccgcagcggaaccgactactttgggtgaccgtgtttccttttatctcatactggctgcttatggtgacaattgagaaattgttaccatatagctattggattggccatccggtgacaaatagagcaattgtttaccaatttgttggttttgtaccattgaatttcaaagttctaaaaaccctcaacctaatcttatttcttaatacaacaaa

SEQ ID NO: 21498 - DNA, 564 bp, synthetic construct
  source 1..564: mol_type = other DNA
tgacgttgcatagactgctcacgcggttgaaagcgattgatccgttatccgcttgtgtacttcgagaagcctagtatcgccttgggatcttcgacgcgttgcgctcagcacccgaccccggggtgtagcttaggctgatgagtctggacattcctcaccggtgacggtggtccaggctgcgttggcggcctacctatggctaatgccataggacgctagatgtgaacaaggtgtgaagagcctattgagctacacaagagtcctccggcccctgaatgcggctaatcctaaccacggggcaggcggtcgcaaaccagcgattggcttgtcgtaacgcgcaagtctgtggcggaaccgactactttgggtgtccgtgtttcctgttatttttatcatggctgcttatggtgacaatcagagattgttatcataaagcgaattggattggccatccggtgagaattgtgtcaagcgcacaactgtttgttggaatcactgtgttagttttaattctcatttaaccgattaatcaaaactacacgagaacaaaacactagcatcaca

SEQ ID NO: 21499 - DNA, 564 bp, synthetic construct
  source 1..564: mol_type = other DNA
tgacgttgcatagactgctcacgcggttgaaagcgattgatccgttatccgcttgtgtacttcgagaagcctagtatcgccttgggatcttcgacgcgttgcgctcagcacccgaccccggggtgtagcttaggctgatgagtctggacattcctcaccggtgacggtggtccaggctgcgttggcggcctacctatggctaacgccataggacgctagatgtgaacaaggtgtgaagagcctattgagctacacaagagtcctccggcccctgaatgcggctaatcctaaccacggagcaggcggtcgcaaaccagcgactggcttgtcgtaacgcgcaagtctgtggcggaaccgactactttgggtgtccgtgtttcctgttatttttatcatggctgcttatggtgacaatcagagattgttatcataaagcgaattggattggccatccggtgagaattgtgtcaagcgtacaactgtttgttggaatcactgtgttagttttaattctcatttaaccgattaatcaaaactacacgagaacaaaacactagcatcaca

SEQ ID NO: 21500 - DNA, 354 bp, synthetic construct; identical to SEQ ID NO: 334
  source 1..354: mol_type = other DNA

SEQ ID NO: 21501 - DNA, 738 bp, synthetic construct
  source 1..738: mol_type = other DNA
ttaaaacagcctgtgggttgatcccacccacagggcccattggggctagcactctggtatcacggtacctttgtgcgcctgttttatacccctccccaactgtaacttagaagtaacacacaccgatcaacagtcagcgtggcacaccagccacgttttgatcaagcacttctgttaccccggactgagtatcaatagactgctcacgcggttgaaggagaaagcgttcgttatccggccaactacttcgaaaaacctagtaacaccgtgaagttgcagagtgtttcgctcagcactaccccagtgtagatcaggtcgatgagtcaccgcattccccacgggcgaccgtggcggtggctgcgttggcggcctgcccatggggaaacccatgggacgctctaatacagacatggtgcgaagagtctattgagctagttggtagtcctccggcccctgaatgcggctaatcctaactgcggagcacacaccctcaagccagagggcagtgtgtcgtaacgggcaactctgcagcggaaccgactactttgggtgtccgtgtttcattttattcctatactggctgcttatggtgacaattgagagattgttaccatatagctattggattggccatccggtgaccaatagagctattatatatctctttgttgggtttataccacttagcttgaaagaggttaaaacattacaattcattgttaagttgaatacagcaaa

SEQ ID NO: 21502 - DNA, 611 bp, synthetic construct; identical to SEQ ID NO: 679
  source 1..611: mol_type = other DNA

SEQ ID NO: 21503 - DNA, 453 bp, synthetic construct
  source 1..453: mol_type = other DNA
tgcacttctgtttccccggtcgatgaggatatgctttacccaaggcaaaaaccttagagatcgttatccacacactgcctacacagagcctagtaccacttttgatgtaattaggttggtcgctccctgcaaacccagcagtagacctggcagatgaggctggacattccccactggcgacagtggtccagcctgcgtggctgcctgctcaccctattgggtgagaagcctatttattgacaaggtgtgaagagccgcgtgtgctcagtgtgcttcctccggcccctgaatgtggctaaccttaaccctgcagccgctgcccataatccaatgggtctacggtcgtaacgcgtaagtgcgggatgggaccaactactttgggtgtccgtgtttcttatttttcctatatatttgcttatggtgacaatatataattacttgtatattggcacc

SEQ ID NO: 21504 - DNA, 635 bp, synthetic construct
  source 1..635: mol_type = other DNA
tcggtacctttgtacgcctgttttatctcccttcccaatgtaacttagaagttcttaaatcaatgctcaataggtggggcgcaaaccagcgctctcatgagcaagcactcctgtctccccggtgaggttgtataaactgttcccacggttgaaaacaacctatccgttatccgctatagtacttcgagaaacctagtaccacctttggattgttgacgcgttgcgctcagcacactaacccgtgtgtagcttgggtcgatgagtctggacatacctcactggcgacagtggtccaggctgcgttggcggcctactcatggtgaaagccatgagacgctagacatgaacaaggtgtgaagagtctattgagctactatagagtcctccggcccctgaatgcggctaatcctaaccatggagcaagtgctcacaggccagtgagttgcttgtcgtaatgcgcaagtccgtggcggaaccgactactttgggtgtccgtgtttcactttttacttttatgactgcttatggtgacaattcgatattgttaccatttagcttgtcaaatcaattgcaaaagatcctaactcttatttatcaacttgcatcttgataactttaatttgaaaattttaaca

SEQ ID NO: 21505 - DNA, 745 bp, synthetic construct
  source 1..745: mol_type = other DNA
ttaaaacagcctgtgggttgatcccacccacagggcccattgggcgctagcactctggtatcacggtacctttgtgcgcctgttttatatccctttcccccccgcgtaacttagaagttgaacttactcggtcaatagacaactcagtgagccaactgagcaatgaccaagcacttctgtttaccccggaccaagtatcaatagactgctagcgcggttgaaggagaaaacgtccgttacccggccaattacttcgagaaacctagtaccaccatggatgttgcgtagtgtttcgctccgcacaaccccagtgtagatcaggccgatgagccaccgcattccccacgggcgaccgtggcggtggctgcgctggcggcctgcccatggggcaacccatgggacgcttcaatactgacatggtgcgaagagtctattgagctaattggtggtcctccggcccctgaatgcggctaatcctaactgcggagcagatacccacgtgccagtgggcagtctgtcgtaacgggcaactctgcagcggaaccgactactttgggtgtccgtgtttccctttaatcttacattggctgcttatggtgacaattgaaagattgttaccatatagctattggattggccatccagtgacaaatagagcgatcatttatttgttcgttggttttattccattgaacctcaaagttttgaacactctaaactttattatatcactcaacacaacaaa

SEQ ID NO: 21506 - DNA, 821 bp, synthetic construct
  source 1..821: mol_type = other DNA
ttcaaacagcctgggggttgtacccacccccggggcccacgcggcgccagtacactggttcgcttaggacctttgtacgcctgtttttccctcccttaaataaattaagatctctaccaatgtggggagtagtccgactccgcaccgatacgtcgcaccagcagaccggttcgcttagaacccttctgtggattggtatgagttcctttccccccgtaacttagaaatactcaactaaccgaccaataggaacgtggcacccagccatgtaaaggtcaagcacttctgtttccccggccagaaatggtcgttacccgcccttcctactacgagaagcctactaactgttgaaagcggtgaggagttgcgatcagccacaaccccagtggtagctctgagagatggggctcgcaaacacccccgtggtgacacggttgcttgcccgcgtgtgctctcgggtccagtcacatgactgttcactccaatccgccgtaaccagccaagagccgattgtgctaggaaggttttcctccggagccgtgaatgctgctaatcctaacctccgagcgtgtgcgcacaatccagtgttgctacgtcgtaacgcgcaagttgggggcggaacagactactttcggtactccgtgtttccttaattttatttaataaatatatggtgacattgtctgatattgttgaatttgctcgcttgccactgaacattgctctgtattacttggttgcatttcatagaaccactcaactcaccgtcgaaatcgtagactttgcagttttcttgaaccaaatacacaaacagcacgacc

SEQ ID NO: 21507 - DNA, 817 bp, synthetic construct; identical to SEQ ID NO: 1262
  source 1..817: mol_type = other DNA

SEQ ID NO: 21508 - DNA, 741 bp, synthetic construct
  source 1..741: mol_type = other DNA
ttaaaacagcctgtgggttgtacccacccacagggcccactgggcgctagcactctggtattgcggtacctttgtgcgcctgttttacccaccctcccccaacgtaacttagaagcctgacatatacggtcacaagccagcccagtacgccaactgggtaccgaccaagcacttctgttaccccggactgagtatcaataagctgccaaagcggctgaaggaaaaacgttcgttacccggccaattacttcgagaaacccagtaacaccatgaaagttgcgtagcgtttcattcagcacaatcccagtgtagatcaggtcgatgagtcaccgcattccccacaggcgactgtggcggtggctgcgttggcggcctgcccatggggcaacccatgggacgcttcaatactgacatggtgcgaagagtctattgagctaattggtagtcctccggcccctgaatgcggctaatcctaactgcggagcaggcactcgcagaccagcgagcagcttgtcgtaatgggcaactccgcagcggaaccgactactttgggtgtccgtgtttcctatttcctttacactggctgcttatggtgacaattgagaaattgttaccatatagctattggagtggccatccggtgactaacagagcaataatatatttgtttgttggctttgtgccacttaatttgaaggttgttaagacgctcaatctgatactacttctaaataaagcaaa

SEQ ID NO: 21509 - DNA, 816 bp, synthetic construct
  source 1..816: mol_type = other DNA
ttaaaacagcctgggggttgtacccacccccggggcccacgcggcgctagtactctggtacgctagtacctttgtacgcctgtttttccctcccttaaataaattaagattgccactactgaggggagtagtccgactccgctccggtactgccgcaccagtactccggtacgcctagtaccctagtacggagtagatggcaccccccccaccctgaaacttagaagcatgtaactaaccgaccaataggtgcgcgacaaccagttgtgtgacggtcaagcacttctgtttccccggtccgaaaggatcgttacccgcccgacccactacgagaagcccagtaactggccaagtgattgcgaggttgcactcagccacgacccctgtggtagctctggaagatggggctcgcgcctcccccgtggtaacacggtcgcttgcccgcgtgtgcttccgggttcggctatgccgatcaccctctacatcatgtaaccagccaagagcctattgtgctgggacggttttcctccggagccgtgaatgctgctaatcctaacctccgagcgtgtgcgcacaaaccagtgttgctacgtcgtaacgcgtaagttggaggcggaacagactactttcggtactccgtgtttccttataattttatattttattttatggttacactgactgatatttgtgagtttgctcgcctgcccctgaacattgctttgtactaccttatagcatttcataaaaccacccagttcacagttgagcttattgactttgctgtctacctaaacattttacacaagagaaata

SEQ ID NO: 21510 - DNA, 748 bp, synthetic construct
  source 1..748: mol_type = other DNA
ttaaaacagctctggggttgtacccaccccagaggcccacgtggcggctagcactccggtatcacggtacccttgtgcgcctgttttatacccccccacccgcaacttagaagcacgaaaccaagttcaatagaagggggtacaaaccagtaccaccacgaacaagcacttctgtttccccggtgacattgcatagactgctcacgcggttgaaagtgatcgatccgttacccgcttgtgtacttcgaaaagcctagtatcgccttggaatcttcgacgcgttgcgctcagcacccgaccccggggtgtagcttaggctgatgagtctggacattcctcaccggtgacggtggtccaggctgcgttggcggcctacctatggctaacgccataggacgctagatgtgaacaaggtgtgaagagcctattgagctacataagagtcctccggcccctgaatgcggctaatcctaaccacggagcaggcggtcgcgaaccagtgactggcttgtcgtaatgcgcaagtctgtggcggaaccgactactttgggtgtccgtgtttcctattatatttatcatggctgcttatggtgacaatcagagattgttaccataaagcgaattggattggccatccggtgagtgctgtgtcaggtatacaactgtttgttggaaccactgtgttagctttacttctcatttaaccaattgatcaaaaataatacgaggataaaacgacaatactaca

SEQ ID NO: 21511 - DNA, 748 bp, synthetic construct
  source 1..748: mol_type = other DNA
ttaaaacagctctggggttgtacccaccccagaggcccacgtggcggctagcactccggtatcacggtacccttgtgcgcctgttttatgcccccccacccgcaacttagaagcacgaaaccaagttcaatagaagggggtacaaaccagtaccaccacgaacaagcacttctgtttccccggtgacattgcatagactgctcacgcggttgaaagtgatcgatccgttacccgcttgtgtacttcgaaaagcctagtaccgccttggaatcttcgacgcgttgcgctcagcacccgaccccggggtgtagcttaggctgatgagtctggacattcctcaccggtgacggtggtccaggctgcgttggcggcctacctatggctaacgccataggacgctagatgtgaacaaggtgtgaagagcctattgagctacataagagtcctccggcccctgaatgcggctaatcctaaccacggagcaggcggtcgcgaaccagtgactggcttgtcgtaacgcgcaagtctgtggcggaaccgactactttgggtgtccgtgtttcctattatatttatcatggctgcttatggtgacaatcagagattgttaccataaagcgaattggattggccatccggtgagtgctgtgtcaggtatacaactgtttgttggaaccactgtgttagctttacttctcatttaaccaattgatcaaaaataatacgaggataaaacgacaatactaca

SEQ ID NO: 21512 - DNA, 648 bp, synthetic construct
  source 1..648: mol_type = other DNA
cttcccgtaacttagacgcacaaaaccaagttcaatagaagggggtacaaaccagtaccaccacgaacaagcacttctgtttccccggtgatgttgtatagactgcttgcgtggttgaaagcgacggatccgttatccgcttatgtacttcgagaagcccagtaccacctcggaatcttcgatgcgttgcgctcagcactcaaccccagagtgtagcttaggctgatgagtctggacatccctcaccggtgacggtggtccaggctgcgttggcggcctacctatggctaacgccatgggacgctagttgtgaacaaggtgtgaagagcctattgagctacataagaatcctccggcccctgaatgcggctaatcccaaccacggggcaggtggtcacaaaccagtgattggcctgtcgtaacgcgcaagtccgtggcggaaccgactactttgggtgtccgtgtttccttttattttattgtggctgcttatggtgacaatcacagattgttatcataaagcgaattggattggccatccggtgaaagtgagattcattttctatctgtttgctggattcgctccattgagtgtgattactctaagtacaatttcaacagttatttcaatcagacaattgtatcata

SEQ ID NO: 21513 - DNA, 747 bp, synthetic construct
  source 1..747: mol_type = other DNA
ttaaaacagctctggggttgtacccaccccagaggcccacgtggcggctagcactccggtattacggtacccttgtgcgcctgttttatactcccctcccgcaacttagaagcacgaaaccaagttcaatagaagggggtacaaaccagtaccaccacgaacaagcacttctgtttccccggtgacattgcatagactgctcacgcggttgaaagtgatcgatccgttacccgcttgtgtacttcgaaaagcctagtatcgccttggaatcttcgacgcgttgcgctcagcacccgaccccggggtgtagcttaggctgatgagtctggacattcctcaccggtgacggtggtccaggctgcgttggcggcctacctatggctaacgccataggacgctagatgtgaacaaggtgtgaagagcccattgagctacataagagtcctccggcccctgaatgcggctaatcctaaccacggagcaggcggtcgcgaaccagtgactggcttgtcgtaacgcgcaagtctgtggcggaaccgactactttgggtgtccgtgtttcctgttatttttatcatggctgcttatggtgacaatcagagattgttatcataaagcgaattggattggccatccggtgagtgttgtgtcaggtatacaactgtttgttggaaccactgtgttagctttacttctcatttaaccaattaatcaaaaacaatacgaggataaaacaacaatactaca

SEQ ID NO: 21514 - DNA, 747 bp, synthetic construct
  source 1..747: mol_type = other DNA
ttaaaacagctctggggttgtacccaccccagaggcccacgtggcggctagcactccggtatcacggtacccttgtgcgcctgttttataccccccacccgcaacttagaagcacgaaaccaagttcaatagaagggggtacaaaccagtaccaccacgaacaagcacttctgtttccccggtgacattgcatagactgctcacgcggttgaaagtgatcgatccgttacccgcttgtgtacttcgaaaagcctagtatcgccttggaatcttcgacgcgttgcgctcagcacccgaccccggggtgtagcttaggctgatgagtctggacattcctcaccggtgacggtggtccaggctgcgttggcggcctacctatggctaacgccataggacgctagatgtgaacaaggtgtgaagagcctattgagctacataagagtcctccggcccctgaatgcggctaatcctaaccacggagcaggcggtcgcgaaccagtgactggcttgtcgtaacgcgcaagtctgtggcggaaccgactactttgggtgtccgtgtttcctgttatatttatcatggctgcttatggtgacaatcagagattgttatcataaagcgaattggattggccatccggtgagtgctgtgtcaggtatacaactgtttgttggaaccactgtgttagctttacttctcatttaaccaattaatcaaaaacaatacgaggataaaacgacaatactaca

SEQ ID NO: 21515 - DNA, 747 bp, synthetic construct
  source 1..747: mol_type = other DNA
ttaaaacagctctggggttgtacccaccccagaggcccacgtggcggctagcactccggtatcacggtacccttgtgagcctgttttattctccccacccgcaacttagaagcacgaaaccaagttcaatagaagggggtacaaaccagtaccaccacgaacaagcacttctgtttccccggtgacattgcatagactgctcacgcggttgaaagtgatcgatccgttacccgcttgtgtacttcgaaaagcctagtatcgccttggaatcttcgacgcgttgcgctcagcacccgaccccggggtgtagcttaggctgatgagtctggacattcctcaccggtgacggtggtccaggctgcgttggcggcctacctatggctaacgccataggacgctagaagtgaacaaggtgtgaagagcctattgagctacataagagtcctccggcccctgaatgcggctaatcctaaccacggagcaggcggtcgcgaaccagtgactggcttgtcgtaacgcgcaagtctgtggcggaaccgactactttgggtgtccgtgtttcctgttatatttatcatggctgcttatggtgacaatcagagattgttatcataaagcgaattggattggccatccggtgagtgttgtgtcaggtatacaactgtttgttggaaccactgtgttagctttacttctcatttaaccaattaatcaaaaacaatacgaagataaaacgacaataccaca

SEQ ID NO: 21516 - DNA, 747 bp, synthetic construct
  source 1..747: mol_type = other DNA
ttaaaacagctctggggttgtacccaccccagaggcccacgtggcggctagcactccggtatcacggtacccttgtgcgcctgttttataccccccacccgcaacttagaagcacgaaaccaagttcaatagaagggggtacaaaccagtaccaccacgaacaagcacttctgtttccccggtgacattgcatagactgctcacgcggttgaaagtgatcgatccgttacccgcttgtgtacttcgaaaagcctagtatcgccttggaatcttcgacgcgttgcgctcagcacccgaccccggggtgtagcttaggctgatgagtctggacattcctcaccggtgacggtggtccaggctgcgttggcggcctacctatggctaacgccataggacgctagatgtgaacaaggtgtgaagagcctattgagctacataagagtcctccggcccctgaatgcggctaatcctaaccacggagcaggcggtcgcgaaccagtgactggcttgtcgtaacgcgcaagtctgtggcggaaccgactactttgggtgtccgtgtttcctattatatttaccatggctgcttatggtgacaatcagagattgttatcataaagcgaattggattggccatccggtgagtgctgtgtcaggtatacaactgtttgttggaaccactgtgttagctttacttctcatttaaccaattaatcaaaaacaatacgaggataaaacgacaatactaca

SEQ ID NO: 21517 - DNA, 747 bp, synthetic construct
  source 1..747: mol_type = other DNA
ttaaaacagctctggggttgtacccaccccagaggcccacgtggcggctagcactccggtatcacggtacccttgtgcgcctgttttataccccccacccgcaacttagaagcacgaaaccaagttcaatagaagggggtacaaaccagtaccaccacgaacaagcacttctgtttccccggtgacattgcatagactgctcacgcggttgaaagtgatcgatccgttacccgcttgtgtacttcgaaaagcctagtatcgccttggaatcttcgacgcgttgcgctcagcacccgaccccggggtgtagcttaggctgatgagtctggacattcctcaccggtgacggtggtccaggctgcgttggcggcctacctatggctaacgccataggacgctagatgtgaacaaggtgtgaagagcctattgagctacataagagtcctccggcccctgaatgcggctaatcctaaccacggagcaggcggtcgcgaaccagtgactggcttgtcgtaacgcgcaagtctgtggcggaaccgactactttgggtgtccgtgtttcctgttatatttatcatggctgcttatggtgacaatcagagattgttatcataaagcgaattggattggccatccggtgagtgctgtgtcaggtacacaactgtttgttggaaccactgtgttagctttacttctcatttaaccaattaatcaataacaatacgaggataaaacgacaatactaca

SEQ ID NO: 21518 - DNA, 455 bp, synthetic construct; identical to SEQ ID NO: 496
  source 1..455: mol_type = other DNA

SEQ ID NO: 21519 - DNA, 822 bp, synthetic construct
  source 1..822: mol_type = other DNA
tttaaaacagcctgggggttgttcccacccctggggcccacgtggcgctagtactctggtacgctagtacctttgtacgcctgtttttcccctcccttaaataaatcaaggttgccactactgaggggagtagtccgactccgctccagcaatgctgcaccagtgcactggtacgctagtaccttttcacggagtagatggtatcccttaccccggaacctagaagattgcacacaaaccgaccaatatgcgcaccgcatccagccgtgcagcggtcaagcacttctgtctccccggtctgtaaagatcgttatccgcccgacccactacgaaaagcctagtaactggccaagtgaacgcgaagttgcgctccgccacaaccccagtggtagctctggaagatggggctcgcaccacccccgtggtaacacggttgcctgcccgcgtgtgcttccgggttcggtctcgtgccgttcacttcaacttcacgcaaccagccaagagcctattgtgctgggacggttttcctccggggccgtgaatgctgctaatcccaacctccgagcgtgtgcgcacaatccagtgttgctacgtcgtaacgcgtaagttggaggcggaacagactacttcggtaccccgtgtttcctctcattttatttaatattttatggtgacaattgttgagatttgccctcttgcaacgttgccattgaatattggcttatactatttggttgccttttacaaaacctctgatatacccagttcttacattgatctgcttgtttttctcaatttgaagtatagactacaaatagcaaa

SEQ ID NO: 21520 - DNA, 822 bp, synthetic construct
  source 1..822: mol_type = other DNA
tttaaaagagtcagggggttgtacccacccctagggcccacgtggcgccagtactctggtacattagtacctttgtacgcctgttttcccctcccttaaataaatcaagattaccactactgaggggagtagtccgactccgctccagcaatgctgcaccagtgcactggtacgctagtaccttttcacggagtagatggtatccccaccccgaaacttagaagcatgtgatcaaatcgaccaataggcgcgcggttgccagccgcgtttcggtcaagcacttctgtttccccggtccgcaaggatcgttacccgcccgacccactgcgagaagcccagtaactggccaagcggtagcgaggttgcactcagccacaaccccagtggtagctctggaagatggggctcgcagttcccccgtggtaacacggatgcctgcccgcgtgtgcttccgggttcggtctcgtgccgttcacctcaataccgcgtaaccagtgaagagcctattgcgctgggacggttttcctccggggccgtgaatgctgctaatcctaacctctgagcgtgtgcgcacaatccagtgttgctacgtcgtaacgcgtaagtcaggggcggaacagactactttcggtaccccgtgtttccttttattttatatttatcattttatggtgacaattgctgagatttgcgatttagcggttttgccattgaacattgctttgtactacttggttgcatttcacaaaacctccgacatacccagctcctacatcgacttgcttgtttttcttaattaagacataaactagagaacacaaa

SEQ ID NO: 21521 - DNA, 732 bp, synthetic construct
  source 1..732: mol_type = other DNA
gtgggttgttcccatccacagggcccactgggcgccagcactctggtattgcggtaccttagtgcgcctgttttatatacccaccccccaaatgtaatttagatgcatgtcaacaaagaccaatagtaagcgcagcacaccagctgtgttctggtcaagcacttctgttaccccggactgagtatcaataagctactcgcgtggctgaaggagaaaacgttcgttacccggccaattacttcgagaaacctagtaacaccatgaaggttgcgcagtgtttcgctccgcacaaccccagtgtagatcaggtcgatgagtcaccgcattccccacgggtgaccgtggcggtggctgcgctggcggcctgcccatggggtaacccatgggacgcttcaatactgacatggtgcgaagagtctattgagctaattggtagtcctccggcccctgaatgcggctaatccttactgcggagcagatacccacacaccagtgggcagtctgtcgtaacgggcaactctgcagcggaaccgactactttgggtgtccgtgtttctctttatccttatactggctgcttatggtgacaattgagagattgttaccatatagctattggattggccatccggtgacgaatagagcaattgtgtatttgtttgttggttttataccattaaattacaaggttctaaacacccttaatcttattatagtattcaatacaataaa

SEQ ID NO: 21522 - DNA, 732 bp, synthetic construct
  source 1..732: mol_type = other DNA
gtgggttgttcccatccacagggcccactgggcgccagcactctggtattgcggtaccttagtgcgcctgttttacatacccatcccccaaatgtaatttagatgcatgtcaacaaagaccaatagtaagcgcagcacaccagctgtgttctggtcaagcacttctgttaccccggactgagtatcaataagctactcgcgtggctgaaggagaaaacgttcgttacccggccaattacttcgagaaacctagtaacaccatgaaggttgcgcagtgtttcgctccgcacaaccccagtgtagatcaggtcgatgagtcaccgcattccccacgggtgaccgtggcggtggctgcgctggcggcctgcccatggggtaacccatgggacgcttcaatactgacatggtgcgaagagtctattgagctaattggtagtcctccggcccctgaatgcggctaatcctaactgcggagcagatacccacacaccagtgggcagtctgtcgtaacgggcaactctgcagcggaaccgactactttgggtgtccgtgtttctctttatccttatactggctgcttatggtgacaattgagagattgttaccatatagctattggattggccatccggtgacgaatagagcaattgtgtatttgtttgttggttttataccattaaattacaaggttctaaacacccttaatcttattatagtattcaatacaataaa

SEQ ID NO: 21523 - DNA, 732 bp, synthetic construct
  source 1..732: mol_type = other DNA
gtgggttgtacccatccacagggcccactgggcgccagcactctggtattgcggtaccttagtgcgcctgttttatatacccaccccccaaatgtaatttagatgcatgtcaacaaagaccaatagtaagcgcagcacaccagctgtgttctggtcaagcacttctgttaccccggactgagtatcaataagctactcgcgtggctgaaggagaaaacgttcgttacccggccaattacttcgagaaacctagtaacaccatgaaggttgcgcagtgtttcgctccgcacaaccccagtgtagatcaggtcgatgagtcaccgcattccccacgggtgaccgtggcggtggctgcgctggcggcctgcccatggggtaacccatgggacgcttcaatactgacatggtgcgaagagtctattgagctaattggtagtcctccggcccctgaatgcggctaatcctaactgcggagcagatacccacacaccagtgggcagtctgtcgtaacgggcaactctgcagcggaaccgactactttgggtgtccgtgtttctctttatccttatactggctgcttatggtgacaattgagagattgttaccatatagctattggattggccatccggtgacgaatagagcaattgtgtatttgtttgtcggttttataccattaaattacaaggttctaaacacccttaatcttattatagtattcaatacaataaa

SEQ ID NO: 21524 - DNA, 565 bp, synthetic construct
  source 1..565: mol_type = other DNA
tgacattgcatagactgctcacgcggttgaaagcgatcgatccgttatccgcttgtgtacttcgaaaagcctagtatcgccttggaatcttcgacgcgttgcgctcagcacccgatcccggggtgtagcttaggctgatgagtctggacgtccctcaccggcgacggtggtccaggctgcgttggcggcctacctatggctaacgccataggacgctagatgtgaacaaggtgtgaagagcctattgagctacacgagagtcctccggcccctgaatgcggctaatcctaaccacggagcaagcggtcacgaaccagtggctggcttgtcgtaacgcgcaagtctgtggcggaaccgactactttgggtgtccgtgtttcctgttatttttatcatggctgcttatggtgacaatctgtgattgttatcataaagcgatttggattggccatccggtgagtgttgtatcgaacatttgactgttcatcagaactactgtgttagattcacttcttattcaactaattaatcaaaaacagtacgaagacaaaacaacaatactaca

SEQ ID NO: 21525 - DNA, 950 bp, synthetic construct
  source 1..950: mol_type = other DNA
ttaaaacagcctgtgggttgtacccacccacagggcccaatgggcgctagcacactggtattccggtacctttgtgcgcctgttttataacccccccccagttcgcaacttagaagcaaagaaacaatggtcaatagctgacgcagcaacccagctgtgttttggccaagcacttctgtgtccccggactgagtatcaataagctgcttgcgcggctgaaggagaaaccgttcgttacccggccaactacttcgagaagcctagtaacgccatgaacgttgaggagtgtttcgctcagcacttcccccgtgtagttcaggtcgatgagtcaccgcgttccccacgggtgaccgtggcggtggctgcgttggcggcctgcctgtggggcaacccgcaggacgctctgatacagacatggtgtgaagagcctattgagctagttggtagtcctccggcccctgaatgcggctaatcctaactgcggagcacacgttcgcaagccagcgagtggtgtgtcgtaacgggcaactctgcagcggaaccgactactttgggtgtccgtgtttccttttattcttaccttggctgcttatggtgacaattgaaagattgttaccatatagctattggattggccgtccagtgtcaaatagagcaatcatatatctgtttgttggtttcgatcccttggactacagaaatcttaaaactctttatttcatattgagactcaatacgataaaatgggaacacaggtgtcaacacaaaagacaggggcacacgagactagattgagcgccagtggaaactcaattattcattacaccaacataaactattacaaggatgctgcttcaaattcggccaataggcaagattttacacaagaccctagtaaattcacagaaccggtaaaggatgtgatgataaagtcgctgccagcgctcaat

SEQ ID NO: 21526 - DNA, 714 bp, synthetic construct; identical to SEQ ID NO: 880
  source 1..714: mol_type = other DNA

SEQ ID NO: 21527 - DNA, 715 bp, synthetic construct
  source 1..715: mol_type = other DNA
agggcccattgggcgctagcacactggtatcacggtacctttgtgcgcctgttttatccatcccttcccaaattgcaacttagaagcatgctacaatcggatcaataggtggttcagtaaaccaactgagccttgaccaagtacttctgttaccccggactgagtatcaataggctgctcgcgtggctgatggagaaaacgtccgttacccgaccaattacttcgagaaacctagtaccaccatgaaagttgcgcagcgtttcgctccgcacaaccccagtgtagatcaggtcgatgagtcaccgcgttccccacgggcgaccgtggcggtggctgcgttggcggcctgcccatggggtaacctatgggacgcttcaatactgacatggtgcgaagagtctattgagctaattggtagtcctccggcccctgaatgcggctaatcctaactgcggagcagatacccacgcaccagtgggcagtctgtcgtaacgggcaactctgcagcggaaccgactactttgggtgaccgtgtttccttttatttcaatgctggctgctttatggtgacaattgaaagattgttaccatatagctattggattggccatccggtgacaaaaaaaacaattatctacctgtttattggctttatacctctcaattacaaggttataaatactcttaacttcattttaatgcttaacacagcaaa

SEQ ID NO: 21528 - DNA, 688 bp, synthetic construct
  source 1..688: mol_type = other DNA
tcccaccccaggggcccacgtggcggctagtactctggtatttcggtacctttgtacgcctgttttatctcccttcccaatgtaacttagaagttttcaaatcgaagctcaataggtggggcgcaaaccagcgctttcatgagcaagcacttctgtttccccggtgcggttgtatagactgtctccacggttgaaaacaacttatccgttatccgctatagtacttcgagaaacctagtatcacctttggattgttgatgcgttgcgctcagcacactaacccgtgtgtagcttgggttgatgagtctggacgtaccccactggtgacagtggtccaggctgcgttggcggcctactcatggtgaaagccatgagacgctagacatgaacaaggtgtgaagagtctattgagctactatagagtcctccggcccctgaatgcggctaatcttaaccatggagcaagtgctcacaagccagtgagttgcttgtcgtaacgcgcaagtccgtggcggaaccgactactttgggtgtccgtgtttcactttttacctttatgactgcttatggtgacaatttaatattgttaccatttagcttgtcaaattaatcacgtgaaatcctaaatcttatttatcaatttgtatttggatagcttcatttgagaattctaaactcattcataaag

SEQ ID NO: 21529 - DNA, 688 bp, synthetic construct
  source 1..688: mol_type = other DNA
tcccaccccaagggcccacgtggcggctagtactctggtatttcggtacctttgtacgcctgttttatctcccttcccaatgtaacttagaagttctcaaattgaagctcagtaggtggggcgcaaaccagcgctttcatgagcaagcacttctgtttccccggtgcggttgtatagactgtttccacggttgaaaacaacttatccgttatccgctatagtacttcgagaaacctagtatcacctttggattgttgatgcgttgcgatcagcacactgacccgtgtgtagcttgggctgatgagtctggacgtaccccactggtgacagtggtccaggctgcgttggcggcctactcatggtgaaaaccatgagacgctagacatgaacaaggtgtgaagagtctattgagctactatagagtcctccggcccctgaatgcggctaatcttaaccatggagcaagtgctcacaagccagtgagttgcttgtcgtaacgcgcaagtccgtggcggaaccgactactttgggtgtccgtgtttcactttttacctttatgactgcttatggtgacaatttaatattgttaccatttagcttgtcagattaatcgcgtgaaatcctaaatcttgttcaccaatttgtattcggatagcttcatttgaaaattctaaactcattcataaag

SEQ ID NO: 21530 - DNA, 688 bp, synthetic construct
  source 1..688: mol_type = other DNA
tcccaccccaagggcccacgtggcggctagtactctggtatttcggtacctttgtacgcctgttttatctcccttcccaatgtaacttagaagttctcaaattgaagctcagtaggtggggcgcaaaccagcgctttcatgagcaagcacttctgtttccccggtgcggttgtatagactgtttccacggttgaaaacaacttatccgttatccgctatagtacttcgagaaacctagtatcacctttggattgttgatgcgttgcgctcagcacactaacccgtgtgtagcttgggctgatgagtctggacgtaccccactggtgacagtggtccaggctgcgttggcggcctactcatggtgaaaaccatgagacgctagacatgaacaaggtgtgaagagtctattgagctactatagagtcctccggcccctgaatgcggctaatcttaaccatggagcaagtgctcacaagccagtgagttgcttgtcgtaacgcgcaagtccgtggcggaaccgactactttgggtgtccgtgtttcactttttacctttatgactgcttatggtgacaatttaatattgttaccatttagcttgtcagattaatcgcgtgaaatcctaaatcttgttcaccaatttgtattcggatagcttcatttgaaaattctaaactcattcataaag

SEQ ID NO: 21531 - DNA, 676 bp, synthetic construct
  source 1..676: mol_type = other DNA
tcccaccccaagggcccacgtggcggctagtactctggtacttcggtacctttgtacgcctgttttatttcccttcccaatgtaacctagaagttttcaaatcaaagctcgataggtggagcgcaaaccagcgctctcatgagcaagcactcctgtctccccggtgcggttgtataaactgttcccacggttgaaaacaacctatccgttatccgctatagtacttcgagaaacctagtatcacctttggattgttgatgcgttgcgctcagcacactaacccgtgtgtagcttgggtcgatgagtctggacatacctcactggcgacagtggtccaggctgcgttggcggcctactcatggtgaaaaccatgagacgctagacatgaacaaggtgtgaagagtctattgagctactatagagtcctccggcccctgaatgcggctaatcttaaccatggagcaagtgctcacaagccagtgagttgcttgtcgtaatgcgcaagtccgtggcggaaccgactactttgggtgtccgtgtttcactttttacttttatgactgcttatggtgacaatttgatattgttaccatttagcttgtcaaatcaattacaaaagacctaaatcttgtttatcaacttgcattttgataacttcaattagaaaaatttaata

SEQ ID NO: 21532 - DNA, 604 bp, synthetic construct
  source 1..604: mol_type = other DNA
caactcggtaagccaaccgggcaatgaccaagcactactgttaccccggaccaagtatcaataaactgctagcgcggttgaaggagaaaacgtccgttacccggccaattacttcgagaaacctagtaccaccatggatgttgcgcagtgtttcgctccgcacaaccccagtgtagatcaggccgatgagccaccgcattccccacgggtgaccgtggcggtggttgcgctggcggcctgcccatggggcaacccatgggacgcttcaatactgacatggtgcgaagagtctattgagctaattggtagtcctccggcccctgaatgcggctaatcccaactgcggagcagatacccacatgccagtgggcagtctgtcgtaacgggcaactctgcagcggaaccgactactttgggtgtccgtgtttcctttttaaccttatattggctgcatatggtgacaattgaaagattgttaccatatagctattggattggccatccggtgacaaacagagcaatcatttatttgttcgttggttttattccattgaatctcaaagttttgaacactctaaactttattatttcactcaacaacaaa

SEQ ID NO: 21533 - DNA, 497 bp, synthetic construct
  source 1..497: mol_type = other DNA
tacttcgagaaacccagtaccaccatgaatgttgcgcggcgtttcgctccgcacaatcccagtgtagatcaggtcgatgagccaccgcatccctcacgggcgaccgtggcggtggctgcgctggcggcctgcccatggggcaacccatgggacgcttcaatacagacatggtgtgaagagtctattgagctaattggtagtcctccggcccctgaatgcggctaatcctaactgcggagcagattcccacatgccagtgggcagtctgtcgtaatgggtaactctgcagcggaaccgactactttgggtgtccgtgtttccttttattcttgtactggctgctaatggtgacaattgaaagattgttaccatatagctattggattggccacccagtgtctaacagagcaatcatttacctttttgttggattcatcccactcgattataaagcacttgtaacacctcaaatacatcatagacctcaacacaacaaa

SEQ ID NO: 21534 - DNA, 1000 bp, synthetic construct; identical to SEQ ID NO: 146
  source 1..1000: mol_type = other DNA

SEQ ID NO: 21535 - DNA, 496 bp, synthetic construct; identical to SEQ ID NO: 524
  source 1..496: mol_type = other DNA

SEQ ID NO: 21536 - DNA, 546 bp, synthetic construct
  source 1..546: mol_type = other DNA
ccaagcacttctgtttccccggtgcggttgtatagactgtttccacggttgaaaacaacttatccgttatccgctatagtacttcgagaaacctagtatcatctttggattgttgatgcgttgcgctcagcacactaacccgtgtgtagcttgggtcgatgagtctggacgtaccccactggcgacagtggtccaggctgcgttggcggcctactcatggtgaaaaccatgagacgctaaacatgaacaaggtgtgaagagtctattgagctactatagagtcctccggcccctgaatgcggctaatcttaaccatggagcaagtgctcacaaaccagtgagttgcttgtcgtaatgcgcaagtccgtggcggaaccgactactttgggtgtccgtgtttcactttttacttttatgactgcttatggtgacaattcaatattgttaccatttagcttgtcagatcaatcacgtaaaattccaaatcttatttggtaatttgtgtttggataacttcatttgaaaatcttaaacttatttgtaaag

SEQ ID NO: 21537 - DNA, 446 bp, synthetic construct; identical to SEQ ID NO: 490
  source 1..446: mol_type = other DNA

SEQ ID NO: 21538 - DNA, 527 bp, synthetic construct
  source 1..527: mol_type = other DNA
cactgtttccccggtgtggttgtataaactgttcccacggttgaaaacaacctatccgttatccgctatagtacttcgagaaacctagtaccacctttggattgttgacgcgttgcgctcagcacactaacccgtgtgtagcttgggtcgatgagtctggacgtaccccactggcgacagtggtccaggctgcgttggcggcctactcatggtgaaaaccatgagacgctagacatgaacaaggtgtgaagagtctattgagctactatagagtcctccggcccctgaatgcggctaatcctaaccatggagcaagtgctcacaagccagtgagttgcttgtcgtactgcgcaagtctgtggcggaaccgactactttgggtgtccgtgtttcactttttacttttatgactgcttatggtgacaatttgatattgttaccattgagcttgtcaaattaattgcaaaagatcctaaatcttatttaccaacttgcattttgataaccttgttttgaaaattttaata

SEQ ID NO: 21539 - DNA, 440 bp, synthetic construct
  source 1..440: mol_type = other DNA
cacttctgtttccccggatgtgtgaataggcttcacccgaggctgaaactgtagcattcgttatccgcatggctactacgcgactgctagtagcattctgtatgacatgtggggtttcgctcagcagagacccagtctgtagatcagggtaatgaggctacacaatccccactggcgacagtggtgtagcctgcgtggtgccctgcccgaggttcgtcctcgggaccctccatgttagacagggtgtgaagacactagtgtgctagtcatgagtcctccggcccctgaatgcggctaatcttaaacctgcagccatcgcatgcatgccagcatgtaggtggtcgtaatgagcaattgcgggatggaaccgactactttgggtgtccgtgtttccctttttacatttatgtgtctcttatggttacatcattggtgtaatc

SEQ ID NO: 21540 - DNA, 451 bp, synthetic construct
  source 1..451: mol_type = other DNA
tatcacctttggattgttgatgcgttgcgctcagcacactaacccgtgtgtagcttgggtcgatgagtctggacataccccactggtgacagtggtccaggctgcgttggcggcctactcatggtgaaaaccatgagacgctaaacatgaacaaggtgtgaagagtctattgagctactatagagtcctccggcccctgaatgcggctaatctcaaccatggagcaagtgcttacaaaccagtgagttgcttgtcgtaatgcgcaagtccgtggcggaaccgactactttgggtgtccgtgtttcactttttacttttatgactgcttatggtgacaatttaacattgttaccatttagctagtcaaattaatcacataaaattttaaatcctatctaataattcacatttggatagcttcattttaaggactttaaacctatttacaaag

SEQ ID NO: 21541 - DNA, 451 bp, synthetic construct
  source 1..451: mol_type = other DNA
tatcacctttggattgttgatgcgttgcgctcagcacactaacccgtgtgtagcttgggttgatgagtctggacataccccactggtgacagtggtccaggctgcgttggcggcctactcatggtgaaaaccatgagacgctaaacatgaacaaggtgtgaagagtctattgagctactatagagtcctccggcccctgaatgcggctaatcttaaccatggagcaagtgctcacaaaccagtgagttgcttgtcgtaatgcgcaagtccgtggcggaaccgactactttgggtgtccgtgtttcactttttacttttatgactgcttatggtgacaatttaatattgttaccatttagctagtcaaattaatcacataaaactttaaatcctatctaataattcacatttggatagcttcattttgaggactttaatcctatttacaaat

SEQ ID NO: 21542 - DNA, 451 bp, synthetic construct
  source 1..451: mol_type = other DNA
tatcacctttggattgttgatgcgttgcgctcagcacactaacccgtgtgtagcttgggtcgatgagtctggacataccccactggtgacagtggtccaggctgcgttggcggcctactcatggtgaaaaccatgagacgctaaacatgaacaaggtgtgaagagtctattgagctactatagagtcctccggcccctgaatgcggctaatcttaaccatggagcaagtgctcacaaaccagtgagttgcttgtcgtaatgcgcaagtccgtggcggaaccgactactttgggtgtccgtgtttcactttttacttttatgactgcttatggtgacaatttaatattgttaccatttagctagtcaaattaatcacataaaactttaaattctatctaataattcacatttggatagcttcattttgaggaccttaaacctatttacaaag

SEQ ID NO: 21543 - DNA, 451 bp, synthetic construct
  source 1..451: mol_type = other DNA
tatcacctttggattgttgatgcgttgcgctcagcacactaacccgtgtgtagcttgggtcgatgagtctggacataccccactggtgacagtggtccaggctgcgttggcggcctactcatggtgaaaaccatgagacgctaaacatgaacaaggtgtgaagagtctattgagctactatagagtcctccggcccctgaatgcggctaatcttaaccatggagcaagtgctcacaaaccagtgagttgcttgtcgtaatgcgcaagtctgtggcggaaccgactactttgggtgtccgtgtttcactttttacttttatgactgcttatggtgacaatttaatattgttaccatttggctagtcaaattattcacataaaactttaaatcctatctaataattcacatttggatagcttcattttgaggactttaaacctatttacaaaa

SEQ ID NO: 21544 - DNA, 449 bp, synthetic construct
  source 1..449: mol_type = other DNA
tcacctttggattgttgatgcgttgcgctcagcacactaacccgtgtgtagcttgggtcgatgagtctggacataccccactggtgacagtggtccaggctgcgttggcggcctactcatggtgaaaaccatgagacgctaaacatgaacaaggtgtgaagagtctattgagctactatagagtcctccggcccctgaatgcggctaatcttaaccatggagcaagtgctcacaaaccagtgagttgcttgtcgtaatgcgcaagtccgtggcggaaccgactactttgggtgtccgtgtttcactttttacttttatgactgcttatggtgacaatttaatattgttgccatttagctagtcatattaatcacataaaactttaaattctatctaataattcacatttggatagtttcattttgaggactttaaacctatttacaaaa

SEQ ID NO: 21545 - DNA, 449 bp, synthetic construct
  source 1..449: mol_type = other DNA
tcacctttggattgttgatgcgttgcgctcagcacactaacccgtgtgtagcttgggtcgatgagtctggacataccccactggtgacagtggtccaggctgcgttggcggcctactcatggtgaaaaccatgagacgctaaacatgaacaaggtgtgaagagtctattgagctactatagagtcctccggcccctgaatgcggctaatcttaaccatggagcaagtgctcacaaaccagtgagttgcttgtcgtaatgcgcaagtccgtggcggaaccgactactttgggtgtccgtgtttcactttttacttttatgactgcttatggtgacaatttaatattgttaccatttagttagtcatattaatcacataaaactttaaattctatctaataattcacatttggatagtttcattttgaggactttaaacctatttacaaaa

SEQ ID NO: 21546 - DNA, 449 bp, synthetic construct
  source 1..449: mol_type = other DNA
tcacctttggattgttgatgcgttgcgctcagcacactaacccgtgtgtagcttgggtcgatgagtctggacataccccactggtgacagtggtccaggctgcgttggcggcctactcatggtgaaaaccatgagacgctaaacatgaacaaggtgtgaagagtctattgagctactatagagtcctccggcccctgaatgcggctaatcttaaccatggagcaagtgctcacaaaccagtgagttgcttgtcgtaatgcgcaagtccgtggcggaaccgactactttgggtgtccgtgtttcactttttacttttatgactgcttatggtgacaatttaatattgttaccatttagctagtcatattaatcacataaaactttaaattctatctaataattcacatttggatagtttcattttgaggactttaaacctatttacaaaa

SEQ ID NO: 21547 - DNA, 439 bp, synthetic construct
  source 1..439: mol_type = other DNA
taccacctttggattgttgacgcgttgcgctcagcacactaacccgtgtgtagcttgggtcgatgagtctggacatacctcactggcgacagtggtccaggctgcgttggcggcctactcatggtgaaaaccatgagacgctagacatgaacaaggtgtgaagagtctattgagctactatagagtcctccggcccctgaatgcggctaatcctaaccatggagcaagtgctcacaggccagtgagttgcttgtcgtaatgcgcaagtccgtggcggaaccgactactttgggtgtccgtgtttcactttttacttttatgactgcttatggtgacaatttgatattgttaccatttagcttgtcaaatcaattgcaaaagatcctaaatcctatttatcaacttgcatcttgataactttgatttgaaaattttaaca

SEQ ID NO: 21548 - DNA, 438 bp, synthetic construct
  source 1..438: mol_type = other DNA
tatcacctttggattgttgacgcgttgcgctcagcacactaacccgtgtgtagcttgggtcgatgagtctggacataccccactggcgacagtggtccaggctgcgttggcggcctactcatggtgaaaaccatgagacgctagacatgaacaaggtgtgaagagtctattgagctactatagagtcctccggcccctgaatgcggctaatcctaaccatggagcaagtgctcacagaccagtgagttgcttgtcgtaatgcgcaagtccgtggcggaaccgactactttgggtgtccgtgtttcactttttacccttatgactgcttatggtgacaatttgatattgttaccatttagcttgtcaaatcaattgcaaaagatcctaaatcttatttatcaacttgcattttgataactttaatttgaagatttaata

SEQ ID NO: 21549 - DNA, 438 bp, synthetic construct
  source 1..438: mol_type = other DNA
tatcacctttggattgttgacgcgttgcgctcagcacactaacccgtgtgtagcttgggtcgatgagtctggacataccccactggcgacagtggtccaggctgcgttggcggcctactcatggtgaaaaccatgagacgctagacatgaacaaggtgtgaagagtctattgagctactatagagtcctccggcccctgaatgcggctaatcctaaccatggagcaagtgctcacacaccagtgagttgcttgtcgtaatgcgcaagtccgtggcggaaccgactactttgggtgtccgtgtttcactttttacccttatgactgcttatggtgacaatttgatattgttaccatttagcttgtcaaatcaattgcaaaagatcctaaatcttatttatcaacttgcattttgataactttaatttgaagatttaata

SEQ ID NO: 21550 - DNA, 438 bp, synthetic construct
  source 1..438: mol_type = other DNA
tatcacctttggattgttgacgcgttgcgctcagcacactaacccgtgtgtagcttgggtcgatgagtctggacataccccactggcgacagtggtccaggctgcgttggcggcctactcatggtgaaaaccatgagacgctagacatgaacaaggtgtgaagagtctattgagctactatagagtcctccggcccctgaatgcggctaatcctaaccatggagcaagtgctcacagaccagtgagttgcttgtcgtaatgcgcaagtccgtggcggaaccgactactttgggtgtccgtgtttcactttttacccttatgactgcttatggtgacaatttgatattgttaccatttagcttgtcaaaccaattgcaaaagatcctaaatcttatttatcaacttgcatttcaacaactttaatttgaagatttaata

SEQ ID NO: 21551 - DNA, 438 bp, synthetic construct
  source 1..438: mol_type = other DNA
tatcacctttggattgttgatgcgttgcgctcagcacactaacccgtgtgtagcttgggtcgatgagtctggacataccccactggcgacagtggtccaggctgcgttggcggcctactcatggtgaaaaccatgagacgctagacatgaacaaggtgtgaagagtctattgagctactatagagtcctccggcccctgaatgcggctaatcctaaccatggagcaagtgctcacagaccagtgagttgcttgtcgtaatgcgcaagtccgtggcggaaccgactactttgggtgtccgtgtttcactttttacccttatgactgcttatggtgacaattcgatattgttaccatttagcttgtcaaaccaattgcaaaagatcctaaatcttatttatcaacttgcatttcgacaactttaatttgaagatttaata

SEQ ID NO: 21552 - DNA, 438 bp, synthetic construct
  source 1..438: mol_type = other DNA
tatcacctttggattgttgatgcgttgcgctcagcacactaacccgtgtgtagcttgggtcgatgagtctggacataccccactggcgacagtggtccaggctgcgttggcggcctactcatggtgaaaaccatgagacgctagacatgaacaaggtgtgaagagtctattgagctactatagagtcctccggcccctgaatgcggctaatcctaaccatggagcaagtgctcacagaccagtgagttgcttgtcgtaatgcgcaagtccgtggcggaaccgactactttgggtgtccgtgtttcactttttacccttatgactgcttatggtgacaatttgatattgttaccatttagcttgtcaaatcaattgcaaaagatcctaaatcttatttatcaacttgcattttgataactttaatttgaagatttaata

SEQ ID NO: 21553 - DNA, 438 bp, synthetic construct
  source 1..438: mol_type = other DNA
tatcacctttggattgttgacgcgttgcgctcagcacactaacccgtgtgtagcttgggtcgatgagtctggacataccccactggcgacagtggtccaggctgcgttggcggcctactcatggtgaaaaccatgagacgctagacatgaacaaggtgtgaagagtctattgagctactatagagtcctccggcccctgaatgcggctaatcctaaccatggagcaagtgctcacagaccagtgagttgcttgtcgtaatgcgcaagtccgtggcggaaccgactactttgggtgtccgtgtttcactttttacccttatgactgcttatggtgacaatttgatattgttaccatttagcttgtcaaatcaattacaaaagatcctaaatcttatttatcaacttgcattttgataactttaatttgaagatttaata

SEQ ID NO: 21554 - DNA, 438 bp, synthetic construct
  source 1..438: mol_type = other DNA
tatcacctttggattgttgacgcgttgcgctcagcacactaacccgtgtgtagcttgggtcgatgagtctggacataccccactggcgacagtggtccaggctgcgttggcggcctactcatggtgaaaaccatgagacgctagacatgaacaaggtgtgaagagtctattgagctactatagagtcctccggcccctgaatgcggctaatcctaaccatggagcaagtgctcacagaccagtgagttgcttgtcgtaatgcgcaagtccgtggcggaaccgactactttgggtgtccgtgtttcactttttacccttatgactgcttatggtgacaatttgatattgttaccatttagcttgtcaaatcaattgcaaaagatcctagatcttacttatcaacttgcattttgataacattaatttgaagatttaata

SEQ ID NO: 21555 - DNA, 438 bp, synthetic construct
  source 1..438: mol_type = other DNA
tatcacctttggattgttgacgcgttgcgctcagcacactaacccgtgtgtagcttgggtcgatgagtctggacataccccactggcgacagtggtccaggctgcgttggcggcctactcatggtgaaaaccatgagacgctagacatgaacaaggtgtgaagagtctattgagctactatagagtcctccggcccctgaatgcggctaatcctaaccatggagcaagtgctcacagaccagtgagttgcttgtcgtaatgcgcaagtccgtggcggaaccgactactttgggtgtccgtgtttcactttttacccttatgactgcttatggtgacaatttgatattgttaccatttagcttgtcaaatcaattgcaaaagatcctaaatcttatttatcaacttgcattttgataactttaatttaaagattcaata

SEQ ID NO: 21556 - DNA, 437 bp, synthetic construct
  source 1..437: mol_type = other DNA
ccacctttggattgttgatgcgttgcactcagcacactaacccgtgtgtagcttgggtcgatgagtctggacatacctcactggcgacagtggtccaggctgcgttggcggcctactcatggtgaaagccatgagacgctagacatgaacaaggtgtgaagagtctattgagctactatagagtcctccggcccctgaatgcggctaatcctaaccatggagcaagtgctcacaggccagtgagttgcttgtcgtaatgcgcaagtccgtggcggaaccgactactttgggtgtccgtgtttcactttttacttttatgactgcttatggtgacaatttgatattgttaccatttagcttgtcaaatcaattgcaaaagatcctaaatcttatttatcaacttgcattttgataactttaatttgaaaattttaaca

SEQ ID NO: 21557 - DNA, 437 bp, synthetic construct
  source 1..437: mol_type = other DNA
ccacctttggattgttgacgcgttgcactcagcacactaacccgtgtgtagcttgggtcgatgagtctggacatacctcactggcgacagtggtccaggctgcgttggcggcctactcatggtgaaagccatgagacgctagacatgaacaaggtgtgaagagtctattgagctactatagagtcctccggcccctgaatgcggctaatcctaaccatggagcaggtgctcacaggccagtgagttgcttgtcgtaatgcgcaagtccgtggcggaaccgactactttgggtgtccgtgtttcactttttacttttatgactgcttatggtgacaatttgatattgttaccatttagcttgtcaaatcaattgcaaaagatcctaaatcttatttatcaacttgcattttgataactttaatttgaaaattttaaca

SEQ ID NO: 21558 - DNA, 437 bp, synthetic construct
  source 1..437: mol_type = other DNA
ccacctttggattgttgacgcgttgcgctcagcacactaacccgtgtgtagcttgggtcgatgagtctggacatacctcactggcgacagtggtccaggctgcgttggcggcctactcatggtgaaagccatgagacgctagacatgaacaaggtgtgaagagtctattgagctactatagagtcctccggcccctgaatgcggctaatcctaaccatggagcaagtgctcacaggccagtgagttgcttgtcgtaatgcgcaagtccgtggcggaaccgactactttgggtgtccgtgtttcactttttacttttatgactgcttatggtgacaatttgatattgttaccatttagcttgtcaaatcaattgcaaaagatcctaaatcttatttatcaacttgcatcttgataactttaatttgaaaattttaaca

SEQ ID NO: 21559 - DNA, 437 bp, synthetic construct
  source 1..437: mol_type = other DNA
tatcacctttggattgttgacgcgttgcgctcagcacactaacccgtgtgtagcttgggtcgatgagtctggacataccccactggcgacagtggtccaggctgcgttggcggcctactcatggtgaaaaccatgagacgctagacatgaacaaggtgtgaagagtctattgagctactatagagtcctccggcccctgaatgcggctaatcctaaccatggagcaagtgctcacagaccagtgagttgcttgtcgtaatgcgcaagtccgtggcggaaccgactactttgggtgtccgtgtttcactttttacctttttgactgcttatggtgacaatttgatattgttaccatttagcttgtcaaatcaattgcaaaagatcctaaatcttatttatcaacttgcatttgataattttaatttgaagatttaata

SEQ ID NO: 21560 - DNA, 436 bp, synthetic construct
  source 1..436: mol_type = other DNA
tcacctttggattgttgacgcgttgcgctcagcacactaacccgtgtgtagcttgggtcgatgagtctggacataccccactggcgacagtggtccaggctgcgttggcggcctactcatggtgaaaaccatgagacgctagacatgaacaaggtgtgaagagtctattgagctactatagagtcctccggcccctgaatgcggctaatcctaaccatggagcaagtgctcacagaccagtgagttgcttgtcgtaatgcgcaagtccgtggcggaaccgactactttgggtgtccgtgtttcactttttacccttatgactgcttatggtgacaatttgatattgttaccatttagcttgtcaaatcaattgcaaaagatcctaaatcttatttatcaacttgcattttgataactttaatttgaagatttaata

SEQ ID NO: 21561 - DNA, 436 bp, synthetic construct
  source 1..436: mol_type = other DNA
tcacctttggattgttgacgcgttgcgctcagcacactaacccgtgtgtagcttgggtcgatgagtctggacacaccccactggcgacagtggtccaggctgcgttggcggcctactcatggtgaaaaccatgagacgctagacatgaacaaggtgtgaagagtctattgagctactatagagtcctccggcccctgaatgcggctaatcctaaccatggagcaagtgctcacagaccagtgagttgcttgtcgtaatgcgcaagtccgtggcggaaccgactactttgggtgtccgtgtttcactttttacccttatgactgcttatggtgacaatttgatattgttaccatttagcttgtcaaaccaattgcaaaagatcctaaatcctatttatcaacttgcatttcaagaactttaatttgaagatttaata

SEQ ID NO: 21562 - DNA, 436 bp, synthetic construct
  source 1..436: mol_type = other DNA
tcacctttggattgttgacgcgttgcgctcagcacactaacccgtgtgtagcttgggtcgatgagtctggacataccccactggcgacagtggtccaggctgcgttggcggcctactcatggtgaaaaccatgagacgctagacatgaacaaggtgtgaagagtctattgagctactatagagtcctccggcccctgaatgcggctaatcctaaccatggagcaagtgctcacagaccagtgagttgcttgtcgtaatgcgcaagtccgtggcggaaccgactactttgggtgaccgtgtttcactttttacccttatgactgcttatggtgacaatttgatattgttaccatttagcttgtcaaatcaattgcaaaagatcctaaatcttatttatcaacttgcattttgataactttaatttgaagatttaata

SEQ ID NO: 21563 - DNA, 436 bp, synthetic construct
  source 1..436: mol_type = other DNA
tcacctttggattgttgacgcgttgcgctcagcacactaacccgtgtgtagcttgggtcgatgagtctggacataccccactggcgacagtggtccaggctgcgttggcggcctactcatggtgaaaaccatgagacgctagacatgaacaaggtgtgaagagtctattgagctactatagagtcctccggcccctgaatgcggctaatcctaaccatggagcaagtgctcacagaccagtgagttgcttgtcgtaatgcgcaagtccgtggcggaaccgactactttgggtgtccgtgtttcactttttacccttatgactgcttatggtgacaatttgatattgttaccatttagcttgtcaaaccaattgcaaaagatcctaaatcttatttatcaacttgcatttcgacaactttaatttgaagatttaata

SEQ ID NO: 21564 - DNA, 328 bp, synthetic construct
  source 1..328: mol_type = other DNA
ccggcccctgaatgcggctaatcctaaccacggagcgtccaccagcaaaccagctggcagggcgtcgtaacgggtaactctgtggcggaaccgactactttgggtgtccgtgtttccttttgatcctatattggctgcttatggtgacaacgataagttgttatcataaagcttttgggttggccacctggaaaaggttatcggtgtttgatattgttcggctttcacgcctaccaataaaacaagctttatatttgttaatttcattttatccatctaaggatattactgaatttcatttacaactcttgcttgcactatcaccaag

SEQ ID NO: 21565 - DNA, 328 bp, synthetic construct; identical to SEQ ID NO: 312
  source 1..328: mol_type = other DNA

SEQ ID NO: 21566 - DNA, 537 bp, synthetic construct
  source 1..537: mol_type = other DNA
tctgtttccccggtgcggttgtatagactgtttccacggttgaaaacaacttatccgttatccgctatagtacttcgagaaacctagtatcatctttggattgttgatgcgttgcgctcagcacactaacccgtgtgtagcttgggtcgatgagtctggacgtaccccactggcgacagtggtccaggctgcgttggcggcctactcatggtgaaaaccatgagacgctaagcatgaacaaggtgtgaagagtctattgagctactatagagtcctccggcccctgaatgcggctaatcttaaccatggagcaagtgctcacaaaccagtgagttgcttgtcgtaatgcgcaagtccgtggcggaaccgactactttgggtgtccgtgtttcactttttacttttatgactgcttatggtgacaattcaatattgttaccatttagcttgtcagatcaatcacgtaaaatcccaaatcttatttagtaatttgtgtttggataacttcatttgaaaatcttaaacttatttgtaaag

SEQ ID NO: 21567 - DNA, 296 bp, synthetic construct
  source 1..296: mol_type = other DNA
tcctccggcccctgaatgcggctaatcctaactgtggagcatgcgcccccactccagagggtagcgtgtcgtaacgggtaactccgcagcggaaccgactactttgggtgtccgtgtttctttttattcttatattggctgcttatggtgacaattgaaaggttgttaccatatagctattggattggccacccagcgacaaacagagcaataatttaccaatttgtgggatttgttccaataagtctgaaagtcttgaagacacttaatctaatattacaactcaatagtgcaaa

SEQ ID NO: 21568 - DNA, 714 bp, synthetic construct
  source 1..714: mol_type = other DNA
agaggcccacgtggcggctagtactccggtattacggtacccttgtacgcctgttttatactcccttccccgtaacttagaagcacaaaaccaagttcaatagaagggggtacaaaccagtaccaccacgaacaagcacttctgtttccccggtgatgttgtatagactgctcgcgcggttgaaagcgacggatccgttatccgcttatgtacttcgagaagcccagtaccaccttggaatcttcgatgcgttgcgctcagcactcaaccccagagtgtagcttaggctgatgagtctggacgtccctcaccggcgacggtggtccaggctgcgttggcggcctacccatggctaacgccatgggacgctagttgtgaacaaggtgtgaagagcctattgagctacataagagtcctccggcccctgaatgcggctaatcccaaccacggggcaggtgatcacaaaccagtgattagcctgtcgtaacgcgcaagctcgtggcggaaccgactactttgggtgtccgtgtttccttttatttttatcatggctgcttatggtgacaatcacagattgttatcataaagcgaattggattggccatccggtgaaagtgagattcattatctatctgtttgttggatttactccattgagtgtgtttactccaagcttaatctcaacagttattctaatcaggcatttgtatcaca

SEQ ID NO: 21569 - DNA, 714 bp, synthetic construct
  source 1..714: mol_type = other DNA
agaggcccacgtggcggctagtactccggtattacggtacccttgtacgcctgttttatactcccttccccgcaacttagaagcacaaaaccaagttcaatagaagggggtacaaaccagtaccaccacgaacaagcacttctgtttccccggtgatgttgtatagactgctcgcgcggttgaaagcgacggatccgttatccgcttatgtacttcgagaagcccagtaccaccttggaatcttcgatgcgttgcgctcagcactcaaccccagagtgtagcttaggctgatgagtctggacgtccctcaccggcgacggtggtccaggctgcgttggcggcctacccatggctaacgccatgggacgctagttgtgaacaaggtgtgaagagcctattgagctacataagagtcctccggcccctgaatgcggctaatcccaaccacggggcaggtgatcacaaaccagtgattggcctgtcgtaacgcgcaagctcgtggcggaaccgactactttgggtgtccgtgtttccttttatttttatcatggctgcttatggtgacaatcacagattgttatcataaagcgaattggattggccatccggtgaaagtgagattcattatctatctgtttgttggatttactccattgagtgtgtttactccaagcttagtctcaacagttattctaatcaggcatttgtatcaca

SEQ ID NO: 21570 - DNA, 714 bp, synthetic construct
  source 1..714: mol_type = other DNA
agaggcccacgtggcggctagtactccggtattacggtacccttgtacgcctgttttatactcccttccccgtaacttagaagcacaaaaccaagttcaatagaagggggtacaaaccagtaccaccacgaacaagcacttctgtttccccggtgatgttgtatagactgctcgcgcggttgaaagcgacggatccgttatccgcttatgtacttcgagaagcccagtaccaccttggaatcttcgatgcgttgcgctcagcactcaaccccagagtgtagcttaggctgatgagtctggacgtccctcaccggcgacggtggtccaggctgcgttggcggcctacccatggctaacgccatgggacgctagttgtgaacaaggtgtgaagagcctattgagctacataagagtcctccggcccctgaatgcggctaatcccaaccacggggcaggtgatcacaaaccagtgattggcctgtcgtaacgcgcaagctcgtggcggaaccgactactttgggtgtccgtgtttccttttatttttatcatggctgcttatggtgacaatcacagattgttatcataaagcgaattggattggccatccggtgaaagtgagattcattatctatctgtttgttggatttactccattgagtgtgtttactccacgcttaatctcaacagttattctaatcaggcatttgtatcaca

SEQ ID NO: 21571 - DNA, 714 bp, synthetic construct
  source 1..714: mol_type = other DNA
agaggcccacgtggcggctagtactccggtattacggtacccttgtacgcctgttttatactcccttccccgtaacttagaagcacaaaaccaagttcaatagaagggggtacaaaccagtaccaccacgaacaagcacttctgtttccccggtgatgttgtatagactgctcgcgcggttgaaagcgacggatccgttatccgcttatgtacttcgagaagcccagtaccaccttggaatcttcgatgcgttgcgctcagcactcaaccccagagtgtagcttaggctgatgagtctggacgtccctcaccggcgacggtggtccaggctgcgttggcggcctacccatggctaacgccatgggacgctagttgtgaacaaggtgtgaagagcctattgagctacataagagtcctccggcccctgaatgcggctaatcccaaccacggggcaggtgatcacaaaccagtgattggcctgtcgtaacgcgcaagctcgtggcggaaccgactactttgggtgtccgtgtttccttttatttttatcatggctgcttatggtgacaatcacagattgttatcataaagcgaattggattggccatccggtgaaagtgagattcattatctatctgtttgttggatttactccattgagtgtgtttactccaagcttaatctcaacagttattctaatcaggcatttgtatcaca

SEQ ID NO: 21572 - DNA, 714 bp, synthetic construct
  source 1..714: mol_type = other DNA
agaggcccacgtggcggctagtactccggtattacggtacccttgtacgcctgttttatactcccttccccgtaacttagaagcacaaaaccaagttcaatagaagggggtacaaaccagtaccaccacgaacaagcacttctgtttccccggtgatgttgtatagactgctcgcgcggttgaaagcgacggatccgttatccgcttatgtacttcgagaagcccagtaccaccttggaatcttcgatgcgttgcgctcagcactcaaccccagagtgtagcttaggctgatgagtctggacgtccctcaccggcgacggtggtccaggctgcgttggcggcctacccatggctaacgccatgggacgctagttgtgaacaaggtgtgaagagcctattgagctacataagagtcctccggcccctgaatgcggctaatcccaaccacggggcaggtgatcacaaaccagtgattggcctgtcgtaacgcgtaagctcgtggcggaaccgactactttgggtgtccgtgtttccttttatttttatcatggctgcttatggtgacaatcacagattgttatcataaagcgaattggattggccatccggtgaaagtgagattcattatctatctgtttgttggatttactccattgagtgtgtttactccaagcttaatctcaacagttattctaatcaggcatttgtatcaca

SEQ ID NO: 21573 - DNA, 714 bp, synthetic construct
  source 1..714: mol_type = other DNA
agaggcccacgtggcggctagtactccggtattacggtacccttgtacgcctgttttatactcccttccccgtaacttagaagcacaaaaccaagttcaatagaagggggtacaaaccagtaccaccacgaacaagcacttctgtttccccggtgatgttgtatagactgctcgcgcggttgaaagcgacggatccgttatccgcttatgtacttcgagaagcccagtaccaccttggaatcttcgatgcgttgcgctcagcactcaaccccagagtgtagcttaggctgatgagtctggacgtccctcaccggcgacggtggtccaggctgcgttggcggcctacccatggctaacgccatgggacgctagttgtgaacaaggtgtgaagagcctattgagctacataagagtcctccggcccctgaatgcggccaatcccaaccacggggcaggtgatcacaaaccagtgattggcctgtcgtaacgcgcaagctcgtggcggaaccgactactttgggtgtccgtgtttccttttatttttatcatggctgcttatggtgacaatcacagattgttatcataaagcgaattggattggccatccggtgaaagtgagattcattatctatctgtttgttggatttactccattgagtgtgtttactccaagcttaatctcaacagttattctaatcaggcatttgtatcaca

SEQ ID NO: 21574 - DNA, 713 bp, synthetic construct
  source 1..713: mol_type = other DNA
agaggcccacgtggcggctagtactccggtattgcggtacccttgtacgcctgttttatactcccttcccgtaacttagacgcacaaaaccaagttcaatagaagggggtacaaaccagtaccaccacgaacaagcacttctgtttccccggtgatgttgcatagactgctcgcgtggttgaaagtgacggatccgttatccgcttatgtacttcgagaagcccagtatcaccttggaatcttcgatgcgttgcgctcagcactcgaccccggagtgtagcttaggctgatgagtctggacattcctcaccggcgacggtggtccaggctgcgttggcggcctacctatggctaacgccataggacgctagttgtgaacaaggtgtgaagagcctattgagctacataagagtcctccggcccctgaatgcggctaatcctaacctcggggcaggtgatcacaaaccagtgattggcctgtcgtaacgcgcaagcccgtggcggaaccgactactttgggtgtccgtgtttccttttatttttattgtggctgcttatggtgacaatcacagattgttatcataaagcgaattggattggccatccggtgaaagtgagatacattatctatctgtttgttggattcgctccattgagtgtgtttactccaagtacaatttcaatagttattttaatcagacaattgtatcata

SEQ ID NO: 21575 - DNA, 713 bp, synthetic construct
  source 1..713: mol_type = other DNA
agaggcccacgtggcggctagtactccggtattgcggtacccttgtacgcctgttttatactcccttcccgtaacttagacgcacaaaaccaagttcaatagaagggggtacaaaccagtaccaccacgaacaagcacttctgtttccccggtgatgttgcatagactgctcgcgtggttgaaagcgacggatccgttatccgcttatgtacttcgagaagcccagtatcaccttggaatcttcgatgcgttgcgctcagcactcgaccccggagtgtagcttaggctgatgagtctggacatccctcaccggcgacggtggtccaggctgcgttggcggcctacctatggctaacgccataggacgctagttgtgaacaaggtgtgaagagcctattgagctacataagagtcctccggcccctgaatgcggctaatcccaacctcggggcaggtgatcacaaaccagtgattggcctgtcgtaacgcgcaagcccgtggcggaaccgactactttgggtgtccgtgtttccttttatttttattgtggctgcttatggtgacaatcacagattgttatcataaagcgaattggattggccatccggtgaaagtgagatacattatctatctgtttgttggattcgctccattgagtgtgtttactccaagtacaatttcaatagttattttaatcagacaattgtatcata

SEQ ID NO: 21576 - DNA, 712 bp, synthetic construct
  source 1..712: mol_type = other DNA
agaggcccacgtggcggctagtactccggtattgcggtacccttgtacgcctgttttatactcccttcccgtaacttagacgcacaaaaccaagttcaatagaagggggtacaaaccagtaccaccacgaacaagcacttctgtttccccggtgatgttgtatagactgctcgcgtggttgaaagcgacggatccgttatccgcttatgtacttcgagaagcccagtaccacctcggaatcttcgatgcgttgcgctcagcactcaaccccagagtgtagcttaggctgatgagtctggacatccctcaccggcgacggtggtccaggctgcgttggcggcctacccatggctgacgccatgggacgctagttgtgaacaaggtgtgaagagcctattgagctacataagaatcctccggcccctgaatgcggctaatcccaacctcggggcaggtgatcacaaaccagtgattggcctgtcgtaacgcgcaagcccgtggcggaaccgactactttgggtgtccgtgtttccttttattttattgtggctgcttatggtgacaatcacagattgttatcataaagcgaattggattggccatccggtgaaagtgagattcattatctatctgtttgttggatttgctccattgagtgtgtttactccaagtataatttcaacagttattttaatcaggcaattgtatcaca

SEQ ID NO: 21577 - DNA, 697 bp, synthetic construct
  source 1..697: mol_type = other DNA
ttaaaacagccttggggttgttcccactccaagggcccacgtggcggctagtactctggtacttcggtacctttgtacgcctgttttatctcccttcccaatgtaatttagaagcttttaaatcaaggctcaataggtggggcgcaaaccagcgctctcatgagcaagcactcctgtctccccggtgtggttgtataaactgttcccacggttgaaaacaacctatccgttatccgctatagtacttcgagaaacctagtatcacctttggattgttgacgcgttgcgctcagcacactaacccgtgtgtagcttgggtcgatgagtctggacataccccactggcgacagtggtccaggctgcgttggcggcctactcatggtgaaaaccatgagacgctagacatgaacaaggtgtgaagagtctattgagctactatagagtcctccggcccctgaatgcggctaatcctaaccatggagcaagtgctcacaggccagtgagttgcttgtcgtaatgcgcaagtccgtggcggaaccgactactttgggtgtccgtgtttcactttttacttttatgactgcttatggtgacaatttgatattgttaccatttagctgtcaaattaattgcaaaaggtcctaagtcttacctaccaatttgcattttgataaccttgatttgaaaattttaata

SEQ ID NO: 21578 - DNA, 686 bp, synthetic construct
  source 1..686: mol_type = other DNA
ttggggttgttcccactccaagggcccacgtggcggctagtactctggtacttcggtacctttgtacgcctgttttatctcccttcccaatgtaatttagaagcttttaaatcaaggctcaataggtggggcgcaaaccagcgctctcatgagcaagcactcctgtctccccggtgtggttgtataaactgttcccacggttgaaaacaacctatccgttatccgctatagtacttcgagaaacctagtatcacctttggattgttgacgcgttgcgctcagcacactaacccgtgtgtagcttgggtcgatgagtctggacataccccactggcgacagtggtccaggctgcgttggcggcctactcatggtgaaaaccatgagacgctagacatgaacaaggtgtgaagagtctattgagctactatagagtcctccggcccctgaatgcggctaatcctaaccatggagcaagtgctcacaggccagtgagttgcttgtcgtaatgcgcaagtccgtggcggaaccgactactttgggtgtccgtgtttcactttttacttttatgactgcttatggtgacaatttgatattgttaccatttagctgtcaaattaattgcaaaagatcctaagtcttacttaccaatttgcattttgataaccttgatttgaaaactttaata

SEQ ID NO: 21579 - DNA, 689 bp, synthetic construct
  source 1..689: mol_type = other DNA
gccttggggttgttcccactccaagggcccacgtggcggctagtactctggtacttcggtacctttgtacgcctgttttatctcccttcccaatgtaatttagaagcttttaaatcaaggctcaataggtggggcgcaaaccagcgctctcatgagcaagcactcctgtctccccggtgtggttgtataaactgttcccacggttgaaaacaacctatccgttatccgctatagtacttcgagaaacctagtatcacctttggattgttgacgcgttgcgctcagcacactaacccgtgtgtagcttgggtcgatgagtctggacataccccactggcgacagtggtccaggctgcgttggcggcctactcatggtgaaaaccatgagacgctagacatgaacaaggtgtgaagagtctattgagctactatagagtcctccggcccctgaatgcggctaatcctaaccatggagcaagtgctcacaggccagtgagttgcttgtcgtaatgcgcaagtccgtggcggaaccgactactttgggtgtccgtgtttcactttttacttttatgactgcttatggtaacaatttgatattgttaccatttagctgtcaaattaattgcaaaagatcctaagtcttacttaccaatttgcattttgataaccttgatttgaaaattttaata

SEQ ID NO: 21580 - DNA, 684 bp, synthetic construct
  source 1..684: mol_type = other DNA
ccccaagggcccacgtggcggctagtactctggtatttcggtacctttgtacgcctgttttatctccctccccaatgtaacttagaagctttcaaatcaaagctcaataggtggagcgcaagccaacgcttccgtgagcaagtacttctgtttccccggtgcggttgtatagactgttcccacggttaaaaacaacctatccgttatccgctatagtacttcgagaaacctagtatcacctttggattgttgatgcgttgcgctcaacacactaacccgtgtgtagcttgggttgatgagtctggacataccccactggtgacagtggtccaggctgcgttggcggcctactcatggtgaaaaccatgagacgctagacatgaacaaggtgtgaagagtctattgagctactatagagtcctccggcccctgaatgcggctaatcttaaccatggagcaagtgctcacaaaccagtgagttgcttgtcgtaatgcgcaagtccgtggcggaaccgactactttgggtgtccgtgtttcactttttacttttatgactgcttatggtgacaatttaatattgttaccattcagctagtcgaaataatcgcataaaactttaaatcctatctaacagttcacatttggatagttttattttaaggactttaaacctacctagaaag

SEQ ID NO: 21581 - DNA, 438 bp, synthetic construct; identical to SEQ ID NO: 1319
  source 1..438: mol_type = other DNA

SEQ ID NO: 21582 - DNA, 724 bp, synthetic construct; identical to SEQ ID NO: 1320
  source 1..724: mol_type = other DNA

SEQ ID NO: 21583 - DNA, 438 bp, synthetic construct; identical to SEQ ID NO: 1321
  source 1..438: mol_type = other DNA

SEQ ID NO: 21584 - DNA, 438 bp, synthetic construct; identical to SEQ ID NO: 1322
  source 1..438: mol_type = other DNA

SEQ ID NO: 21585 - DNA, 438 bp, synthetic construct; identical to SEQ ID NO: 1323
  source 1..438: mol_type = other DNA

SEQ ID NO: 21586 - DNA, 438 bp, synthetic construct; identical to SEQ ID NO: 1324
  source 1..438: mol_type = other DNA

SEQ ID NO: 21587 - DNA, 438 bp, synthetic construct; identical to SEQ ID NO: 1325
  source 1..438: mol_type = other DNA

SEQ ID NO: 21588 - DNA, 438 bp, synthetic construct; identical to SEQ ID NO: 1326
  source 1..438: mol_type = other DNA

SEQ ID NO: 21589 - DNA, 438 bp, synthetic construct; identical to SEQ ID NO: 1327
  source 1..438: mol_type = other DNA

SEQ ID NO: 21590 - DNA, 438 bp, synthetic construct; identical to SEQ ID NO: 1328
  source 1..438: mol_type = other DNA

SEQ ID NO: 21591 - DNA, 438 bp, synthetic construct; identical to SEQ ID NO: 1329
  source 1..438: mol_type = other DNA

SEQ ID NO: 21592 - DNA, 438 bp, synthetic construct; identical to SEQ ID NO: 1331
  source 1..438: mol_type = other DNA

SEQ ID NO: 21593 - DNA, 733 bp, synthetic construct; identical to SEQ ID NO: 1333
  source 1..733: mol_type = other DNA

SEQ ID NO: 21594 - DNA, 729 bp, synthetic construct; identical to SEQ ID NO: 1334
  source 1..729: mol_type = other DNA

SEQ ID NO: 21595 - DNA, 729 bp, synthetic construct; identical to SEQ ID NO: 1335
  source 1..729: mol_type = other DNA

SEQ ID NO: 21596 - DNA, 579 bp, synthetic construct; identical to SEQ ID NO: 1352
  source 1..579: mol_type = other DNA

SEQ ID NO: 21597 - DNA, 555 bp, synthetic construct; identical to SEQ ID NO: 1374
  source 1..555: mol_type = other DNA

SEQ ID NO: 21598 - DNA, 555 bp, synthetic construct; identical to SEQ ID NO: 1375
  source 1..555: mol_type = other DNA

SEQ ID NO: 21599 - DNA, 556 bp, synthetic construct; identical to SEQ ID NO: 1376
  source 1..556: mol_type = other DNA

SEQ ID NO: 21600 - DNA, 556 bp, synthetic construct; identical to SEQ ID NO: 1377
  source 1..556: mol_type = other DNA

SEQ ID NO: 21601 - DNA, 555 bp, synthetic construct; identical to SEQ ID NO: 1378
  source 1..555: mol_type = other DNA

SEQ ID NO: 21602 - DNA, 555 bp, synthetic construct; identical to SEQ ID NO: 1379
  source 1..555: mol_type = other DNA

SEQ ID NO: 21603 - DNA, 555 bp, synthetic construct; identical to SEQ ID NO: 1380
  source 1..555: mol_type = other DNA

SEQ ID NO: 21604 - DNA, 555 bp, synthetic construct; identical to SEQ ID NO: 1381
  source 1..555: mol_type = other DNA

SEQ ID NO: 21605 - DNA, 555 bp, synthetic construct; identical to SEQ ID NO: 1382
  source 1..555: mol_type = other DNA

SEQ ID NO: 21606 - DNA, 555 bp, synthetic construct; identical to SEQ ID NO: 1383
  source 1..555: mol_type = other DNA

SEQ ID NO: 21607 - DNA, 555 bp, synthetic construct; identical to SEQ ID NO: 1384
  source 1..555: mol_type = other DNA

SEQ ID NO: 21608 - DNA, 555 bp, synthetic construct; identical to SEQ ID NO: 1385
  source 1..555: mol_type = other DNA

SEQ ID NO: 21609 - DNA, 555 bp, synthetic construct; identical to SEQ ID NO: 1386
  source 1..555: mol_type = other DNA

SEQ ID NO: 21610 - DNA, 555 bp, synthetic construct; identical to SEQ ID NO: 1387
  source 1..555: mol_type = other DNA

SEQ ID NO: 21611 - DNA, 555 bp, synthetic construct; identical to SEQ ID NO: 1388
  source 1..555: mol_type = other DNA

SEQ ID NO: 21612 - DNA, 555 bp, synthetic construct; identical to SEQ ID NO: 1389
  source 1..555: mol_type = other DNA

SEQ ID NO: 21613 - DNA, 558 bp, synthetic construct; identical to SEQ ID NO: 1390
  source 1..558: mol_type = other DNA

SEQ ID NO: 21614 - DNA, 555 bp, synthetic construct; identical to SEQ ID NO: 1391
  source 1..555: mol_type = other DNA

SEQ ID NO: 21615 - DNA, 555 bp, synthetic construct; identical to SEQ ID NO: 1392
  source 1..555: mol_type = other DNA

SEQ ID NO: 21616 - DNA, 555 bp, synthetic construct; identical to SEQ ID NO: 1393
  source 1..555: mol_type = other DNA

SEQ ID NO: 21617 - DNA, 555 bp, synthetic construct; identical to SEQ ID NO: 1394
  source 1..555: mol_type = other DNA

SEQ ID NO: 21618 - DNA, 555 bp, synthetic construct; identical to SEQ ID NO: 1395
  source 1..555: mol_type = other DNA

SEQ ID NO: 21619 - DNA, 555 bp, synthetic construct; identical to SEQ ID NO: 1396
  source 1..555: mol_type = other DNA

SEQ ID NO: 21620 - DNA, 556 bp, synthetic construct; identical to SEQ ID NO: 1397
  source 1..556: mol_type = other DNA

SEQ ID NO: 21621 - DNA, 555 bp, synthetic construct; identical to SEQ ID NO: 1398
  source 1..555: mol_type = other DNA

SEQ ID NO: 21622 - DNA, 555 bp, synthetic construct; identical to SEQ ID NO: 1399
  source 1..555: mol_type = other DNA

SEQ ID NO: 21623 - DNA, 555 bp, synthetic construct; identical to SEQ ID NO: 1400
  source 1..555: mol_type = other DNA

SEQ ID NO: 21624 - DNA, 555 bp, synthetic construct; identical to SEQ ID NO: 1401
  source 1..555: mol_type = other DNA

SEQ ID NO: 21625 - DNA, 556 bp, synthetic construct; identical to SEQ ID NO: 1403
  source 1..556: mol_type = other DNA

SEQ ID NO: 21626 - DNA, 556 bp, synthetic construct; identical to SEQ ID NO: 1404
  source 1..556: mol_type = other DNA

SEQ ID NO: 21627 - DNA, 555 bp, synthetic construct; identical to SEQ ID NO: 1405
  source 1..555: mol_type = other DNA

SEQ ID NO: 21628 - DNA, 556 bp, synthetic construct; identical to SEQ ID NO: 1407
  source 1..556: mol_type = other DNA

SEQ ID NO: 21629 - DNA, 554 bp, synthetic construct; identical to SEQ ID NO: 1408
  source 1..554: mol_type = other DNA

SEQ ID NO: 21630 - DNA, 556 bp, synthetic construct; identical to SEQ ID NO: 1409
  source 1..556: mol_type = other DNA

SEQ ID NO: 21631 - DNA, 557 bp, synthetic construct; identical to SEQ ID NO: 1410
  source 1..557: mol_type = other DNA

SEQ ID NO: 21632 - DNA, 556 bp, synthetic construct; identical to SEQ ID NO: 1411
  source 1..556: mol_type = other DNA

SEQ ID NO: 21633 - DNA, 556 bp, synthetic construct; identical to SEQ ID NO: 1412
  source 1..556: mol_type = other DNA

SEQ ID NO: 21634 - DNA, 556 bp, synthetic construct; identical to SEQ ID NO: 1413
  source 1..556: mol_type = other DNA

SEQ ID NO: 21635 - DNA, 556 bp, synthetic construct; identical to SEQ ID NO: 1414
  source 1..556: mol_type = other DNA

SEQ ID NO: 21636 - DNA, 558 bp, synthetic construct; identical to SEQ ID NO: 1415
  source 1..558: mol_type = other DNA

SEQ ID NO: 21637 - DNA, 555 bp, synthetic construct; identical to SEQ ID NO: 1416
  source 1..555: mol_type = other DNA

SEQ ID NO: 21638 - DNA, 557 bp, synthetic construct; identical to SEQ ID NO: 1417
  source 1..557: mol_type = other DNA

SEQ ID NO: 21639 - DNA, 555 bp, synthetic construct; identical to SEQ ID NO: 1418
  source 1..555: mol_type = other DNA

SEQ ID NO: 21640 - DNA, 555 bp, synthetic construct; identical to SEQ ID NO: 1420
  source 1..555: mol_type = other DNA

SEQ ID NO: 21641 - DNA, 557 bp, synthetic construct; identical to SEQ ID NO: 1421
  source 1..557: mol_type = other DNA

SEQ ID NO: 21642 - DNA, 557 bp, synthetic construct; identical to SEQ ID NO: 1422
  source 1..557: mol_type = other DNA

SEQ ID NO: 21643 - DNA, 557 bp, synthetic construct; identical to SEQ ID NO: 1424
  source 1..557: mol_type = other DNA

SEQ ID NO: 21644 - DNA, 557 bp, synthetic construct; identical to SEQ ID NO: 1425
  source 1..557: mol_type = other DNA

SEQ ID NO: 21645 - DNA, 559 bp, synthetic construct; identical to SEQ ID NO: 1426
  source 1..559: mol_type = other DNA

SEQ ID NO: 21646 - DNA, 556 bp, synthetic construct; identical to SEQ ID NO: 1427
  source 1..556: mol_type = other DNA

SEQ ID NO: 21647 - DNA, 556 bp, synthetic construct; identical to SEQ ID NO: 1428
  source 1..556: mol_type = other DNA

SEQ ID NO: 21648 - DNA, 556 bp, synthetic construct; identical to SEQ ID NO: 1429
  source 1..556: mol_type = other DNA

SEQ ID NO: 21649 - DNA, 557 bp, synthetic construct; identical to SEQ ID NO: 1430
  source 1..557: mol_type = other DNA

SEQ ID NO: 21650 - DNA, 776 bp, synthetic construct; identical to SEQ ID NO: 1431
  source 1..776: mol_type = other DNA

SEQ ID NO: 21651 - DNA, 556 bp, synthetic construct; identical to SEQ ID NO: 1433
  source 1..556: mol_type = other DNA

SEQ ID NO: 21652 - DNA, 174 bp, synthetic construct
  source 1..174: mol_type = other DNA
aatttaaatatgttaataatgctgaagacaagtatttcgattattaacctctatatttctatataaagtatctgtgagtctcagtggacatcacagtaaggtcgcagttaacttgtaatcttttcattcctgtgtcggagcagtggtaatggagccggacgatttcgccaaaac

SEQ ID NO: 21653 - DNA, 174 bp, synthetic construct
  source 1..174: mol_type = other DNA
ttgcctctctcaacaaaaagccaccgacattaagagagagagtattgctgcttagttaactgcaggccctatttagggttaccgcccaggatctgcaacagcattcctgtatcatccagggcaccggtggacttggtgaggattgagttgacctcatcattagagaccagactc

SEQ ID NO: 21654 - DNA, 190 bp, synthetic construct
  source 1..190: mol_type = other DNA
ccaacaatgtgatcttgcttgcggaggcaaaatttgcacagtataaaatctgcaagtagtgctattgttggaatcaccgtacctatttaggtttacgctccaagatcggtggatagcagccctatcaatatctaggagaactgtgctatgtttagaagattaggtagtctctaaacagaacaatttacct

SEQ ID NO: 21655 - DNA, 174 bp, synthetic construct
  source 1..174: mol_type = other DNA
ctgatctcttgttagatctttttgtaatctaaactttataaaaacatccactccctgtaatctatgcttgtgggcgtagatttttcatagtggtgtttatattcatttctgctgttaacagctttcagccagggacgtgttgtatcctaggcagtggcccgcccataggtcaca

SEQ ID NO: 21656 - DNA, 174 bp, synthetic construct
  source 1..174: mol_type = other DNA
ggttttgttgtcgttttggaatgtcccatgtcggagatgtcgttaccggtgtttgctttacttgtgcacgaataagaaaacagagtttggagttttggaagttaatggataacatcaagtttccattgcgttcctcgtgcattttaggccagaaaatcgaccacaaaatcgaga

SEQ ID NO: 21657 - DNA, 212 bp, synthetic construct
  source 1..212: mol_type = other DNA
tagcaccacccgatcgtaaactccatgtattggttacccatctgcatcgaaaactctccgaacactaggtgcagtaaggctttcatggagtggtttgctatttagcgtacgtgtaccataggcagccccaaaaacacgtgtgaggagaaagtcccagtcactttgggcaaagtagacagccgcgcttgcgtggtgggacttaattaatgcct

SEQ ID NO: 21658 - DNA, 590 bp, synthetic construct
  source 1..590: mol_type = other DNA
taattcctgcaggttcagggttcttaaatctgtttctctataagaacactcatttttcacgctttctgtcttctttcttccagggctctccccttgccctaggctctggccgttgcgcccggcggggtcaactccatgattagcatggagctgtaggagtctaaattggggacacagatgtttggaacgtcaccttgcagtgttaacttggctttcatgaatctctttgatcttccacaaggggtaggctacgggtgaaacctcttaggctaatacttctatgaagagatgccttggatagggtaacagcggcggatattggtgagttgttaagacaaaaaccattcaacgccggaggactgactctcatccagtggatgcattgagtggattgactgtcagggctgtctttaggcttaattccagacctctctgtgcttagggcaaacatcatttggccttaaatgggattctgtgagaggggatccctccattgacagctggactgttctttggggccttatgtggtgtttgcctctgaggtactcaggggcatttaggtttttcctcattcttaaataataatgaac

SEQ ID NO: 21659 - DNA, 232 bp, synthetic construct
  source 1..232: mol_type = other DNA
gcctccaggaccccccctcccgggagagccatagtggtctgcggaaccggtgagtacaccggaattgccaggacgaccgggtcctttcttggataaacccgctcaatgcctggagatttgggcgtgcccccgcaagactgctagccgagtagtgttgggtcgcgaaaggccttgtggtactgcctgatagggtgcttgcgagtgccccgggaggtctcgtagaccgtgcacc

SEQ ID NO: 21660 - DNA, 174 bp, synthetic construct
  source 1..174: mol_type = other DNA
tagacaatcctgaccgggcaataggactgcattgcatatccttaggtggtattgagaaacctctgccacccaccggcgtggatctctatggggggggccccatagactgggtctatactgcctgatagggtcgcggctggtcgaccactgactgtataaccagttgtactcaac

SEQ ID NO: 21661 - DNA, 174 bp, synthetic construct
  source 1..174: mol_type = other DNA
agttgatcctgccagcggtgggtcgctactgtttcgcgaaccagtcgttttgacagttggttgggatcaaatttgttctgtgcgcgtcacgccactttttgtggcgggaatgtgcgaaaataacaggaaaaagaaccctggaaagggttcaaagaagaaaaagaatgctggaag

SEQ ID NO: 21662 - DNA, 174 bp, synthetic construct
  source 1..174: mol_type = other DNA
cagacaagcaccccacccatcccagaaaccgcacggccgagaatcgatccccagcattcaaaatgcgttattaagaaaaaacatatgatgaagattaaaaccttcatcaacattgcacagactttgatccttaggagtttattctagctatctacaaaacgggtccaaaacgga

SEQ ID NO: 21663 - DNA, 174 bp, synthetic construct
  source 1..174: mol_type = other DNA
taattctaattgctgtccttggctctagcatgatcctagtgagcatcttcattataatcaagaaaacaaagaaaccaacgggagcacctccagagctgagtggtgtcacaaacaatggcttcataccacacagttagttaattaaaaataaaataaaatttgggacaaatcata

SEQ ID NO: 21664 - DNA, 174 bp, synthetic construct
  source 1..174: mol_type = other DNA
ttgtataagtgatttaggatttaccccagaagtgaaataattcttagaataaaagaccgactagaatatccttaaggctgtctaacgtgccacacagctagggttagcctgacatctggaacaagatcgatactaatatagggatttgtttcatactagctctctgcaaacaca

SEQ ID NO: 21665 - DNA, 174 bp, synthetic construct
  source 1..174: mol_type = other DNA
ccgcaggtcacatgtgttaggtttcacagattctatatattactaactctatactcgtaattaacattagataagtagattaagaaaaaagcctgaggaagattaagaaaaactgcttattgggtctttccgtgttttagatgaagcagttgaaattcttcctcttgatattaa

SEQ ID NO: 21666 - DNA, 213 bp, synthetic construct
  source 1..213: mol_type = other DNA
tttgggaatcgcaacacaacatggttacccatagattgaggaaatttccaataaactcagtattaaggcttgttgtgttggacaaggtgccctatttagggtgaggagccttactggcagccccagtgaatcctccattggataggaacagctatattgggtagttgtagcagttgtattcaaatgaatgcagcgttccgaaatatcatacct

SEQ ID NO: 21667 - DNA, 174 bp, synthetic construct
  source 1..174: mol_type = other DNA
ttattcttgaatggctgcttatggtgacaatcatagattgttatcataaagcgagttggattggccatccagtgtgaatcagattaattactcccttgtttgttggatccactcccgaaacgttttactccttaacttattgaaattgtttgaagacaggatttcagtgtcaca

SEQ ID NO: 21668 - DNA, 579 bp, synthetic construct; identical to SEQ ID NO: 14837
  source 1..579: mol_type = other DNA

SEQ ID NO: 21669 - DNA, 174 bp, synthetic construct
  source 1..174: mol_type = other DNA
ggctaaaaaaaatggcgcaatccatagtcgtagatggggactacgacgctcttgctagtagatatcttaaatttgtttatgattttgaaaatgtaacttatcaaaataattacttcgccacagataaatttaaaaaagacatagagcaatatcttaaatcaatccatgatggag

SEQ ID NO: 21670 - DNA, 174 bp, synthetic construct
  source 1..174: mol_type = other DNA
aatgattttgaaacatattaagatgtttatacgagcgtgttgtttactattttcaggatatgtggaagcggttgtgtatgatctatacgcacatttagttcccagagggcgttgtcgtctccccctaagcaagggagaaacacgtggcacatgatcttgcgcttaacgataaaa

SEQ ID NO: 21671 - DNA, 178 bp, synthetic construct
  source 1..178: mol_type = other DNA
tgatcttgctttcgtaataaaattctgtacataaaagtcgaaagtattgctatagttaaggttgcgcttgcctatttaggcatacttctcaggatggcgcgttgcagtccaacaagatccagggactgtacagaattttcctatacctcgagtcgggtttggaatctaaggttgactc

SEQ ID NO: 21672 - DNA, 385 bp, synthetic construct; identical to SEQ ID NO: 16348
  source 1..385: mol_type = other DNA

SEQ ID NO: 21673 - DNA, 174 bp, synthetic construct
  source 1..174: mol_type = other DNA
ggcaaaaaaagcccaacacgcaatgcgtttattgcaattcagttcactggtgcaatgagggtattggggctttttgaacgtgggaataacttgaatttcgcagatacctacgtatatacatggaaccaacagtactcgtatcatgaaaatgcattcctaatttcaaatcaagta

SEQ ID NO: 21674 - DNA, 174 bp, synthetic construct
  source 1..174: mol_type = other DNA
gaaattcccctgtattgtaataagacctcattaacatatttcccctgcttagtactatgcagaaacccccgagcaaattaaaattgatgaagattaagaaaaagagggattttctcaggaaaaatcttttttcttaccttcatctcatttaaacaaatttaggactcaggaaaa

SEQ ID NO: 21675 - DNA, 174 bp, synthetic construct
  source 1..174: mol_type = other DNA
gagaggcaatcttcctcccgtgaaggacacaagcagtagctcacaatcatctcgtgtttcagcaaagtgtgcataattataaagtgctgggtcatctaagcttttcagtcgagaaaaaaacagtagatcagaagaacaactggcaacacttctcatcctgagacctacttcaag

SEQ ID NO: 21676 - DNA, 174 bp, synthetic construct
  source 1..174: mol_type = other DNA
tcagcttacgatctcttgtcagatctcattaaatctaaactttttaaacaagattccctgttatccatgcttgtgagtgtggtttaatcataatcttgtattttactttccacacttttcatctctctgccagtgacgtgttggttgtcctcagcgtccctcccataggtcgca

SEQ ID NO: 21677 - DNA, 174 bp, synthetic construct
  source 1..174: mol_type = other DNA
cttggtttctggagacaggctaaggatgcccttcaggtaccccgaggtaacaagcgacactcgggatctgagaaggggattggggcttctatccaagcgcccaatttaaaaagcttctatgcctgaataggtgaccggaggccggcaccttttcctttacccacaacttacttt

SEQ ID NO: 21678 - DNA, 204 bp, synthetic construct
  source 1..204: mol_type = other DNA
aacgtttctcttctggttaccagcaacataggaaattgtcgttgaactacatgttgtaaggctttagagaaataagggagtgtcctatttaggatgaggtgctccggtggcagccccaccaaaacctctagcgactaggaacagctatatcgggttgctatagcagtcaggatgtcattctggcgttccgaaatacccaaacct

SEQ ID NO: 21679 - DNA, 628 bp, synthetic construct
  source 1..628: mol_type = other DNA
cactgggtgcaagccccagaaaccgacgcctatctaagtagacgcaatgactcggcgccaactcggcgaccggccaaaaggtggtggatgggtgatgacagggttggtaggtcgtaaatcccggtcaccttggtagccactataggtgggtcttaagagaaggttaagattcctcttgtgcctgcggcgagaccgcgcacggtccacaggtgttggccctaccggtgtgaataagggcccgacgtcaggctcgtcgttagaccgagcccgtcacccacctgggcaaacgtcgcccacgtacggtccacgtcgcccttcaatgtctctcttgaccaataggcttagccggccgagttgacaaggaccagtgggggtcgggggcttggggagggaccccaagtcctgcccttcccggtgggccgggaaatgcatggggccacccagctccgcggcggcctgcagccggggtagcccaagaatccttcgggtgagggcgggtggcatttctcttttctataccatcatggcagtccttctgctccttctcgtggtcgaggccggggccattctggccccggccacccacgcttgtcgagcgaatgggcaatacttcctcacaaactgttgc

SEQ ID NO: 21680 - DNA, 174 bp, synthetic construct
  source 1..174: mol_type = other DNA
ttggctcattatttctgttgtttttgttgtattgttgagtcttcttgtgttttgttgtctttctacaggttgttgtggttgttgcaattgtttaacttcatcaatgcgaggctgttgtgattgtggttcaactaaacttccttattacgaatttgaaaaggtccacgttcaata

SEQ ID NO: 21681 - DNA, 642 bp, synthetic construct
  source 1..642: mol_type = other DNA
aactctaagccgaacaattatagctaggctttttattatataacattaattaggcattagcgttgtcgccaatctcttggtaatcctaaggatacctttcctgttgactaagatgaagcgccttcggttaccgatgcccggtgtccacgaagccatcgtggtcggccgcgtcccccacctctcccaacttggactccatgttttcagtaggtgtaatgattagtattattgattctgctcgttcaatgtgtttatcttcacgatctgggacccaacacatgcttcactcatgtttaaatgttggttccctcattttgaagacacccaaaccatagagtgcgagaatgaggatttctacttccattctggtaacagaaatgaattcctgcgtgtgtctcgtaaatggaatctttaagaacttcagataaatcgaacaatacactaatacaagttgttttctaccaacatgttcaatgcggctaatctgaccgtggagctgtgaagcgctcaaacccgagtgttgtatacagtcgtaatgcgtaagtccatgaggaaccgactactgttacctctgttggtgtgtttctcctttattctcttttattattatttgttattgcaaatactacaactttgatcaac

SEQ ID NO: 21682 - DNA, 353 bp, synthetic construct
  source 1..353: mol_type = other DNA
ttcgataccaagagctggtgtctgagggattacgactcgcgtggtcggacagcacatgttagtcatgtattatggtgtttcccaacacgtatctttgctctagtattgaactttagtgatgagtgtacttggcatgtacacctgattagttagcccttgtggatacgccactgccgctcaggtacagtaggacataccccaaatattgggttccactcgtagagaagaaaattagtggcgaaacgtacggtttatgtcaaaggagaaggtgattttaattgcacctgaagcaaccctaggtcttccctttgatgtgagctaataaggagtaaccgattcttacaatgtgatca

SEQ ID NO: 21683 - DNA, 174 bp, synthetic construct
  source 1..174: mol_type = other DNA
tgctgctatacattggctgcttatggtgacaattgacaaattgttaccatatagctattggattggccatccggtgacaaacagagctattgtttacttgtttgttggtttcataccattaaattacaaggtcttagaaactctcaactttattttgacactcaatacagcaaa

SEQ ID NO: 21684 - DNA, 174 bp, synthetic construct
  source 1..174: mol_type = other DNA
ggctataaaatggcttcgctcatttatagacaattgctcacgaattcttatacagtagatttatccgatgagatacaagagattggatcaactaaatcacaaaatgtcacaattaatcctggaccatttgcgcaaacaggttatgctccagttaactggggacctggagaaatt

SEQ ID NO: 21685 - DNA, 174 bp, synthetic construct
  source 1..174: mol_type = other DNA
gtattaaaaattgatagcgcttgcgtaagagtaagatctcaagatggatcctgtatctgtagtacatagcttcgctaggagtcaaggcctgccacttaactttgaaactgtgggttgtgagggtccaagtcacgacccacgctttgtaattgaatgtaaatttcttgatttcca

SEQ ID NO: 21686 - DNA, 395 bp, synthetic construct
  source 1..395: mol_type = other DNA
tcccgcatggcaagggcgtgctaccttgccccttgacgcatggtatgcgtcatcatttgccttggttaagccccatagaaacgaggcgtcacgtgccgaaaatccctttgcgtttcacagaaccatcctaaccatgggtgtagtatgggaatcgtgtatggggatgattaggatctctcgtagagggataggtgtgccattcaaatccagggagtactctggctctgacattgggacatttgatgtaaccggacctggttcagtatccgggttgtcctgtattgttacggtgtatccgtcttggcacactgaaagggtatttttgggtaatcctttcctactgcctgatagggtggcgtgcccggccacgagagattaagggtagcaatttaaac

SEQ ID NO: 21687 - DNA, 174 bp, synthetic construct
  source 1..174: mol_type = other DNA
tgcgtgtctccccgcacttgtggttaaaaccatgaaagttcatcccaaacaatcttttcctcttctttttcttttagtggtgacaacctactggattggtgattaccaatctgtactagtgttgtattaagacttgttgtgtggagaaaatggactctttcaagaagatttttg

SEQ ID NO: 21688 - DNA, 174 bp, synthetic construct
  source 1..174: mol_type = other DNA
cgcacatgtgatcctaggcgattcttgatcgcgcttattagctaaccaatttaatttggtgttgaagtgttgacacgctctctaacacatggggcagcttatcagcttctttcaggagattcctgtttttctacaggaagctctgaacatcgctttagtggctgttagtctcat

SEQ ID NO: 21689 - DNA, 174 bp, synthetic construct
  source 1..174: mol_type = other DNA
gtataaattttgtatccgatagtagcacatagaatcacaatcacatccccgttttttgaaattttataatttctacagcaaattttatatcaaatgcctaggaaaaaggagcaggccagcaagagtgaaaatgaaaagcaaacaagtaacgttcaagctcaagatttcaaaact

SEQ ID NO: 21690 - DNA, 174 bp, synthetic construct
  source 1..174: mol_type = other DNA
ttatgtgagcctgtgtgagctgacaaacttagtagtgtttgtgaggattaacaacaattaacacagtgcgagctgtttcttagcacgaagatctcgatgtctaagaaaccaggagggcccggcaagagccgggctgtcaatatgctaaaacgcggaatgccccgcgtgttgtcc

SEQ ID NO: 21691 - DNA, 445 bp, synthetic construct; identical to SEQ ID NO: 488
  source 1..445: mol_type = other DNA

SEQ ID NO: 21692 - DNA, 174 bp, synthetic construct
  source 1..174: mol_type = other DNA
cttaagcgcctctgtagggaagccaggaatgtccaggaggtaccccttccgctcggaagggatctgacctggagacacatcacatgtgctttacacctgtgcttgtgtttaaaaattgtcgcagcttccccaaaccaagtggtcttggttttctctttttattatattgtcaat

SEQ ID NO: 21693 - DNA, 334 bp, synthetic construct
  source 1..334: mol_type = other DNA
ttcagggcctccctccagcgacggccgaactgggctagccatgcccacagtaggactagcaaacggagggactagccgtagtggcgagctccctgggtggtctaagtcctgagtacaggacagtcgtcagtagttcgacgtgagcagaagcccacctcgagatgctatgtggacgagggcatgcccaagacacaccttaaccctagcgggggtcgctagggtgaaatcacaccacgtgatgggagtacgacctgatagggcgctgcagaggcccactattaggctagtataaaaatctctgctgtacatggcacatggagttgaatcattttga

SEQ ID NO: 21694 - DNA, 174 bp, synthetic construct
  source 1..174: mol_type = other DNA
gtaatcaaggtagattttgtgctacattcactctttatggtaaatccaaacattatgataaatattttggagtaataaatggtttcacagcattcgctaatactgtagaggatgctgttaacaaactggttttcttagctgttgactttattacctggcgcagacaggagttaa

SEQ ID NO: 21695 - DNA, 211 bp, synthetic construct
  source 1..211: mol_type = other DNA
taaaaagcaaaaatgtgatcttgcttgtaaatacaattttgagaggttaataaattacaagtagtgctatttttgtatttaggttagctatttagctttacgttccaggatgcctagtggcagccccacaatatccaggaagccctctctgcggtttttcagattaggtagtcgaaaaacctaagaaatttacctgctacatttcaagata

SEQ ID NO: 21696 - DNA, 174 bp, synthetic construct
  source 1..174: mol_type = other DNA
gtgggtgtggttgtgcatttcagtcgtgctcatctttgtggtgagtatgttgctattatgttgttgttctactggttgctgtggcttctttagttgttttgcatcttctattagaggttgttgtgaatcaactaaacttccttattacgacgttgaaaagatccacatacagta

SEQ ID NO: 21697 - DNA, 174 bp, synthetic construct
  source 1..174: mol_type = other DNA
ttgtagatctctcacgcattttagtgtcatgaattagtgtttcaaatcagttgcatatcaattaagaaaaacttaggagacaggtatagaacctctctttcagataactggtcaattaaggacagaaattctgtttctcaaatccgctagcctttgtcaaagaggacacaagca

SEQ ID NO: 21698 - DNA, 174 bp, synthetic construct
  source 1..174: mol_type = other DNA
ctaataaattaagaaaaacttaggacccaagtcctttaaacgtgcatgattgagatagtcagaaattggagctaatttgaatactagtgagtaaattaggagtagtagtattgaaccacctcatatcttatttcttctgaactgcattaaaatttgtacccaggatataacaac

SEQ ID NO: 21699 - DNA, 174 bp, synthetic construct
  source 1..174: mol_type = other DNA
gctctgacattgggacatttgatgtaaccggacctggttcagtatccgggttgtcctgtattgttacggtgtatccgtcttggcacactgaaagggtatttttgggtaatcctttcctactgcctgatagggtggcgtgcccggccacgagagattaagggtagcaatttaaac

SEQ ID NO: 21700 - DNA, 77 bp, synthetic construct
  source 1..77: mol_type = other DNA
cagagagagtaacgcacaatcactactcaaacgacaacagcaaagcgcaatacatacggatctcaactgggcaataa

SEQ ID NO: 21701 - DNA, 191 bp, synthetic construct
  source 1..191: mol_type = other DNA
gactatgtgatcttattaaaattaggttaaatttcgaggttaaaaatagttttaatattgctatagtcttagaggtcttgtatatttatacttaccacacaagatggaccggagcagccctccaatatctagtgtaccctcgtgctcgctcaaacattaagtggtgttgtgcgaaaagaatctcacttcaa

SEQ ID NO: 21702 - DNA, 174 bp, synthetic construct
  source 1..174: mol_type = other DNA
gcgtaagtctgggacggaaccgactactttgggtgtccgtgtttcctgttttacttactttggctgcttatggtgacaatctagtgttgttaccatatagctattggattggccatccggtgttttgaattgtgtgtttatactaattcttttacatatcacagacaaccaaat

SEQ ID NO: 21703 - DNA, 549 bp, synthetic construct
  source 1..549: mol_type = other DNA
caaaattgcgtgcgagaaagcacgcaaatcaaagtctagtgcgtaattcactcactaccggcgtaatttgtggttatgctattgcgttgagagtgttgtgggcgtagtacgggggcttttggtttgtgtgtgattaatatgcattcccagttttgtttagttttagattactgatttatttttcgaactacccgaatttatttaggctcttcgagaaataatgatgaactgtcctcaacaagtatgaaaagcaattatttgtgaagttacttgttgttgtaagattattgacctcttagatttttctaagttgtaatgctttgttttctgattgactagattatgaatccaattaaaaggagtagtggtctaatatagtctgtgtgacctgcaggcattttgtgaaaagggtaaagtatgaaagctactctcagaaaagtacttatgtattgatgagagccttaaaatgactttatattcacaaaactgctggaagacaatgatctggggtatcacattccctcttaggttaagtttcgcactactagg

SEQ ID NO: 21704 - DNA, 174 bp, synthetic construct
  source 1..174: mol_type = other DNA
cgtgtttcctgttttaacttttatggctgcttatggtgacaatttaacattgttaccatatagctgttgggttggccatccggattttgttataaaaccatttcctcgtgccttgacctttaacacatttgtgaacttctttaaatcccttttattagtccttaaatactaaga

SEQ ID NO: 21705 - DNA, 174 bp, synthetic construct
  source 1..174: mol_type = other DNA
cttgggttgtagatatagtcaatcaactggtctgacaagtcataccccaaacaatccaaatctggaatcacctgttcgctcagtagtaatatcttggcaaacactacactaacctcgtctgtactgtctgaaagtggtcaggattgattgacagttattatttatctttaagca

SEQ ID NO: 21706 - DNA, 174 bp, synthetic construct
  source 1..174: mol_type = other DNA
ggaaatttccaataaactctggtgtaaggcttagagtgatggtcgaggtgccctatttagggtgaggagcctcggtggcagccccaccaaatcctctattggataggaacagctgtactgggcagttacagcagtcgtatggtaacacatgcggcgttccgaaataccatgcct

SEQ ID NO: 21707 - DNA, 518 bp, synthetic construct
  source 1..518: mol_type = other DNA
ctgctagacttcgccacgcttacaccattgagaacacataggtggtgtaatattatgtgtttggctgcgtgtgtcacgagcacgatctatgggggaatctaacccaggtggtgttgtgtatgatgaggtacaagcccgtcaacaccacaggtggagagggacaggagtctcatttcccctccaaaaaacagcagtggtccgcccctcatgccctatgaaacattagggggccgacactagtgggcaagcccgatggtgtgggggactggatatgggaaccccagtccgttaaacccgtacggcttcgccagcctacaccggggggggcttaatccccttattttggcacctgaaaatattacttttgacactttaaacacacacaatgatcacgaggagacccatggagagtctccagaggttcctaaggcctcgatcgcgcctgccgggaggcagaatgtcccggttctccaacaaaatcaagaaaacgaagataatcacgcgctgggcggtagcga

SEQ ID NO: 21708 - DNA, 691 bp, synthetic construct
  source 1..691: mol_type = other DNA
gccccggacctcccaccgaggtggggggaaaggggccctggaccggccgggtggaaggcccggaaccggtccatcttcctcaaggttgaggaaggggtacgtctatcggtccggtcggtccgaaaggcgtctggatgcctagtgttagggttcgtaggtggtaaatcccagctaggcgtgaaagcgctataggataggcttatcccggtgaccgctgccccggaaccagccccgcggktctttggacacggtccacaggttgggggtaccggtgtgaataaccccccgactgaagcgtcagtcgttaaacggagacggtctcctgagatcgcaacgacgccccacgtacgggaacgccgccaaaaccttcgggacagctatgcgggttgacaatcccagtggggggccggggaccagctgattacttgtcctgcgagttcctcttgagactggccgaaaggcagccacggggccaccaaggcggcgcagcgctgcatgcggcaaggggaaaaatccttcgggtgacccctggtggcaatcccttcccttaggagcatgagtgtggtcgacacattcaccatggcttggctgtggttgctggtttgcttccccctcgcggggggggtgctcttcaactcgcggcaccagtgcttcaatggggaccattatgtgctttccaattgttgttccc

SEQ ID NO: 21709 - DNA, 174 bp, synthetic construct
  source 1..174: mol_type = other DNA
tcaactctcaagatccttcctcttcttactttgttccgctcctcgcctagtcccaacacagcaatcaccaaccagatcgaagaaaccgcggcaggtcgacccaactgagcaacatcgactgcaacttcacacaagcctccaactggcctccaacagataccgcaaagaacccaa

SEQ ID NO: 21710 - DNA, 174 bp, synthetic construct
  source 1..174: mol_type = other DNA
ggcagaagcacagcattttcttgtgagcttcgagcactaataaaactgaaaatcaaaatgtccaacatggatattgacagtataaataccggaacaatcgataaaacaccagaagaactgactcccggaaccagtggggcaaccagaccaatcatcaagccagcaacccttgct

SEQ ID NO: 21711 - DNA, 174 bp, synthetic construct
  source 1..174: mol_type = other DNA
acctagtgtatcctcggggctgtaatataatcagccatttaacacataacaagccctactgttttcttgttttgccgtgcatttagaataagagacaacttaaacctccgattcggcaacacagggaataatctcaccagacccggcagtgtcttcaggcttcatagccccaag

SEQ ID NO: 21712 - DNA, 741 bp, synthetic construct; identical to SEQ ID NO: 19712
  source 1..741: mol_type = other DNA

SEQ ID NO: 21713 - DNA, 174 bp, synthetic construct
  source 1..174: mol_type = other DNA
tactattctatattggctgcttatggtgacaattgaaagattgttaccatatagctattggattggccatccggtgtcaaacagagcaatcatttatttgtttgttggttttatacctctgaactttaaagtgctaaagactctcaattttatattatatctcaacaaatcagg

SEQ ID NO: 21714 - DNA, 174 bp, synthetic construct
  source 1..174: mol_type = other DNA
caattcagttttagatttaagtaagtttgaatgtaaacataaagccactgttgttgttacacttaaagatagtgatgtaaatgatatggttttgagtttgattaagagtggtaggttgttgttacgcaataatggtcgttttggtggttttagtaatcatttagtctcaactaa

SEQ ID NO: 21715 - DNA, 174 bp, synthetic construct
  source 1..174: mol_type = other DNA
agaccggggaccggtcactaccaaggacgcagacctctttttgagtatcacgcctccggaagtagttgggcaagcccacctatatgtgttgggatggttggggttagccatccataccgtactgcctgatagggtccttgcgaggggatctgggagtctcgtagaccgtagcac

SEQ ID NO: 21716 - DNA, 174 bp, synthetic construct
  source 1..174: mol_type = other DNA
tgcttccttatacaattttgagaggttaataagaaggaagtagtgctatcttaataattaggttaactatttagttttactgttcaggatgcctattggcagccccataatatccaggacaccctctctgcttcttatatgattaggttgtcatttagaataagaaaataacct

SEQ ID NO: 21717 - DNA, 174 bp, synthetic construct
  source 1..174: mol_type = other DNA
ccatcaagcaagtgttgtagaataccaggggtttcacaggctgctaaacttactaaattttacataggattatataattcttttcgatacacgttatatctttagcaaagtgaggaaaacagctttatcatgttagatgccagttatccattttaagtgaatcctttcctcaac

SEQ ID NO: 21718 - DNA, 237 bp, synthetic construct
  source 1..237: mol_type = other DNA
aaattcaaatagttaagatttaattaggattaattaccgatattgtaatcttctattattttatcggtttgaatctcccttacacatatgattatgtagcgtgcttattagtagtagatacatctaaattctacaacgacctaataagttttgattatataagataggatgtgaaggctccgatttgtgaataggtttttatattcgaagtaggtagtattgcgcatactattaatt

SEQ ID NO: 21719 - DNA, 174 bp, synthetic construct
  source 1..174: mol_type = other DNA
acagtgtgcaatcggttcaccgtaaattatcattgatatctgttatatcctaataagcattcaaaatccaatcctcccctgaataacagcccaatccgcaaagtactttgggtataggtataatccaagttgaattctcaagtagacaactaggcctttgagtatcctgtgatc

SEQ ID NO: 21720 - DNA, 174 bp, synthetic construct
  source 1..174: mol_type = other DNA
catttatttatattaaatactgacactttgcgggttaaaatgtttaatactatttttcaatttgaggttgtatgagataattttgatttctatgttatcattgaataagggagtctggccctaattgatgtacgactcttctttggttgcgacccgagtcccttctacatcaag

SEQ ID NO: 21721 - DNA, 148 bp, synthetic construct
  source 1..148: mol_type = other DNA
gaattcgtcgattcggttgcagcatttaaagcggttgacaactttaaaagaaggaaaaagaaggttgaagaaaagggtgtagtaagtaagtataagtacagaccggagaagtacgccggtcctgattcgtttaatttgaaagaagaaa

SEQ ID NO: 21722 - DNA, 174 bp, synthetic construct
  source 1..174: mol_type = other DNA
ggacggtagtgattggttaagatttggtgtaaggttcatgtgccaacgccctgtgcgggatgaaacctctactgccctaggaatgccaggcaggtaccccacctccgggtgggatctgagcctgggctaattgtctacgggtagtttcatttccaatccttttatgtcggagtc

SEQ ID NO: 21723 - DNA, 419 bp, synthetic construct
  source 1..419: mol_type = other DNA
gtcttcttgacgagcattcctaggggtctttcccctctcgccaaaggaatgcaaggtctgttgaatgtcgtgaaggaagcagttcctctggaagcttcttgaagacaaacaacgtctgtagcgaccctttgcaggcagcggaaccccccacctggcgacaggtgcctctgcggccaaaagccacgtgtataagatacacctgcaaaggcggcacaaccccagtgccacgttgtgagttggatagttgtggaaagagtcaaatggctctcctcaagcgtattcaacaaggggctgaaggatgcccagaaggtaccccattgtatgggatctgatctggggcctcggtgcacatgctttacatgtgtttagtcgaggttaaaaaacgtctaggccccccgaaccacggggacgtggttttc

SEQ ID NO: 21724 - DNA, 174 bp, synthetic construct
  source 1..174: mol_type = other DNA
tccggcccctgaatgtggctaaccttaaccctgcagccgttgcccataatccaatgggtttgcggtcgtaatgcgtaagtgcgggatgggaccaactactttgggtgtccgtgtttcctgtttttcttttgattgcattttatggtgacaatttatagtgtatagattgtcatc

SEQ ID NO: 21725 - DNA, 174 bp, synthetic construct
  source 1..174: mol_type = other DNA
agcaaaagcaggtactgatccaaaatggaagactttgtgcgacaatgcttcaatccaatgattgtcgagcttgcggaaaaggcaatgaaagaatatggggaagatccgaaaatcgaaacgaacaaatttgccgcaatatgcacgcacttagaagtctgtttcatgtattcagat

SEQ ID NO: 21726 - DNA, 717 bp, synthetic construct
  source 1..717: mol_type = other DNA
gagaggagcccgttttcgggcacttgtctcctaaacaatattggcgcgcatttgcgcgcccccccccatttcagccccctgtcattgactggtcgaaggcgttcgcaataagactggtcgtcacttggctgttctatcgtttcaggctttagcgcgccctcgcgcggcgggccgtcaagcccgtgcgctgtatagcgccaggtaaccggacagcggcttgctggattttcccggtgccattgctctggatggtgtcaccaagctgacaaatgcggactgaacctcacaaagcgacacacctgtggtagcgctgcccaaaagggagcggaactcccccgccgcgaggcggtcctctctggccaaaagcccagcgttaatagcgccttttgggatgcaggagccccacctgccaggtgtgaagtggagtgagtggatctccaatttggtctgttctgaactacaccatctactgctgtgaagaatgccctggaggcaagctggttacagccctgaccaggggccctgcccgtgactctcgatcggcgcagggtcaaaaattgtctaagcagcagcaggaacgcgggagcgtttcttttccctttgtatcgacatgatggcggcgtctaaggtgtatagagtttgcgagcagactctgctagcaggcgccgttcgcatgatggacaaatttttgcaaaagagaactgtttttgtccccca

SEQ ID NO: 21727 - DNA, 174 bp, synthetic construct
  source 1..174: mol_type = other DNA
ataatatcctgatgaattctatagaacttaggattaagaaaaaattcatgatgaagattaaaaccttcatcatcctttaaaaagagagctattctttatctgaatgtccttattaatgtctaagagctattattttgtaccctcttagcctagacactgcccagcatataagcc

SEQ ID NO: 21728 - DNA, 655 bp, synthetic construct
  source 1..655: mol_type = other DNA
ccccttcccccgaagtaacttagaagctgtaaatcaacgatcaatagcaggtgtggcacaccagtcataccttgatcaagcacttctgtttccccggactgagtatcaataggctgctcgcgcggctgaaggagaaaacgttcgttacccgaccaactacttcgagaagcttagtaccaccatgaacgaggcagggtgtttcgctcagcacaaccccagtgtagatcaggctgatgagtcactgcaacccccatgggcgaccatggcagtggctgcgttggcggcctgcccatggagaaatccatgggacgctctaattctgacatggtgtgaagagcctattgagctagctggtagtcctccggcccctgaatgcggctaatcctaactgcggagcacatgctcacaaaccagtgggtggtgtgtcgtaacgggcaactctgcagcggaaccgactactttgggtgtccgtgtttccttttattcctatattggctgcttatggtgacaatcaaaaagttgttaccatatagctattggattggccatccggtgtgcaacagggcaattgtttacctatttattggttttgtaccattatcactgaagtctgtgatcactctcaaattcattttgaccctcaacacaatcaaac

SEQ ID NO: 21729 - DNA, 174 bp, synthetic construct
  source 1..174: mol_type = other DNA
caaaattttactttgattgattttgcaaggagttataaaaatcttgaaggataaattgttataaagtagagtcgaagaacattaaatgttctttgttagaattattcatctaagttgtttttgagtatattcgcttcaatacaactcctctttatatttgatttaagttttaaa

SEQ ID NO: 21730 - DNA, 174 bp, synthetic construct
  source 1..174: mol_type = other DNA
gtagggaagccaggaatgtccaggaggtaccccttccgctcggaagggatctgacctggagacacatcacatgtgctttacacctgtgcttgtgtttaaaaattgtcgcagcttccccaaaccaagtggtcttggttttctctttttattatattgtcaatatggcttgcaaac

SEQ ID NO: 21731 - DNA, 174 bp, synthetic construct
  source 1..174: mol_type = other DNA
accaaacaagaggaaaaacttgtttggaatatataataatattaaatagtattttagggttaaagtaatactttaaagggacaagtcacagacatttgatcttagtataaatttttataatggccgggctactaagtacttttgacacatttagttccaggagaagtgagagca

SEQ ID NO: 21732 - DNA, 280 bp, synthetic construct
  source 1..280: mol_type = other DNA
acttggttatgaattcattgtattaacccctctgaaagacctgctctggcgcgagctaaagcgcaattgtcaccaggtattgcaccaatggtggcgacagggtacagaagagcaagtactcctgactgggtaatgggactgcattgcatatccctaggcacctattgagatttctctggggcccaccagcgtggagttcctgtatgggaatgcaggactggacttgtgctgcctgacagggtcgcggctggccgtctgtactttgtatagtcagttgaaa

SEQ ID NO: 21733 - DNA, 510 bp, synthetic construct
  source 1..510: mol_type = other DNA
acttagaagcacaatgtccaagttcaataggagggggtacaaaccagtaccaccacgaacaagcacttctgttcccccggtgaggctgtataggctgtttccacggctaaaagcggctgatccgttatccgctcatgtacttcgagaagcctagtatcaccttggaatcttcgatgcgttgcgctcaacactcaaccccagagtgtagcttaggtcgatgagtctggacgttcctcaccggcgacggtggtccaggctgcgttggcggcctacctgtggcccaaagccacaggacgctagttgtgaacaaggtgtgaagagcctattgagctacctgagagtcctccggcccctgaatgcggctaatcctaaccacggagcaggcagtggcaatccagcgaccagcctgtcgtaacgcgcaagttcgtggcggaaccgactactttgggtgtccgtgtttccttttatttttacaatggctgcttatggtgacaatcattgattgttatc

SEQ ID NO: 21734 - DNA, 697 bp, synthetic construct
  source 1..697: mol_type = other DNA
attgatgtgttggtcgtttgccaatcggagggcgacaggcacaggtcgctccgagttctagtagtgtgggaacttgttactactgatgaaacgaggtagtgacactcagtacctgcgaacgaggtcggggccctcccttcttccttcacccaactttcacttttcgttccactttagcaggggtcttctttctatccccctggcggcattggaactagccgtcgcgtcttaacgcgcagccctgaaggccccacaccttgtggatcttgccgtgggtatgtttctggcatgtgtttctcaagcctgcaaccgaagccgaacagccacatgaacagtttgagcgtggtagcgctgtgtgagttggcggtggatccccctcgtggtaacacgagcccccgtggccaaaagcccagtgtttacagcacctctcacatccaggacgaccccatcctggcgctcactcttagtagtatggcttagtacgcattaggtggtaagccgagctctccctcggccttgttctgaatgcacacatgtctaggggctaaggatgtcctacaggtacccgcacgtaaccttcagagagtgcggatctgagtaggagaccgtggtgcactgctttacagatgcagcccggtttaaaaagcgtctatgcccctacagggtagcggtgggccgcgccctttccttttaaaac

SEQ ID NO: 21735 - DNA, 174 bp, synthetic construct
  source 1..174: mol_type = other DNA
catccgtaatacaacccggaataacctccaaaccgagaagaactagtctatgaccagacgaaaaggaactagtccctgttcttttcttagggcctttttcacctgggtaaagtgtagttattgcgtataactctggtatcaataccacccggaagaaattatttatctgccatc

SEQ ID NO: 21736 - DNA, 408 bp, synthetic construct
  source 1..408: mol_type = other DNA
ccttcatcaagacaccaggtctttcctccttaaggctagccccggcgtgtgaattcacgttgggcaactagtggtgtcactgtgcgctcccaatctcggccgcggagtgctgttccccaagccaaacccctggcccttcactatgtgcctggcaagcatatctgagaaggtgttccgctgtggctgccaacctggtgacaggtgccccagtgtgcgtaaccttcttccgtctccggacggtagtgattggttaagatttggtgtaaggttcatgtgccaacgccctgtgcgggatgaaacctctactgccctaggaatgccaggcaggtaccccacctccgggtgggatctgagcctgggctaattgtctacgggtagtttcatttccaatccttttatgtcggagtc

SEQ ID NO: 21737 - DNA, 174 bp, synthetic construct
  source 1..174: mol_type = other DNA
gaggagttcaggtagatattgaaagatgagccttctaaccgaggtcgaaacgtatgttctctctatcgttccatcaggccccctcaaagccgagatcgcgcagagacttgaagatgtctttgctgggaaaaacacagatcttgaggctctcatggaatggctaaagacaagacc

SEQ ID NO: 21738 - DNA, 174 bp, synthetic construct
  source 1..174: mol_type = other DNA
caattctgggatggaaccgactactttgggtgtccgtgtttcctgtttcacttaccttggctgcttatggtgacaattgtatagttgtcatcatatagctattggattggccatccggatattattcttgtgtttatttgtgtaatttgatataatttagaaccctgtataaga

SEQ ID NO: 21739 - DNA, 174 bp, synthetic construct
  source 1..174: mol_type = other DNA
gtgcagttttggatagtgaaggatgccctgacggtacccataggtaacaagtgacactatggatctaagcaggggctcactctacgctgctttacagctggctgtgagttaaaaaacgtctagctatccacaacctaggggactaggttttccttttatttagattacaattat

SEQ ID NO: 21740 - DNA, 174 bp, synthetic construct
  source 1..174: mol_type = other DNA
agcaaaagcaggggataattctattaaccatgaagactatcattgctttgagctacattctatgtctggttttcgctcaaaaacttcccggaaatgacaacagcacggcaacgctgtgccttgggcaccatgcagtaccaaacggaacgatagtgaaaacaatcacgaatgacc

SEQ ID NO: 21741 - DNA, 219 bp, synthetic construct
  source 1..219: mol_type = other DNA
atataatacttgagatgcactgtttcatggttacccatcatttgaggaaatttccaataaacttgaatgtaaggcttgaaacagtggtctaggtgccctatttagggtgaggagcctagctggcagccccagtgaatcctctattggatagaaaccgctatatcgggtagctatagcagtcggatagtaatatatccggcgtttcgaaataccatacct

SEQ ID NO: 21742 - DNA, 177 bp, synthetic construct
  source 1..177: mol_type = other DNA
gatctgattagaagtaagaaaattcctagttataatatttttaatactgctacatttttaagacccttagttatttagctttaccgcccaggatggggtgcagcgttcctgcaatatccagggcacctaggtgcagccttgtagttttagtggactttaggctaaagaatttcacta

SEQ ID NO: 21743 - DNA, 148 bp, synthetic construct; identical to SEQ ID NO: 21721
  source 1..148: mol_type = other DNA

SEQ ID NO: 21744 - DNA, 116 bp, synthetic construct
  source 1..116: mol_type = other DNA
ctctctctcactggtcctcctactttgtcatctgattcctgaaatcaaaccgattcacacatcctacaacacacacgactcatcgaagcagcaacacataagcatcaacactggaa

SEQ ID NO: 21745 - DNA, 113 bp, synthetic construct
  source 1..113: mol_type = other DNA
ctctctaagcgacagcgacgcaacaggaaaacggaagaaaggcggagagaaaagtgcgaagaagagattggtagctagccacgcggctagctctgttttaaacaagaaaagaa

SEQ ID NO: 21746 - DNA, 742 bp, synthetic construct; identical to SEQ ID NO: 19251
  source 1..742: mol_type = other DNA

SEQ ID NO: 21747 - DNA, 721 bp, synthetic construct
  source 1..721: mol_type = other DNA
tttgaaatggggggctgggccctgatgcccagtccttcctttccccttccggggggttaaccggctgtgtttgctagaggcacagaggggcaacatccaacctgcttttgcggggaacggtgcggctccgattcctgcgtcgccaaaggtgttagcgcacccaaacggcgcacctaccaatgttattggtgtggtctgcgagttctagcctactcgtttctcccccgaccattcactcacccacgaaaagtgtgttgtaaccataagatttaacccccgcacgggatgtgcgataaccgtaagactggctcaagcgcggaaagcgctgtaaccacatgctgttagtccctttatggctgcaagatggctacccacctcggatcactgaactggagctcgaccctccttagtaagggaaccgagaggccttcgtgcaacaagctccgacacagagtccacgtgactgctaccaccatgagtacatggttctcccctctcgacccaggacttctttttgaatatccacggctcgatccagagggtggggcatgacccctagcatagcgagctacagcgggaactgtagctaggccttagcgtgccttggatactgcctgatagggcgacggcctagtcgtgtcggttctataggtagcacatacaaatatgcagaactctcatttttctttcgatacagcctctggcacctttgaagatgtaa

SEQ ID NO: 21748 - DNA, 161 bp, synthetic construct
  source 1..161: mol_type = other DNA
ttttcaaaagttctctcctagaacttttcccacctctttcttgtcacttttgctagtttctctctgtttttctccattcttactagttggtgttgttcggttgtttggcttccctgctctttttccttccttccttcgcttttgttttggtttgctttacc

SEQ ID NO: 21749 - DNA, 101 bp, synthetic construct
  source 1..101: mol_type = other DNA
tagcttgtttgggttctttatcactgtcctgattaaggctgaatcagaacactttcacttccacacacacgacagtagtaagacacaaaatatagtagtta

SEQ ID NO: 21750 - DNA, 153 bp, synthetic construct
  source 1..153: mol_type = other DNA
actgggctgatgattatgactccgatgaggattacggtctggagagagaggctgcaacaaatgcgcccgcagagaaaactgctcaaacaaactcagcagagaagactgctccatcaacttcagcagagaaaactgctccaacaaacaagcctt

SEQ ID NO: 21751 - DNA, 143 bp, synthetic construct
  source 1..143: mol_type = other DNA
aaataacaaatctcaacacaacatatacaaaacaaacgaatctcaagcaatcaagcattctacttctattgcagcaatttaaatcatttcttttaaagcaaaagcaattttctgaaaattttcaccatttacgaacgatagca

SEQ ID NO: 21752 - DNA, 449 bp, synthetic construct
  source 1..449: mol_type = other DNA
gcgaattcaaacgagatgcctaagagtttggattcgctagctgtccggatggtagtgttacctgtggtccaccacggtaaagcattaagggctagccttaacctcactggaattgaatgaaagtgggagatcagtggcctccaacggttggactgactggacggggggtaatcgagtgggagtcccccacatcctacatttatgtagttcctcacgatccacagcaatcgtctggttgtatccaggttactgccgcgagcgtaagggagtgttttggcagacacaatccaatatgctgactacggtcggtgtggaggatccgaaacgtaagcaagtttcttgttactattgatcaacagctacatcctacaacgacagctatcataccagccatctttaacccaagaattccacgtgaacataccttgagtatacaattcttgagcaaa

SEQ ID NO: 21753 - DNA, 297 bp, synthetic construct
  source 1..297: mol_type = other DNA
accatcaacactccaggctcatggattaagttaggttccgccgaagcgggctaaccaggcccctagtaggaggcgcctatcccatgagccctttccccacagattgagtggagctggagctgggaaggaccgagtacggtccaatcgagaagaaccctgatgaacattccaggcctcttcggtagatttgggtatacccaccagtgaaggcggggtcgtgggcacaggccccctagtccacacagcctgatagggtcctgccgcaggatctgtgggtgcggctgtacatgtaacatg

SEQ ID NO: 21754 - DNA, 739 bp, synthetic construct
  source 1..739: mol_type = other DNA
aaaattaaagatcatattacataaaataacataatataaaatcacttaaaatcatgtgttttaaactacgcttagtttaattagttttggtgcgtttagcgattcgtcattgtacatggtgtgttgtgtgttttatgattttagtatgtttcttaaattattgaagccctataaggaccggctataaacgtcctgttttcaagtgggaaaagaaaccactcgccttaccactagctgggatctagctagagctccggcgtaaaacgagctacgcttttggatgcagcgttacgcattcctgggcttaggcgattgtactacaatgggtagcccccagtgccagtttttggcccgctattgtattacaattcggttaagttaacttggttggaaacaagccaaatgctagctatcattcgcattcggacatgaggaaggtgaacgcagtgaatcatagtggtggtacgctcttggggtggttcccaagacttcgtagggctatggttagctgttagtaagacctaatgttcgtttgtgatacagtcgaaagttgtttccgtatggagctcggtctgcgcgttaagcaccagcctgactatgggcagtatccctgtttttccactattctcactatcaaccacaacgcacgactttctgctctcttggcactttcttactttcacactctcgcgctcgtttcaaagttttattacttctctttttctcctgaccattcacg

SEQ ID NO: 21755 - DNA, 119 bp, synthetic construct
  source 1..119: mol_type = other DNA
ggaaagagagtttcaacgttagtggtaacccacgagcggagagctcttacggaggagctctccgtcgatggcgaaagccctttctaacaaacaaccaacaattcttatctacatgaatc

SEQ ID NO: 21756 - DNA, 215 bp, synthetic construct
  source 1..215: mol_type = other DNA
caaaagaacgattcaaagcaattgcatccactaaaaccctaccatgcaagccaccccactcacgacaaaccttagaacctaaccacaatgtctcactacgtcagtaacagtgagcagaagtatagtgagcgggaagctactttcatcgcgattcggggtgcagccaacgctgtgatcaatgcgagggcagaggctgattcgcttaaggtgtggga

SEQ ID NO: 21757 - DNA, 96 bp, synthetic construct
  source 1..96: mol_type = other DNA
agttgttagtctacgtggaccgacaaagacagattctttgagggagctaagctcaacgtagttctaacagttttttaattagagagcagatctctg

SEQ ID NO: 21758 - DNA, 107 bp, synthetic construct
  source 1..107: mol_type = other DNA
agttgttgatctgtgtgaatcagactgcgacagttcgagtttgaagcgaaagctagcaacagtatcaacaggttttattttggatttggaaacgagagtttctggtc

SEQ ID NO: 21759 - DNA, 542 bp, synthetic construct
  source 1..542: mol_type = other DNA
gtcgaaggcatctagcaataagataggtggaacaaggacgcttaaagcataaagacaataatcttttctaactcacacattggtgtgaggtggcagatggcgtgccataactctaatagtgagataccacgcttgtggaccttatgctcacacagccatcctctagtaagtttgtgaggtgtctgatgacgtgtgggaacttgttggaaatgacagcttgctgcaaagcatcccattgccagcggactaacacctggtaacaggtgcctctggggccaaaagccaaggtttaacagaccctttgggattggttcaaacctgagctgtcatggaagacacttagtacctgctgatttggtagcaatacaaacactagttgtaaggcccacgaaggatgcccagaaggtacccgtaggtaacaagtgacactatagatctgatctggggccggctacctctatcttggtgagtcggttaaaaaacgtctagtgggccaaacccaggggggatccctggtttccttttattttactaatgcaact

SEQ ID NO: 21760 - DNA, 562 bp, synthetic construct
  source 1..562: mol_type = other DNA
actctgctattacggtagccttgtatgccagttttatctcccctcccccatgtaacttagaagttttacacaaggaccaatagtcggtaatcagccagattactaaaggtcaagcacttctgtttccccggtcaatgctgatatgctccaacagggcaaaaacagcagcgatcgttatccgcaaagcgcctacgcaaagcttagtagcatctccgaaattgtctggttggtcgttccgccattttccccttggtagacctggcagatgaggctagaaataccccactggcgacagtgttctagcctgcgtggctgcctgcacaccctatgggtgtgaagccaaacaatggacaaggtgtgaagagccccgtgtgctcgctttgactcctccggcccctgaatgtggctaaccttaaccctgcagctagagcacgcaaaccagcgtgtttctagtcgtaatgagcaattgcgggatgggaccaactactttgggtgtccgtgtttcactttttctttttatattgcttatggtgacaatatatacatcatatatattgacacc

SEQ ID NO: 21761 - DNA, 512 bp, synthetic construct
  source 1..512: mol_type = other DNA
tgtaacttagaagttttacacaaggaccaatagtcggtaatcagccagattactaaaggtcaagcacttctgtttccccggtcaatgctgatatgctccaacagggcaaaaacagcagcgatcgttatccgcaaagcgcctacgcaaagcttagtagcatctccgaaattgtctggttggtcgttccgccattttccccttggtagacctggcagatgaggctagaaataccccactggcgacagtgttctagcctgcgtggctgcctgcacaccctatgggtgtgaagccaaacaatggacaaggtgtgaagagccccgtgtgctcgctttgactcctccggcccctgaatgtggctaaccttaaccctgcagctagagcacgcaaaccagcgtgtttctagtcgtaatgagcaattgcgggatgggaccaactactttgggtgtccgtgtttcactttttctttttatattgcttatggtgacaatatatacatcatatatattgacacc

SEQ ID NO: 21762 - DNA, 563 bp, synthetic construct
  source 1..563: mol_type = other DNA
actctattattacggtaattttgtacgccagttttatctcccttaccccctttgtaacttagaagatttaaacacagaccaataggcgacgatcatccagatcgtttaaggtcaagcacttctgtttccccggtcaatgctgatatgctctaccagggcaaaaacagtagagatcgttatccgcaaggtgcctacacaaagcttagtaacattttgaagagcatttggttggtcgctcagctattaccccatagtagacctggcagatgaggctagaagttccccactggcgacagtgttcttgcctgcgtggctgcctgcgcactctcatgagtgcgaagccatatgtttgacaaggtgtgaagagccccgtgtgctcaccttgagtcctccggcccctgaatgtggctaaccttaaccctgcagctagtgcatgaaatccatcatgtaactagtcgtaatgagcaattgcgggatgggaccaactactttgggtgtccgtgtttcactttttccttttatatttgcttatggtgacaatatatatagcatatattgacacc

SEQ ID NO: 21763 - DNA, 513 bp, synthetic construct
  source 1..513: mol_type = other DNA
tttgtaacttagaagatttaaacacagaccaataggcgacgatcatccagatcgtttaaggtcaagcacttctgtttccccggtcaatgctgatatgctctaccagggcaaaaacagtagagatcgttatccgcaaggtgcctacacaaagcttagtaacattttgaagagcatttggttggtcgctcagctattaccccatagtagacctggcagatgaggctagaagttccccactggcgacagtgttcttgcctgcgtggctgcctgcgcactctcatgagtgcgaagccatatgtttgacaaggtgtgaagagccccgtgtgctcaccttgagtcctccggcccctgaatgtggctaaccttaaccctgcagctagtgcatgaaatccatcatgtaactagtcgtaatgagcaattgcgggatgggaccaactactttgggtgtccgtgtttcactttttccttttatatttgcttatggtgacaatatatatagcatatattgacacc

SEQ ID NO: 21764 - DNA, 563 bp, synthetic construct
  source 1..563: mol_type = other DNA
actctattattccggtaatcttgtacgccagttttatatcccctacccctttgtaacttagaagttaaacacacagaccaataggcggtggctatccaagtcactaatggtcaagcacttctgtttccccggtcaagattgatacgctccaacagggcgaaaacagtcaagatcgttaaccgcaaagtgactacgcaaagcttagtaatgccttgaagagtctatggctggtcgttccgctataaccccctagtagacctggcagatgaggctagaaacaccccactggcaacagtgttctagcctgcgtggctgcctgcacaccctttcgggtgtgaagccatatatttgacaaggtgtgaagagccccgtgtgctcactttgagtcctccggcccctgaatgtggctaaccttaaccctgcagctagcgtatgtaatccaacatattgctagtcgtaatgagcaattgcgggatgggaccaactactttgggtgtccgtgtttcacttttttccttttatttgcttatggtgacaatatatatagtatatatattggcatc

SEQ ID NO: 21765 - DNA, 513 bp, synthetic construct
  source 1..513: mol_type = other DNA
ttgtaacttagaagttaaacacacagaccaataggcggtggctatccaagtcactaatggtcaagcacttctgtttccccggtcaagattgatacgctccaacagggcgaaaacagtcaagatcgttaaccgcaaagtgactacgcaaagcttagtaatgccttgaagagtctatggctggtcgttccgctataaccccctagtagacctggcagatgaggctagaaacaccccactggcaacagtgttctagcctgcgtggctgcctgcacaccctttcgggtgtgaagccatatatttgacaaggtgtgaagagccccgtgtgctcactttgagtcctccggcccctgaatgtggctaaccttaaccctgcagctagcgtatgtaatccaacatattgctagtcgtaatgagcaattgcgggatgggaccaactactttgggtgtccgtgtttcacttttttccttttatttgcttatggtgacaatatatatagtatatatattggcatc

SEQ ID NO: 21766 - DNA, 564 bp, synthetic construct
  source 1..564: mol_type = other DNA
ctctgttatttcggtaaccttgtacgccagttttatctcccctcccccaattgtaacttagaagcaatacacaaggaccaataggcagtgattaaccagatcacttaaggtcaagcacttctgtttccccggtctgagttgatatgctctaacagggcaaaaacaagtcagatcgttatccgcaaagtgcctacgcaaagcctagtatcatctttgaaaatgtatggttggtcattccgctgaaccccacagtagacctggcagatgaggctagaaaccccccactggcgacagtgttctagcctgcgtggctgcctgcacacccttatgggtgtgaagccatatatttgacaaggtgtgaagagccccgtgtgctcactttgagtcctccggcccctgaatgtggctaaccctaaccctgcagctagtgcatacaagccagtatgttgctagtcgtaacgagcaattgcgggatgggaccaactactttgggtgtccgtgtttcactttttacctttatactgcttatggtgacaatatatatatagcatatatattgacacc

SEQ ID NO: 21767 - DNA, 514 bp, synthetic construct
  source 1..514: mol_type = other DNA
ttgtaacttagaagcaatacacaaggaccaataggcagtgattaaccagatcacttaaggtcaagcacttctgtttccccggtctgagttgatatgctctaacagggcaaaaacaagtcagatcgttatccgcaaagtgcctacgcaaagcctagtatcatctttgaaaatgtatggttggtcattccgctgaaccccacagtagacctggcagatgaggctagaaaccccccactggcgacagtgttctagcctgcgtggctgcctgcacacccttatgggtgtgaagccatatatttgacaaggtgtgaagagccccgtgtgctcactttgagtcctccggcccctgaatgtggctaaccctaaccctgcagctagtgcatacaagccagtatgttgctagtcgtaacgagcaattgcgggatgggaccaactactttgggtgtccgtgtttcactttttacctttatactgcttatggtgacaatatatatatagcatatatattgacacc

SEQ ID NO: 21768 - DNA, 571 bp, synthetic construct
  source 1..571: mol_type = other DNA
ctggtattctgtacctttgtacgcctgtttgccgcccctcccccttttattaccacatttgtggtcgctgcaacgttagaagattttaaagtagtgcaataggaagcatcacaaccagtggtgttatgcacaaacacttctgtttccccggagcgaggtatagacggtccccactgtcaaaagcctttaaccgttatccgccaaccaactacgagacagctagtaatgccctgttctcctgcaaggcgttcgatcagacagatttcccctctgttagtctggtcgatgaggctagaagtaccccacaggtaactgtgttctagcctgcgtggcggccagcccagcttctgctgggacgcctttcaagagacatggtgtgaagactcaattgtgcttggttgtgagtcctccggcccctgaatgcggctaaccttaaacccggatccatgctatgcaaaccagcatagttatggtcgtaatgggcaactctgggatgggaccgactactttgggtgtccgtgtttccatttttactttttgtgtcatttatggttacaattaagttgtaacc

SEQ ID NO: 21769 - DNA, 521 bp, synthetic construct
  source 1..521: mol_type = other DNA
taccacatttgtggtcgctgcaacgttagaagattttaaagtagtgcaataggaagcatcacaaccagtggtgttatgcacaaacacttctgtttccccggagcgaggtatagacggtccccactgtcaaaagcctttaaccgttatccgccaaccaactacgagacagctagtaatgccctgttctcctgcaaggcgttcgatcagacagatttcccctctgttagtctggtcgatgaggctagaagtaccccacaggtaactgtgttctagcctgcgtggcggccagcccagcttctgctgggacgcctttcaagagacatggtgtgaagactcaattgtgcttggttgtgagtcctccggcccctgaatgcggctaaccttaaacccggatccatgctatgcaaaccagcatagttatggtcgtaatgggcaactctgggatgggaccgactactttgggtgtccgtgtttccatttttactttttgtgtcatttatggttacaattaagttgtaacc

SEQ ID NO: 21770 - DNA, 587 bp, synthetic construct
  source 1..587: mol_type = other DNA
gtgcttaggtgccacaccactgcggtttgggttcccctttcccctatatatgtttgtctgtttatttcaaattcttgaggattggcacctccttatgccaaatctaaatcgtggaggatcccaggctttctggtctcaaacagaactccacgtccaggtcataggaactggttagtaggctatttgagtagtccgtttgttagtaatgccttgtgaacagggtggctcccgtttactgctggtattcccggtgcaggttgccgtggtggtgacaccatcctgcattgtgtgtgaaccagtaccgcaaggatagcaaggtatgaacacttatgggtgaaataataagtgactaatccactttcatggccggaaggtcatgtggcaatcatgccacccaggtaccctcttaggaggatctgagggtgggctaagcagaccctgccatgtggctgaaattttctattattttattccataacatttatagctatataggtgttttgtgtgttgtgctctccttttccgagttatttccagtactagttcgcagctagaagtttaactcttcgatatcggctacattggaa

SEQ ID NO: 21771 - DNA, 537 bp, synthetic construct
  source 1..537: mol_type = other DNA
tgtttgtctgtttatttcaaattcttgaggattggcacctccttatgccaaatctaaatcgtggaggatcccaggctttctggtctcaaacagaactccacgtccaggtcataggaactggttagtaggctatttgagtagtccgtttgttagtaatgccttgtgaacagggtggctcccgtttactgctggtattcccggtgcaggttgccgtggtggtgacaccatcctgcattgtgtgtgaaccagtaccgcaaggatagcaaggtatgaacacttatgggtgaaataataagtgactaatccactttcatggccggaaggtcatgtggcaatcatgccacccaggtaccctcttaggaggatctgagggtgggctaagcagaccctgccatgtggctgaaattttctattattttattccataacatttatagctatataggtgttttgtgtgttgtgctctccttttccgagttatttccagtactagttcgcagctagaagtttaactcttcgatatcggctacattggaa

SEQ ID NO: 21772 - DNA, 597 bp, synthetic construct
  source 1..597: mol_type = other DNA
caaatgtaacaaacatctaagaagattgtgtggaaccctatgcctggtctccactattcgaaggcagcttgcaataagaagagtggaattaagacgctcaaagcatagagacaattttcttttctaacccatacttgtatggggtggcagatggcgtgccataactctaatagtgagataccatgcttgtggaccttatgctcacacagccatcctctagtaagtttgtgagacgtctggtgacgtgtgggaacttattggaaacaacattttgctgcaaagcatcctattgccagcggaacaacacctggtaacaggtgcctctggggccaaaagccaaggtttaacagaccctttaggattggttctaaacctgaaatgttgtggaagacacttagtacctgccgatctggtagtaatacaaacactagttgtaaggcccacgaaggatgcccagaaggtacccgtaggtaacaagtgacactatggatctgatctggggccaactacctctatcttggtgagttggttaaaaaacgtctagtgggccaaacccaggggggatccctggtttccttttattttatcattactaat

SEQ ID NO: 21773 - DNA, 547 bp, synthetic construct
  source 1..547: mol_type = other DNA
ccactattcgaaggcagcttgcaataagaagagtggaattaagacgctcaaagcatagagacaattttcttttctaacccatacttgtatggggtggcagatggcgtgccataactctaatagtgagataccatgcttgtggaccttatgctcacacagccatcctctagtaagtttgtgagacgtctggtgacgtgtgggaacttattggaaacaacattttgctgcaaagcatcctattgccagcggaacaacacctggtaacaggtgcctctggggccaaaagccaaggtttaacagaccctttaggattggttctaaacctgaaatgttgtggaagacacttagtacctgccgatctggtagtaatacaaacactagttgtaaggcccacgaaggatgcccagaaggtacccgtaggtaacaagtgacactatggatctgatctggggccaactacctctatcttggtgagttggttaaaaaacgtctagtgggccaaacccaggggggatccctggtttccttttattttatcattactaat

SEQ ID NO: 21774 - DNA, 599 bp, synthetic construct
  source 1..599: mol_type = other DNA
tcaatcgtaactaacatctaagaatattatttcaaccccatgcctggtctccactagttgaaggcaacttgcaataaaatgagtggaaacaagacgcttaaagcatggtgtaaattaccttttctaacctacactttgtgtggggtggcagatggcgtgccataattctattagtgagataccacgcttgtggaccttatgctcacacagccatcctctagtaagtttgcaagatgtctggtgacgtgtgggaacttattggaaacaacattttgctgcaaagcatcctactgccagcggaataacacctggtgacaggtgcctctggggccaaaagccaaggtttaacagaccctttaggattggttttaaaacctgaaatgttgtggaagatacttagtacctgccgatctggtagtagtgcaaacactagttgtaaggcccacgaaggatgcccagaaggtacccgtaggtaacaagtgacactatggatctgatctggggccaagtacctctatcttggtgacttggttaaaaaacgtctagtgggccaaacccgggggggatccctggtttccttttattttaccaatgccact

SEQ ID NO: 21775 - DNA, 549 bp, synthetic construct
  source 1..549: mol_type = other DNA
ccactagttgaaggcaacttgcaataaaatgagtggaaacaagacgcttaaagcatggtgtaaattaccttttctaacctacactttgtgtggggtggcagatggcgtgccataattctattagtgagataccacgcttgtggaccttatgctcacacagccatcctctagtaagtttgcaagatgtctggtgacgtgtgggaacttattggaaacaacattttgctgcaaagcatcctactgccagcggaataacacctggtgacaggtgcctctggggccaaaagccaaggtttaacagaccctttaggattggttttaaaacctgaaatgttgtggaagatacttagtacctgccgatctggtagtagtgcaaacactagttgtaaggcccacgaaggatgcccagaaggtacccgtaggtaacaagtgacactatggatctgatctggggccaagtacctctatcttggtgacttggttaaaaaacgtctagtgggccaaacccgggggggatccctggtttccttttattttaccaatgccact

SEQ ID NO: 21776 - DNA, 601 bp, synthetic construct
  source 1..601: mol_type = other DNA
cctcaaatgcaacaaacatctaagactattgagaacaaccctgtacctggtccccactagtcgaaggcatctagcaataagatgagtggaatatgggcgcttaaagtacagagtcaatgatcttttctagcctacgcttatgcgtggggtggcagatggcgtgccataaccctattagtgagataccacacttgtggaccttatgctcacacagccatcctccagttagtttgtaagatgtctggtgatgtgtgggaacttgttggaaataacattttgctgtaaggcattcattagccagcggataaaacacctggtaacaggtgcctctggggccaaaagccaaggtttaacagaccctaatgaattggttcaaacctggaatgttatggaagatacttagtacctgctgatctggtagtaatgcaaacactggttgtaaggcccacgaaggatgcccagaaggtacccgcaggtaacaagagacactgtggatctgatctggggctagttgcctctttaaggtgaactagttaaaaaacgtctagtgggccaaacccaggggggatccctggtttcctttattatttgaatgttcatc

SEQ ID NO: 21777 - DNA, 551 bp, synthetic construct
  source 1..551: mol_type = other DNA
tccccactagtcgaaggcatctagcaataagatgagtggaatatgggcgcttaaagtacagagtcaatgatcttttctagcctacgcttatgcgtggggtggcagatggcgtgccataaccctattagtgagataccacacttgtggaccttatgctcacacagccatcctccagttagtttgtaagatgtctggtgatgtgtgggaacttgttggaaataacattttgctgtaaggcattcattagccagcggataaaacacctggtaacaggtgcctctggggccaaaagccaaggtttaacagaccctaatgaattggttcaaacctggaatgttatggaagatacttagtacctgctgatctggtagtaatgcaaacactggttgtaaggcccacgaaggatgcccagaaggtacccgcaggtaacaagagacactgtggatctgatctggggctagttgcctctttaaggtgaactagttaaaaaacgtctagtgggccaaacccaggggggatccctggtttcctttattatttgaatgttcatc

SEQ ID NO: 21778 - DNA, 501 bp, synthetic construct
  source 1..501: mol_type = other DNA
ttaaagtacagagtcaatgatcttttctagcctacgcttatgcgtggggtggcagatggcgtgccataaccctattagtgagataccacacttgtggaccttatgctcacacagccatcctccagttagtttgtaagatgtctggtgatgtgtgggaacttgttggaaataacattttgctgtaaggcattcattagccagcggataaaacacctggtaacaggtgcctctggggccaaaagccaaggtttaacagaccctaatgaattggttcaaacctggaatgttatggaagatacttagtacctgctgatctggtagtaatgcaaacactggttgtaaggcccacgaaggatgcccagaaggtacccgcaggtaacaagagacactgtggatctgatctggggctagttgcctctttaaggtgaactagttaaaaaacgtctagtgggccaaacccaggggggatccctggtttcctttattatttgaatgttcatc

SEQ ID NO: 21779 - DNA, 630 bp, synthetic construct
  source 1..630: mol_type = other DNA
cccagccctgaggcggctggtcaataaaagcctcaattgtaacaaacatctaagcttattacaataaccccatgcctggtctccactagttgaaggcaacttgcaataaaatgagtggaaatgagacgcttaaagcatggtgtaaactaacttttctagcccacactttgtgtggggtggcagatggcgtgccataattctaatagtgggataccacgcttgtggaccttatgctcacacagccatcctctagtaagtttgtgtgacgtctggtgacgtgtgggaacttattggaaacaacattttgctgtaaagcatcctattgccagcggaacaacgcctggtaacaggtgcctctggggccaaaagccaaggtttagcagaccctctaggattggtttaaaacctgaaatgttgtggaagatacttagtacctaccgatctggtagtaatgcagacactagttgtaaggcccacgaaggatgcccagaaggtacctgtaggtaacaagcgacactatggatctgatctggggccaggtacctctatcttggtgacctggttaaaaaacgtctagtgggccaaacccgggggggatccccggtttccttttattttatcaatgccact

SEQ ID NO: 21780 - DNA, 580 bp, synthetic construct
  source 1..580: mol_type = other DNA
taagcttattacaataaccccatgcctggtctccactagttgaaggcaacttgcaataaaatgagtggaaatgagacgcttaaagcatggtgtaaactaacttttctagcccacactttgtgtggggtggcagatggcgtgccataattctaatagtgggataccacgcttgtggaccttatgctcacacagccatcctctagtaagtttgtgtgacgtctggtgacgtgtgggaacttattggaaacaacattttgctgtaaagcatcctattgccagcggaacaacgcctggtaacaggtgcctctggggccaaaagccaaggtttagcagaccctctaggattggtttaaaacctgaaatgttgtggaagatacttagtacctaccgatctggtagtaatgcagacactagttgtaaggcccacgaaggatgcccagaaggtacctgtaggtaacaagcgacactatggatctgatctggggccaggtacctctatcttggtgacctggttaaaaaacgtctagtgggccaaacccgggggggatccccggtttccttttattttatcaatgccact

SEQ ID NO: 21781 - DNA, 530 bp, synthetic construct
  source 1..530: mol_type = other DNA
ttgcaataaaatgagtggaaatgagacgcttaaagcatggtgtaaactaacttttctagcccacactttgtgtggggtggcagatggcgtgccataattctaatagtgggataccacgcttgtggaccttatgctcacacagccatcctctagtaagtttgtgtgacgtctggtgacgtgtgggaacttattggaaacaacattttgctgtaaagcatcctattgccagcggaacaacgcctggtaacaggtgcctctggggccaaaagccaaggtttagcagaccctctaggattggtttaaaacctgaaatgttgtggaagatacttagtacctaccgatctggtagtaatgcagacactagttgtaaggcccacgaaggatgcccagaaggtacctgtaggtaacaagcgacactatggatctgatctggggccaggtacctctatcttggtgacctggttaaaaaacgtctagtgggccaaacccgggggggatccccggtttccttttattttatcaatgccact

SEQ ID NO: 21782 - DNA, 647 bp, synthetic construct
  source 1..647: mol_type = other DNA
ctctaggagagcccctttcccagccttgaggcggctggtcaataaaagcctcaaacgtaactaacacctaagataaatctcataaccctatgcctggtccccactagtcgaaagcacctagcaataagatgagtggaccatggacgcttaaagcatagtgccaatatacatttctaacctgtggattcccatggggtggcagatggcgtgccataattctattagtgggataccacgcttgtggatcttatgcccacacagccatcctctagtaagtttgtaaggcgtctgatgacgtgtgggaacttatcggaaacaacaatttgctgcaaagcatcctattgccagcggacaaacacctggtaacaggtgcctctggggccaaaagccaaggtttaacagaccctttaggattggttcttacctggattgttgtggaaggtacttagtacctgctgatttggtagttggacaaacactagttgtaaggcccacgaaggatgcccagaaggtacccgtaggtaacaagggacactatggatctgatttggggtcacctacctctatcttggtgaggtgattaaaaagcgtctagtgggccaaacccaggggggatccctggtttccttttattttacacagacact

SEQ ID NO: 21783 - DNA, 597 bp, synthetic construct
  source 1..597: mol_type = other DNA
tcaaacgtaactaacacctaagataaatctcataaccctatgcctggtccccactagtcgaaagcacctagcaataagatgagtggaccatggacgcttaaagcatagtgccaatatacatttctaacctgtggattcccatggggtggcagatggcgtgccataattctattagtgggataccacgcttgtggatcttatgcccacacagccatcctctagtaagtttgtaaggcgtctgatgacgtgtgggaacttatcggaaacaacaatttgctgcaaagcatcctattgccagcggacaaacacctggtaacaggtgcctctggggccaaaagccaaggtttaacagaccctttaggattggttcttacctggattgttgtggaaggtacttagtacctgctgatttggtagttggacaaacactagttgtaaggcccacgaaggatgcccagaaggtacccgtaggtaacaagggacactatggatctgatttggggtcacctacctctatcttggtgaggtgattaaaaagcgtctagtgggccaaacccaggggggatccctggtttccttttattttacacagacact

SEQ ID NO: 21784 - DNA, 547 bp, synthetic construct
  source 1..547: mol_type = other DNA
ccactagtcgaaagcacctagcaataagatgagtggaccatggacgcttaaagcatagtgccaatatacatttctaacctgtggattcccatggggtggcagatggcgtgccataattctattagtgggataccacgcttgtggatcttatgcccacacagccatcctctagtaagtttgtaaggcgtctgatgacgtgtgggaacttatcggaaacaacaatttgctgcaaagcatcctattgccagcggacaaacacctggtaacaggtgcctctggggccaaaagccaaggtttaacagaccctttaggattggttcttacctggattgttgtggaaggtacttagtacctgctgatttggtagttggacaaacactagttgtaaggcccacgaaggatgcccagaaggtacccgtaggtaacaagggacactatggatctgatttggggtcacctacctctatcttggtgaggtgattaaaaagcgtctagtgggccaaacccaggggggatccctggtttccttttattttacacagacact

SEQ ID NO: 21785 - DNA, 652 bp, synthetic construct
  source 1..652: mol_type = other DNA
ttgctgagtttctctaggagagtccctttcccagccagaggtggctggtcaaacaataccaaacgtaactaaacatctaagataacatagccctatgcctggtctccaccagttgaaggcatcttgcaataaaatgggtggattaagacgcttaaagcatggagtcaattatcttttctaactagtgatcttcactgggtggcagatggcgtgccataactctattagtgggataccacgctcgtggatcttatgcccacacagccatcctctagtaagtttgcaaggtgtctgatgaggcgtgggaacttattggaaataattacttgctgcgaagcatcctactgccagcggatcaacacctggtaacaggtgcccctggggccaaaagccacggtttaacagaccctttaggattggttaaaacctgagtaattatggaagatacttagtacctaccaacttggtaacagtgcaaacactagttgtaaggcccacgaaggatgcccagaaggtacccgcaggtaacaagagacactgtggatctgatctggggccacctacctctatcctggtgaggtggttaaaaaacgtctagtgggccaaacccaggggggatccctggtttccttattttagtgtaaatgtcatt

SEQ ID NO: 21786 - DNA, 602 bp, synthetic construct
  source 1..602: mol_type = other DNA
aaacaataccaaacgtaactaaacatctaagataacatagccctatgcctggtctccaccagttgaaggcatcttgcaataaaatgggtggattaagacgcttaaagcatggagtcaattatcttttctaactagtgatcttcactgggtggcagatggcgtgccataactctattagtgggataccacgctcgtggatcttatgcccacacagccatcctctagtaagtttgcaaggtgtctgatgaggcgtgggaacttattggaaataattacttgctgcgaagcatcctactgccagcggatcaacacctggtaacaggtgcccctggggccaaaagccacggtttaacagaccctttaggattggttaaaacctgagtaattatggaagatacttagtacctaccaacttggtaacagtgcaaacactagttgtaaggcccacgaaggatgcccagaaggtacccgcaggtaacaagagacactgtggatctgatctggggccacctacctctatcctggtgaggtggttaaaaaacgtctagtgggccaaacccaggggggatccctggtttccttattttagtgtaaatgtcatt

SEQ ID NO: 21787 - DNA, 552 bp, synthetic construct
  source 1..552: mol_type = other DNA
ggtctccaccagttgaaggcatcttgcaataaaatgggtggattaagacgcttaaagcatggagtcaattatcttttctaactagtgatcttcactgggtggcagatggcgtgccataactctattagtgggataccacgctcgtggatcttatgcccacacagccatcctctagtaagtttgcaaggtgtctgatgaggcgtgggaacttattggaaataattacttgctgcgaagcatcctactgccagcggatcaacacctggtaacaggtgcccctggggccaaaagccacggtttaacagaccctttaggattggttaaaacctgagtaattatggaagatacttagtacctaccaacttggtaacagtgcaaacactagttgtaaggcccacgaaggatgcccagaaggtacccgcaggtaacaagagacactgtggatctgatctggggccacctacctctatcctggtgaggtggttaaaaaacgtctagtgggccaaacccaggggggatccctggtttccttattttagtgtaaatgtcatt

SEQ ID NO: 21788 - DNA, 502 bp, synthetic construct
  source 1..502: mol_type = other DNA
cttaaagcatggagtcaattatcttttctaactagtgatcttcactgggtggcagatggcgtgccataactctattagtgggataccacgctcgtggatcttatgcccacacagccatcctctagtaagtttgcaaggtgtctgatgaggcgtgggaacttattggaaataattacttgctgcgaagcatcctactgccagcggatcaacacctggtaacaggtgcccctggggccaaaagccacggtttaacagaccctttaggattggttaaaacctgagtaattatggaagatacttagtacctaccaacttggtaacagtgcaaacactagttgtaaggcccacgaaggatgcccagaaggtacccgcaggtaacaagagacactgtggatctgatctggggccacctacctctatcctggtgaggtggttaaaaaacgtctagtgggccaaacccaggggggatccctggtttccttattttagtgtaaatgtcatt

SEQ ID NO: 21789 - DNA, 655 bp, synthetic construct
  source 1..655: mol_type = other DNA
ctgagtttctctaggagagtccctttcccagccctgaggcggctggataataaaggcctcacatgtaacaaacatctaagacaaaataatttgccttgcacctggtccccactagttgaaggcatctagcaataagatgagtggaacaaggacgcttaaagtgcaatgatagttatcttttctaacccactatttatagtggggtggtggatggcgcaccataattctaatagtgagataccacgcttgtggaccttatgctcacacagccatcctctagtaagtttgtgagacgtctggtgacgtgtgggaacttactggaaacaatgctttgccgtaaggctttcattagccagcggaccaccacctggtaacaggtgcctctggggccaaaagccaaggtttaatagaccctaatggaatggttcaaacctggagcattgtggaaagtacttagtacctgctgatctggtagtaatgcaaacactagttgtacggcccacgaaggatgcccagaaggtacccgtaggtaacaagtgacactatggatctgatctggggccaactacctctatcttggtgagttggttaaaaaacgtctagtgggccaaacccaggggggatccctggtttccttttattttactttgtcaat

SEQ ID NO: 21790 - DNA, 605 bp, synthetic construct
  source 1..605: mol_type = other DNA
taaaggcctcacatgtaacaaacatctaagacaaaataatttgccttgcacctggtccccactagttgaaggcatctagcaataagatgagtggaacaaggacgcttaaagtgcaatgatagttatcttttctaacccactatttatagtggggtggtggatggcgcaccataattctaatagtgagataccacgcttgtggaccttatgctcacacagccatcctctagtaagtttgtgagacgtctggtgacgtgtgggaacttactggaaacaatgctttgccgtaaggctttcattagccagcggaccaccacctggtaacaggtgcctctggggccaaaagccaaggtttaatagaccctaatggaatggttcaaacctggagcattgtggaaagtacttagtacctgctgatctggtagtaatgcaaacactagttgtacggcccacgaaggatgcccagaaggtacccgtaggtaacaagtgacactatggatctgatctggggccaactacctctatcttggtgagttggttaaaaaacgtctagtgggccaaacccaggggggatccctggtttccttttattttactttgtcaat

SEQ ID NO: 21791 - DNA, 555 bp, synthetic construct
  source 1..555: mol_type = other DNA
cctggtccccactagttgaaggcatctagcaataagatgagtggaacaaggacgcttaaagtgcaatgatagttatcttttctaacccactatttatagtggggtggtggatggcgcaccataattctaatagtgagataccacgcttgtggaccttatgctcacacagccatcctctagtaagtttgtgagacgtctggtgacgtgtgggaacttactggaaacaatgctttgccgtaaggctttcattagccagcggaccaccacctggtaacaggtgcctctggggccaaaagccaaggtttaatagaccctaatggaatggttcaaacctggagcattgtggaaagtacttagtacctgctgatctggtagtaatgcaaacactagttgtacggcccacgaaggatgcccagaaggtacccgtaggtaacaagtgacactatggatctgatctggggccaactacctctatcttggtgagttggttaaaaaacgtctagtgggccaaacccaggggggatccctggtttccttttattttactttgtcaat

SEQ ID NO: 21792 - DNA, 505 bp, synthetic construct
  source 1..505: mol_type = other DNA
gacgcttaaagtgcaatgatagttatcttttctaacccactatttatagtggggtggtggatggcgcaccataattctaatagtgagataccacgcttgtggaccttatgctcacacagccatcctctagtaagtttgtgagacgtctggtgacgtgtgggaacttactggaaacaatgctttgccgtaaggctttcattagccagcggaccaccacctggtaacaggtgcctctggggccaaaagccaaggtttaatagaccctaatggaatggttcaaacctggagcattgtggaaagtacttagtacctgctgatctggtagtaatgcaaacactagttgtacggcccacgaaggatgcccagaaggtacccgtaggtaacaagtgacactatggatctgatctggggccaactacctctatcttggtgagttggttaaaaaacgtctagtgggccaaacccaggggggatccctggtttccttttattttactttgtcaat

SEQ ID NO: 21793 - DNA, 658 bp, synthetic construct
  source 1..658: mol_type = other DNA
ttgctgagcttctctaggagagtccctttcccagccctgaggcggctggttaataatagcctcaagcgtaactaatatctaagaagattgtgcaaaccctatgcctggtctccactattcgaaggcaacttgcaataagaagagtggaatcaagacgcttaaagcatagagacagtattcttttctaacccacattactgtggggtggcagatggcgtgccataattctaatagtgagataccacgcttgtggaccttatgctcacacagccatcctctagtaagtttgtgagacgtctggtgacgtgtgggaacttattggaaacaacattttgctgcaaagcatcctactgccagcggaacaacacctggtaacaggtgcctctggggccaaaagccaaggtttaatagaccctttaggattggttctaaacctgagatgttgtggaaaatatttagtacctgctgacctggtagtaatacaaacactagttgtaaggcccacgaaggatgcccagaaggtacccgtaggtaacaagtgacactatggatctgatctggggccaaccacctctatcttggtgggttggttaaaaaacgtctagtgggccaaacccaggggggatccctggtttccttttattttatcatatttaat

SEQ ID NO: 21794 - DNA, 608 bp, synthetic construct
  source 1..608: mol_type = other DNA
taataatagcctcaagcgtaactaatatctaagaagattgtgcaaaccctatgcctggtctccactattcgaaggcaacttgcaataagaagagtggaatcaagacgcttaaagcatagagacagtattcttttctaacccacattactgtggggtggcagatggcgtgccataattctaatagtgagataccacgcttgtggaccttatgctcacacagccatcctctagtaagtttgtgagacgtctggtgacgtgtgggaacttattggaaacaacattttgctgcaaagcatcctactgccagcggaacaacacctggtaacaggtgcctctggggccaaaagccaaggtttaatagaccctttaggattggttctaaacctgagatgttgtggaaaatatttagtacctgctgacctggtagtaatacaaacactagttgtaaggcccacgaaggatgcccagaaggtacccgtaggtaacaagtgacactatggatctgatctggggccaaccacctctatcttggtgggttggttaaaaaacgtctagtgggccaaacccaggggggatccctggtttccttttattttatcatatttaat

SEQ ID NO: 21795 - DNA, 558 bp, synthetic construct
  source 1..558: mol_type = other DNA
atgcctggtctccactattcgaaggcaacttgcaataagaagagtggaatcaagacgcttaaagcatagagacagtattcttttctaacccacattactgtggggtggcagatggcgtgccataattctaatagtgagataccacgcttgtggaccttatgctcacacagccatcctctagtaagtttgtgagacgtctggtgacgtgtgggaacttattggaaacaacattttgctgcaaagcatcctactgccagcggaacaacacctggtaacaggtgcctctggggccaaaagccaaggtttaatagaccctttaggattggttctaaacctgagatgttgtggaaaatatttagtacctgctgacctggtagtaatacaaacactagttgtaaggcccacgaaggatgcccagaaggtacccgtaggtaacaagtgacactatggatctgatctggggccaaccacctctatcttggtgggttggttaaaaaacgtctagtgggccaaacccaggggggatccctggtttccttttattttatcatatttaat

SEQ ID NO: 21796 - DNA, 508 bp, synthetic construct
  source 1..508: mol_type = other DNA
caagacgcttaaagcatagagacagtattcttttctaacccacattactgtggggtggcagatggcgtgccataattctaatagtgagataccacgcttgtggaccttatgctcacacagccatcctctagtaagtttgtgagacgtctggtgacgtgtgggaacttattggaaacaacattttgctgcaaagcatcctactgccagcggaacaacacctggtaacaggtgcctctggggccaaaagccaaggtttaatagaccctttaggattggttctaaacctgagatgttgtggaaaatatttagtacctgctgacctggtagtaatacaaacactagttgtaaggcccacgaaggatgcccagaaggtacccgtaggtaacaagtgacactatggatctgatctggggccaaccacctctatcttggtgggttggttaaaaaacgtctagtgggccaaacccaggggggatccctggtttccttttattttatcatatttaat

SEQ ID NO: 21797 - DNA, 658 bp, synthetic construct
  source 1..658: mol_type = other DNA
ttgccgagtttctctaagagagtccctttcccagccttgaggcggctggtcaataaatgccttaaatgtaactaacacctaagattgctttaacaaccctatgcctggtctccactagttgaaggcatctagcaataaaatgagtggaatcaagacgcttaaagcatagtgccagcatgcatttctaacctgcagtttttgcagggtggcagatggcgtgccataattctattagtgagatactacgcttgtagatcttatgctcacacagccatcctctagtaagtttgtaagatgtctgatgacgtgtgggaacttattggaaataacaccttgctgtaaagcatcttattgccagcggaacaacacctggtaacaggtgcctctggggccaaaagccaaggtttaacagaccctttaagattggttcaaacctgaggtgttatggaaaatattcagtacctgctgatttggtagtaatgcaaacactagttgtaaggcccacgaaggatgcccagaaggtacccgtaggtaacaagtgacactatggatctgatctggggccaactacctctatcttggtgagttggttaaaaaacgtctagtgggccacacccaggggggatccctggttttcttttattacacaattgtcatt

SEQ ID NO: 21798 - DNA, 608 bp, synthetic construct
  source 1..608: mol_type = other DNA
caataaatgccttaaatgtaactaacacctaagattgctttaacaaccctatgcctggtctccactagttgaaggcatctagcaataaaatgagtggaatcaagacgcttaaagcatagtgccagcatgcatttctaacctgcagtttttgcagggtggcagatggcgtgccataattctattagtgagatactacgcttgtagatcttatgctcacacagccatcctctagtaagtttgtaagatgtctgatgacgtgtgggaacttattggaaataacaccttgctgtaaagcatcttattgccagcggaacaacacctggtaacaggtgcctctggggccaaaagccaaggtttaacagaccctttaagattggttcaaacctgaggtgttatggaaaatattcagtacctgctgatttggtagtaatgcaaacactagttgtaaggcccacgaaggatgcccagaaggtacccgtaggtaacaagtgacactatggatctgatctggggccaactacctctatcttggtgagttggttaaaaaacgtctagtgggccacacccaggggggatccctggttttcttttattacacaattgtcatt

SEQ ID NO: 21799 - DNA, 558 bp, synthetic construct
  source 1..558: mol_type = other DNA
atgcctggtctccactagttgaaggcatctagcaataaaatgagtggaatcaagacgcttaaagcatagtgccagcatgcatttctaacctgcagtttttgcagggtggcagatggcgtgccataattctattagtgagatactacgcttgtagatcttatgctcacacagccatcctctagtaagtttgtaagatgtctgatgacgtgtgggaacttattggaaataacaccttgctgtaaagcatcttattgccagcggaacaacacctggtaacaggtgcctctggggccaaaagccaaggtttaacagaccctttaagattggttcaaacctgaggtgttatggaaaatattcagtacctgctgatttggtagtaatgcaaacactagttgtaaggcccacgaaggatgcccagaaggtacccgtaggtaacaagtgacactatggatctgatctggggccaactacctctatcttggtgagttggttaaaaaacgtctagtgggccacacccaggggggatccctggttttcttttattacacaattgtcatt

SEQ ID NO: 21800 - DNA, 508 bp, synthetic construct
  source 1..508: mol_type = other DNA
caagacgcttaaagcatagtgccagcatgcatttctaacctgcagtttttgcagggtggcagatggcgtgccataattctattagtgagatactacgcttgtagatcttatgctcacacagccatcctctagtaagtttgtaagatgtctgatgacgtgtgggaacttattggaaataacaccttgctgtaaagcatcttattgccagcggaacaacacctggtaacaggtgcctctggggccaaaagccaaggtttaacagaccctttaagattggttcaaacctgaggtgttatggaaaatattcagtacctgctgatttggtagtaatgcaaacactagttgtaaggcccacgaaggatgcccagaaggtacccgtaggtaacaagtgacactatggatctgatctggggccaactacctctatcttggtgagttggttaaaaaacgtctagtgggccacacccaggggggatccctggttttcttttattacacaattgtcatt

SEQ ID NO: 21801 - DNA, 659 bp, synthetic construct
  source 1..659: mol_type = other DNA
ttgctgagctcctctaggagagtccctttcccagccttgaggcggctggtcaataaaagcctcaattgtaacaaacatctaagattattatattaaccccatgcctggtctccgttagttgaaggcaacttgcaataaaatgagcggaaacaagacgcttaaagcatggtgtaaattaacttttctaacccacatcttgtgtggggtggcagatggcgtgccataactctattagtgagataccacgcttgtggaccttatgctcacacagccatcctctagtaagtttgtgagacgtctggtgacgtgtgggaacttattggaaacaacattttgctgtaaagcatcctattgccagcggaacaacacctggtaacaggtgcctctggggccaaaagccaaggtttaacaaaccctttaggattggttctaaacctgagatgttgtggaagatacttagtacctaccgatccggtagtagtgcaaacactagttgtaaggcccacgaaggatgcccagaaggtacccgtaggtaacaagcgacactatggatctgatctggggccaggtacctctatcttggtgatctggttaaaaaacgtctagtgggccaaatccgggggggatccccggtttccttttattttatcaatgccact

SEQ ID NO: 21802 - DNA, 609 bp, synthetic construct
  source 1..609: mol_type = other DNA
caataaaagcctcaattgtaacaaacatctaagattattatattaaccccatgcctggtctccgttagttgaaggcaacttgcaataaaatgagcggaaacaagacgcttaaagcatggtgtaaattaacttttctaacccacatcttgtgtggggtggcagatggcgtgccataactctattagtgagataccacgcttgtggaccttatgctcacacagccatcctctagtaagtttgtgagacgtctggtgacgtgtgggaacttattggaaacaacattttgctgtaaagcatcctattgccagcggaacaacacctggtaacaggtgcctctggggccaaaagccaaggtttaacaaaccctttaggattggttctaaacctgagatgttgtggaagatacttagtacctaccgatccggtagtagtgcaaacactagttgtaaggcccacgaaggatgcccagaaggtacccgtaggtaacaagcgacactatggatctgatctggggccaggtacctctatcttggtgatctggttaaaaaacgtctagtgggccaaatccgggggggatccccggtttccttttattttatcaatgccact

SEQ ID NO: 21803 - DNA, 559 bp, synthetic construct
  source 1..559: mol_type = other DNA
atgcctggtctccgttagttgaaggcaacttgcaataaaatgagcggaaacaagacgcttaaagcatggtgtaaattaacttttctaacccacatcttgtgtggggtggcagatggcgtgccataactctattagtgagataccacgcttgtggaccttatgctcacacagccatcctctagtaagtttgtgagacgtctggtgacgtgtgggaacttattggaaacaacattttgctgtaaagcatcctattgccagcggaacaacacctggtaacaggtgcctctggggccaaaagccaaggtttaacaaaccctttaggattggttctaaacctgagatgttgtggaagatacttagtacctaccgatccggtagtagtgcaaacactagttgtaaggcccacgaaggatgcccagaaggtacccgtaggtaacaagcgacactatggatctgatctggggccaggtacctctatcttggtgatctggttaaaaaacgtctagtgggccaaatccgggggggatccccggtttccttttattttatcaatgccact

SEQ ID NO: 21804 - DNA, 509 bp, synthetic construct
  source 1..509: mol_type = other DNA
caagacgcttaaagcatggtgtaaattaacttttctaacccacatcttgtgtggggtggcagatggcgtgccataactctattagtgagataccacgcttgtggaccttatgctcacacagccatcctctagtaagtttgtgagacgtctggtgacgtgtgggaacttattggaaacaacattttgctgtaaagcatcctattgccagcggaacaacacctggtaacaggtgcctctggggccaaaagccaaggtttaacaaaccctttaggattggttctaaacctgagatgttgtggaagatacttagtacctaccgatccggtagtagtgcaaacactagttgtaaggcccacgaaggatgcccagaaggtacccgtaggtaacaagcgacactatggatctgatctggggccaggtacctctatcttggtgatctggttaaaaaacgtctagtgggccaaatccgggggggatccccggtttccttttattttatcaatgccact

SEQ ID NO: 21805 - DNA, 659 bp, synthetic construct
  source 1..659: mol_type = other DNA
ttgctgagtctctctaggagagtccctttcccagccttgaggcggctggacaataaaagcctcaactgtaacaaacacctaagattattatattaaccccatgcctggtctccactggttgaaggcaacttgcaataaaatgagtggaaataagacgcttgaagcatggtgcaaatctacttttctaacccacactttgtgtggggtggcagatggcgtgccataattctattagtgagataccacgcttgtggaccttatgctcacacagccatcctctagtaagtttgtgaggcgtctggtgacgtgtgggaacttattggaagcaacattttgctgtaaagcatcctatcgccagcggaacaacgcctggtaacaggtgcctctggggccaaaagccaaggtttaacagaccctttaggattggtttaaaacctgaaatgttgtggaaaatacttagtacctaccgacctggtagtaatgcaaacactagttgtaaggcccacgaaggatgcccagaaggtacccgtaggtaacaagtgacactatggatctgatctggggccaggtacttctatcctagtgacctggttaaaaaacgtctagtgggccaaacccgggggggatccccggtttccttttattttactaatgctatt

SEQ ID NO: 21806 - DNA, 609 bp, synthetic construct
  source 1..609: mol_type = other DNA
caataaaagcctcaactgtaacaaacacctaagattattatattaaccccatgcctggtctccactggttgaaggcaacttgcaataaaatgagtggaaataagacgcttgaagcatggtgcaaatctacttttctaacccacactttgtgtggggtggcagatggcgtgccataattctattagtgagataccacgcttgtggaccttatgctcacacagccatcctctagtaagtttgtgaggcgtctggtgacgtgtgggaacttattggaagcaacattttgctgtaaagcatcctatcgccagcggaacaacgcctggtaacaggtgcctctggggccaaaagccaaggtttaacagaccctttaggattggtttaaaacctgaaatgttgtggaaaatacttagtacctaccgacctggtagtaatgcaaacactagttgtaaggcccacgaaggatgcccagaaggtacccgtaggtaacaagtgacactatggatctgatctggggccaggtacttctatcctagtgacctggttaaaaaacgtctagtgggccaaacccgggggggatccccggtttccttttattttactaatgctatt

SEQ ID NO: 21807 - DNA, 559 bp, synthetic construct
  source 1..559: mol_type = other DNA
atgcctggtctccactggttgaaggcaacttgcaataaaatgagtggaaataagacgcttgaagcatggtgcaaatctacttttctaacccacactttgtgtggggtggcagatggcgtgccataattctattagtgagataccacgcttgtggaccttatgctcacacagccatcctctagtaagtttgtgaggcgtctggtgacgtgtgggaacttattggaagcaacattttgctgtaaagcatcctatcgccagcggaacaacgcctggtaacaggtgcctctggggccaaaagccaaggtttaacagaccctttaggattggtttaaaacctgaaatgttgtggaaaatacttagtacctaccgacctggtagtaatgcaaacactagttgtaaggcccacgaaggatgcccagaaggtacccgtaggtaacaagtgacactatggatctgatctggggccaggtacttctatcctagtgacctggttaaaaaacgtctagtgggccaaacccgggggggatccccggtttccttttattttactaatgctatt

SEQ ID NO: 21808 - DNA, 509 bp, synthetic construct
  source 1..509: mol_type = other DNA
taagacgcttgaagcatggtgcaaatctacttttctaacccacactttgtgtggggtggcagatggcgtgccataattctattagtgagataccacgcttgtggaccttatgctcacacagccatcctctagtaagtttgtgaggcgtctggtgacgtgtgggaacttattggaagcaacattttgctgtaaagcatcctatcgccagcggaacaacgcctggtaacaggtgcctctggggccaaaagccaaggtttaacagaccctttaggattggtttaaaacctgaaatgttgtggaaaatacttagtacctaccgacctggtagtaatgcaaacactagttgtaaggcccacgaaggatgcccagaaggtacccgtaggtaacaagtgacactatggatctgatctggggccaggtacttctatcctagtgacctggttaaaaaacgtctagtgggccaaacccgggggggatccccggtttccttttattttactaatgctatt

SEQ ID NO: 21809 - DNA, 659 bp, synthetic construct
  source 1..659: mol_type = other DNA
gctgagcttctataggaaaaaaccctttcccagccttggggtggctggtcaataaaaacccccatagtaaccaacacctaagacaatttgatcaaccctatgcctggtccccactattcgaaggcaacttgcaataagaagagtggaacaaggatgcttaaagcatagtgtaaatgatcttttctaacctgtattatgtacagggtggcagatggcgtgccataaatctattagtgggataccacgcttgtggaccttatgcccacacagccatcctctagtaagtttgtaaaatgtctggtgagatgtgggaacttattggaaacaacaatttgcttaatagcatcctagtgccagcggaacaacatctggtaacagatgcctctggggccaaaagccaaggtttgacagacccattaggattggtttcaaaacctgaattgttgtggaagatattcagtacctatcaatctggtagtggtgcaaacactagttgtaaggcccacgaaggatgcccagaaggtacccgcaggtaacaagagacactgtggatctgatctggggccaactacctctatcaggtgagttagttaaaaaacgtctagtgggccaaacccaggggggatccctggtttccttttattgttaatattgacatt

SEQ ID NO: 21810 - DNA, 609 bp, synthetic construct
  source 1..609: mol_type = other DNA
aataaaaacccccatagtaaccaacacctaagacaatttgatcaaccctatgcctggtccccactattcgaaggcaacttgcaataagaagagtggaacaaggatgcttaaagcatagtgtaaatgatcttttctaacctgtattatgtacagggtggcagatggcgtgccataaatctattagtgggataccacgcttgtggaccttatgcccacacagccatcctctagtaagtttgtaaaatgtctggtgagatgtgggaacttattggaaacaacaatttgcttaatagcatcctagtgccagcggaacaacatctggtaacagatgcctctggggccaaaagccaaggtttgacagacccattaggattggtttcaaaacctgaattgttgtggaagatattcagtacctatcaatctggtagtggtgcaaacactagttgtaaggcccacgaaggatgcccagaaggtacccgcaggtaacaagagacactgtggatctgatctggggccaactacctctatcaggtgagttagttaaaaaacgtctagtgggccaaacccaggggggatccctggtttccttttattgttaatattgacatt

SEQ ID NO: 21811 - DNA, 559 bp, synthetic construct
  source 1..559: mol_type = other DNA
tgcctggtccccactattcgaaggcaacttgcaataagaagagtggaacaaggatgcttaaagcatagtgtaaatgatcttttctaacctgtattatgtacagggtggcagatggcgtgccataaatctattagtgggataccacgcttgtggaccttatgcccacacagccatcctctagtaagtttgtaaaatgtctggtgagatgtgggaacttattggaaacaacaatttgcttaatagcatcctagtgccagcggaacaacatctggtaacagatgcctctggggccaaaagccaaggtttgacagacccattaggattggtttcaaaacctgaattgttgtggaagatattcagtacctatcaatctggtagtggtgcaaacactagttgtaaggcccacgaaggatgcccagaaggtacccgcaggtaacaagagacactgtggatctgatctggggccaactacctctatcaggtgagttagttaaaaaacgtctagtgggccaaacccaggggggatccctggtttccttttattgttaatattgacatt

SEQ ID NO: 21812 - DNA, 509 bp, synthetic construct
  source 1..509: mol_type = other DNA
aggatgcttaaagcatagtgtaaatgatcttttctaacctgtattatgtacagggtggcagatggcgtgccataaatctattagtgggataccacgcttgtggaccttatgcccacacagccatcctctagtaagtttgtaaaatgtctggtgagatgtgggaacttattggaaacaacaatttgcttaatagcatcctagtgccagcggaacaacatctggtaacagatgcctctggggccaaaagccaaggtttgacagacccattaggattggtttcaaaacctgaattgttgtggaagatattcagtacctatcaatctggtagtggtgcaaacactagttgtaaggcccacgaaggatgcccagaaggtacccgcaggtaacaagagacactgtggatctgatctggggccaactacctctatcaggtgagttagttaaaaaacgtctagtgggccaaacccaggggggatccctggtttccttttattgttaatattgacatt

SEQ ID NO: 21813 - DNA, 693 bp, synthetic construct
  source 1..693: mol_type = other DNA
gtacaccggtatcacggtacccttgtacgcctgttttatactccctaccccgtaacttagaagcaataatccaagttcaatagtaggggtacaaaccagtaccaccacgaacaagcacttctgtttccccggtgatatcgtatagactgtacccacggtcgaaaatggtggatccgttatccgcttttgtacttcgagaagcccagtaccatcttggaatcttcgatgcgttgcgctcagcactcgaacccggagtgtagcttaggccgatgagtctggacaatccccaccggcgacggtggtccaggctgcgttggcggcctacctgtggcccaaagccacaggacgctagttgtgaacaaggtgcgaagagcctattgagctacaaaagagtcctccggcccctgaatgcggctaatcccaaccatggagcaggtgatcacaaaccagtggtaagcctgtcgtaacgcgcaagtccgtggcggaaccgactactttgggtgtccgtgtttccttttatttttgtatggctgcttatggtgacaatcaaagattgttatcataaagcgaattggattggccatccagtgagagtaaagcacattatttacttgcttgttgggtttgcccctttgatttgtaacactctttatctaccttatattgtacttttggttagacaacagtatcacg

SEQ ID NO: 21814 - DNA, 643 bp, synthetic construct
  source 1..643: mol_type = other DNA
cgtaacttagaagcaataatccaagttcaatagtaggggtacaaaccagtaccaccacgaacaagcacttctgtttccccggtgatatcgtatagactgtacccacggtcgaaaatggtggatccgttatccgcttttgtacttcgagaagcccagtaccatcttggaatcttcgatgcgttgcgctcagcactcgaacccggagtgtagcttaggccgatgagtctggacaatccccaccggcgacggtggtccaggctgcgttggcggcctacctgtggcccaaagccacaggacgctagttgtgaacaaggtgcgaagagcctattgagctacaaaagagtcctccggcccctgaatgcggctaatcccaaccatggagcaggtgatcacaaaccagtggtaagcctgtcgtaacgcgcaagtccgtggcggaaccgactactttgggtgtccgtgtttccttttatttttgtatggctgcttatggtgacaatcaaagattgttatcataaagcgaattggattggccatccagtgagagtaaagcacattatttacttgcttgttgggtttgcccctttgatttgtaacactctttatctaccttatattgtacttttggttagacaacagtatcacg

SEQ ID NO: 21815 - DNA, 593 bp, synthetic construct
  source 1..593: mol_type = other DNA
accaccacgaacaagcacttctgtttccccggtgatatcgtatagactgtacccacggtcgaaaatggtggatccgttatccgcttttgtacttcgagaagcccagtaccatcttggaatcttcgatgcgttgcgctcagcactcgaacccggagtgtagcttaggccgatgagtctggacaatccccaccggcgacggtggtccaggctgcgttggcggcctacctgtggcccaaagccacaggacgctagttgtgaacaaggtgcgaagagcctattgagctacaaaagagtcctccggcccctgaatgcggctaatcccaaccatggagcaggtgatcacaaaccagtggtaagcctgtcgtaacgcgcaagtccgtggcggaaccgactactttgggtgtccgtgtttccttttatttttgtatggctgcttatggtgacaatcaaagattgttatcataaagcgaattggattggccatccagtgagagtaaagcacattatttacttgcttgttgggtttgcccctttgatttgtaacactctttatctaccttatattgtacttttggttagacaacagtatcacg

SEQ ID NO: 21816 - DNA, 543 bp, synthetic construct
  source 1..543: mol_type = other DNA
acccacggtcgaaaatggtggatccgttatccgcttttgtacttcgagaagcccagtaccatcttggaatcttcgatgcgttgcgctcagcactcgaacccggagtgtagcttaggccgatgagtctggacaatccccaccggcgacggtggtccaggctgcgttggcggcctacctgtggcccaaagccacaggacgctagttgtgaacaaggtgcgaagagcctattgagctacaaaagagtcctccggcccctgaatgcggctaatcccaaccatggagcaggtgatcacaaaccagtggtaagcctgtcgtaacgcgcaagtccgtggcggaaccgactactttgggtgtccgtgtttccttttatttttgtatggctgcttatggtgacaatcaaagattgttatcataaagcgaattggattggccatccagtgagagtaaagcacattatttacttgcttgttgggtttgcccctttgatttgtaacactctttatctaccttatattgtacttttggttagacaacagtatcacg

SEQ ID NO: 21817 - DNA, 693 bp, synthetic construct
  source 1..693: mol_type = other DNA
gtactccggtattgcggtacccttgtacgcctgttttatactcccttcccgtaacttagacgcacgacaccaagttcaatagaagggggtgcaaaccagtaccaccacgaacaagcacttctgtttccccggtgatgttgtatagactgcttgcgtggtcgaaagcgacggatccgttacccgcttatgtacttcgagaagcccagtaccacctcggaatcttcgacgcgttgcgctcagcactcaaccccagagtgtagcttaggctgatgagtctggacgtcccccaccggtgacggtggtccaggctgcgttggcggcctacctatggcttacgccatgggacgctagttgtgaacaaggtgtgaagagcctattgagctacataagaatcctccggcccctgaatgcggctaatcccaacctcggagcaggtggtcacaaaccagtgattggcctgtcgtaacgcgcaagtccgtggcggaaccgactactttgggtgtccgtgtttccttttattttattatggctgcttatggtgacaatcacagattgttatcataaagcgaattggattagccatccggtgaaagtgagactcattatctacctgttcgctggattcgctccattgagtgtgtttactctaagtacaatttcaacagttatttttaatcagacaattgtaccata

SEQ ID NO: 21818 - DNA, 643 bp, synthetic construct
  source 1..643: mol_type = other DNA
gtaacttagacgcacgacaccaagttcaatagaagggggtgcaaaccagtaccaccacgaacaagcacttctgtttccccggtgatgttgtatagactgcttgcgtggtcgaaagcgacggatccgttacccgcttatgtacttcgagaagcccagtaccacctcggaatcttcgacgcgttgcgctcagcactcaaccccagagtgtagcttaggctgatgagtctggacgtcccccaccggtgacggtggtccaggctgcgttggcggcctacctatggcttacgccatgggacgctagttgtgaacaaggtgtgaagagcctattgagctacataagaatcctccggcccctgaatgcggctaatcccaacctcggagcaggtggtcacaaaccagtgattggcctgtcgtaacgcgcaagtccgtggcggaaccgactactttgggtgtccgtgtttccttttattttattatggctgcttatggtgacaatcacagattgttatcataaagcgaattggattagccatccggtgaaagtgagactcattatctacctgttcgctggattcgctccattgagtgtgtttactctaagtacaatttcaacagttatttttaatcagacaattgtaccata

SEQ ID NO: 21819 - DNA, 593 bp, synthetic construct
  source 1..593: mol_type = other DNA
accaccacgaacaagcacttctgtttccccggtgatgttgtatagactgcttgcgtggtcgaaagcgacggatccgttacccgcttatgtacttcgagaagcccagtaccacctcggaatcttcgacgcgttgcgctcagcactcaaccccagagtgtagcttaggctgatgagtctggacgtcccccaccggtgacggtggtccaggctgcgttggcggcctacctatggcttacgccatgggacgctagttgtgaacaaggtgtgaagagcctattgagctacataagaatcctccggcccctgaatgcggctaatcccaacctcggagcaggtggtcacaaaccagtgattggcctgtcgtaacgcgcaagtccgtggcggaaccgactactttgggtgtccgtgtttccttttattttattatggctgcttatggtgacaatcacagattgttatcataaagcgaattggattagccatccggtgaaagtgagactcattatctacctgttcgctggattcgctccattgagtgtgtttactctaagtacaatttcaacagttatttttaatcagacaattgtaccata

SEQ ID NO: 21820 - DNA, 543 bp, synthetic construct
  source 1..543: mol_type = other DNA
ttgcgtggtcgaaagcgacggatccgttacccgcttatgtacttcgagaagcccagtaccacctcggaatcttcgacgcgttgcgctcagcactcaaccccagagtgtagcttaggctgatgagtctggacgtcccccaccggtgacggtggtccaggctgcgttggcggcctacctatggcttacgccatgggacgctagttgtgaacaaggtgtgaagagcctattgagctacataagaatcctccggcccctgaatgcggctaatcccaacctcggagcaggtggtcacaaaccagtgattggcctgtcgtaacgcgcaagtccgtggcggaaccgactactttgggtgtccgtgtttccttttattttattatggctgcttatggtgacaatcacagattgttatcataaagcgaattggattagccatccggtgaaagtgagactcattatctacctgttcgctggattcgctccattgagtgtgtttactctaagtacaatttcaacagttatttttaatcagacaattgtaccata

SEQ ID NO: 21821 - DNA, 694 bp, synthetic construct
  source 1..694: mol_type = other DNA
gtacaccggtatcacggtacccttgtacgcctgttttatactccctaccccgtaacttagaagcaacaatccaagttcaatagtaggggtacaaaccagtaccaccacgaacaagcacttctgtttccccggtgataccatatagactgtacccacggtcaaaaatggtggatccgttacccgcttttgtacttcgagaagcccagtatcatcttggaatcttcgatgcgttgcgttcagcactcgaacccggagtgtagcttaggtcgatgagtctggacaatcctcaccggcgacggtggtccaggctgcgttggcggcctacctgtggcccaaagccacaggacgctagttgtgaacaaggtgtgaagagcctattgagctacaaaagagtcctccggcccctgaatgcggctaatcccaaccatggagcaggtggtcacaaaccagtgactagcctgtcgtaacgcgcaagtccgtggcggaaccgactactttgggtgtccgtgtttccttttattttatgtatggctgcttatggtgacaatcaaagattgttatcataaagcaaattggattggccatccagtgagagtaaaacacattatctacttatttgttggatttgtccctttaattcatcacactcttcatctaatttacattgtggttctaattagacagcagtatcaca

SEQ ID NO: 21822 - DNA, 644 bp, synthetic construct
  source 1..644: mol_type = other DNA
cgtaacttagaagcaacaatccaagttcaatagtaggggtacaaaccagtaccaccacgaacaagcacttctgtttccccggtgataccatatagactgtacccacggtcaaaaatggtggatccgttacccgcttttgtacttcgagaagcccagtatcatcttggaatcttcgatgcgttgcgttcagcactcgaacccggagtgtagcttaggtcgatgagtctggacaatcctcaccggcgacggtggtccaggctgcgttggcggcctacctgtggcccaaagccacaggacgctagttgtgaacaaggtgtgaagagcctattgagctacaaaagagtcctccggcccctgaatgcggctaatcccaaccatggagcaggtggtcacaaaccagtgactagcctgtcgtaacgcgcaagtccgtggcggaaccgactactttgggtgtccgtgtttccttttattttatgtatggctgcttatggtgacaatcaaagattgttatcataaagcaaattggattggccatccagtgagagtaaaacacattatctacttatttgttggatttgtccctttaattcatcacactcttcatctaatttacattgtggttctaattagacagcagtatcaca

SEQ ID NO: 21823 - DNA, 594 bp, synthetic construct
  source 1..594: mol_type = other DNA
accaccacgaacaagcacttctgtttccccggtgataccatatagactgtacccacggtcaaaaatggtggatccgttacccgcttttgtacttcgagaagcccagtatcatcttggaatcttcgatgcgttgcgttcagcactcgaacccggagtgtagcttaggtcgatgagtctggacaatcctcaccggcgacggtggtccaggctgcgttggcggcctacctgtggcccaaagccacaggacgctagttgtgaacaaggtgtgaagagcctattgagctacaaaagagtcctccggcccctgaatgcggctaatcccaaccatggagcaggtggtcacaaaccagtgactagcctgtcgtaacgcgcaagtccgtggcggaaccgactactttgggtgtccgtgtttccttttattttatgtatggctgcttatggtgacaatcaaagattgttatcataaagcaaattggattggccatccagtgagagtaaaacacattatctacttatttgttggatttgtccctttaattcatcacactcttcatctaatttacattgtggttctaattagacagcagtatcaca

SEQ ID NO: 21824 - DNA, 544 bp, synthetic construct
  source 1..544: mol_type = other DNA
acccacggtcaaaaatggtggatccgttacccgcttttgtacttcgagaagcccagtatcatcttggaatcttcgatgcgttgcgttcagcactcgaacccggagtgtagcttaggtcgatgagtctggacaatcctcaccggcgacggtggtccaggctgcgttggcggcctacctgtggcccaaagccacaggacgctagttgtgaacaaggtgtgaagagcctattgagctacaaaagagtcctccggcccctgaatgcggctaatcccaaccatggagcaggtggtcacaaaccagtgactagcctgtcgtaacgcgcaagtccgtggcggaaccgactactttgggtgtccgtgtttccttttattttatgtatggctgcttatggtgacaatcaaagattgttatcataaagcaaattggattggccatccagtgagagtaaaacacattatctacttatttgttggatttgtccctttaattcatcacactcttcatctaatttacattgtggttctaattagacagcagtatcaca

SEQ ID NO: 21825 - DNA, 694 bp, synthetic construct
  source 1..694: mol_type = other DNA
gtactccggtattacggtacccttgtacgcctgttttatactccctccctcgtaacttagaagcacaaaaccaagttcaatagaagggggtgcaaaccagtaccaccacgaacaagcatttctgtttccccggtgatgttgtatagactgcccgcgcggttgaaagcaacggatccgttacccgctcaagtacttcgagaagcctagtattaccttggaatcttcgatgcgttgcgttcagcactcgaccctggagtgtagcttaggctgatgagtctggacgtccctcaccggtgacggtggtccaggctgcgttggcggcctacctatggctaacgccataggacgctagttgtgaacaaggtgtgaagagcctattgagctacttgagagtcctccggcccctgaatgcggctaatcctaaccatggagcaggcggtcacagaccagtgactagcttgtcgtaatgcgcaagtctatggcggaaccgactactttgggtgtccgtgtttccttttatttttattatggctgcttatggtgacaatcattgattgttatcataaagcgaattggattggccatccggtgaaagcgagacttactatttacttacttgttggacttaccacacttaatacatttattctaggtgtcacttgtatagcaattagaatcaaacagttgcatcata

SEQ ID NO: 21826 - DNA, 644 bp, synthetic construct
  source 1..644: mol_type = other DNA
cgtaacttagaagcacaaaaccaagttcaatagaagggggtgcaaaccagtaccaccacgaacaagcatttctgtttccccggtgatgttgtatagactgcccgcgcggttgaaagcaacggatccgttacccgctcaagtacttcgagaagcctagtattaccttggaatcttcgatgcgttgcgttcagcactcgaccctggagtgtagcttaggctgatgagtctggacgtccctcaccggtgacggtggtccaggctgcgttggcggcctacctatggctaacgccataggacgctagttgtgaacaaggtgtgaagagcctattgagctacttgagagtcctccggcccctgaatgcggctaatcctaaccatggagcaggcggtcacagaccagtgactagcttgtcgtaatgcgcaagtctatggcggaaccgactactttgggtgtccgtgtttccttttatttttattatggctgcttatggtgacaatcattgattgttatcataaagcgaattggattggccatccggtgaaagcgagacttactatttacttacttgttggacttaccacacttaatacatttattctaggtgtcacttgtatagcaattagaatcaaacagttgcatcata

SEQ ID NO: 21827 - DNA, 594 bp, synthetic construct
  source 1..594: mol_type = other DNA
taccaccacgaacaagcatttctgtttccccggtgatgttgtatagactgcccgcgcggttgaaagcaacggatccgttacccgctcaagtacttcgagaagcctagtattaccttggaatcttcgatgcgttgcgttcagcactcgaccctggagtgtagcttaggctgatgagtctggacgtccctcaccggtgacggtggtccaggctgcgttggcggcctacctatggctaacgccataggacgctagttgtgaacaaggtgtgaagagcctattgagctacttgagagtcctccggcccctgaatgcggctaatcctaaccatggagcaggcggtcacagaccagtgactagcttgtcgtaatgcgcaagtctatggcggaaccgactactttgggtgtccgtgtttccttttatttttattatggctgcttatggtgacaatcattgattgttatcataaagcgaattggattggccatccggtgaaagcgagacttactatttacttacttgttggacttaccacacttaatacatttattctaggtgtcacttgtatagcaattagaatcaaacagttgcatcata

SEQ ID NO: 21828 - DNA, 544 bp, synthetic construct
  source 1..544: mol_type = other DNA
cccgcgcggttgaaagcaacggatccgttacccgctcaagtacttcgagaagcctagtattaccttggaatcttcgatgcgttgcgttcagcactcgaccctggagtgtagcttaggctgatgagtctggacgtccctcaccggtgacggtggtccaggctgcgttggcggcctacctatggctaacgccataggacgctagttgtgaacaaggtgtgaagagcctattgagctacttgagagtcctccggcccctgaatgcggctaatcctaaccatggagcaggcggtcacagaccagtgactagcttgtcgtaatgcgcaagtctatggcggaaccgactactttgggtgtccgtgtttccttttatttttattatggctgcttatggtgacaatcattgattgttatcataaagcgaattggattggccatccggtgaaagcgagacttactatttacttacttgttggacttaccacacttaatacatttattctaggtgtcacttgtatagcaattagaatcaaacagttgcatcata

SEQ ID NO: 21829 - DNA, 696 bp, synthetic construct
  source 1..696: mol_type = other DNA
gtacaccggtattacggtacccttgtacgcctgttttatactccctaccccgtaacttagaagcaataacttaagttcaatagtagggggtacaaaccagtaccaccacgaacaagcacttctgtttccccggtgacattgtatagactgtgcccacggttgaaaacgatggatccgttatccgctcttgtacttcgagaagcctagtaatactttggaatcttcgatgcgttgcgctcagcactcatccccagagtgtagcttaggccgatgagtctggacattcctcaccggcgacggtggtccaggctgcgttggcggcctacctgtggcccaaagccacaggacgctagttgtgaacaaggtgtgaagagcctattgagctacaagagagtcctccggcccctgaatgcggctaatcccaaccatggagcaggtgatcgcaaaccagcggttagcctgtcgtaacgcgcaagtctgtggcggaaccgactactttgggagtccgtgtttctctttatttttacttatggctgcttatggtgacaatcatagattgttatcataacgcgaattggattggccatccggtgatatacaaacacattgtttacctatttattgggtttacacctttaagttctttcactctacaccttactcgtgttgtgttattaaccagacagtggtgccaac

SEQ ID NO: 21830 - DNA, 646 bp, synthetic construct
  source 1..646: mol_type = other DNA
cgtaacttagaagcaataacttaagttcaatagtagggggtacaaaccagtaccaccacgaacaagcacttctgtttccccggtgacattgtatagactgtgcccacggttgaaaacgatggatccgttatccgctcttgtacttcgagaagcctagtaatactttggaatcttcgatgcgttgcgctcagcactcatccccagagtgtagcttaggccgatgagtctggacattcctcaccggcgacggtggtccaggctgcgttggcggcctacctgtggcccaaagccacaggacgctagttgtgaacaaggtgtgaagagcctattgagctacaagagagtcctccggcccctgaatgcggctaatcccaaccatggagcaggtgatcgcaaaccagcggttagcctgtcgtaacgcgcaagtctgtggcggaaccgactactttgggagtccgtgtttctctttatttttacttatggctgcttatggtgacaatcatagattgttatcataacgcgaattggattggccatccggtgatatacaaacacattgtttacctatttattgggtttacacctttaagttctttcactctacaccttactcgtgttgtgttattaaccagacagtggtgccaac

SEQ ID NO: 21831 - DNA, 596 bp, synthetic construct
  source 1..596: mol_type = other DNA
taccaccacgaacaagcacttctgtttccccggtgacattgtatagactgtgcccacggttgaaaacgatggatccgttatccgctcttgtacttcgagaagcctagtaatactttggaatcttcgatgcgttgcgctcagcactcatccccagagtgtagcttaggccgatgagtctggacattcctcaccggcgacggtggtccaggctgcgttggcggcctacctgtggcccaaagccacaggacgctagttgtgaacaaggtgtgaagagcctattgagctacaagagagtcctccggcccctgaatgcggctaatcccaaccatggagcaggtgatcgcaaaccagcggttagcctgtcgtaacgcgcaagtctgtggcggaaccgactactttgggagtccgtgtttctctttatttttacttatggctgcttatggtgacaatcatagattgttatcataacgcgaattggattggccatccggtgatatacaaacacattgtttacctatttattgggtttacacctttaagttctttcactctacaccttactcgtgttgtgttattaaccagacagtggtgccaac

SEQ ID NO: 21832 - DNA, 546 bp, synthetic construct
  source 1..546: mol_type = other DNA
tgcccacggttgaaaacgatggatccgttatccgctcttgtacttcgagaagcctagtaatactttggaatcttcgatgcgttgcgctcagcactcatccccagagtgtagcttaggccgatgagtctggacattcctcaccggcgacggtggtccaggctgcgttggcggcctacctgtggcccaaagccacaggacgctagttgtgaacaaggtgtgaagagcctattgagctacaagagagtcctccggcccctgaatgcggctaatcccaaccatggagcaggtgatcgcaaaccagcggttagcctgtcgtaacgcgcaagtctgtggcggaaccgactactttgggagtccgtgtttctctttatttttacttatggctgcttatggtgacaatcatagattgttatcataacgcgaattggattggccatccggtgatatacaaacacattgtttacctatttattgggtttacacctttaagttctttcactctacaccttactcgtgttgtgttattaaccagacagtggtgccaac

SEQ ID NO: 21833 - DNA, 698 bp, synthetic construct
  source 1..698: mol_type = other DNA
catgttatgacgtatctttcatctaccccaacccttgtgtcaaccgatacgcctacacaggtgggtaaagcaccggcccactgaatggaacaaaatgctaggtgcaaagtcaggcccataggccatcggtcgaagcccgcttgggaataagactgatggattaccctattctggcgcctgaccacttgtttcttttctgaatcacacacctgtgtgaacggtggacctgcaccgtaactcttctagcctactaccacacttgtggaactataggggcacaggaacttcaaccaagtgctgttggaatggagaaaataatccaatcctgaaacgtcatggatccacactctgtgtggggctactagcctgcggaacaacacatggtaacatgtgccccaggggccgaaagccacggtgataagatcaccctagtagtttgagattgtatcaatgttcatgtcttagtaaggggaggtgaaatctatctgtgacaccggattactggttgtcgtatagcggctgaaggatgtcctgctggtacctttagggaaccttaagagactattgatcgaagcaggagcctggttggtctctcccactccaggttaaaaaacgtctaggccgtggaaccgggcgggaggcccggttttcctcccaaaattataatattgtgtatggtgacaactgaaggcttaaca

SEQ ID NO: 21834 - DNA, 648 bp, synthetic construct
  source 1..648: mol_type = other DNA
gcctacacaggtgggtaaagcaccggcccactgaatggaacaaaatgctaggtgcaaagtcaggcccataggccatcggtcgaagcccgcttgggaataagactgatggattaccctattctggcgcctgaccacttgtttcttttctgaatcacacacctgtgtgaacggtggacctgcaccgtaactcttctagcctactaccacacttgtggaactataggggcacaggaacttcaaccaagtgctgttggaatggagaaaataatccaatcctgaaacgtcatggatccacactctgtgtggggctactagcctgcggaacaacacatggtaacatgtgccccaggggccgaaagccacggtgataagatcaccctagtagtttgagattgtatcaatgttcatgtcttagtaaggggaggtgaaatctatctgtgacaccggattactggttgtcgtatagcggctgaaggatgtcctgctggtacctttagggaaccttaagagactattgatcgaagcaggagcctggttggtctctcccactccaggttaaaaaacgtctaggccgtggaaccgggcgggaggcccggttttcctcccaaaattataatattgtgtatggtgacaactgaaggcttaaca

SEQ ID NO: 21835 - DNA, 598 bp, synthetic construct
  source 1..598: mol_type = other DNA
ggtgcaaagtcaggcccataggccatcggtcgaagcccgcttgggaataagactgatggattaccctattctggcgcctgaccacttgtttcttttctgaatcacacacctgtgtgaacggtggacctgcaccgtaactcttctagcctactaccacacttgtggaactataggggcacaggaacttcaaccaagtgctgttggaatggagaaaataatccaatcctgaaacgtcatggatccacactctgtgtggggctactagcctgcggaacaacacatggtaacatgtgccccaggggccgaaagccacggtgataagatcaccctagtagtttgagattgtatcaatgttcatgtcttagtaaggggaggtgaaatctatctgtgacaccggattactggttgtcgtatagcggctgaaggatgtcctgctggtacctttagggaaccttaagagactattgatcgaagcaggagcctggttggtctctcccactccaggttaaaaaacgtctaggccgtggaaccgggcgggaggcccggttttcctcccaaaattataatattgtgtatggtgacaactgaaggcttaaca

SEQ ID NO: 21836 - DNA, 548 bp, synthetic construct
  source 1..548: mol_type = other DNA
gactgatggattaccctattctggcgcctgaccacttgtttcttttctgaatcacacacctgtgtgaacggtggacctgcaccgtaactcttctagcctactaccacacttgtggaactataggggcacaggaacttcaaccaagtgctgttggaatggagaaaataatccaatcctgaaacgtcatggatccacactctgtgtggggctactagcctgcggaacaacacatggtaacatgtgccccaggggccgaaagccacggtgataagatcaccctagtagtttgagattgtatcaatgttcatgtcttagtaaggggaggtgaaatctatctgtgacaccggattactggttgtcgtatagcggctgaaggatgtcctgctggtacctttagggaaccttaagagactattgatcgaagcaggagcctggttggtctctcccactccaggttaaaaaacgtctaggccgtggaaccgggcgggaggcccggttttcctcccaaaattataatattgtgtatggtgacaactgaaggcttaaca

SEQ ID NO: 21837 - DNA, 701 bp, synthetic construct
  source 1..701: mol_type = other DNA
gctagtacactggtattacggtacccttgtacgcctgttttacacccctttcccccgtaacttagaagcttttaaattcaagttcaacagtgagtggtacaacccagtactactatgaacaagcacttctgttaccccggtgagattgcataagctgtccccacggctaaaagcgattgatccgttatccgctcttgtacttcgagaagcccagtaaaaccttgggatcctcgatgcgttgcgctcaacactcaaccccagagtgtagcttgggctgatgagtctgggcattcctcaccggcgacggtggtccaggctgcgttggcggcctacctgtggcccaaagccacaggacgctagttgtgaacaaggtgtgaagagcctattgagctacaagagagtcctccggcccctgaatgcggctaatcccaaccacggagcaggtgattgcaacccagcaactagcctgtcgtaacgcgcaagtctgtggcggaaccgactactttgggtgtccgtgtttccttttattacataatggctgcttatggtgacaatcatagattgttgtcataaagcgagttggattggccatccggtgagaattaaaacaattatttacttgtttgttggatttgttcctatacacacccatacaccttgcttgattgaagtaattctgttgataagacaacactattacg

SEQ ID NO: 21838 - DNA, 651 bp, synthetic construct
  source 1..651: mol_type = other DNA
tcccccgtaacttagaagcttttaaattcaagttcaacagtgagtggtacaacccagtactactatgaacaagcacttctgttaccccggtgagattgcataagctgtccccacggctaaaagcgattgatccgttatccgctcttgtacttcgagaagcccagtaaaaccttgggatcctcgatgcgttgcgctcaacactcaaccccagagtgtagcttgggctgatgagtctgggcattcctcaccggcgacggtggtccaggctgcgttggcggcctacctgtggcccaaagccacaggacgctagttgtgaacaaggtgtgaagagcctattgagctacaagagagtcctccggcccctgaatgcggctaatcccaaccacggagcaggtgattgcaacccagcaactagcctgtcgtaacgcgcaagtctgtggcggaaccgactactttgggtgtccgtgtttccttttattacataatggctgcttatggtgacaatcatagattgttgtcataaagcgagttggattggccatccggtgagaattaaaacaattatttacttgtttgttggatttgttcctatacacacccatacaccttgcttgattgaagtaattctgttgataagacaacactattacg

SEQ ID NO: 21839 - DNA, 601 bp, synthetic construct
  source 1..601: mol_type = other DNA
aacccagtactactatgaacaagcacttctgttaccccggtgagattgcataagctgtccccacggctaaaagcgattgatccgttatccgctcttgtacttcgagaagcccagtaaaaccttgggatcctcgatgcgttgcgctcaacactcaaccccagagtgtagcttgggctgatgagtctgggcattcctcaccggcgacggtggtccaggctgcgttggcggcctacctgtggcccaaagccacaggacgctagttgtgaacaaggtgtgaagagcctattgagctacaagagagtcctccggcccctgaatgcggctaatcccaaccacggagcaggtgattgcaacccagcaactagcctgtcgtaacgcgcaagtctgtggcggaaccgactactttgggtgtccgtgtttccttttattacataatggctgcttatggtgacaatcatagattgttgtcataaagcgagttggattggccatccggtgagaattaaaacaattatttacttgtttgttggatttgttcctatacacacccatacaccttgcttgattgaagtaattctgttgataagacaacactattacg

SEQ ID NO: 21840 - DNA, 551 bp, synthetic construct
  source 1..551: mol_type = other DNA
taagctgtccccacggctaaaagcgattgatccgttatccgctcttgtacttcgagaagcccagtaaaaccttgggatcctcgatgcgttgcgctcaacactcaaccccagagtgtagcttgggctgatgagtctgggcattcctcaccggcgacggtggtccaggctgcgttggcggcctacctgtggcccaaagccacaggacgctagttgtgaacaaggtgtgaagagcctattgagctacaagagagtcctccggcccctgaatgcggctaatcccaaccacggagcaggtgattgcaacccagcaactagcctgtcgtaacgcgcaagtctgtggcggaaccgactactttgggtgtccgtgtttccttttattacataatggctgcttatggtgacaatcatagattgttgtcataaagcgagttggattggccatccggtgagaattaaaacaattatttacttgtttgttggatttgttcctatacacacccatacaccttgcttgattgaagtaattctgttgataagacaacactattacg

SEQ ID NO: 21841 - DNA, 501 bp, synthetic construct
  source 1..501: mol_type = other DNA
ttcgagaagcccagtaaaaccttgggatcctcgatgcgttgcgctcaacactcaaccccagagtgtagcttgggctgatgagtctgggcattcctcaccggcgacggtggtccaggctgcgttggcggcctacctgtggcccaaagccacaggacgctagttgtgaacaaggtgtgaagagcctattgagctacaagagagtcctccggcccctgaatgcggctaatcccaaccacggagcaggtgattgcaacccagcaactagcctgtcgtaacgcgcaagtctgtggcggaaccgactactttgggtgtccgtgtttccttttattacataatggctgcttatggtgacaatcatagattgttgtcataaagcgagttggattggccatccggtgagaattaaaacaattatttacttgtttgttggatttgttcctatacacacccatacaccttgcttgattgaagtaattctgttgataagacaacactattacg

SEQ ID NO: 21842 - DNA, 950 bp, synthetic construct
  source 1..950: mol_type = other DNA
gtgtcagatgcttttacaaactttatgctatggcgcgctggagtggcagtccacatttccacgtcggccagccccgctatggcaggagcgctactcgtggtggcatcacccgagggctttgaggacgtgcaacagcgcccatggaatgcgcaagttagcgggctaactacaatcccatatgtacttcttaacctgtgccaatccaattcagccactgtaatcctccctccttgtacagtcactccgtttgatgatgcccgctcccatacatcttggtctgtgcgcgtgtatgtcttcacacagctaaatgtccctaccggcgttgcaaatcaaatcacaattcaattgatgtttgctccccttgcttcccggtttttgtttgcatgtgttcccataaagcaccacctgcgcacccgcatactacccggttccggggatggctattcatttaacatcccccagaaccagggcgtccctatggctcaatatcttcctgaacatgagtccgcagactacatccctgggcattttgataattttgcacggtttgctaacgcccccgggctcttgcgcactgtgcgttggctctctgagtatactcccaacacacctcttcttcggcttaatttgaattctattagtctcggtcccgatacccacacccccttatcctatgtacttagtgcttttgctcaacaacgtgggtctctctcttttgatttggtgtttgttggggcccaggtccaatctgggcgcctgctcatatctataacccccccctcgcaggcccctcctgccagtgtcgaggaagccctccgtggccattccctgacctgggacgtgactgtgtcttgctgcagctcatttcacgcccccttcttctctgcgactgcctggcgatctctagctattgatggatccgctacaaaaactctctacaattcgtgggg

SEQ ID NO: 21843 - DNA, 900 bp, synthetic construct
  source 1..900: mol_type = other DNA
ccacatttccacgtcggccagccccgctatggcaggagcgctactcgtggtggcatcacccgagggctttgaggacgtgcaacagcgcccatggaatgcgcaagttagcgggctaactacaatcccatatgtacttcttaacctgtgccaatccaattcagccactgtaatcctccctccttgtacagtcactccgtttgatgatgcccgctcccatacatcttggtctgtgcgcgtgtatgtcttcacacagctaaatgtccctaccggcgttgcaaatcaaatcacaattcaattgatgtttgctccccttgcttcccggtttttgtttgcatgtgttcccataaagcaccacctgcgcacccgcatactacccggttccggggatggctattcatttaacatcccccagaaccagggcgtccctatggctcaatatcttcctgaacatgagtccgcagactacatccctgggcattttgataattttgcacggtttgctaacgcccccgggctcttgcgcactgtgcgttggctctctgagtatactcccaacacacctcttcttcggcttaatttgaattctattagtctcggtcccgatacccacacccccttatcctatgtacttagtgcttttgctcaacaacgtgggtctctctcttttgatttggtgtttgttggggcccaggtccaatctgggcgcctgctcatatctataacccccccctcgcaggcccctcctgccagtgtcgaggaagccctccgtggccattccctgacctgggacgtgactgtgtcttgctgcagctcatttcacgcccccttcttctctgcgactgcctggcgatctctagctattgatggatccgctacaaaaactctctacaattcgtgggg

SEQ ID NO: 21844 - DNA, 850 bp, synthetic construct
  source 1..850: mol_type = other DNA
tggcatcacccgagggctttgaggacgtgcaacagcgcccatggaatgcgcaagttagcgggctaactacaatcccatatgtacttcttaacctgtgccaatccaattcagccactgtaatcctccctccttgtacagtcactccgtttgatgatgcccgctcccatacatcttggtctgtgcgcgtgtatgtcttcacacagctaaatgtccctaccggcgttgcaaatcaaatcacaattcaattgatgtttgctccccttgcttcccggtttttgtttgcatgtgttcccataaagcaccacctgcgcacccgcatactacccggttccggggatggctattcatttaacatcccccagaaccagggcgtccctatggctcaatatcttcctgaacatgagtccgcagactacatccctgggcattttgataattttgcacggtttgctaacgcccccgggctcttgcgcactgtgcgttggctctctgagtatactcccaacacacctcttcttcggcttaatttgaattctattagtctcggtcccgatacccacacccccttatcctatgtacttagtgcttttgctcaacaacgtgggtctctctcttttgatttggtgtttgttggggcccaggtccaatctgggcgcctgctcatatctataacccccccctcgcaggcccctcctgccagtgtcgaggaagccctccgtggccattccctgacctgggacgtgactgtgtcttgctgcagctcatttcacgcccccttcttctctgcgactgcctggcgatctctagctattgatggatccgctacaaaaactctctacaattcgtgggg

SEQ ID NO: 21845 - DNA, 800 bp, synthetic construct
  source 1..800: mol_type = other DNA
caagttagcgggctaactacaatcccatatgtacttcttaacctgtgccaatccaattcagccactgtaatcctccctccttgtacagtcactccgtttgatgatgcccgctcccatacatcttggtctgtgcgcgtgtatgtcttcacacagctaaatgtccctaccggcgttgcaaatcaaatcacaattcaattgatgtttgctccccttgcttcccggtttttgtttgcatgtgttcccataaagcaccacctgcgcacccgcatactacccggttccggggatggctattcatttaacatcccccagaaccagggcgtccctatggctcaatatcttcctgaacatgagtccgcagactacatccctgggcattttgataattttgcacggtttgctaacgcccccgggctcttgcgcactgtgcgttggctctctgagtatactcccaacacacctcttcttcggcttaatttgaattctattagtctcggtcccgatacccacacccccttatcctatgtacttagtgcttttgctcaacaacgtgggtctctctcttttgatttggtgtttgttggggcccaggtccaatctgggcgcctgctcatatctataacccccccctcgcaggcccctcctgccagtgtcgaggaagccctccgtggccattccctgacctgggacgtgactgtgtcttgctgcagctcatttcacgcccccttcttctctgcgactgcctggcgatctctagctattgatggatccgctacaaaaactctctacaattcgtgggg

SEQ ID NO: 21846 - DNA, 750 bp, synthetic construct
  source 1..750: mol_type = other DNA
atccaattcagccactgtaatcctccctccttgtacagtcactccgtttgatgatgcccgctcccatacatcttggtctgtgcgcgtgtatgtcttcacacagctaaatgtccctaccggcgttgcaaatcaaatcacaattcaattgatgtttgctccccttgcttcccggtttttgtttgcatgtgttcccataaagcaccacctgcgcacccgcatactacccggttccggggatggctattcatttaacatcccccagaaccagggcgtccctatggctcaatatcttcctgaacatgagtccgcagactacatccctgggcattttgataattttgcacggtttgctaacgcccccgggctcttgcgcactgtgcgttggctctctgagtatactcccaacacacctcttcttcggcttaatttgaattctattagtctcggtcccgatacccacacccccttatcctatgtacttagtgcttttgctcaacaacgtgggtctctctcttttgatttggtgtttgttggggcccaggtccaatctgggcgcctgctcatatctataacccccccctcgcaggcccctcctgccagtgtcgaggaagccctccgtggccattccctgacctgggacgtgactgtgtcttgctgcagctcatttcacgcccccttcttctctgcgactgcctggcgatctctagctattgatggatccgctacaaaaactctctacaattcgtgggg

SEQ ID NO: 21847 - DNA, 700 bp, synthetic construct
  source 1..700: mol_type = other DNA
atgatgcccgctcccatacatcttggtctgtgcgcgtgtatgtcttcacacagctaaatgtccctaccggcgttgcaaatcaaatcacaattcaattgatgtttgctccccttgcttcccggtttttgtttgcatgtgttcccataaagcaccacctgcgcacccgcatactacccggttccggggatggctattcatttaacatcccccagaaccagggcgtccctatggctcaatatcttcctgaacatgagtccgcagactacatccctgggcattttgataattttgcacggtttgctaacgcccccgggctcttgcgcactgtgcgttggctctctgagtatactcccaacacacctcttcttcggcttaatttgaattctattagtctcggtcccgatacccacacccccttatcctatgtacttagtgcttttgctcaacaacgtgggtctctctcttttgatttggtgtttgttggggcccaggtccaatctgggcgcctgctcatatctataacccccccctcgcaggcccctcctgccagtgtcgaggaagccctccgtggccattccctgacctgggacgtgactgtgtcttgctgcagctcatttcacgcccccttcttctctgcgactgcctggcgatctctagctattgatggatccgctacaaaaactctctacaattcgtgggg

SEQ ID NO: 21848 - DNA, 650 bp, synthetic construct
  source 1..650: mol_type = other DNA
cagctaaatgtccctaccggcgttgcaaatcaaatcacaattcaattgatgtttgctccccttgcttcccggtttttgtttgcatgtgttcccataaagcaccacctgcgcacccgcatactacccggttccggggatggctattcatttaacatcccccagaaccagggcgtccctatggctcaatatcttcctgaacatgagtccgcagactacatccctgggcattttgataattttgcacggtttgctaacgcccccgggctcttgcgcactgtgcgttggctctctgagtatactcccaacacacctcttcttcggcttaatttgaattctattagtctcggtcccgatacccacacccccttatcctatgtacttagtgcttttgctcaacaacgtgggtctctctcttttgatttggtgtttgttggggcccaggtccaatctgggcgcctgctcatatctataacccccccctcgcaggcccctcctgccagtgtcgaggaagccctccgtggccattccctgacctgggacgtgactgtgtcttgctgcagctcatttcacgcccccttcttctctgcgactgcctggcgatctctagctattgatggatccgctacaaaaactctctacaattcgtgggg

SEQ ID NO: 21849 - DNA, 600 bp, synthetic construct
  source 1..600: mol_type = other DNA
gtttgctccccttgcttcccggtttttgtttgcatgtgttcccataaagcaccacctgcgcacccgcatactacccggttccggggatggctattcatttaacatcccccagaaccagggcgtccctatggctcaatatcttcctgaacatgagtccgcagactacatccctgggcattttgataattttgcacggtttgctaacgcccccgggctcttgcgcactgtgcgttggctctctgagtatactcccaacacacctcttcttcggcttaatttgaattctattagtctcggtcccgatacccacacccccttatcctatgtacttagtgcttttgctcaacaacgtgggtctctctcttttgatttggtgtttgttggggcccaggtccaatctgggcgcctgctcatatctataacccccccctcgcaggcccctcctgccagtgtcgaggaagccctccgtggccattccctgacctgggacgtgactgtgtcttgctgcagctcatttcacgcccccttcttctctgcgactgcctggcgatctctagctattgatggatccgctacaaaaactctctacaattcgtgggg

SEQ ID NO: 21850 - DNA, 550 bp, synthetic construct
  source 1..550: mol_type = other DNA
accacctgcgcacccgcatactacccggttccggggatggctattcatttaacatcccccagaaccagggcgtccctatggctcaatatcttcctgaacatgagtccgcagactacatccctgggcattttgataattttgcacggtttgctaacgcccccgggctcttgcgcactgtgcgttggctctctgagtatactcccaacacacctcttcttcggcttaatttgaattctattagtctcggtcccgatacccacacccccttatcctatgtacttagtgcttttgctcaacaacgtgggtctctctcttttgatttggtgtttgttggggcccaggtccaatctgggcgcctgctcatatctataacccccccctcgcaggcccctcctgccagtgtcgaggaagccctccgtggccattccctgacctgggacgtgactgtgtcttgctgcagctcatttcacgcccccttcttctctgcgactgcctggcgatctctagctattgatggatccgctacaaaaactctctacaattcgtgggg

SEQ ID NO: 21851 - DNA, 500 bp, synthetic construct
  source 1..500: mol_type = other DNA
aacatcccccagaaccagggcgtccctatggctcaatatcttcctgaacatgagtccgcagactacatccctgggcattttgataattttgcacggtttgctaacgcccccgggctcttgcgcactgtgcgttggctctctgagtatactcccaacacacctcttcttcggcttaatttgaattctattagtctcggtcccgatacccacacccccttatcctatgtacttagtgcttttgctcaacaacgtgggtctctctcttttgatttggtgtttgttggggcccaggtccaatctgggcgcctgctcatatctataacccccccctcgcaggcccctcctgccagtgtcgaggaagccctccgtggccattccctgacctgggacgtgactgtgtcttgctgcagctcatttcacgcccccttcttctctgcgactgcctggcgatctctagctattgatggatccgctacaaaaactctctacaattcgtgggg

SEQ ID NO: 21852 - DNA, 950 bp, synthetic construct
  source 1..950: mol_type = other DNA
gcctttcctacacccgactcccgaccctaacccagggtcctcggaagaggatcatacatctcatcccctgaatgctgactaatcagaggaaagttagcattttccggcccaggctaagagaagtagataagttagattcaaattgatacaacatccccttgacgaattcgcaacgaaaagtcgtccctcacttgccgcttgatcacacccacgaactcacaattcggcccctcgtgacaagccccttgttgaaacgacctctttcaatgcgacgtggttggagatttgtcatcttacgactccgacgtaactaccgtcatgcctccccgattatgtgatgctatccgccctgctgggtggagcattctcgggttgagtaacctacatcctttactccttggactccggtcccccggtctaagccgcttggaatatgacagggttattttccaaacatcttctttctactcttaagtgttctatacttaagaagggtatgtgttgccccttccttcttggagaacgtgcgcggcggtctttccgtctctcgaaaagcgtgcgtgcaacatgcagagacctgtgaagaaagcagtctttgaactagccttagtgcagacaagaaactggctgtagcgacctcacactagcagcggacacccctcctggtaacaggagcccctgcggccaaaagccacgtggataggatccactggtgtgagcggtgcatccccagcaccctggtttcttggttgtactctggtgaacccagagatggcaatcttaagcaactctgtagagaagccaagaatgtccggaaggtaccccgcttcggtgggatctgatccggagactcgtccacagtgctctacactgtggctcgggtttaaaaactgtcacagcttctccaaaccaagtggtcttggttttccctttttactcattgtgtcacg

SEQ ID NO: 21853 - DNA, 900 bp, synthetic construct
  source 1..900: mol_type = other DNA
atcatacatctcatcccctgaatgctgactaatcagaggaaagttagcattttccggcccaggctaagagaagtagataagttagattcaaattgatacaacatccccttgacgaattcgcaacgaaaagtcgtccctcacttgccgcttgatcacacccacgaactcacaattcggcccctcgtgacaagccccttgttgaaacgacctctttcaatgcgacgtggttggagatttgtcatcttacgactccgacgtaactaccgtcatgcctccccgattatgtgatgctatccgccctgctgggtggagcattctcgggttgagtaacctacatcctttactccttggactccggtcccccggtctaagccgcttggaatatgacagggttattttccaaacatcttctttctactcttaagtgttctatacttaagaagggtatgtgttgccccttccttcttggagaacgtgcgcggcggtctttccgtctctcgaaaagcgtgcgtgcaacatgcagagacctgtgaagaaagcagtctttgaactagccttagtgcagacaagaaactggctgtagcgacctcacactagcagcggacacccctcctggtaacaggagcccctgcggccaaaagccacgtggataggatccactggtgtgagcggtgcatccccagcaccctggtttcttggttgtactctggtgaacccagagatggcaatcttaagcaactctgtagagaagccaagaatgtccggaaggtaccccgcttcggtgggatctgatccggagactcgtccacagtgctctacactgtggctcgggtttaaaaactgtcacagcttctccaaaccaagtggtcttggttttccctttttactcattgtgtcacg

SEQ ID NO: 21854 - DNA, 850 bp, synthetic construct
  source 1..850: mol_type = other DNA
tttccggcccaggctaagagaagtagataagttagattcaaattgatacaacatccccttgacgaattcgcaacgaaaagtcgtccctcacttgccgcttgatcacacccacgaactcacaattcggcccctcgtgacaagccccttgttgaaacgacctctttcaatgcgacgtggttggagatttgtcatcttacgactccgacgtaactaccgtcatgcctccccgattatgtgatgctatccgccctgctgggtggagcattctcgggttgagtaacctacatcctttactccttggactccggtcccccggtctaagccgcttggaatatgacagggttattttccaaacatcttctttctactcttaagtgttctatacttaagaagggtatgtgttgccccttccttcttggagaacgtgcgcggcggtctttccgtctctcgaaaagcgtgcgtgcaacatgcagagacctgtgaagaaagcagtctttgaactagccttagtgcagacaagaaactggctgtagcgacctcacactagcagcggacacccctcctggtaacaggagcccctgcggccaaaagccacgtggataggatccactggtgtgagcggtgcatccccagcaccctggtttcttggttgtactctggtgaacccagagatggcaatcttaagcaactctgtagagaagccaagaatgtccggaaggtaccccgcttcggtgggatctgatccggagactcgtccacagtgctctacactgtggctcgggtttaaaaactgtcacagcttctccaaaccaagtggtcttggttttccctttttactcattgtgtcacg

SEQ ID NO: 21855 - DNA, 800 bp, synthetic construct
  source 1..800: mol_type = other DNA
acatccccttgacgaattcgcaacgaaaagtcgtccctcacttgccgcttgatcacacccacgaactcacaattcggcccctcgtgacaagccccttgttgaaacgacctctttcaatgcgacgtggttggagatttgtcatcttacgactccgacgtaactaccgtcatgcctccccgattatgtgatgctatccgccctgctgggtggagcattctcgggttgagtaacctacatcctttactccttggactccggtcccccggtctaagccgcttggaatatgacagggttattttccaaacatcttctttctactcttaagtgttctatacttaagaagggtatgtgttgccccttccttcttggagaacgtgcgcggcggtctttccgtctctcgaaaagcgtgcgtgcaacatgcagagacctgtgaagaaagcagtctttgaactagccttagtgcagacaagaaactggctgtagcgacctcacactagcagcggacacccctcctggtaacaggagcccctgcggccaaaagccacgtggataggatccactggtgtgagcggtgcatccccagcaccctggtttcttggttgtactctggtgaacccagagatggcaatcttaagcaactctgtagagaagccaagaatgtccggaaggtaccccgcttcggtgggatctgatccggagactcgtccacagtgctctacactgtggctcgggtttaaaaactgtcacagcttctccaaaccaagtggtcttggttttccctttttactcattgtgtcacg

SEQ ID NO: 21856 - DNA, 750 bp, synthetic construct
  source 1..750: mol_type = other DNA
gatcacacccacgaactcacaattcggcccctcgtgacaagccccttgttgaaacgacctctttcaatgcgacgtggttggagatttgtcatcttacgactccgacgtaactaccgtcatgcctccccgattatgtgatgctatccgccctgctgggtggagcattctcgggttgagtaacctacatcctttactccttggactccggtcccccggtctaagccgcttggaatatgacagggttattttccaaacatcttctttctactcttaagtgttctatacttaagaagggtatgtgttgccccttccttcttggagaacgtgcgcggcggtctttccgtctctcgaaaagcgtgcgtgcaacatgcagagacctgtgaagaaagcagtctttgaactagccttagtgcagacaagaaactggctgtagcgacctcacactagcagcggacacccctcctggtaacaggagcccctgcggccaaaagccacgtggataggatccactggtgtgagcggtgcatccccagcaccctggtttcttggttgtactctggtgaacccagagatggcaatcttaagcaactctgtagagaagccaagaatgtccggaaggtaccccgcttcggtgggatctgatccggagactcgtccacagtgctctacactgtggctcgggtttaaaaactgtcacagcttctccaaaccaagtggtcttggttttccctttttactcattgtgtcacg

SEQ ID NO: 21857 - DNA, 700 bp, synthetic construct
  source 1..700: mol_type = other DNA
gaaacgacctctttcaatgcgacgtggttggagatttgtcatcttacgactccgacgtaactaccgtcatgcctccccgattatgtgatgctatccgccctgctgggtggagcattctcgggttgagtaacctacatcctttactccttggactccggtcccccggtctaagccgcttggaatatgacagggttattttccaaacatcttctttctactcttaagtgttctatacttaagaagggtatgtgttgccccttccttcttggagaacgtgcgcggcggtctttccgtctctcgaaaagcgtgcgtgcaacatgcagagacctgtgaagaaagcagtctttgaactagccttagtgcagacaagaaactggctgtagcgacctcacactagcagcggacacccctcctggtaacaggagcccctgcggccaaaagccacgtggataggatccactggtgtgagcggtgcatccccagcaccctggtttcttggttgtactctggtgaacccagagatggcaatcttaagcaactctgtagagaagccaagaatgtccggaaggtaccccgcttcggtgggatctgatccggagactcgtccacagtgctctacactgtggctcgggtttaaaaactgtcacagcttctccaaaccaagtggtcttggttttccctttttactcattgtgtcacg

SEQ ID NO: 21858 - DNA, 650 bp, synthetic construct
  source 1..650: mol_type = other DNA
tccgacgtaactaccgtcatgcctccccgattatgtgatgctatccgccctgctgggtggagcattctcgggttgagtaacctacatcctttactccttggactccggtcccccggtctaagccgcttggaatatgacagggttattttccaaacatcttctttctactcttaagtgttctatacttaagaagggtatgtgttgccccttccttcttggagaacgtgcgcggcggtctttccgtctctcgaaaagcgtgcgtgcaacatgcagagacctgtgaagaaagcagtctttgaactagccttagtgcagacaagaaactggctgtagcgacctcacactagcagcggacacccctcctggtaacaggagcccctgcggccaaaagccacgtggataggatccactggtgtgagcggtgcatccccagcaccctggtttcttggttgtactctggtgaacccagagatggcaatcttaagcaactctgtagagaagccaagaatgtccggaaggtaccccgcttcggtgggatctgatccggagactcgtccacagtgctctacactgtggctcgggtttaaaaactgtcacagcttctccaaaccaagtggtcttggttttccctttttactcattgtgtcacg

SEQ ID NO: 21859 - DNA, 600 bp, synthetic construct
  source 1..600: mol_type = other DNA
tgctgggtggagcattctcgggttgagtaacctacatcctttactccttggactccggtcccccggtctaagccgcttggaatatgacagggttattttccaaacatcttctttctactcttaagtgttctatacttaagaagggtatgtgttgccccttccttcttggagaacgtgcgcggcggtctttccgtctctcgaaaagcgtgcgtgcaacatgcagagacctgtgaagaaagcagtctttgaactagccttagtgcagacaagaaactggctgtagcgacctcacactagcagcggacacccctcctggtaacaggagcccctgcggccaaaagccacgtggataggatccactggtgtgagcggtgcatccccagcaccctggtttcttggttgtactctggtgaacccagagatggcaatcttaagcaactctgtagagaagccaagaatgtccggaaggtaccccgcttcggtgggatctgatccggagactcgtccacagtgctctacactgtggctcgggtttaaaaactgtcacagcttctccaaaccaagtggtcttggttttccctttttactcattgtgtcacg

SEQ ID NO: 21860 - DNA, 550 bp, synthetic construct
  source 1..550: mol_type = other DNA
gactccggtcccccggtctaagccgcttggaatatgacagggttattttccaaacatcttctttctactcttaagtgttctatacttaagaagggtatgtgttgccccttccttcttggagaacgtgcgcggcggtctttccgtctctcgaaaagcgtgcgtgcaacatgcagagacctgtgaagaaagcagtctttgaactagccttagtgcagacaagaaactggctgtagcgacctcacactagcagcggacacccctcctggtaacaggagcccctgcggccaaaagccacgtggataggatccactggtgtgagcggtgcatccccagcaccctggtttcttggttgtactctggtgaacccagagatggcaatcttaagcaactctgtagagaagccaagaatgtccggaaggtaccccgcttcggtgggatctgatccggagactcgtccacagtgctctacactgtggctcgggtttaaaaactgtcacagcttctccaaaccaagtggtcttggttttccctttttactcattgtgtcacg

SEQ ID NO: 21861 - DNA, 500 bp, synthetic construct
  source 1..500: mol_type = other DNA
caaacatcttctttctactcttaagtgttctatacttaagaagggtatgtgttgccccttccttcttggagaacgtgcgcggcggtctttccgtctctcgaaaagcgtgcgtgcaacatgcagagacctgtgaagaaagcagtctttgaactagccttagtgcagacaagaaactggctgtagcgacctcacactagcagcggacacccctcctggtaacaggagcccctgcggccaaaagccacgtggataggatccactggtgtgagcggtgcatccccagcaccctggtttcttggttgtactctggtgaacccagagatggcaatcttaagcaactctgtagagaagccaagaatgtccggaaggtaccccgcttcggtgggatctgatccggagactcgtccacagtgctctacactgtggctcgggtttaaaaactgtcacagcttctccaaaccaagtggtcttggttttccctttttactcattgtgtcacg

SEQ ID NO: 21862 - DNA, 503 bp, synthetic construct
  source 1..503: mol_type = other DNA
ttctccccaccccctccaattcccttttccccctcttgcaacttagaagtttgtacacacagggcaataggatacgtgatccagccaggacacgtgagctcaagcacttctgtttccccgtccccttcacgtactacgggaatgttagtaatttgtgtgcactttagtaaggttgatccgggattaaccccaaatcccagaaactggtgatgagcgttaccacccccgccgggcgaccggaaggtttcgctgcgttggcaccagggcttcggcaccagaaaaaggtaaagcaaatgaaggcgctactgtgctacgagaagtttcctccaggcccctgaatgcggctaatcctaaccagtgatccaccggtgcaaaaccatgtactaggtggtcgtaacgcgcaagtcgctggcggaaccgactactttgggtgtcctgtgtttccatattttattttattcaattttatggtgacaagagtaaagagatacagatttgcagcc

SEQ ID NO: 21863 - DNA, 534 bp, synthetic construct
  source 1..534: mol_type = other DNA
tcctaaaactcccacccatgaaacgttagaagcttgacatttaagtacaataggtggcaccacatccagtggtgtctacgtacaagcacttctgtttccccggagcgaggtataggctgtacccactgccaaaagcctttaaccgttatccgccaaccaactacgtaacagctagtatcatcttgttcttcactggacgttcgatcaggtggattccccctccactagtttggtcgatgaggctaggagctccccacgggtgaccgtgtcctagcctgcgtggcggccaacccagctcatgctgggacgcccttttaaggacatggtgtgaagactcgcatgtgcttggttgtgagtcctccggcccctgaatgcggctaaccttaaccctggagccttatgccacgaaccagtggttgtaaggtcgtaacgagcaattccgggatgggaccgactactttgggtgtccgtgtttcctatttttctttatattgtcttatggtcacagcatatatataagtatatactgtgatc

SEQ ID NO: 21864 - DNA, 546 bp, synthetic construct
  source 1..546: mol_type = other DNA
cccatttgtacccttccttgatttcctccccatgtaacgttagaagtttcggaattttaaagtacaataggaagcgccacatccagtggtgttgtgtacaagcacttctgtttacccggggcgaggtataggctgtgcccacggccaaaaacctttaaccgttatccgccaaccaactacgtaacggctagtatcatcttgtttctgacttggcgttcgatcaggtggtaacccccactagtctggtcgatgaggctaggaattccccacgggcgaccgtgtcctagcctgcgtggcggccagcccagcttttgctgggacgccttttcaaagacatggtgtgaagacccgcatgtgcttggttgtgagtcctccggcccctgaatgcggctaaccttaaccctggagcccagtgacataatccaatgttatttgggtcgtaatgagtaattccgggatgggaccgactactttgggtgtccgtgtttccttttattctttataatgtcttatggtcacagcatatatattgtatatactgtgatc

SEQ ID NO: 21865 - DNA, 548 bp, synthetic construct
  source 1..548: mol_type = other DNA
ccaggtgggttttcgtcaagcacttctgtttccccggacctagtaccaataggctgtacccacggctgaaggggaaaacgttcgttacccggctacctacttcgaaaagcctagtatcatcatagaatgtctcaagtgttacgctcagcacaaccccagtgtagttcaggtcgatgagtcaccgaattccccacgggcgaccgtgtcggtggctgcgttggcggcctgcctgcgagtttcactcgcaggacgcttgattcatgacatggtgtgaagagcctattgagctaggtagtagtcctccggcccctgaatgcggctaatcctaaccacggagccatgcgtcacaatccagtgatgtcgtggtcgtaacgagcaattctgtggcggaaccgactactttgggtgtccgtgtttcctgttttatttaccttggctgcttatggtgacaattgtatagttgtcatcatatagctattggattggccatccggatatatacaagcaactagtgttcacactacctcttttgctataacacaagtatc

SEQ ID NO: 21866 - DNA, 552 bp, synthetic construct
  source 1..552: mol_type = other DNA
cactgggattccggtcactttgtacgcctgtttgaccacccccccccatgcaacttagaaaatatacacatagcccaataggatgcggccaaaccaggttcgtcacgggcaagcacttctgtttccccgggtgtgtgaatagaccctaccagggttgaagctgtagcactcgttatccgcatggctactacgcaaatgttagtaacaccctctattgtacttgggatttcgttccgcagataccccatctgtagattagggcgatgaggctacacactccccactggcgacagtggtgtagcctgcgtggcgccctacctgggtctcctgacccaggattccacttacaagacagggtgtgaaggcacaagtgtgctagtcatgagtcctccggcccctgaatgcggctaatcttaaccccgtagccattgcaggcaaaccagtctgtggatggtcgtaatgggtaactacgggatggaaccgactactttgggtgaccgtgtttctcttttttctttatgtaggcactttatggttacaacataagtaacc

SEQ ID NO: 21867 - DNA, 502 bp, synthetic construct
  source 1..502: mol_type = other DNA
caacttagaaaatatacacatagcccaataggatgcggccaaaccaggttcgtcacgggcaagcacttctgtttccccgggtgtgtgaatagaccctaccagggttgaagctgtagcactcgttatccgcatggctactacgcaaatgttagtaacaccctctattgtacttgggatttcgttccgcagataccccatctgtagattagggcgatgaggctacacactccccactggcgacagtggtgtagcctgcgtggcgccctacctgggtctcctgacccaggattccacttacaagacagggtgtgaaggcacaagtgtgctagtcatgagtcctccggcccctgaatgcggctaatcttaaccccgtagccattgcaggcaaaccagtctgtggatggtcgtaatgggtaactacgggatggaaccgactactttgggtgaccgtgtttctcttttttctttatgtaggcactttatggttacaacataagtaacc

SEQ ID NO: 21868 - DNA, 553 bp, synthetic construct
  source 1..553: mol_type = other DNA
gcttgcacgccagtttttaccccccttttcccaatttgtaacattagaagtttgtactattaatttggtcaataggaggtagcaagccatgctatctaagaccaagcacttctgttaccccggtatacggagaatagactccaaaagggttgaagctccaaatatcgttatccgcacaattactacgcaaagcctagtaacatcttgataagctctttggttggtcgctcagctgttacccccagtagacttggcagatgaggctgggtattccccactggcgacagtgacccagcctgcgtggctgcctacacacctggcgacaggtgtgaagccaaaagtggacaaggtgtgaagagccccgtgtgctaattgtgattcctccggcccctgaatgcggctaatccaaccccacagccaatgcatgtaaaccaacatgtatttggtcgtaacgggcaactgtgggacggaaccgactactttgggtgtccgtgtttccttttattttaaatgacttgcttatggtgacaaatattggtgtatatttgtcatc

SEQ ID NO: 21869 - DNA, 503 bp, synthetic construct
  source 1..503: mol_type = other DNA
tttgtactattaatttggtcaataggaggtagcaagccatgctatctaagaccaagcacttctgttaccccggtatacggagaatagactccaaaagggttgaagctccaaatatcgttatccgcacaattactacgcaaagcctagtaacatcttgataagctctttggttggtcgctcagctgttacccccagtagacttggcagatgaggctgggtattccccactggcgacagtgacccagcctgcgtggctgcctacacacctggcgacaggtgtgaagccaaaagtggacaaggtgtgaagagccccgtgtgctaattgtgattcctccggcccctgaatgcggctaatccaaccccacagccaatgcatgtaaaccaacatgtatttggtcgtaacgggcaactgtgggacggaaccgactactttgggtgtccgtgtttccttttattttaaatgacttgcttatggtgacaaatattggtgtatatttgtcatc

SEQ ID NO: 21870 - DNA, 555 bp, synthetic construct
  source 1..555: mol_type = other DNA
caccacgaacaagcacttctgtttccccggtgaggctgtatagactgtgcccacggtctaaaacggcagatccgttacccgctcaagtacttcgagaagcctagtatcaccttggaatcttcgatgcgttgcgctcagcaccctacccccgggtgtagcttaggtcgatgagtctgggcatgccccaccggcgacggtggcccaggctgcgttggcggcctacccatggctaacgccatgggacgctagttgtgaacaaggtgtgaagagcctattgagctacttgagagtcctccggcccctgaatgcggctaatcccaaccacggagcaagtgcctgcatgccagcaggtagcttgtcgtaacgcgcaagtctgtggcggaaccgactactttgggtgtccgtgtttccttttattcttataatggctgcttatggtgacaatctaagattgttatcatatagcttttggattggccatccggtgattatttgacttttgagcacttgtttaccttatctcatcacatattcatttaattgcttgattgcata

SEQ ID NO: 21871 - DNA, 505 bp, synthetic construct
  source 1..505: mol_type = other DNA
ccacggtctaaaacggcagatccgttacccgctcaagtacttcgagaagcctagtatcaccttggaatcttcgatgcgttgcgctcagcaccctacccccgggtgtagcttaggtcgatgagtctgggcatgccccaccggcgacggtggcccaggctgcgttggcggcctacccatggctaacgccatgggacgctagttgtgaacaaggtgtgaagagcctattgagctacttgagagtcctccggcccctgaatgcggctaatcccaaccacggagcaagtgcctgcatgccagcaggtagcttgtcgtaacgcgcaagtctgtggcggaaccgactactttgggtgtccgtgtttccttttattcttataatggctgcttatggtgacaatctaagattgttatcatatagcttttggattggccatccggtgattatttgacttttgagcacttgtttaccttatctcatcacatattcatttaattgcttgattgcata

SEQ ID NO: 21872 - DNA, 560 bp, synthetic construct
  source 1..560: mol_type = other DNA
ccggttcagtgaacaaacagctaggcaagtccctcccttcccctgtggtcggttctcaccggccaccatccctcccccagcctgacgtgttacaggctgtgcaaagcccccgcgaaagctgctcacgtggcaattgtgggtcccccctttgtcaagacaccgagtctttctcccttaaggctagcccggtcccacgaacgtggaactggcaactagtggtgtcactacacgcctccgacctcggacgcggagtgctgttccccaagctgtaaccctgacccaagactgtgctgcctggcaagcaccgtctgggaagatgttccgctgtggctgccaaacctggtaacaggtgccccagtgtgtgtagtcttcctccagtctccggactggcagtcttgtgtaaagatgcagtgtaaggttcaagtgccaaatccctggaaggagtgaccctctactgccctaggaatgctgtgcaggtacccccaacttcggttggggatctgagcacaggctaattgtctacgggtagtttcatttcccatcctctcttttttggcatc

SEQ ID NO: 21873 - DNA, 510 bp, synthetic construct
  source 1..510: mol_type = other DNA
ggttctcaccggccaccatccctcccccagcctgacgtgttacaggctgtgcaaagcccccgcgaaagctgctcacgtggcaattgtgggtcccccctttgtcaagacaccgagtctttctcccttaaggctagcccggtcccacgaacgtggaactggcaactagtggtgtcactacacgcctccgacctcggacgcggagtgctgttccccaagctgtaaccctgacccaagactgtgctgcctggcaagcaccgtctgggaagatgttccgctgtggctgccaaacctggtaacaggtgccccagtgtgtgtagtcttcctccagtctccggactggcagtcttgtgtaaagatgcagtgtaaggttcaagtgccaaatccctggaaggagtgaccctctactgccctaggaatgctgtgcaggtacccccaacttcggttggggatctgagcacaggctaattgtctacgggtagtttcatttcccatcctctcttttttggcatc

SEQ ID NO: 21874 - DNA, 562 bp, synthetic construct
  source 1..562: mol_type = other DNA
cttcaccgaccggcagtgtccaaaatgctaggtgaatcccctccctttcctctgggcttctgcccagcttcctccccccagcctgacgtgacacaggctgtgcaaagaccccgcgaaagctgccaaaagtggcaattgtgggtcccccctttgtaaaggcgtcgagtctttctccctcaaggctagacccgtcagtgaattctgtcgggcaactagtgacgccactgcacgcctctgacctcggccgcggagtgctgccccccaagtcgtgcccctgaccacaagttgtgctgtctggcaaacattgtctgtgagaatgttccgctgtggctgccaagcctggcaacaggctgccccagtgtgcgtagttctcatccagacttcggtctggcaacttgctgttaagacacggcgtaaggggcgtgtgccaacgccctggaacgagtgtccactctaataccccgaggaatgctacgcaggtacccctggttcgccagggatctgagcgtaggctaattgtctaagggtattttcatttcccattctttctttcttgttcata

SEQ ID NO: 21875 - DNA, 512 bp, synthetic construct
  source 1..512: mol_type = other DNA
tctgggcttctgcccagcttcctccccccagcctgacgtgacacaggctgtgcaaagaccccgcgaaagctgccaaaagtggcaattgtgggtcccccctttgtaaaggcgtcgagtctttctccctcaaggctagacccgtcagtgaattctgtcgggcaactagtgacgccactgcacgcctctgacctcggccgcggagtgctgccccccaagtcgtgcccctgaccacaagttgtgctgtctggcaaacattgtctgtgagaatgttccgctgtggctgccaagcctggcaacaggctgccccagtgtgcgtagttctcatccagacttcggtctggcaacttgctgttaagacacggcgtaaggggcgtgtgccaacgccctggaacgagtgtccactctaataccccgaggaatgctacgcaggtacccctggttcgccagggatctgagcgtaggctaattgtctaagggtattttcatttcccattctttctttcttgttcata

SEQ ID NO: 21876 - DNA, 562 bp, synthetic construct
  source 1..562: mol_type = other DNA
acactgttattacggtaaccttgtacgccagttttatcatccctttccctttgtaacttagaagttttaaacttgagaccaataggtggtgatcagccagatcactaaaggtcaagcacttctgtctccccggtcaacgctgatatgctccgccagggcaaaaacagctgcgatcgttatccgcaaagtgcctacgcaaagcctagtaatatcttgaatgatatatggttggtcgttcagctaaaccccatagtagacctggcagatgaggctggaaataccccactggtgacagtgttccagcctgcgtggctgcctgcgcactcttgcgagtgcgaagccatatatttgacaaggtgtgaagagccccgtgtgctcactttgagtcctccggcccctgaatgtggctaaccttaaccctgcagctagtgcatacaatccagtgtgtggctagtcgtaatgagcaattgcgggatgggaccaactactttgggtgtccgtgtttcactttttcctttataatttgcttatggtgacagtatatagcttatatattgttacc

SEQ ID NO: 21877 - DNA, 512 bp, synthetic construct
  source 1..512: mol_type = other DNA
ttgtaacttagaagttttaaacttgagaccaataggtggtgatcagccagatcactaaaggtcaagcacttctgtctccccggtcaacgctgatatgctccgccagggcaaaaacagctgcgatcgttatccgcaaagtgcctacgcaaagcctagtaatatcttgaatgatatatggttggtcgttcagctaaaccccatagtagacctggcagatgaggctggaaataccccactggtgacagtgttccagcctgcgtggctgcctgcgcactcttgcgagtgcgaagccatatatttgacaaggtgtgaagagccccgtgtgctcactttgagtcctccggcccctgaatgtggctaaccttaaccctgcagctagtgcatacaatccagtgtgtggctagtcgtaatgagcaattgcgggatgggaccaactactttgggtgtccgtgtttcactttttcctttataatttgcttatggtgacagtatatagcttatatattgttacc

SEQ ID NO: 21878 - DNA, 562 bp, synthetic construct
  source 1..562: mol_type = other DNA
actctattatcccggtaatcttgtacgccagttttatatcccttccctttttgtaacttagaagttaaacacacagaccaataggtggtggctatccaagtcattaatggtcaagcacttctgtttccccggtttagattgatacgctccaccagggcgaaaacaatttaaatcgttatccgcaaaatgactacgcaaagcctagtaatatcttgaaggacttatggttggtcgctccactaaaccccatagtagacctggcagatgaggctagaaataccccactggagacagtgttctagcctgcgtggctgcctgcacaccctatgggtgtgaagccatactttcgacaaggtgtgaagagccccgtgtgctcattttgagtcctccggcccctgaatgtggctaaccttaaccctgcagctagtgcatgcaatccagcatgttgctagtcgtaacgagcaattgcgggatgggaccaactactttgggtgtccgtgtttcactttttccttttatttgcttatggtgacaatatatatagtacatatatattggcatc

SEQ ID NO: 21879 - DNA, 512 bp, synthetic construct
  source 1..512: mol_type = other DNA
ttgtaacttagaagttaaacacacagaccaataggtggtggctatccaagtcattaatggtcaagcacttctgtttccccggtttagattgatacgctccaccagggcgaaaacaatttaaatcgttatccgcaaaatgactacgcaaagcctagtaatatcttgaaggacttatggttggtcgctccactaaaccccatagtagacctggcagatgaggctagaaataccccactggagacagtgttctagcctgcgtggctgcctgcacaccctatgggtgtgaagccatactttcgacaaggtgtgaagagccccgtgtgctcattttgagtcctccggcccctgaatgtggctaaccttaaccctgcagctagtgcatgcaatccagcatgttgctagtcgtaacgagcaattgcgggatgggaccaactactttgggtgtccgtgtttcactttttccttttatttgcttatggtgacaatatatatagtacatatatattggcatc

SEQ ID NO: 21880 - DNA, 564 bp, synthetic construct
  source 1..564: mol_type = other DNA
actctgtcattccggtgactttgtacgccagtttttacaccccccccttcttgtaacttagaagaattaagttcagaccaataggaaaacgacaaaccagtcgtttaaggtcaagcacttctgtttccccggtcaatgctgatatgcttcaccaaggcaaaaacagcagcgatcgttacccgcaagacgcctacgcaaagcctagtaatgcctttgaagatatttgtctggtcactcaggtacaatcccagtactagacctggcagatgaggctggaaaatccccactggcgacagtgttccagcctgcgtggctgcctgcacacccatacgggtgtgaagccaaatattggacaaggtgtgaagagccccgtgtgctcgtcttgagtcctccggcccctgaatgcggctaaccttaaccccacagccattgcttgcattccagcaagtctatggtcgtaatgagcaattgtgggatgggaccgactactttgggtgtccgtgtttcactttttaccttttattatgcttatggtgacaatatatagcgttatatattggcatc

SEQ ID NO: 21881 - DNA, 514 bp, synthetic construct
  source 1..514: mol_type = other DNA
ttgtaacttagaagaattaagttcagaccaataggaaaacgacaaaccagtcgtttaaggtcaagcacttctgtttccccggtcaatgctgatatgcttcaccaaggcaaaaacagcagcgatcgttacccgcaagacgcctacgcaaagcctagtaatgcctttgaagatatttgtctggtcactcaggtacaatcccagtactagacctggcagatgaggctggaaaatccccactggcgacagtgttccagcctgcgtggctgcctgcacacccatacgggtgtgaagccaaatattggacaaggtgtgaagagccccgtgtgctcgtcttgagtcctccggcccctgaatgcggctaaccttaaccccacagccattgcttgcattccagcaagtctatggtcgtaatgagcaattgtgggatgggaccgactactttgggtgtccgtgtttcactttttaccttttattatgcttatggtgacaatatatagcgttatatattggcatc

SEQ ID NO: 21882 - DNA, 564 bp, synthetic construct
  source 1..564: mol_type = other DNA
gctctgttattccggtaaccttgcacgccagttttatcacccctttccccatgtaacttagaagttttaaacacagaccaatagggagcgacaaaccagtcgtgaaaggtcaagcacttctgtttccccggtcaacgttgatatgctctcccagggcaaaaacaacagcgatcgttacccgcaagatgcctacgcaaagcttagtaacgccctcgaagatactcggttggtcgttcatgtgcaaccccagcattagacctggcagatgaggctagaaattccccactggcgacagtgttctagcctgcgtggctgcctgcacaccctgacgggtgtgaagcctagtattggacaaggtgtgaagagccccgtgtgctcatcttgagtcctccggcccctgaatgcggctaaccttaaacctgcagccattgctcacaatccagtgagtttgtggtcgtaatgagcaattgcgggatgggaccgactactttgggtgtccgtgtttctctttttaccttacattttagcttatggtgacaatatatagtgatatatattggcatc

SEQ ID NO: 21883 - DNA, 514 bp, synthetic construct
  source 1..514: mol_type = other DNA
atgtaacttagaagttttaaacacagaccaatagggagcgacaaaccagtcgtgaaaggtcaagcacttctgtttccccggtcaacgttgatatgctctcccagggcaaaaacaacagcgatcgttacccgcaagatgcctacgcaaagcttagtaacgccctcgaagatactcggttggtcgttcatgtgcaaccccagcattagacctggcagatgaggctagaaattccccactggcgacagtgttctagcctgcgtggctgcctgcacaccctgacgggtgtgaagcctagtattggacaaggtgtgaagagccccgtgtgctcatcttgagtcctccggcccctgaatgcggctaaccttaaacctgcagccattgctcacaatccagtgagtttgtggtcgtaatgagcaattgcgggatgggaccgactactttgggtgtccgtgtttctctttttaccttacattttagcttatggtgacaatatatagtgatatatattggcatc

SEQ ID NO: 21884 - DNA, 564 bp, synthetic construct
  source 1..564: mol_type = other DNA
ggacttgtattacggtacatttccataccagttttataacccctaccctgaaacttttagaagcatgtacacatacagaccaacaggtggcaatcagccagattgctaacggtcaagcacttctgtttccccggtaatcttgcatacgcttcacccgaggcgaaaagtgagattatcgttatccgcaaagtgcctacgagaagcccagtagcacattgaaagcctatggttggtcgctcagctgttcacccaacagtagacctggcagatgaggctagatattccccaccagcgatggtgatctagcctgcgtggctgcctgcacaccctatcgggtgtgaagccagaaagtggacaaggtgtgaagagcctattgtgctcactttgagtcctccggcccctgaatgtggctaatcctaaccccgtagctgttgcatgtaacccaacatgtctgcagtcgtaatgggcaactacgggatggaaccaactactttgggtgtccgtgtttcttgtttttctttatatttgcttatggtgacaattgtagatactacacttgttacc

SEQ ID NO: 21885 - DNA, 514 bp, synthetic construct
  source 1..514: mol_type = other DNA
aaacttttagaagcatgtacacatacagaccaacaggtggcaatcagccagattgctaacggtcaagcacttctgtttccccggtaatcttgcatacgcttcacccgaggcgaaaagtgagattatcgttatccgcaaagtgcctacgagaagcccagtagcacattgaaagcctatggttggtcgctcagctgttcacccaacagtagacctggcagatgaggctagatattccccaccagcgatggtgatctagcctgcgtggctgcctgcacaccctatcgggtgtgaagccagaaagtggacaaggtgtgaagagcctattgtgctcactttgagtcctccggcccctgaatgtggctaatcctaaccccgtagctgttgcatgtaacccaacatgtctgcagtcgtaatgggcaactacgggatggaaccaactactttgggtgtccgtgtttcttgtttttctttatatttgcttatggtgacaattgtagatactacacttgttacc

SEQ ID NO: 21886 - DNA, 565 bp, synthetic construct
  source 1..565: mol_type = other DNA
gtttccccggaccgagtatcaatagactgcttacgcggttgaaggagaaaacgttcgttacccggctaactacttcgagaaacctagtagcaccatgaaagttgcagagtgtttcgctcagcacttcccccgtgtagatcaggtcgatgagccactgtgaaccccacgggcgaccgtgacagtggctgcgttggcggcctgcccatggggcaacccgtgggacgctctaatacagacatggtgtgaagagtctattgagctagttagtaatcctccggcccctgaatgcggctaatcctaactgcggagcacgcaccctcaatccagggggcagtgtgtcgtaacgggtaactctgcagcggaaccgactactttgggtgtccgtgtttccttttattccttactggctgcttatggtgacaatcaaagagttgttaccatatagctattggattggccatccggtgtctaacagagctattgtctacctgttcattggatacgtccctctcaattacaagactctccaaactcttaactacatactgctacttaatcataagaa

SEQ ID NO: 21887 - DNA, 515 bp, synthetic construct
  source 1..515: mol_type = other DNA
acgttcgttacccggctaactacttcgagaaacctagtagcaccatgaaagttgcagagtgtttcgctcagcacttcccccgtgtagatcaggtcgatgagccactgtgaaccccacgggcgaccgtgacagtggctgcgttggcggcctgcccatggggcaacccgtgggacgctctaatacagacatggtgtgaagagtctattgagctagttagtaatcctccggcccctgaatgcggctaatcctaactgcggagcacgcaccctcaatccagggggcagtgtgtcgtaacgggtaactctgcagcggaaccgactactttgggtgtccgtgtttccttttattccttactggctgcttatggtgacaatcaaagagttgttaccatatagctattggattggccatccggtgtctaacagagctattgtctacctgttcattggatacgtccctctcaattacaagactctccaaactcttaactacatactgctacttaatcataagaa

SEQ ID NO: 21888 - DNA, 565 bp, synthetic construct
  source 1..565: mol_type = other DNA
acactgttattccggtaaccttgtacgccagttttatatcccttcccccccttgtaacttagaagacatgcgaatcgaccaatagcaggcaatcaaccagattgtcaccggtcaagcacttctgtttccccggctctcgttgatatgctccaacagggcaaaaacaattggagtcgttacccgcaagatgcctacgcaaaacctagtagcatcttcgaagatttttggttggtcgctcagttgctaccccagcaatagacctggcagatgaggctagaaataccccactggtgacagtgttctagcctgcgtggctgcctgcacacccacacgggtgtgaagccaaagattggacaaggtgtgaagagtcacgtgtgctcatcttgagtcctccggcccctgaatgcggctaaccttaaccccgtagccattgctcgcaatccagcgagtatatggtcgtaatgagtaattacgggatgggaccgactactttgggtgtccgtgtttcactttttacttatcaatttgcttatggtgacaatatatatagatatatattgacacc

SEQ ID NO: 21889 - DNA, 515 bp, synthetic construct
  source 1..515: mol_type = other DNA
cttgtaacttagaagacatgcgaatcgaccaatagcaggcaatcaaccagattgtcaccggtcaagcacttctgtttccccggctctcgttgatatgctccaacagggcaaaaacaattggagtcgttacccgcaagatgcctacgcaaaacctagtagcatcttcgaagatttttggttggtcgctcagttgctaccccagcaatagacctggcagatgaggctagaaataccccactggtgacagtgttctagcctgcgtggctgcctgcacacccacacgggtgtgaagccaaagattggacaaggtgtgaagagtcacgtgtgctcatcttgagtcctccggcccctgaatgcggctaaccttaaccccgtagccattgctcgcaatccagcgagtatatggtcgtaatgagtaattacgggatgggaccgactactttgggtgtccgtgtttcactttttacttatcaatttgcttatggtgacaatatatatagatatatattgacacc

SEQ ID NO: 21890 - DNA, 565 bp, synthetic construct
  source 1..565: mol_type = other DNA
gctctgtcattccggtgaccttgcacgccagttttatcaccccttccctcttgtaacttagaagaattaaactcagaccaataggaagcgacaagccagtcgtgacaggtcaagcacttctgtttccccggtcaaagttgatatgcttcaccaaggcaaaaacaacagcgatcgttatccgcaagatgcctacgcaaagcctagtagtgcctttgaaaatatttgtctggttgctcaagtacaaccccagtactaaacctggcagatgaggctggagcttccccactggtaacagtgttccagcctgcgtggctgcctgcacacccttacgggtgtgaagccaaatattggacaaggtgtgaagagccccgtgtgctcatcttgagtcctccggcccctgaatgcggctaaccttaaccccacagccattgctcacaatccagtgagtgtatggtcgtaacgagcaattgtgggatgggaccgactactttgggtgtccgtgtttctcttttttcctttttaattctgcttatggtgacaatatatagtgttatatattggcatc

SEQ ID NO: 21891 - DNA, 515 bp, synthetic construct
  source 1..515: mol_type = other DNA
ttgtaacttagaagaattaaactcagaccaataggaagcgacaagccagtcgtgacaggtcaagcacttctgtttccccggtcaaagttgatatgcttcaccaaggcaaaaacaacagcgatcgttatccgcaagatgcctacgcaaagcctagtagtgcctttgaaaatatttgtctggttgctcaagtacaaccccagtactaaacctggcagatgaggctggagcttccccactggtaacagtgttccagcctgcgtggctgcctgcacacccttacgggtgtgaagccaaatattggacaaggtgtgaagagccccgtgtgctcatcttgagtcctccggcccctgaatgcggctaaccttaaccccacagccattgctcacaatccagtgagtgtatggtcgtaacgagcaattgtgggatgggaccgactactttgggtgtccgtgtttctcttttttcctttttaattctgcttatggtgacaatatatagtgttatatattggcatc

SEQ ID NO: 21892 - DNA, 565 bp, synthetic construct
  source 1..565: mol_type = other DNA
gctcttgtattacggtacacttgcatgccagttttatctcccccctccccacaatgtaatttagaagccaatcacatgaccaataggaagtggtaagccataccacttaaggtcaagcacttctgtttccccggtatgcgtggaataggcctcttaaggggctgaagccacaattatcgttacccgcatgtgaactacgcgaaacctagtactaccttgaaagtacattgtctggtcgctcagccaatccccatggtagacctggcagatgaggcaagaggtaccccactggtaacagtgttcttgcctgcgtggctgcctgcacacccttaccgggtgtgaagccaatgtatagacagggtgagaagagtcgagtgtgcttcacatgagtcctccggcccctgaatgcggctaatccaaccccgcagctgtagtatgcaagccagcatatgtgcagtcgtaatgggtaactgcgggacggaaccgactactttgggtgtccgtgtttcctgtttttcctttattcatgcttatggtgacaatattgagaattaatattgtcact

SEQ ID NO: 21893 - DNA, 515 bp, synthetic construct
  source 1..515: mol_type = other DNA
acaatgtaatttagaagccaatcacatgaccaataggaagtggtaagccataccacttaaggtcaagcacttctgtttccccggtatgcgtggaataggcctcttaaggggctgaagccacaattatcgttacccgcatgtgaactacgcgaaacctagtactaccttgaaagtacattgtctggtcgctcagccaatccccatggtagacctggcagatgaggcaagaggtaccccactggtaacagtgttcttgcctgcgtggctgcctgcacacccttaccgggtgtgaagccaatgtatagacagggtgagaagagtcgagtgtgcttcacatgagtcctccggcccctgaatgcggctaatccaaccccgcagctgtagtatgcaagccagcatatgtgcagtcgtaatgggtaactgcgggacggaaccgactactttgggtgtccgtgtttcctgtttttcctttattcatgcttatggtgacaatattgagaattaatattgtcact

SEQ ID NO: 21894 - DNA, 565 bp, synthetic construct
  source 1..565: mol_type = other DNA
actctgttattacggtaactttgtacgccagttttatcctccccttaccccatgtaacttagaagtttttcataaagaccaatagttggtaatcatccagattacttaaggtcaagcacttctgtttccccggtcaatgttgatatgctccaacagggcaaaaacaactgcgatcgttatccgcaaagcgcctacgcaaagcttagtagcacctttgagattgtttggttggtcgttccgccatttcccctggtagacctggcagatgaggctagaagtaccccactggcgacagtgttctagcctgcgtggctgcctgcacaccctgtgggtgtgaagccaaataatggacaaggtgtgaagagccccgtgtgctcgctttgagtcctccggcccctgaatgcggctaaccttaaccctgcagctagagcatacaaaccagtgtgtatctagtcgtaatgagcaattgcgggatgggaccgactactttgggtgtccgtgtttcactttttttttacttataattgcttatggtgacaatatatatatagtatatattgacacc

SEQ ID NO: 21895 - DNA, 515 bp, synthetic construct
  source 1..515: mol_type = other DNA
catgtaacttagaagtttttcataaagaccaatagttggtaatcatccagattacttaaggtcaagcacttctgtttccccggtcaatgttgatatgctccaacagggcaaaaacaactgcgatcgttatccgcaaagcgcctacgcaaagcttagtagcacctttgagattgtttggttggtcgttccgccatttcccctggtagacctggcagatgaggctagaagtaccccactggcgacagtgttctagcctgcgtggctgcctgcacaccctgtgggtgtgaagccaaataatggacaaggtgtgaagagccccgtgtgctcgctttgagtcctccggcccctgaatgcggctaaccttaaccctgcagctagagcatacaaaccagtgtgtatctagtcgtaatgagcaattgcgggatgggaccgactactttgggtgtccgtgtttcactttttttttacttataattgcttatggtgacaatatatatatagtatatattgacacc

SEQ ID NO: 21896 - DNA, 566 bp, synthetic construct
  source 1..566: mol_type = other DNA
acactgttattccggtaactttgtacgccagttttatatccccaccccccttttgtaacttagaagttatgcacactgaccaatagtgggcaatcatccagattgtcatcggtcgagcacttctgtttccccggtttgagttgatatgctccaccagggcaaaaacaactcagatcgttatccgcaagatgcctacacagaacttagtaccattctggaaaattcttggctggtcgttcaattactaccccagtaatagacctggcagatgaggctagaagttccccactggcgacagtgttctagcctgcgtggctgcctgcacacccttctggggtgtgaagcctagaattggacagggtgtgaagagtcgcgtgtgctcatcttgagtcctccggcccctgaatgcggctaaccctaaccctgcagccattgcccacaatccagtgggtttatggtcgtaatgagcaattgcgggatgggaccgactactttgggtgtccgtgtttcactttttacttattatttgcttatggtgacaatatatagatacatatattgacacc

SEQ ID NO: 21897 - DNA, 516 bp, synthetic construct
  source 1..516: mol_type = other DNA
ttttgtaacttagaagttatgcacactgaccaatagtgggcaatcatccagattgtcatcggtcgagcacttctgtttccccggtttgagttgatatgctccaccagggcaaaaacaactcagatcgttatccgcaagatgcctacacagaacttagtaccattctggaaaattcttggctggtcgttcaattactaccccagtaatagacctggcagatgaggctagaagttccccactggcgacagtgttctagcctgcgtggctgcctgcacacccttctggggtgtgaagcctagaattggacagggtgtgaagagtcgcgtgtgctcatcttgagtcctccggcccctgaatgcggctaaccctaaccctgcagccattgcccacaatccagtgggtttatggtcgtaatgagcaattgcgggatgggaccgactactttgggtgtccgtgtttcactttttacttattatttgcttatggtgacaatatatagatacatatattgacacc

SEQ ID NO: 21898 - DNA, 566 bp, synthetic construct
  source 1..566: mol_type = other DNA
actctattattacggtaattttgtacgccagttttatatccccttccccttttgtaacttagaagtcgtgaacacagaccaataggtggcgatcacccagatcgcttaaggtcaagcacttctgtttccccggtcaacgttgatatgctccaccagggcaaaaacaacggagatcgttatccgcaaggtgcctacgcaaagcctagtaacctcttggaggatatatggttggtcgctcagctataccccatagtagacctggcagatgaggctagaaactccccactggcgacagtgttctagcctgcgtggctgcctgcgcactcttatgagtgcgaagccatatatttgacaaggtgtgaagagccccgtgtgctcaccttgagtcctccggcccctgaatgtggctaaccctaaccctgcagctagtgcatgaaatccatcatgttgctagtcgtaatgagcaattgcgggatgggaccaactactttgggtgtccgtgtttcactttttccttttatatttgcttatggtgacaatatatatataacatatatattggcatc

SEQ ID NO: 21899 - DNA, 516 bp, synthetic construct
  source 1..516: mol_type = other DNA
tttgtaacttagaagtcgtgaacacagaccaataggtggcgatcacccagatcgcttaaggtcaagcacttctgtttccccggtcaacgttgatatgctccaccagggcaaaaacaacggagatcgttatccgcaaggtgcctacgcaaagcctagtaacctcttggaggatatatggttggtcgctcagctataccccatagtagacctggcagatgaggctagaaactccccactggcgacagtgttctagcctgcgtggctgcctgcgcactcttatgagtgcgaagccatatatttgacaaggtgtgaagagccccgtgtgctcaccttgagtcctccggcccctgaatgtggctaaccctaaccctgcagctagtgcatgaaatccatcatgttgctagtcgtaatgagcaattgcgggatgggaccaactactttgggtgtccgtgtttcactttttccttttatatttgcttatggtgacaatatatatataacatatatattggcatc

SEQ ID NO: 21900 - DNA, 566 bp, synthetic construct
  source 1..566: mol_type = other DNA
actctattatcccggtaattttgtacgccagttttatcctcccctccccatgtaacttagaagctgtacacaacgaccaacaggtaacattcatccagagtgttaaaggtcaagcacttctgtttccccggtcaaagttgatatgctccaacagggcaaaaacaactgcgatcgttatccgcagagcaactacgcaaagcttagtaccactttcaatggtgtatggctggtcgctccactataaacccaatagtagacctggcagatgaggctagaaactccccactggtaacagtgttctagcctgcgtggctgcctgcgtgcccttttgggcacgaagccttacatttgacaaggtgcgaagagccccgtgtgcttgctttgagtcctccggcccctgaatgtggctaaccttaaccctgcagctagtgtgtgcaatccagcacatggctagtcgtaatgagcaattgcgggatgggaccaactactttgggtgtccgtgtttcttgtttttcttttatatttgcttatggtgacaatatatatagaatatatatattggcatc

SEQ ID NO: 21901 - DNA, 516 bp, synthetic construct
  source 1..516: mol_type = other DNA
tgtaacttagaagctgtacacaacgaccaacaggtaacattcatccagagtgttaaaggtcaagcacttctgtttccccggtcaaagttgatatgctccaacagggcaaaaacaactgcgatcgttatccgcagagcaactacgcaaagcttagtaccactttcaatggtgtatggctggtcgctccactataaacccaatagtagacctggcagatgaggctagaaactccccactggtaacagtgttctagcctgcgtggctgcctgcgtgcccttttgggcacgaagccttacatttgacaaggtgcgaagagccccgtgtgcttgctttgagtcctccggcccctgaatgtggctaaccttaaccctgcagctagtgtgtgcaatccagcacatggctagtcgtaatgagcaattgcgggatgggaccaactactttgggtgtccgtgtttcttgtttttcttttatatttgcttatggtgacaatatatatagaatatatatattggcatc

SEQ ID NO: 21902 - DNA, 566 bp, synthetic construct
  source 1..566: mol_type = other DNA
gctcttgtattccggtacatttgcacgccagtttgccacccctaccctctatgtaacttagaagcttacacaaagaccaataggcggtggtaaacccataccactaacggtcaaacacttctgtttccccggcatatgaggaataggctccaaaagggctgaagccactagtgtcgttatccgcattggtactacgcaaagcctagtatcggcctgaaaatttcttggttggtcgttcggccagttaccccactggtagacctggcagatgaggcaggacttaccccactggcgacagtggtcctgcctgcgtggctgcctgcacacccttatggggtgtgaagcctaggaacggacagggtgtgaagagccccgtgtgctaccaatgagtcctccggcccctgaatgcggctaatcttaccccgcagctgttgcacacaatccagtgtgtatgcagtcgtaatgagcaattgtgggatggaaccgactactttgggtgtccgtgtttccttgttttccttatatttgcttatggtgacaatattgatattatcagtgttgtcatc

SEQ ID NO: 21903 - DNA, 516 bp, synthetic construct
  source 1..516: mol_type = other DNA
atgtaacttagaagcttacacaaagaccaataggcggtggtaaacccataccactaacggtcaaacacttctgtttccccggcatatgaggaataggctccaaaagggctgaagccactagtgtcgttatccgcattggtactacgcaaagcctagtatcggcctgaaaatttcttggttggtcgttcggccagttaccccactggtagacctggcagatgaggcaggacttaccccactggcgacagtggtcctgcctgcgtggctgcctgcacacccttatggggtgtgaagcctaggaacggacagggtgtgaagagccccgtgtgctaccaatgagtcctccggcccctgaatgcggctaatcttaccccgcagctgttgcacacaatccagtgtgtatgcagtcgtaatgagcaattgtgggatggaaccgactactttgggtgtccgtgtttccttgttttccttatatttgcttatggtgacaatattgatattatcagtgttgtcatc

SEQ ID NO: 21904 - DNA, 567 bp, synthetic construct
  source 1..567: mol_type = other DNA
acactgttatttcggtaaccttgtacgccagttttataaccccctccccaaatgtaacttagaagctgtacacaacgaccaatagagggtaatcatccagattacttacggtcaagcacttctgtctccccggtttactttgatatgctccaacagggcaaaaacaaagtgaatcgttacccgcaagatgcctacgcaacgcctagtaacatcctgaattgtttatggttggtcgctcaattacaaccccagtaatagacctggcagatgaggctagatattccccactggcgacagtgatctagcctgcgtggctgcctgcacaccccttgtgggtgtgaagccataatcatgacagggtgcgaagagccacgtgtgctcatcttgagtcctccggcccctgaatgcggctaaccctaaccctgcagccattgcctacaaaccagtgggtatgtggtcgtaacgagaaattgcgggatgggaccgactactttgggtgtccgtgtttcactttttaccttatatttgcttatggtgacaatatatacgagtttatatattgacacc

SEQ ID NO: 21905 - DNA, 517 bp, synthetic construct
  source 1..517: mol_type = other DNA
aatgtaacttagaagctgtacacaacgaccaatagagggtaatcatccagattacttacggtcaagcacttctgtctccccggtttactttgatatgctccaacagggcaaaaacaaagtgaatcgttacccgcaagatgcctacgcaacgcctagtaacatcctgaattgtttatggttggtcgctcaattacaaccccagtaatagacctggcagatgaggctagatattccccactggcgacagtgatctagcctgcgtggctgcctgcacaccccttgtgggtgtgaagccataatcatgacagggtgcgaagagccacgtgtgctcatcttgagtcctccggcccctgaatgcggctaaccctaaccctgcagccattgcctacaaaccagtgggtatgtggtcgtaacgagaaattgcgggatgggaccgactactttgggtgtccgtgtttcactttttaccttatatttgcttatggtgacaatatatacgagtttatatattgacacc

SEQ ID NO: 21906 - DNA, 567 bp, synthetic construct
  source 1..567: mol_type = other DNA
cacttgtatcccggtacatttgtacgccagtttgcctccccttccctttatgtaacgtaagaagcctcagcacaatggccaacaggtggtaacaatccatgttacctacggtcaagcacttctgtctccccggtacgaagagtgttaagtcttacccaagaccgaagctttgagtatcgttatccgcataactactggacaaagcccagtaacaccccacgatgtaggatggttggtcgttccaccagtgtaaccccctggtagacctggcagatgaggctagagtttccccactggtgacagtgttctagcctgcgtggctgcctgctcccttatgggagaagccattctattgacaaggtgtgaagagccccgtgcgctagttatgagtcctccggcccctgaatgcggctaatccaaccctgcagccattgcatggaaaccaccatgtagatggtcgtaatgagcaattgcgggacggaaccgactactttgggtgtccgtgtttcttgtttttcttatcaattgcttatggtgacaatatatacagctaatatattgttcacc

SEQ ID NO: 21907 - DNA, 517 bp, synthetic construct
  source 1..517: mol_type = other DNA
tgtaacgtaagaagcctcagcacaatggccaacaggtggtaacaatccatgttacctacggtcaagcacttctgtctccccggtacgaagagtgttaagtcttacccaagaccgaagctttgagtatcgttatccgcataactactggacaaagcccagtaacaccccacgatgtaggatggttggtcgttccaccagtgtaaccccctggtagacctggcagatgaggctagagtttccccactggtgacagtgttctagcctgcgtggctgcctgctcccttatgggagaagccattctattgacaaggtgtgaagagccccgtgcgctagttatgagtcctccggcccctgaatgcggctaatccaaccctgcagccattgcatggaaaccaccatgtagatggtcgtaatgagcaattgcgggacggaaccgactactttgggtgtccgtgtttcttgtttttcttatcaattgcttatggtgacaatatatacagctaatatattgttcacc

SEQ ID NO: 21908 - DNA, 567 bp, synthetic construct
  source 1..567: mol_type = other DNA
actcttgtattccggtacacttgtacgccagttttataaccccttcccctttgcaacttagaagaaagtaaacactggccaataggaaatagcaaaccacgctatttacggtcaagcacttctgtttccccggtctgacgggatatgcttcacccgaggcagaaactcagatgatcgttatccgcaaagtgcctacgggaagcctagtagcactttggaagttgttgggctggtcgctcaattgctgaccccgagcaatagacttggcagatgaggctggacgtgccccaccagtgatggtggtccagcctgcgtggctgcctactcaccctaacagggtgagaagcctatcaatagacaaggtgtgaagagcctactgtgctcactttgattcctccggcccctgaatgtggctaatcctaaccccgtatctatcgcatgcacaccagcatgtaggtagtcgtaatgggcaactacgggacggaaccaactactttgggtgtccgtgtttccttgttcttttattacttgcgtatggtgacaattgtatgaaatacgattgacacc

SEQ ID NO: 21909 - DNA, 517 bp, synthetic construct
  source 1..517: mol_type = other DNA
ttgcaacttagaagaaagtaaacactggccaataggaaatagcaaaccacgctatttacggtcaagcacttctgtttccccggtctgacgggatatgcttcacccgaggcagaaactcagatgatcgttatccgcaaagtgcctacgggaagcctagtagcactttggaagttgttgggctggtcgctcaattgctgaccccgagcaatagacttggcagatgaggctggacgtgccccaccagtgatggtggtccagcctgcgtggctgcctactcaccctaacagggtgagaagcctatcaatagacaaggtgtgaagagcctactgtgctcactttgattcctccggcccctgaatgtggctaatcctaaccccgtatctatcgcatgcacaccagcatgtaggtagtcgtaatgggcaactacgggacggaaccaactactttgggtgtccgtgtttccttgttcttttattacttgcgtatggtgacaattgtatgaaatacgattgacacc

SEQ ID NO: 21910 - DNA, 568 bp, synthetic construct
  source 1..568: mol_type = other DNA
actctgttattacggtaactttgtacgccagtttttcccacccttccccataatgtaacttagaagtttgtacaatatgaccaataggtgacaatcatccagactgtcaaaggtcaagcacttctgtttccccggtcaatgaggatatgctttacccaaggcaaaaaccttagagatcgttatccccacactgcctacacagagcccagtaccatttttgatataattgggttggtcgctccctgcaaacccagcagtagacctggcagatgaggctggacattccccactggcgacagtggtccagcctgcgtggctgcctgctcacccttcttgggtgagaagcctaattattgacaaggtgtgaagagccgcgtgtgctcagtgtgcttcctccggcccctgaatgtggctaaccttaaccctgcagccgttgcccataatccaatgggtttgcggtcgtaatgcgtaagtgcgggatgggaccaactactttgggtgtccgtgtttcctgtttttcttttgattgcattttatggtgacaatttatagtgtatagattgtcatc

SEQ ID NO: 21911 - DNA, 518 bp, synthetic construct
  source 1..518: mol_type = other DNA
taatgtaacttagaagtttgtacaatatgaccaataggtgacaatcatccagactgtcaaaggtcaagcacttctgtttccccggtcaatgaggatatgctttacccaaggcaaaaaccttagagatcgttatccccacactgcctacacagagcccagtaccatttttgatataattgggttggtcgctccctgcaaacccagcagtagacctggcagatgaggctggacattccccactggcgacagtggtccagcctgcgtggctgcctgctcacccttcttgggtgagaagcctaattattgacaaggtgtgaagagccgcgtgtgctcagtgtgcttcctccggcccctgaatgtggctaaccttaaccctgcagccgttgcccataatccaatgggtttgcggtcgtaatgcgtaagtgcgggatgggaccaactactttgggtgtccgtgtttcctgtttttcttttgattgcattttatggtgacaatttatagtgtatagattgtcatc

SEQ ID NO: 21912 - DNA, 568 bp, synthetic construct
  source 1..568: mol_type = other DNA
acactattattccggtaattttgtacgccagttttatctccccaccccccttttgtaatttagaagttatgaacacagaccaataggtggcaactagccaagttgttaaaggtcaagcacttctgtctccccggctgacgttgatatgctccaacagggcaaaaacaatgaaagtcgttatccgcaaagtgcctacgcaaagcctagtaacactttgaaatgtctatggttggtcgctcagctattccccatagtagacctggcagatgaggctagaaataccccactggtaacagtgttctagcctgcgtggctgcctgcgcaccctccccgggtgcgaagccatatatatgacaaggtgcgaagagccccgtgtgctcactttgaatcctccggctcctgaatgtggctaaccttaaccccgcagccagtgcacataagccaatgtgtggctggtcgtaatgagcaattgtgggatgggaccaactactttggatgtccgtgtttcctgtttttcttttattcttgcttatggtgacaatatatatagtttatatatattggcatc

SEQ ID NO: 21913 - DNA, 518 bp, synthetic construct
  source 1..518: mol_type = other DNA
ttttgtaatttagaagttatgaacacagaccaataggtggcaactagccaagttgttaaaggtcaagcacttctgtctccccggctgacgttgatatgctccaacagggcaaaaacaatgaaagtcgttatccgcaaagtgcctacgcaaagcctagtaacactttgaaatgtctatggttggtcgctcagctattccccatagtagacctggcagatgaggctagaaataccccactggtaacagtgttctagcctgcgtggctgcctgcgcaccctccccgggtgcgaagccatatatatgacaaggtgcgaagagccccgtgtgctcactttgaatcctccggctcctgaatgtggctaaccttaaccccgcagccagtgcacataagccaatgtgtggctggtcgtaatgagcaattgtgggatgggaccaactactttggatgtccgtgtttcctgtttttcttttattcttgcttatggtgacaatatatatagtttatatatattggcatc

SEQ ID NO: 21914 - DNA, 568 bp, synthetic construct
  source 1..568: mol_type = other DNA
gctcttgtatttcggtacgtttgcacgccagtttgctaccccttcccttttacgtaacttagaagtttacacaaagaccaataggcggtggtaaatccataccactaacggtcaaatacttctgtttccccggcatgcgaggaataggctccaaaagggctgaagccactagtgtcgttatccgcattggtactacgcaaagcctagtattaccttgaaaatttcttggctggtcgctccaccagataccccactggtagacctggcagatgaggcaggacttaccccactggcgacagtggtcctgcctgcgtggctgcctgcacaccccttacggggtgtgaagcccagaaacagacaaggtgtgaagagccccgtgtgctactagtgagtcctccggcccctgaatgcggctaatcttaccccacagctgttgcacgcaaaccagcgtgtatgcagtcgtaatgagcaattgtgggatggaaccgactactttgggtgtccgtgtttctttttattcctattatttgcttatggtgacaatattgatattatcagtgttgtcatc

SEQ ID NO: 21915 - DNA, 518 bp, synthetic construct
  source 1..518: mol_type = other DNA
tacgtaacttagaagtttacacaaagaccaataggcggtggtaaatccataccactaacggtcaaatacttctgtttccccggcatgcgaggaataggctccaaaagggctgaagccactagtgtcgttatccgcattggtactacgcaaagcctagtattaccttgaaaatttcttggctggtcgctccaccagataccccactggtagacctggcagatgaggcaggacttaccccactggcgacagtggtcctgcctgcgtggctgcctgcacaccccttacggggtgtgaagcccagaaacagacaaggtgtgaagagccccgtgtgctactagtgagtcctccggcccctgaatgcggctaatcttaccccacagctgttgcacgcaaaccagcgtgtatgcagtcgtaatgagcaattgtgggatggaaccgactactttgggtgtccgtgtttctttttattcctattatttgcttatggtgacaatattgatattatcagtgttgtcatc

SEQ ID NO: 21916 - DNA, 569 bp, synthetic construct
  source 1..569: mol_type = other DNA
acactgttattccggtaactttgtacgccagttttgaactccccttaccccttttgtaacttagaagttaaacaaaccgaccgatagcaggcaatcacccagattgcttatggtcaagcacttctgtctccccggtctcctttgatatgctccaccagggcaaaaacagagtagatcgttatccgcaagatgcctacgcaacgcctagtagcattttgaagtaattttggctggtcgctcatttacaaccccagtaatagacctggcagatgaggctagatactccccactggtgacagtgatctagcctgcgtggctgcctgcacaccctttccgggtgtgaagccaaacttatgacaaggtgtgaagagccacgtgtgctcatcttgagtcctccggcccctgaatgcggctaaccttaaccctgcagccattgcctacaagccagtgggtatgtggtcgtaatgagaaattgcgggatgggaccgactactttgggtgtccgtgtttcactttttaccttatatttgcttatggtgacaatatatatatagatatatattgacacc

SEQ ID NO: 21917 - DNA, 519 bp, synthetic construct
  source 1..519: mol_type = other DNA
cttttgtaacttagaagttaaacaaaccgaccgatagcaggcaatcacccagattgcttatggtcaagcacttctgtctccccggtctcctttgatatgctccaccagggcaaaaacagagtagatcgttatccgcaagatgcctacgcaacgcctagtagcattttgaagtaattttggctggtcgctcatttacaaccccagtaatagacctggcagatgaggctagatactccccactggtgacagtgatctagcctgcgtggctgcctgcacaccctttccgggtgtgaagccaaacttatgacaaggtgtgaagagccacgtgtgctcatcttgagtcctccggcccctgaatgcggctaaccttaaccctgcagccattgcctacaagccagtgggtatgtggtcgtaatgagaaattgcgggatgggaccgactactttgggtgtccgtgtttcactttttaccttatatttgcttatggtgacaatatatatatagatatatattgacacc

SEQ ID NO: 21918 - DNA, 570 bp, synthetic construct
  source 1..570: mol_type = other DNA
ctggtactttgtacctttgtacgcctgtttctccctcccttcccaacctaaacaatccttgtaacttagaaggtttcgattatcgcacaatagggactattgcaaccagcaatagtcagtgcaagcacttctgtttccccggagcggagtgtagatggccaccgctgtcaaaagctcttaaccgttatccgccagttaactacgcaacggctagtagtgccttgttgcttttatggcgttcgatcaggcgagatttaccccctcgctagtctggtcgatgaggctgagaattccccacgggcgaccgtgtctcagcctgcgtggcggccagcccagcctttgctgggacgccttgattgcgacatggtgtgaagacccgcgtgtgcttaactgtgagtcctccggcccctgaatgcggctaacctaaaccctggagccttgaaacacaacccagtgttcgcaaggtcgtaacgagcaattccgggacgggaccgactactttgggtgtccgtgtttcctttattctttcaattgttcttatggtcacaatataagtgttatattgtgatc

SEQ ID NO: 21919 - DNA, 520 bp, synthetic construct
  source 1..520: mol_type = other DNA
aacaatccttgtaacttagaaggtttcgattatcgcacaatagggactattgcaaccagcaatagtcagtgcaagcacttctgtttccccggagcggagtgtagatggccaccgctgtcaaaagctcttaaccgttatccgccagttaactacgcaacggctagtagtgccttgttgcttttatggcgttcgatcaggcgagatttaccccctcgctagtctggtcgatgaggctgagaattccccacgggcgaccgtgtctcagcctgcgtggcggccagcccagcctttgctgggacgccttgattgcgacatggtgtgaagacccgcgtgtgcttaactgtgagtcctccggcccctgaatgcggctaacctaaaccctggagccttgaaacacaacccagtgttcgcaaggtcgtaacgagcaattccgggacgggaccgactactttgggtgtccgtgtttcctttattctttcaattgttcttatggtcacaatataagtgttatattgtgatc

SEQ ID NO: 21920 - DNA, 570 bp, synthetic construct
  source 1..570: mol_type = other DNA
acactgttattacggtaactttgtatgccagtttttgttcccctatccccctttaaagtaacttagaagcatgaacttacagaccaaaaggtgatgatcacccagatcattaaaggtcaagcacttctgtttccccggtcaatgttgatatgcttcaacaaggcaaaaacaacagcgatcgttatccgcaagatgcctacacaaagcttagtacctcctttgatggtatttgtctggtcgctcaggtgtttccccaacactagacctggcagatgaggctagaaactccccactggcgacagtgttctagcctgcgtggctgcctgcacaccctttcgggtgtgaagccaaatactggacaaggtgcgaagagccccgtgtgctcatcttgagtcctccggcccctgaatgcggctaaccttaaacccgcagccattactcacaatccagtgagcagatggtcgtaatgagcaattgtgggatgggaccgactactttgggtgtccgtgtttcatgttttactttatgacttgcttatggtgacaatatatagagatatatattggcatc

SEQ ID NO: 21921 - DNA, 520 bp, synthetic construct
  source 1..520: mol_type = other DNA
ctttaaagtaacttagaagcatgaacttacagaccaaaaggtgatgatcacccagatcattaaaggtcaagcacttctgtttccccggtcaatgttgatatgcttcaacaaggcaaaaacaacagcgatcgttatccgcaagatgcctacacaaagcttagtacctcctttgatggtatttgtctggtcgctcaggtgtttccccaacactagacctggcagatgaggctagaaactccccactggcgacagtgttctagcctgcgtggctgcctgcacaccctttcgggtgtgaagccaaatactggacaaggtgcgaagagccccgtgtgctcatcttgagtcctccggcccctgaatgcggctaaccttaaacccgcagccattactcacaatccagtgagcagatggtcgtaatgagcaattgtgggatgggaccgactactttgggtgtccgtgtttcatgttttactttatgacttgcttatggtgacaatatatagagatatatattggcatc

SEQ ID NO: 21922 - DNA, 570 bp, synthetic construct
  source 1..570: mol_type = other DNA
tactcttgtattccggtacacttgtacgcccagtttgccaccctaaacaccccgtaacaatagaagtctacgcacacttagaccaatagggggtgttcatccagttcacccaaggtcaagcacttctgtttccccggcataggggtgttaggcttcgcccgaggccaaagctctgattgtcgttatccgcacaactactggacaaagcctagtagcaccctacgatgtagcatggttggttgttccgccagtatcccctggtaaacctggcagatggggctagaagttcctcactggcgacagtgttctagcccgcgtggctgcctgctcccttatgggagaagccattctactgacaaggtgtgaagagccccgtacgctagttgtgattcctccggcccctgaatgcggctaatccaaccctgcagccattacatggaagccaccatgtggatggtcgtaatgagtaattgcgggacggaaccgactactttgggtgtccgtgtttcttgtttttcttttactgacgtttatggtgacaatatatatataacgtatatattgttcatc

SEQ ID NO: 21923 - DNA, 520 bp, synthetic construct
  source 1..520: mol_type = other DNA
cccgtaacaatagaagtctacgcacacttagaccaatagggggtgttcatccagttcacccaaggtcaagcacttctgtttccccggcataggggtgttaggcttcgcccgaggccaaagctctgattgtcgttatccgcacaactactggacaaagcctagtagcaccctacgatgtagcatggttggttgttccgccagtatcccctggtaaacctggcagatggggctagaagttcctcactggcgacagtgttctagcccgcgtggctgcctgctcccttatgggagaagccattctactgacaaggtgtgaagagccccgtacgctagttgtgattcctccggcccctgaatgcggctaatccaaccctgcagccattacatggaagccaccatgtggatggtcgtaatgagtaattgcgggacggaaccgactactttgggtgtccgtgtttcttgtttttcttttactgacgtttatggtgacaatatatatataacgtatatattgttcatc

SEQ ID NO: 21924 - DNA, 571 bp, synthetic construct
  source 1..571: mol_type = other DNA
ctctcatatcacggtatgtttgtacgccagtttgcctcccctcccaagtgtaacttagaagtttgtactttataaaggccaataggcgggtagtcaaccacactactcatggtcaagcacttctgtttccccggtatgcgaagaataagctttaacaaaggctgaagcttcaattatcgttatccgcatgataactacgcaaagcttagtagcattttgaaagtttattggttggtcgctccactggaaaacccccccagtagacctggcagatgaggctaagtaatccccactggcgacagtgacttagcctgcgtggctgcctgcacacctggagacaggtgtgaagccaagtaatggacaaggtgtgaagagccccgtgtgcttatcatgagtcctccggcccctgaatgcggctaatccaaccccacagctattgcacataatccaatgtgtatttagtcgtaacgggcaactgtgggacggaaccgactactttgggtgtccgtgtttcctttattctcatttaagtttcctatggtgacaaatataagtgattatatctgtcatc

SEQ ID NO: 21925 - DNA, 521 bp, synthetic construct
  source 1..521: mol_type = other DNA
taacttagaagtttgtactttataaaggccaataggcgggtagtcaaccacactactcatggtcaagcacttctgtttccccggtatgcgaagaataagctttaacaaaggctgaagcttcaattatcgttatccgcatgataactacgcaaagcttagtagcattttgaaagtttattggttggtcgctccactggaaaacccccccagtagacctggcagatgaggctaagtaatccccactggcgacagtgacttagcctgcgtggctgcctgcacacctggagacaggtgtgaagccaagtaatggacaaggtgtgaagagccccgtgtgcttatcatgagtcctccggcccctgaatgcggctaatccaaccccacagctattgcacataatccaatgtgtatttagtcgtaacgggcaactgtgggacggaaccgactactttgggtgtccgtgtttcctttattctcatttaagtttcctatggtgacaaatataagtgattatatctgtcatc

SEQ ID NO: 21926 - DNA, 572 bp, synthetic construct
  source 1..572: mol_type = other DNA
ctggtactctgtacctttgtacgcctgtttatccactacccttttcctaaattttccacccgtgtaaccttagaagcaaacaaattgtacaatagggtgcatcacaaccagtgatgtacagtacaagcacttctgtttccccggagcggggtatagacggtcaccactgtcaaaagcccttaaccgttacccgccaaccaactacgtaacggctagtaacaccatgaatttgtcttgacgttcgatcaggtggtaaccccccactagtttggtcgatgaggctgagaactccccacgggtaaccgtgtctcagcctgcgtggcggccaacccagcttctgctgggacgccaattcattgacatggtgtgaagacctgcatgtgcttggttgtgattcctccggcccctgaatgcggctaaccctaaccccggagccacgcggcataatccaatgtcgtatgggtcgtaatgagtaattctgggatgggaccgactactttgggtgtccgtgtttcctgtttttccaaattattcttatggtcacagcatataaatagatatatactgtgatc

SEQ ID NO: 21927 - DNA, 522 bp, synthetic construct
  source 1..522: mol_type = other DNA
attttccacccgtgtaaccttagaagcaaacaaattgtacaatagggtgcatcacaaccagtgatgtacagtacaagcacttctgtttccccggagcggggtatagacggtcaccactgtcaaaagcccttaaccgttacccgccaaccaactacgtaacggctagtaacaccatgaatttgtcttgacgttcgatcaggtggtaaccccccactagtttggtcgatgaggctgagaactccccacgggtaaccgtgtctcagcctgcgtggcggccaacccagcttctgctgggacgccaattcattgacatggtgtgaagacctgcatgtgcttggttgtgattcctccggcccctgaatgcggctaaccctaaccccggagccacgcggcataatccaatgtcgtatgggtcgtaatgagtaattctgggatgggaccgactactttgggtgtccgtgtttcctgtttttccaaattattcttatggtcacagcatataaatagatatatactgtgatc

SEQ ID NO: 21928 - DNA, 572 bp, synthetic construct
  source 1..572: mol_type = other DNA
ctggtactctgtacctttgtacgcctgtttctcctcaaccctcccctacccgttatatatctcagtaacttagaagatatcattaccgcacaatagggaccgttgtaaccagcaacggtcagtgcaagcacttctgtttccccggagcggagtatagacggccactgctgtcaaaagctcttaaccgttacccgccagttaactacacaacagctagtaacatcttgttgttcttagggcgttcgatcaggtgagtttaccccctcactagtctggtcgatgaggctgagaaatccccacgggtgaccgtgtctcagcctgcgtggcggccagcccagcttatgctgggacgccttaagtatgacatggtgtgaagactcgcgtgtgcttagctgtgagtcctccggcccctgaatgcggctaacctaaaccccggagccttgaggcacaatccagtgcccgcgaggtcgtaacgagaaattctgggacgggaccgactactttgggtgtccgtgtttccttttatctttttgatgttcttatggttacaatatataaagtatattgtaatc

SEQ ID NO: 21929 - DNA, 522 bp, synthetic construct
  source 1..522: mol_type = other DNA
cgttatatatctcagtaacttagaagatatcattaccgcacaatagggaccgttgtaaccagcaacggtcagtgcaagcacttctgtttccccggagcggagtatagacggccactgctgtcaaaagctcttaaccgttacccgccagttaactacacaacagctagtaacatcttgttgttcttagggcgttcgatcaggtgagtttaccccctcactagtctggtcgatgaggctgagaaatccccacgggtgaccgtgtctcagcctgcgtggcggccagcccagcttatgctgggacgccttaagtatgacatggtgtgaagactcgcgtgtgcttagctgtgagtcctccggcccctgaatgcggctaacctaaaccccggagccttgaggcacaatccagtgcccgcgaggtcgtaacgagaaattctgggacgggaccgactactttgggtgtccgtgtttccttttatctttttgatgttcttatggttacaatatataaagtatattgtaatc

SEQ ID NO: 21930 - DNA, 573 bp, synthetic construct
  source 1..573: mol_type = other DNA
ggtactttgtacctttgtacgcctgttcttcccattgtaccctcccttaacttccaacccaagcaacattagaagttatcaattttcagtacaataggaagcatcacatccagtgatgttgtgtacaagcacttctgtctccccggagcgaggtataagcagtacccactgctaaaagcctttaaccgttacccgccaatcaactacgtaacagctagtatcatcatgtttttgactggacgttcgatcaggtggttcccccccactagtttggtcgatgaggctaggaataccccacgggtaaccgtgtcctagcctgcgtggcggccaacccagcatttgctgggacgcccttttaaagacatggtgtgaagactcgcatgtgcttgattgtgattcctccggcccctgaatgcggctaaccttaaccccggagccttgtgttgcaatccagcaaaagcaaggtcgtaatgagcaattctgggacgggaccgactactttgggtgtccgtgtttctcattttacattacttttcttatggtcacagcatatataataaatatactgtgatc

SEQ ID NO: 21931 - DNA, 523 bp, synthetic construct
  source 1..523: mol_type = other DNA
cttccaacccaagcaacattagaagttatcaattttcagtacaataggaagcatcacatccagtgatgttgtgtacaagcacttctgtctccccggagcgaggtataagcagtacccactgctaaaagcctttaaccgttacccgccaatcaactacgtaacagctagtatcatcatgtttttgactggacgttcgatcaggtggttcccccccactagtttggtcgatgaggctaggaataccccacgggtaaccgtgtcctagcctgcgtggcggccaacccagcatttgctgggacgcccttttaaagacatggtgtgaagactcgcatgtgcttgattgtgattcctccggcccctgaatgcggctaaccttaaccccggagccttgtgttgcaatccagcaaaagcaaggtcgtaatgagcaattctgggacgggaccgactactttgggtgtccgtgtttctcattttacattacttttcttatggtcacagcatatataataaatatactgtgatc

SEQ ID NO: 21932 - DNA, 573 bp, synthetic construct
  source 1..573: mol_type = other DNA
ctctcatattacggtatgcttgcacgccagtttgtttcccctttccccttttgtaactatagaagattgcacttaatctcgaccaataggcagtagtgatccacactacttacggtcaagcacttctgttaccccggtatgcggagaataggctctgaaaagggctgaagcttcaattatcgtcatccgcgcaattactacgcaaagcttagtaacttcccaagaaattctttggttggccgttccgctggtaccccaccagtaggcttggcagatgaggctgagtaatccccactggcgacagtgactcagcctgcgtggctgcctacacacctggtaacaggtgtgaagccatagaaaggacagggtgtgaagagccccgtgtgctaattgtgattcctccggcccctgaatgcggctaatctaaccccacatccaatgcgcataagccaatgcgtatttggtcgtaatgggcaactgtgggacggaaccgactactttgggtgtccgtgtttctttttattccttataattagttcatggtgacaagtataagtgtttatatttgtcatc

SEQ ID NO: 21933 - DNA, 523 bp, synthetic construct
  source 1..523: mol_type = other DNA
ttgtaactatagaagattgcacttaatctcgaccaataggcagtagtgatccacactacttacggtcaagcacttctgttaccccggtatgcggagaataggctctgaaaagggctgaagcttcaattatcgtcatccgcgcaattactacgcaaagcttagtaacttcccaagaaattctttggttggccgttccgctggtaccccaccagtaggcttggcagatgaggctgagtaatccccactggcgacagtgactcagcctgcgtggctgcctacacacctggtaacaggtgtgaagccatagaaaggacagggtgtgaagagccccgtgtgctaattgtgattcctccggcccctgaatgcggctaatctaaccccacatccaatgcgcataagccaatgcgtatttggtcgtaatgggcaactgtgggacggaaccgactactttgggtgtccgtgtttctttttattccttataattagttcatggtgacaagtataagtgtttatatttgtcatc

SEQ ID NO: 21934 - DNA, 574 bp, synthetic construct
  source 1..574: mol_type = other DNA
ctggtattgtgtacctttgtacgcctgttttccccaaatcccctaccctttatatctcctaccccgtaacgtaagaagttttcaaacagtacaataggaagcaccacatccagtggtgttatgtacaagcacttctgtttccccggagcgaggtataggtggtcaccaccgccaaaagcctttaaccgttacccgccaaccaactacgtaatggctagtaacatcattgatttagattggcgttcgatcaggtggtatccccccactagtttggtcgatgaggctaggaataccccacgggtgaccgtgtcctagcctgcgtggcggccaacccagcatacgctgggacgccagtttactgacatggtgcgaagacttgcatgtgcttggttgagagtcctccggcccctgaatgcggctaaccttaaccccggagcctcgcagcataatccaatgttgtagaggtcgtaacgagtaattctgggatgggaccgactactttgggtgtccgtgtttcctgtttttctttaaaatgtcttatggtcacagcatatatactgtatatactgtgatc

SEQ ID NO: 21935 - DNA, 524 bp, synthetic construct
  source 1..524: mol_type = other DNA
tatatctcctaccccgtaacgtaagaagttttcaaacagtacaataggaagcaccacatccagtggtgttatgtacaagcacttctgtttccccggagcgaggtataggtggtcaccaccgccaaaagcctttaaccgttacccgccaaccaactacgtaatggctagtaacatcattgatttagattggcgttcgatcaggtggtatccccccactagtttggtcgatgaggctaggaataccccacgggtgaccgtgtcctagcctgcgtggcggccaacccagcatacgctgggacgccagtttactgacatggtgcgaagacttgcatgtgcttggttgagagtcctccggcccctgaatgcggctaaccttaaccccggagcctcgcagcataatccaatgttgtagaggtcgtaacgagtaattctgggatgggaccgactactttgggtgtccgtgtttcctgtttttctttaaaatgtcttatggtcacagcatatatactgtatatactgtgatc

SEQ ID NO: 21936 - DNA, 574 bp, synthetic construct
  source 1..574: mol_type = other DNA
actctgtacctttgtacgcctgtttctccccttgcaccctccctcattatcctaacccttgtaacattagaagatgagcaacccgtgcaataggagataccacaaccagtggtgttaagcacaagtacttctgtttccccggagcggagtatagacggtccccactgtcaaaagctcttaaccgttatccgccaaccaactacgtgacgactagtagcatcattttgacactttgacgttcgatcaggtaggttcaccccacctactagtttggtcgatgaggctgggagtccctcacaggtaactgtgtcccagcctgcgtggcggccaacccagcaattgctgggacgccaatttgttgacatggtgtgaagatcctaatgtgcttggttgtgagtcctccggcccctgaatgcggctaaccttaaccccggagccttgtggcacaagccagtgacattaaggtcgtaaggagcaattctgggatgggaccgactactttgggtgtccgtgtttcctatttttctttaaattgtcttatggtcacagcatatattaattatatactgtgatc

SEQ ID NO: 21937 - DNA, 524 bp, synthetic construct
  source 1..524: mol_type = other DNA
cctaacccttgtaacattagaagatgagcaacccgtgcaataggagataccacaaccagtggtgttaagcacaagtacttctgtttccccggagcggagtatagacggtccccactgtcaaaagctcttaaccgttatccgccaaccaactacgtgacgactagtagcatcattttgacactttgacgttcgatcaggtaggttcaccccacctactagtttggtcgatgaggctgggagtccctcacaggtaactgtgtcccagcctgcgtggcggccaacccagcaattgctgggacgccaatttgttgacatggtgtgaagatcctaatgtgcttggttgtgagtcctccggcccctgaatgcggctaaccttaaccccggagccttgtggcacaagccagtgacattaaggtcgtaaggagcaattctgggatgggaccgactactttgggtgtccgtgtttcctatttttctttaaattgtcttatggtcacagcatatattaattatatactgtgatc

SEQ ID NO: 21938 - DNA, 575 bp, synthetic construct
  source 1..575: mol_type = other DNA
ctggtattttgtacctttgcacgcctgtttcccatttgtacccttccttaatctccttcccccgtaacgttagaagttttggaattttaaagtacaataggaagcgccacatccagtggtgttgcgtacaaatacttctgtttacccggagcgaggtataggttgtacccacggccaaaagcctttaaccgttatccgccaatcaactacgtaacggctagtatcatcttgcttttgatttggtgttcgatcaggtggtatcccccactagtctggtcgatgaggctaggaattccccacgggcgaccgtgtcctagcctgcgtggcggccagcccagcttttgctgggacgccttttcaaagacatggtgtgaagacctgcatgtgcttggttgtgagtcctccggcccctgaatgcggctaaccttaaccctggagcccagcagcataatccaatgttgtttgggtcgtaatgagcaattccgggacgggaccgactactttgggtgtccgtgtttccttttattcttacattgtcttatggtcacagcatatatattatatatactgtgatc

SEQ ID NO: 21939 - DNA, 525 bp, synthetic construct
  source 1..525: mol_type = other DNA
atctccttcccccgtaacgttagaagttttggaattttaaagtacaataggaagcgccacatccagtggtgttgcgtacaaatacttctgtttacccggagcgaggtataggttgtacccacggccaaaagcctttaaccgttatccgccaatcaactacgtaacggctagtatcatcttgcttttgatttggtgttcgatcaggtggtatcccccactagtctggtcgatgaggctaggaattccccacgggcgaccgtgtcctagcctgcgtggcggccagcccagcttttgctgggacgccttttcaaagacatggtgtgaagacctgcatgtgcttggttgtgagtcctccggcccctgaatgcggctaaccttaaccctggagcccagcagcataatccaatgttgtttgggtcgtaatgagcaattccgggacgggaccgactactttgggtgtccgtgtttccttttattcttacattgtcttatggtcacagcatatatattatatatactgtgatc

SEQ ID NO: 21940 - DNA, 575 bp, synthetic construct
  source 1..575: mol_type = other DNA
ctggtattttgtacctttgcacgcctgtttcccctttgtacccatcctgaatttcctccctctgcaacgttagaagtttgtgaaattaaaagtacaataggaagcatcacatccagtggtgttcagtacaagcactcctgtttccccggagcgaggtataggttgtacccacgaccgaaagcctttaaccgttatccgccaatcaactacataacggctagtatcatcatgtttttgatctggcgttcgatcaggtggtttcccccactagtctggtcgatgaggctaggatttccccacgggcgaccgtgtcctagcctgcgtggcggccagcccagcttatgctgggacgcctttttaaagacatggtgtgaagacctgcatgtgcttgattgtgagtcctccggcccctgaatgcggctaaccttaaccctggagcccgacagcataatccaatgttgtttgggtcgtaatgagcaattccgggatgggaccgactactttgggtgtccgtgtttctttttattcttatattgtcttatggtcacagcatatatagtatatatactgtgatc

SEQ ID NO: 21941 - DNA, 525 bp, synthetic construct
  source 1..525: mol_type = other DNA
atttcctccctctgcaacgttagaagtttgtgaaattaaaagtacaataggaagcatcacatccagtggtgttcagtacaagcactcctgtttccccggagcgaggtataggttgtacccacgaccgaaagcctttaaccgttatccgccaatcaactacataacggctagtatcatcatgtttttgatctggcgttcgatcaggtggtttcccccactagtctggtcgatgaggctaggatttccccacgggcgaccgtgtcctagcctgcgtggcggccagcccagcttatgctgggacgcctttttaaagacatggtgtgaagacctgcatgtgcttgattgtgagtcctccggcccctgaatgcggctaaccttaaccctggagcccgacagcataatccaatgttgtttgggtcgtaatgagcaattccgggatgggaccgactactttgggtgtccgtgtttctttttattcttatattgtcttatggtcacagcatatatagtatatatactgtgatc

SEQ ID NO: 21942 - DNA, 575 bp, synthetic construct
  source 1..575: mol_type = other DNA
ctctcatattccggtatgtttgcacgccagtttgcctctccttttcccacgtaacgttagaagcttatgcactaaatcgaccactaggtgagtgataaaccatatcattctttggtcaagcacttctgtttccccggtatgcagggaataggccctccccagggctgaagccttaattatcgttatccgcacatttactacgcaaagcctattagcgttctggaagttcactggctggtcgttccgctagactaacccgtctagtagacctggcagatgaggctggataaaccccactggcgacagtgatccagcctgcgtggctgcctgcacacctggaaacaggtgtgaagcccatgaatggacagggtgtgaagagccccgtgtgctaagtgtgagtcctccggcccctgaatgcggctaatctaaccccacagctaatacacacaaaccagtgtggatttagtcgtaatgggtaactgtgggacggaaccgactactttgggtgtccgtgtttccttttattccttttatattgcttatggtgacaggtatatagatatatatttgttacc

SEQ ID NO: 21943 - DNA, 525 bp, synthetic construct
  source 1..525: mol_type = other DNA
gtaacgttagaagcttatgcactaaatcgaccactaggtgagtgataaaccatatcattctttggtcaagcacttctgtttccccggtatgcagggaataggccctccccagggctgaagccttaattatcgttatccgcacatttactacgcaaagcctattagcgttctggaagttcactggctggtcgttccgctagactaacccgtctagtagacctggcagatgaggctggataaaccccactggcgacagtgatccagcctgcgtggctgcctgcacacctggaaacaggtgtgaagcccatgaatggacagggtgtgaagagccccgtgtgctaagtgtgagtcctccggcccctgaatgcggctaatctaaccccacagctaatacacacaaaccagtgtggatttagtcgtaatgggtaactgtgggacggaaccgactactttgggtgtccgtgtttccttttattccttttatattgcttatggtgacaggtatatagatatatatttgttacc

SEQ ID NO: 21944 - DNA, 575 bp, synthetic construct
  source 1..575: mol_type = other DNA
gctcctgtattacggtacacttgcacgccagtttgcctccctacccccttcccattcacacccaaccctgcgtaacttagaagctatgcacaagaccaataggtggtaacaatccatgttactaaaggtcaagtacttctgtttccccggcatgcgtggaataaacagtgcaaacggttgaggccacaaatgtcgttacccgcgcatgaactacgcagagcctagtatccccctgaaagtccattggttggtcgctcagctaatccccatagtagacctggcagatgaggcaagacgcaccccactggcgacagtggtcttgcctgcgtggctgcctgcacacccttcggggtgtgaagccaattgatagacagggtgtgaagagccgagtgtgcttcatgtgagtcctccggcccctgaatgcggctaatccaaccccgcagctgtggcacacaatccagtgtgtatgcagtcgtaacgggcaactgcgggacggaaccgactactttgggtgtccgtgtttccttttattctttaatcaagtacttatggtgacaataataaatattgttacc

SEQ ID NO: 21945 - DNA, 525 bp, synthetic construct
  source 1..525: mol_type = other DNA
cccattcacacccaaccctgcgtaacttagaagctatgcacaagaccaataggtggtaacaatccatgttactaaaggtcaagtacttctgtttccccggcatgcgtggaataaacagtgcaaacggttgaggccacaaatgtcgttacccgcgcatgaactacgcagagcctagtatccccctgaaagtccattggttggtcgctcagctaatccccatagtagacctggcagatgaggcaagacgcaccccactggcgacagtggtcttgcctgcgtggctgcctgcacacccttcggggtgtgaagccaattgatagacagggtgtgaagagccgagtgtgcttcatgtgagtcctccggcccctgaatgcggctaatccaaccccgcagctgtggcacacaatccagtgtgtatgcagtcgtaacgggcaactgcgggacggaaccgactactttgggtgtccgtgtttccttttattctttaatcaagtacttatggtgacaataataaatattgttacc

SEQ ID NO: 21946 - DNA, 576 bp, synthetic construct
  source 1..576: mol_type = other DNA
ctggtattttgtacctttgtacgcctgtttcttccctttgtacccgccccttaaacttccaccccacgtaacgttagaagtttatacaagcagtacaataggttgcaccataaccagtggtgtttcgtacaagcacttctgtttccccggagcggggtatagacggtacccactgtcaaaagcccttaaccgttatccgccaatcaactacgtaatggctagtaacaccatgaaggtaagttgacgttcgatcaggtggtaacccccactagtttggtcgatgaggctaggaattccccacgggtaaccgtgtcctagcctgcgtggcggccaacccagcatttgctgggacgccaatttactgacatggtgtgaagacttgcatgtgcttgattgtgactcctccggcccctgaatgcggctaaccttaaccccggagccttgcagcataatccaatgttgtggaggtcgtaatgagcaattctgggatgggaccgactactttgggtgtccgtgtttcctgttttctttaagttgtcttatggtcacagcatatatactatatatactgtgatc

SEQ ID NO: 21947 - DNA, 526 bp, synthetic construct
  source 1..526: mol_type = other DNA
ttaaacttccaccccacgtaacgttagaagtttatacaagcagtacaataggttgcaccataaccagtggtgtttcgtacaagcacttctgtttccccggagcggggtatagacggtacccactgtcaaaagcccttaaccgttatccgccaatcaactacgtaatggctagtaacaccatgaaggtaagttgacgttcgatcaggtggtaacccccactagtttggtcgatgaggctaggaattccccacgggtaaccgtgtcctagcctgcgtggcggccaacccagcatttgctgggacgccaatttactgacatggtgtgaagacttgcatgtgcttgattgtgactcctccggcccctgaatgcggctaaccttaaccccggagccttgcagcataatccaatgttgtggaggtcgtaatgagcaattctgggatgggaccgactactttgggtgtccgtgtttcctgttttctttaagttgtcttatggtcacagcatatatactatatatactgtgatc

SEQ ID NO: 21948 - DNA, 576 bp, synthetic construct
  source 1..576: mol_type = other DNA
ctggtacttcgtacctttgtacgcctgttcttcccattgtacccttcctgaacttccaacccaagtaacgttagaagctcaacatttagtacaacaggaagcaccacatccagtggtgtttagtacaagcacttctgtttccccggagcgaggtataggctgtacccactgccaaaaacctttaaccgttatccgccaaccaactacgtaaaagctagtagtattatgtttttaactaggcgttcgatcaggtggatttcccctccactagtttggtcgatgaggctaggaattccccacgggtgaccgtgtcctagcctgcgtggcggccaacccagcttatgctgggacgcctttttatagacatggtgtgaagactcgcatgtgcttggttgtgattcctccggcccctgaatgcggctaaccttaaccctggagccttgtgtcacaaaccagtgatgataaggtcgtaatgagcaattccgggacgggaccgactactttgggtgtccgtgtttcttatttttcttattattgtcttatggtcacagcatatatataacatatactgtgatc

SEQ ID NO: 21949 - DNA, 526 bp, synthetic construct
  source 1..526: mol_type = other DNA
aacttccaacccaagtaacgttagaagctcaacatttagtacaacaggaagcaccacatccagtggtgtttagtacaagcacttctgtttccccggagcgaggtataggctgtacccactgccaaaaacctttaaccgttatccgccaaccaactacgtaaaagctagtagtattatgtttttaactaggcgttcgatcaggtggatttcccctccactagtttggtcgatgaggctaggaattccccacgggtgaccgtgtcctagcctgcgtggcggccaacccagcttatgctgggacgcctttttatagacatggtgtgaagactcgcatgtgcttggttgtgattcctccggcccctgaatgcggctaaccttaaccctggagccttgtgtcacaaaccagtgatgataaggtcgtaatgagcaattccgggacgggaccgactactttgggtgtccgtgtttcttatttttcttattattgtcttatggtcacagcatatatataacatatactgtgatc

SEQ ID NO: 21950 - DNA, 576 bp, synthetic construct
  source 1..576: mol_type = other DNA
gcgatctcggtcgctttgtatgcctgtttttaccacccaccccaactttactatcttctttacttcacaagtaacatagaagcatgtacatgacgcccaataggacaacgtctcacccagagatgttaagggcaagcacttctgtttccccggatgtgtgaataggcttcacccgaggctgaaactgtagcattcgttatccgcatgactactacgcgactgctagtagcgttctgtgtgacatgtggggtttcgttcagcagagacccagtctgtagatcagggtaatgaggctacacaatccccactggtgacagtggtgtagcctgcgtggtgccctgcccgaggttcgtcctcgggaccctccatgttagacagggtgtgaagacactagtgtgctagtcatgagtcctccggcccctgaatgcggctaatcttaaacctgcagccaccacatgcacgccagcatgcaggtggtcgtaatgagcaattgcgggatggaaccgactactttgggtgtccgtgtttctctttttacatttatgtgtctcttatggttacatcattggtgtaatc

SEQ ID NO: 21951 - DNA, 526 bp, synthetic construct
  source 1..526: mol_type = other DNA
ctatcttctttacttcacaagtaacatagaagcatgtacatgacgcccaataggacaacgtctcacccagagatgttaagggcaagcacttctgtttccccggatgtgtgaataggcttcacccgaggctgaaactgtagcattcgttatccgcatgactactacgcgactgctagtagcgttctgtgtgacatgtggggtttcgttcagcagagacccagtctgtagatcagggtaatgaggctacacaatccccactggtgacagtggtgtagcctgcgtggtgccctgcccgaggttcgtcctcgggaccctccatgttagacagggtgtgaagacactagtgtgctagtcatgagtcctccggcccctgaatgcggctaatcttaaacctgcagccaccacatgcacgccagcatgcaggtggtcgtaatgagcaattgcgggatggaaccgactactttgggtgtccgtgtttctctttttacatttatgtgtctcttatggttacatcattggtgtaatc

SEQ ID NO: 21952 - DNA, 577 bp, synthetic construct
  source 1..577: mol_type = other DNA
ctggtacattgtacctttgtacgcctgttttccccctcttgtacccgcccttcaagctccttgcccaagtaacgttagaagtttgaacattggtacaataggaagcatcacatccagtggtgtactgtacaaacacttctgttgccccggagcgaggtatagatggtccccaccgtcaaaagcctttaaccgttatccgccaatcaactacgtaatggctagtagcaccttggatttaagttggcgttcgatcaggtggtaacccccactagtttggtcgatgaggctaggaattccccacgggtgaccgtgtcctagcctgcgtggcggccaacccagcatccgctgggacgccaatttaatgacatggtgtgaagacctgcatgtgcttgattgtgagtcctccggcccctgaatgcggctaaccctaaccccggagccttgcagcacaatccagtgttgttaaggtcgtaatgagcaattctgggatgggaccgactactttgggtgtccgtgtttcttatttttcttgaatttttcttatggtcacagcatatatacattatatactgtgatc

SEQ ID NO: 21953 - DNA, 527 bp, synthetic construct
  source 1..527: mol_type = other DNA
ttcaagctccttgcccaagtaacgttagaagtttgaacattggtacaataggaagcatcacatccagtggtgtactgtacaaacacttctgttgccccggagcgaggtatagatggtccccaccgtcaaaagcctttaaccgttatccgccaatcaactacgtaatggctagtagcaccttggatttaagttggcgttcgatcaggtggtaacccccactagtttggtcgatgaggctaggaattccccacgggtgaccgtgtcctagcctgcgtggcggccaacccagcatccgctgggacgccaatttaatgacatggtgtgaagacctgcatgtgcttgattgtgagtcctccggcccctgaatgcggctaaccctaaccccggagccttgcagcacaatccagtgttgttaaggtcgtaatgagcaattctgggatgggaccgactactttgggtgtccgtgtttcttatttttcttgaatttttcttatggtcacagcatatatacattatatactgtgatc

SEQ ID NO: 21954 - DNA, 577 bp, synthetic construct
  source 1..577: mol_type = other DNA
ctggtattttgtacctttgcacgcctgtttccccattgtacccctccttaaatttcctccccaagtaacgttagaagtttaaggaaacaaatgtacaataggaagcatcacatccagtggtgttatgtacaagcacttctgtttccccggagcgaggtataagtggtacccaccgccgaaagcctttaaccgttatccgccaatcaactacgtaatggctagtattaccatgtttgtgacttggtgttcgatcaggtggttccccccactagtttggtcgatgaggctaggaactccccacgggtgaccgtgtcctagcctgcgtggcggccaacccagcttttgctgggacgcctttttacagacatggtgtgaagacctgcatgtgcttgattgtgagtcctccggcccctgaatgcggctaaccttaaccccggagccttgcaacataatccaatgttgttgaggtcgtaatgagtaattctgggatgggaccgactactttgggtgtccgtgtttccttttattctttatattgtcttatggtcacagcatatatagcatatatactgtgatc

SEQ ID NO: 21955 - DNA, 527 bp, synthetic construct
  source 1..527: mol_type = other DNA
aatttcctccccaagtaacgttagaagtttaaggaaacaaatgtacaataggaagcatcacatccagtggtgttatgtacaagcacttctgtttccccggagcgaggtataagtggtacccaccgccgaaagcctttaaccgttatccgccaatcaactacgtaatggctagtattaccatgtttgtgacttggtgttcgatcaggtggttccccccactagtttggtcgatgaggctaggaactccccacgggtgaccgtgtcctagcctgcgtggcggccaacccagcttttgctgggacgcctttttacagacatggtgtgaagacctgcatgtgcttgattgtgagtcctccggcccctgaatgcggctaaccttaaccccggagccttgcaacataatccaatgttgttgaggtcgtaatgagtaattctgggatgggaccgactactttgggtgtccgtgtttccttttattctttatattgtcttatggtcacagcatatatagcatatatactgtgatc

SEQ ID NO: 21956 - DNA, 578 bp, synthetic construct
  source 1..578: mol_type = other DNA
ctggtatattgtacctttgcacgcctgttttcccattgtacccttccttaaattcctccccatgtaacgttagaagtttaagaacataaatgtacaataggaagcatcacatccagtggtgtatggtacaagcacttctgtttatccggagcgaggtataagcggtacccactgctgaaagcctttaaccgttaaccgccaatcaactacgtaacggctagtattaccttgtttgcaatctggcgttcgatcaggtggttccccccactagtttggtcgatgaggctaggagttccccacgggcgaccgtgtcctagcctgcgtggcggccaacccagcatttgctgggacgcctttttgtagacatggtgtgaagacctgcatgtgcttgattgtgagtcctccggcccctgaatgcggctaaccttaaccccggagccttgtgacataatccaatgtcattaaggtcgtaatgagcaattctgggacgggaccgactactttgggtgtccgtgtttctctttattctttacattgtcttatggtcacagcatatataatacatatatactgtgatc

SEQ ID NO: 21957 - DNA, 528 bp, synthetic construct
  source 1..528: mol_type = other DNA
aattcctccccatgtaacgttagaagtttaagaacataaatgtacaataggaagcatcacatccagtggtgtatggtacaagcacttctgtttatccggagcgaggtataagcggtacccactgctgaaagcctttaaccgttaaccgccaatcaactacgtaacggctagtattaccttgtttgcaatctggcgttcgatcaggtggttccccccactagtttggtcgatgaggctaggagttccccacgggcgaccgtgtcctagcctgcgtggcggccaacccagcatttgctgggacgcctttttgtagacatggtgtgaagacctgcatgtgcttgattgtgagtcctccggcccctgaatgcggctaaccttaaccccggagccttgtgacataatccaatgtcattaaggtcgtaatgagcaattctgggacgggaccgactactttgggtgtccgtgtttctctttattctttacattgtcttatggtcacagcatatataatacatatatactgtgatc

SEQ ID NO: 21958 - DNA, 580 bp, synthetic construct
  source 1..580: mol_type = other DNA
tctggtatgatgtacctttgtacgcctgtttattcccaaacccccacccgttattcgcccaacccctgtaacgttagaagtttggaacttaattgtacaatagggagcaccatatccaatggtgtaacgtacaagcacttctgtttccccggagcgaggtataggtggtacccactgccgaaagcctttaaccgtcatccgccaatcaactacgtaacagctagtaacatcttgttgttgattggacgttcgatcaggtggttcaccccccactagtttggtcgatgaggctgggaatcccccacgggtgaccgtgtcccagcctgcgtggcggccaacccagcttatgctgggacgccctttcaatgacatggtgtgaagactcgcatgtgcttgattgtgagtccgccggcccctgaatgcggctaaccctaaccctggagccttgcaccacaatccagtggtgtctgggtcgtaatgagtaattctgggatgggaccgactactttgggtgtccgtgtttctcatttttcttttaattgtcttatggtcacagcatatagtattatatactgtgatc

SEQ ID NO: 21959 - DNA, 530 bp, synthetic construct
  source 1..530: mol_type = other DNA
ttattcgcccaacccctgtaacgttagaagtttggaacttaattgtacaatagggagcaccatatccaatggtgtaacgtacaagcacttctgtttccccggagcgaggtataggtggtacccactgccgaaagcctttaaccgtcatccgccaatcaactacgtaacagctagtaacatcttgttgttgattggacgttcgatcaggtggttcaccccccactagtttggtcgatgaggctgggaatcccccacgggtgaccgtgtcccagcctgcgtggcggccaacccagcttatgctgggacgccctttcaatgacatggtgtgaagactcgcatgtgcttgattgtgagtccgccggcccctgaatgcggctaaccctaaccctggagccttgcaccacaatccagtggtgtctgggtcgtaatgagtaattctgggatgggaccgactactttgggtgtccgtgtttctcatttttcttttaattgtcttatggtcacagcatatagtattatatactgtgatc

SEQ ID NO: 21960 - DNA, 581 bp, synthetic construct
  source 1..581: mol_type = other DNA
ctggtactttgtacctttgtatgcctgtttgcttccactcccctttacctaatattcttccccaagtatattttgcggtaacgttagaagaagcaaagttagtgcaataggatgtatcacaaccagtggtataaagcacaagcaattcttgttccccggagctggatatagactgctaacgtggtcaaaagtccttaaccgttatccgccagctaactgcgagaagactagtaacaccatgtttgtttttagacgttcgatcaggtgaataccccattcactagtttggtcgatgaggctgagaataccccacaggtaactgtgtctcagcctgcgtggcggccaacccgactcatgtcgggacgcctactaatagacatggtgtgaagatcctattgcgcttagttgtgagtcctccggcccctgaatgcggctaaccctaaccccggagccttgtggtgtaaaccaacatttgcaaggtcgtaatgagtaattctgggatgggaccgactactttgggtgtccgtgtttcctttatttttattgtgtgtgtcttatggttacaaatacaatttgtaatc

SEQ ID NO: 21961 - DNA, 531 bp, synthetic construct
  source 1..531: mol_type = other DNA
aatattcttccccaagtatattttgcggtaacgttagaagaagcaaagttagtgcaataggatgtatcacaaccagtggtataaagcacaagcaattcttgttccccggagctggatatagactgctaacgtggtcaaaagtccttaaccgttatccgccagctaactgcgagaagactagtaacaccatgtttgtttttagacgttcgatcaggtgaataccccattcactagtttggtcgatgaggctgagaataccccacaggtaactgtgtctcagcctgcgtggcggccaacccgactcatgtcgggacgcctactaatagacatggtgtgaagatcctattgcgcttagttgtgagtcctccggcccctgaatgcggctaaccctaaccccggagccttgtggtgtaaaccaacatttgcaaggtcgtaatgagtaattctgggatgggaccgactactttgggtgtccgtgtttcctttatttttattgtgtgtgtcttatggttacaaatacaatttgtaatc

SEQ ID NO: 21962 - DNA, 583 bp, synthetic construct
  source 1..583: mol_type = other DNA
actctgttattccggtaactttgtacgccagttttccctcccttctccccctcctacccttttacgtaacttagaagctttaaacatgagaccaatagcaggcaactttccaggttgtctaaggtcaagcacttctgtttccccggttgacgttgatatgctccaacagggcaaaaacaactgatatcgttatccgcaaagtgcctacacagagcctagtaggattctgaaagatctttggttggtcgctcagctgcatacccagcagtagacctcgcagatgaggctggacattccccactggtaacagtggtccagcctgcgtggctgcctgcacacctcttacgaggtgtgaagccaaggattcgacagggtgtgaagagccgcgtgtgctcactttgagtcctccggcccctgaatgcggctaaccttaaacctgcagccatagctcataagccaatgagtttatggtcgtaatgagtaattgcgggatgggaccgactactttgggtgtccgtgtttcattttttccttttatcaattgcttatggtgacaatatatatatatatatatattggcatc

SEQ ID NO: 21963 - DNA, 533 bp, synthetic construct
  source 1..533: mol_type = other DNA
ctcctacccttttacgtaacttagaagctttaaacatgagaccaatagcaggcaactttccaggttgtctaaggtcaagcacttctgtttccccggttgacgttgatatgctccaacagggcaaaaacaactgatatcgttatccgcaaagtgcctacacagagcctagtaggattctgaaagatctttggttggtcgctcagctgcatacccagcagtagacctcgcagatgaggctggacattccccactggtaacagtggtccagcctgcgtggctgcctgcacacctcttacgaggtgtgaagccaaggattcgacagggtgtgaagagccgcgtgtgctcactttgagtcctccggcccctgaatgcggctaaccttaaacctgcagccatagctcataagccaatgagtttatggtcgtaatgagtaattgcgggatgggaccgactactttgggtgtccgtgtttcattttttccttttatcaattgcttatggtgacaatatatatatatatatatattggcatc

SEQ ID NO: 21964 - DNA, 589 bp, synthetic construct
  source 1..589: mol_type = other DNA
aggcacacagtgcgtggtacactggaatttcggttcctttgtacgcctgttttcccaccctcatgtttgtttgtctttacgcgtaacttagaagcattgcaaacagctcaataggaatagtccatccaggactgttacgagcaagcacttctgtctccccggacgtgtgaatagacctcaccaaggttgaagctgtagcgttcgttatccgctcatctactgcgcaaagactagtaactaactgaagccttaatggtgtttcgctcagcagtaccccactgtagatcagggcaatgaggctacgcattccccactggtgacagtggcgtagcctgcgtggtgccctgcccaggtttcggcctgggacaccattttgacgacagggtgtgaagaccggcgtgcgctaggtgtgagtcctccggcccctgaatgcggctaatcctaaccctgcagccattgcatgtgatccaacatgtggatggtcgtaatgagtaattgcgggatggaaccgactactttgggtgtccgtgtttcctgttttaccaattactgtctcatggttacaaatttgtgtatcaagtttgtaact

SEQ ID NO: 21965 - DNA, 539 bp, synthetic construct
  source 1..539: mol_type = other DNA
tttcccaccctcatgtttgtttgtctttacgcgtaacttagaagcattgcaaacagctcaataggaatagtccatccaggactgttacgagcaagcacttctgtctccccggacgtgtgaatagacctcaccaaggttgaagctgtagcgttcgttatccgctcatctactgcgcaaagactagtaactaactgaagccttaatggtgtttcgctcagcagtaccccactgtagatcagggcaatgaggctacgcattccccactggtgacagtggcgtagcctgcgtggtgccctgcccaggtttcggcctgggacaccattttgacgacagggtgtgaagaccggcgtgcgctaggtgtgagtcctccggcccctgaatgcggctaatcctaaccctgcagccattgcatgtgatccaacatgtggatggtcgtaatgagtaattgcgggatggaaccgactactttgggtgtccgtgtttcctgttttaccaattactgtctcatggttacaaatttgtgtatcaagtttgtaact

SEQ ID NO: 21966 - DNA, 591 bp, synthetic construct
  source 1..591: mol_type = other DNA
cactggaatctcggttcctttgcatgcctgttttaaaccccccttcccccactctttctatcattcttttcttcctaatgtaacttagacgttataccacagtccaataggacgtggccaatccaggccatgacggacaagcacttctgtctccccgggcgtgtgaataggcctcaacaaggctgaagctgtagcgctcgttatccgcatttgtactacgcgatggctagtatcatccttctcttggtcttggcgtttcgctcagcgtggtaaccccccacgtagatcagggcaatgaggctgcatatgccccaccggcgacggtgatgcagcctgcgtggtgccccgcctgggttaacccccaggacgccacaatcaagacagggtgagaagacctgagtgtgctacagatgagtcctccggcccctgaatgcggctaatcctaaccctgcagctatcgtatgcaaaccagcatattggtagtcgtaacgagcaattgcgggacggaaccgactactttgggtgtccgtgtttctctttttatttgaaatgttgcttatggttacaagttttggtattaaacttgtgacc

SEQ ID NO: 21967 - DNA, 541 bp, synthetic construct
  source 1..541: mol_type = other DNA
actctttctatcattcttttcttcctaatgtaacttagacgttataccacagtccaataggacgtggccaatccaggccatgacggacaagcacttctgtctccccgggcgtgtgaataggcctcaacaaggctgaagctgtagcgctcgttatccgcatttgtactacgcgatggctagtatcatccttctcttggtcttggcgtttcgctcagcgtggtaaccccccacgtagatcagggcaatgaggctgcatatgccccaccggcgacggtgatgcagcctgcgtggtgccccgcctgggttaacccccaggacgccacaatcaagacagggtgagaagacctgagtgtgctacagatgagtcctccggcccctgaatgcggctaatcctaaccctgcagctatcgtatgcaaaccagcatattggtagtcgtaacgagcaattgcgggacggaaccgactactttgggtgtccgtgtttctctttttatttgaaatgttgcttatggttacaagttttggtattaaacttgtgacc

SEQ ID NO: 21968 - DNA, 592 bp, synthetic construct
  source 1..592: mol_type = other DNA
cagttgtgtctcgatcaagcacttctgtctccccggaccgagtatcaatagactgctcacgcggttgaaggagaaagcgttcgttacccggctgactacttcgagaaacctagtagcactatgaaagttgcgaagtgtttcgttcagcacttcccccgtgtagatcaggtcgatgagtcactgtattccctacgggtgaccgtagcagtggctgcgttggcggcctgcccatggggcaacccatgggacgcttcaatacagacatggtgcgaagagtctattgagctagtcagtagtcctccggcccctgaatgcggctaatcctaactgcggagcatgtgccttcgatccagagggtagcatgtcgtaatgggcaactctgcagcggaaccgactactttgggtgtccgtgtttccttttattcttatactggctgcttatggtgacaattgagagattgttgccatatagctattggattggccatccggtgagtaatagagctattatctactcctttgtgggttttgtatcattgaactataaggtcttgaagactctcaactttattttgacactcaacaccgcaaa

SEQ ID NO: 21969 - DNA, 542 bp, synthetic construct
  source 1..542: mol_type = other DNA
gactgctcacgcggttgaaggagaaagcgttcgttacccggctgactacttcgagaaacctagtagcactatgaaagttgcgaagtgtttcgttcagcacttcccccgtgtagatcaggtcgatgagtcactgtattccctacgggtgaccgtagcagtggctgcgttggcggcctgcccatggggcaacccatgggacgcttcaatacagacatggtgcgaagagtctattgagctagtcagtagtcctccggcccctgaatgcggctaatcctaactgcggagcatgtgccttcgatccagagggtagcatgtcgtaatgggcaactctgcagcggaaccgactactttgggtgtccgtgtttccttttattcttatactggctgcttatggtgacaattgagagattgttgccatatagctattggattggccatccggtgagtaatagagctattatctactcctttgtgggttttgtatcattgaactataaggtcttgaagactctcaactttattttgacactcaacaccgcaaa

SEQ ID NO: 21970 - DNA, 593 bp, synthetic construct
  source 1..593: mol_type = other DNA
ccaactgggtcttgaccaagcacttctgttaccccggaccgagtatcaataggctgcccacgcggctgaaggagaaaacgttcgttacccggccaattacttcgagaaacctagtatcaccatggaagttgcgcggcgtttcgctccacacaaccccagtgtagatcaggctgatgagtcaccgcactcctcacgggcgaccgtggcggtggctgcgttggcggcctgcccatggggcaacccatgggacgcctcaatactgacatggtgtgaagagtctattgagctaattggtagtcctccggcccctgaatgcggctaatcctaactgcggagcagacactcacaagccagtgggcggtctgtcgtaacgggcaactctgcagcggaaccgactactttgggtgtccgtgtttccttttattcctacattggctgcttatggtgacaattgagagattgttaccatatagctattggattggccatccggtgacaaacagagcgattgtctattcatttgtcggttttgtaccattaaactccaaagtcttgaaaaccctcaacctaatcatcctacttaactcagtaaa

SEQ ID NO: 21971 - DNA, 543 bp, synthetic construct
  source 1..543: mol_type = other DNA
aggctgcccacgcggctgaaggagaaaacgttcgttacccggccaattacttcgagaaacctagtatcaccatggaagttgcgcggcgtttcgctccacacaaccccagtgtagatcaggctgatgagtcaccgcactcctcacgggcgaccgtggcggtggctgcgttggcggcctgcccatggggcaacccatgggacgcctcaatactgacatggtgtgaagagtctattgagctaattggtagtcctccggcccctgaatgcggctaatcctaactgcggagcagacactcacaagccagtgggcggtctgtcgtaacgggcaactctgcagcggaaccgactactttgggtgtccgtgtttccttttattcctacattggctgcttatggtgacaattgagagattgttaccatatagctattggattggccatccggtgacaaacagagcgattgtctattcatttgtcggttttgtaccattaaactccaaagtcttgaaaaccctcaacctaatcatcctacttaactcagtaaa

SEQ ID NO: 21972 - DNA, 593 bp, synthetic construct
  source 1..593: mol_type = other DNA
ggtgtagtactctggtattatgtacctttgtacgcctgtttactcccaaaccccccctcccgttacatttccaacccctgtaacgttagaagtttggaatttaacagtacaataggaggcaccatacccaatggtgtaatgtacaagcacttctgtttccccggagcgaggtataggtggtacccaccgctgaaagcctttaaccgttatccgccaatcaactacgtaacagctagtagcattttgtcgttgactggacgttcgatcaggtggtttacccccccactagtttggtcgatgaggctggaaattccccacgggtgaccgtgttccagcctgcgtggcggccaacccagctcatgctgggacgccctttcaatgacatggtgtgaagactcgcatgtgcttggttgtgaatcctccggcccctgaatgcggctaaccctaaccccggagccttgcatcgcaatccagtgatgttggggtcgtaatgagtaattctgggatgggaccgactactttgggtgtccgtgtttctcatttttctttgaattatcttatggtcacagcatatagtaatatatactgtgatc

SEQ ID NO: 21973 - DNA, 543 bp, synthetic construct
  source 1..543: mol_type = other DNA
ccccccctcccgttacatttccaacccctgtaacgttagaagtttggaatttaacagtacaataggaggcaccatacccaatggtgtaatgtacaagcacttctgtttccccggagcgaggtataggtggtacccaccgctgaaagcctttaaccgttatccgccaatcaactacgtaacagctagtagcattttgtcgttgactggacgttcgatcaggtggtttacccccccactagtttggtcgatgaggctggaaattccccacgggtgaccgtgttccagcctgcgtggcggccaacccagctcatgctgggacgccctttcaatgacatggtgtgaagactcgcatgtgcttggttgtgaatcctccggcccctgaatgcggctaaccctaaccccggagccttgcatcgcaatccagtgatgttggggtcgtaatgagtaattctgggatgggaccgactactttgggtgtccgtgtttctcatttttctttgaattatcttatggtcacagcatatagtaatatatactgtgatc

SEQ ID NO: 21974 - DNA, 597 bp, synthetic construct
  source 1..597: mol_type = other DNA
agcaattcaaacagttcaatagagggggtacaaaccagtaccaccacgaacaagcacttctgtttccccggtgaagctgtatagactgtgcccacggttgaaaatggctaatccgttatccgcttaagtacttcgagaagcctagtatcaccttggaatcttcgacgcgttgcgctcagcactctaccccgagtgtagcttaggctgatgagtctgggcataccccaccggcgacggtggcccaggctgcgttggcggcctacccatggctaacgccatgggacgctagttgtgaacaaggtgtgaagagcctattgagctacttgagagtcctccggcccctgaatgcggctaatcccaaccacggagcaagtgctcacaaaccagtgagtggcttgtcgtaacgcgcaagtctgtggcggaaccgactactttgggtgtccgtgtttccttttatttttatcatggctgcttatggtgacaatctaagattgttatcatatagcgtttggattggccatccggtgatttcaaaagtgatatatttgacctatcgccttactgtgtttacctactcattacatccactcaaccata

SEQ ID NO: 21975 - DNA, 547 bp, synthetic construct
  source 1..547: mol_type = other DNA
caagcacttctgtttccccggtgaagctgtatagactgtgcccacggttgaaaatggctaatccgttatccgcttaagtacttcgagaagcctagtatcaccttggaatcttcgacgcgttgcgctcagcactctaccccgagtgtagcttaggctgatgagtctgggcataccccaccggcgacggtggcccaggctgcgttggcggcctacccatggctaacgccatgggacgctagttgtgaacaaggtgtgaagagcctattgagctacttgagagtcctccggcccctgaatgcggctaatcccaaccacggagcaagtgctcacaaaccagtgagtggcttgtcgtaacgcgcaagtctgtggcggaaccgactactttgggtgtccgtgtttccttttatttttatcatggctgcttatggtgacaatctaagattgttatcatatagcgtttggattggccatccggtgatttcaaaagtgatatatttgacctatcgccttactgtgtttacctactcattacatccactcaaccata

SEQ ID NO: 21976 - DNA, 598 bp, synthetic construct
  source 1..598: mol_type = other DNA
gaagtaaatcataaagttcaatagaagggggtgcaagccagcaccaccacgaacaagcacttctgtttccccggtgaagccgtatagactgcccccgcggttgaaaatggcagatccgttatccgctcacgtacttcgagaagcctagtatcaccttggaatcttcgacgcgttgcgctcagcactctaccccgagtgtagcttaggtcgatgagtctgggcataccccaccggtgacggtggcccaggctgcgttggcggcctacccatggttaacaccatgggacgctagttgtgaacaaggtgtgaagagcctattgagctacctgagagtcctccggcccctgaatgcggctaatcccaaccacggagcaagtgctcacaaaccagtgggtagcttgtcgtaacgcgcaagtctgtggcggaaccgactactttgggtgtccgtgtttccttttatttttatcatggctgcttatggtgacaatctaagattgttatcatatagctattggattggccatccggtgatttttgaaagtgatatttgccttgctatttcattgcatttgcttacttataatactgcaaactcaca

SEQ ID NO: 21977 - DNA, 548 bp, synthetic construct
  source 1..548: mol_type = other DNA
gaacaagcacttctgtttccccggtgaagccgtatagactgcccccgcggttgaaaatggcagatccgttatccgctcacgtacttcgagaagcctagtatcaccttggaatcttcgacgcgttgcgctcagcactctaccccgagtgtagcttaggtcgatgagtctgggcataccccaccggtgacggtggcccaggctgcgttggcggcctacccatggttaacaccatgggacgctagttgtgaacaaggtgtgaagagcctattgagctacctgagagtcctccggcccctgaatgcggctaatcccaaccacggagcaagtgctcacaaaccagtgggtagcttgtcgtaacgcgcaagtctgtggcggaaccgactactttgggtgtccgtgtttccttttatttttatcatggctgcttatggtgacaatctaagattgttatcatatagctattggattggccatccggtgatttttgaaagtgatatttgccttgctatttcattgcatttgcttacttataatactgcaaactcaca

SEQ ID NO: 21978 - DNA, 598 bp, synthetic construct
  source 1..598: mol_type = other DNA
cgacccactgggtgtagtactctggtattatgtacctttgtacgcctgttcttcccattgtaccctccctaaatttccaacccaagtaacgttagaagttccacataacagtacaataggaagcaccacatccagtggtgttttgtacaagcacttctgtctccccggagcgaggtataggctgtacccactgccaaaagcctttaaccgttatccgccaaccaactacgtaaaagctagtaacatcttgtttgtaacttggcgttcgatcaggtggattccccctccattagtttggtcgatgaggctaggaattccccacgggcgaccgtgtcctagcctgcgtggcggccaacccagcatttgctgggacgcccttttatagacatggtgtgaagactcgcatgtgcttggttgtgactcctccggcccctgaatgcggctaaccttaaccccggagccttgtgttgcaagccagcaacattaaggtcgtaatgagtaattctgggacgggaccgactactttgggtgtccgtgtttccaatttttcttattattgtcttatggtcacagcatatttgacaaatatactgtgatc

SEQ ID NO: 21979 - DNA, 548 bp, synthetic construct
  source 1..548: mol_type = other DNA
cttcccattgtaccctccctaaatttccaacccaagtaacgttagaagttccacataacagtacaataggaagcaccacatccagtggtgttttgtacaagcacttctgtctccccggagcgaggtataggctgtacccactgccaaaagcctttaaccgttatccgccaaccaactacgtaaaagctagtaacatcttgtttgtaacttggcgttcgatcaggtggattccccctccattagtttggtcgatgaggctaggaattccccacgggcgaccgtgtcctagcctgcgtggcggccaacccagcatttgctgggacgcccttttatagacatggtgtgaagactcgcatgtgcttggttgtgactcctccggcccctgaatgcggctaaccttaaccccggagccttgtgttgcaagccagcaacattaaggtcgtaatgagtaattctgggacgggaccgactactttgggtgtccgtgtttccaatttttcttattattgtcttatggtcacagcatatttgacaaatatactgtgatc

SEQ ID NO: 21980 - DNA, 599 bp, synthetic construct
  source 1..599: mol_type = other DNA
agtatgccaactgggtcttgaccaagcacttctgttaccccggactgagtatcaataggctgctcacgcggctgaaggagaaaacgttcgttacccggccagttacttcgagaaacctagtaccaccatgaaggttgcgcagcgtttcgctccgcacaaccccagtgtagatcaggccgatgagtcaccgcatccctcacgggcgaccgtggcggtggctgcgttggcggcctgcccatggggcaacccatgggacgcttcaatactgacatggtgcgaagagtctattgagctaattggtagtcctccggcccctgaatgcggctaatcctaactgcggagcagatacccgcgtgccagcgggcagtctgtcgtaatgggcaactctgcagcggaaccgactactttgggtgtccgtgtttccttttattcttacactggctgcttatggtgacaattgaaagattgttaccatatagctattggattggccatccggtgactaacagagcgattatctatcaatttgttggttttgtgccattggatttcccaaccctaagaacccttaattttatattggtacttaacacgacaag

SEQ ID NO: 21981 - DNA, 549 bp, synthetic construct
  source 1..549: mol_type = other DNA
atcaataggctgctcacgcggctgaaggagaaaacgttcgttacccggccagttacttcgagaaacctagtaccaccatgaaggttgcgcagcgtttcgctccgcacaaccccagtgtagatcaggccgatgagtcaccgcatccctcacgggcgaccgtggcggtggctgcgttggcggcctgcccatggggcaacccatgggacgcttcaatactgacatggtgcgaagagtctattgagctaattggtagtcctccggcccctgaatgcggctaatcctaactgcggagcagatacccgcgtgccagcgggcagtctgtcgtaatgggcaactctgcagcggaaccgactactttgggtgtccgtgtttccttttattcttacactggctgcttatggtgacaattgaaagattgttaccatatagctattggattggccatccggtgactaacagagcgattatctatcaatttgttggttttgtgccattggatttcccaaccctaagaacccttaattttatattggtacttaacacgacaag

SEQ ID NO: 21982 - DNA, 601 bp, synthetic construct
  source 1..601: mol_type = other DNA
cagtacctctatgaacaagcacttctgtttccccggtgacattgcatagactgctcacgcggttgaaagcgatcgatccgttatccgcttgtgtacttcgaaaagcctagtatcgccttggaatcttcgacgcgttgcgctcagcacccgatcccggggtgtagcttaggctgatgagtctggacgtccctcaccggcgacggtggtccaggctgcgttggcggcctacctatggctaacgccataggacgctagatgtgaacaaggtgtgaagagcctattgagctacacgagagtcctccggcccctgaatgcggctaatcctaaccacggagcaagcggtcacgaaccagtggctggcttgtcgtaacgcgcaagtctgtggcggaaccgactactttgggtgtccgtgtttcctgttatttttatcatggctgcttatggtgacaatctgtgattgttatcataaagcgatttggattggccatccggtgagtgttgtatcgaacatttgactgttcatcagaactactgtgttagattcacttcttattcaactaattaatcaaaaacagtacgaagacaaaacaacaatactaca

SEQ ID NO: 21983 - DNA, 551 bp, synthetic construct
  source 1..551: mol_type = other DNA
ctgctcacgcggttgaaagcgatcgatccgttatccgcttgtgtacttcgaaaagcctagtatcgccttggaatcttcgacgcgttgcgctcagcacccgatcccggggtgtagcttaggctgatgagtctggacgtccctcaccggcgacggtggtccaggctgcgttggcggcctacctatggctaacgccataggacgctagatgtgaacaaggtgtgaagagcctattgagctacacgagagtcctccggcccctgaatgcggctaatcctaaccacggagcaagcggtcacgaaccagtggctggcttgtcgtaacgcgcaagtctgtggcggaaccgactactttgggtgtccgtgtttcctgttatttttatcatggctgcttatggtgacaatctgtgattgttatcataaagcgatttggattggccatccggtgagtgttgtatcgaacatttgactgttcatcagaactactgtgttagattcacttcttattcaactaattaatcaaaaacagtacgaagacaaaacaacaatactaca

SEQ ID NO: 21984 - DNA, 501 bp, synthetic construct
  source 1..501: mol_type = other DNA
aaaagcctagtatcgccttggaatcttcgacgcgttgcgctcagcacccgatcccggggtgtagcttaggctgatgagtctggacgtccctcaccggcgacggtggtccaggctgcgttggcggcctacctatggctaacgccataggacgctagatgtgaacaaggtgtgaagagcctattgagctacacgagagtcctccggcccctgaatgcggctaatcctaaccacggagcaagcggtcacgaaccagtggctggcttgtcgtaacgcgcaagtctgtggcggaaccgactactttgggtgtccgtgtttcctgttatttttatcatggctgcttatggtgacaatctgtgattgttatcataaagcgatttggattggccatccggtgagtgttgtatcgaacatttgactgttcatcagaactactgtgttagattcacttcttattcaactaattaatcaaaaacagtacgaagacaaaacaacaatactaca

SEQ ID NO: 21985 - DNA, 601 bp, synthetic construct
  source 1..601: mol_type = other DNA
gtgtcgatccagacgcatcttgatcaagcacttctgttcccccggaccgagtatcaataagctactaacgtggctgaaggagaaaatgtccgttacccggccaactacttcgagaagcccagtaccaccatgaacgttgcagagtgtttcgctcagcacaaccccagtgtagatcaggccgatgagtcaccgcattcctcacgggcgaccgtggcggtggctgcgctggcggcctgcctatggggaaacccataggacgctctaatactgacatggtgcgaagagcctattgagctagttggtagtcctccggcccctgaatgcggctaatcctaactgcggagcatgtgctcacaatccagtgagtggcatgtcgtaacgggtaactctgcagcggaaccgactactttgggtgtccgtgtttccttttatatttatactggctgcttatggtgacaatcaaggaattgttaccatatagctattggattggccatccggtgactaatagagctataatttacctatttgttggattcgtccccctgaacacaaaaacagttcagactctacagtacatcttatttttgaacttgaagaa

SEQ ID NO: 21986 - DNA, 551 bp, synthetic construct
  source 1..551: mol_type = other DNA
gtatcaataagctactaacgtggctgaaggagaaaatgtccgttacccggccaactacttcgagaagcccagtaccaccatgaacgttgcagagtgtttcgctcagcacaaccccagtgtagatcaggccgatgagtcaccgcattcctcacgggcgaccgtggcggtggctgcgctggcggcctgcctatggggaaacccataggacgctctaatactgacatggtgcgaagagcctattgagctagttggtagtcctccggcccctgaatgcggctaatcctaactgcggagcatgtgctcacaatccagtgagtggcatgtcgtaacgggtaactctgcagcggaaccgactactttgggtgtccgtgtttccttttatatttatactggctgcttatggtgacaatcaaggaattgttaccatatagctattggattggccatccggtgactaatagagctataatttacctatttgttggattcgtccccctgaacacaaaaacagttcagactctacagtacatcttatttttgaacttgaagaa

SEQ ID NO: 21987 - DNA, 501 bp, synthetic construct
  source 1..501: mol_type = other DNA
ccaactacttcgagaagcccagtaccaccatgaacgttgcagagtgtttcgctcagcacaaccccagtgtagatcaggccgatgagtcaccgcattcctcacgggcgaccgtggcggtggctgcgctggcggcctgcctatggggaaacccataggacgctctaatactgacatggtgcgaagagcctattgagctagttggtagtcctccggcccctgaatgcggctaatcctaactgcggagcatgtgctcacaatccagtgagtggcatgtcgtaacgggtaactctgcagcggaaccgactactttgggtgtccgtgtttccttttatatttatactggctgcttatggtgacaatcaaggaattgttaccatatagctattggattggccatccggtgactaatagagctataatttacctatttgttggattcgtccccctgaacacaaaaacagttcagactctacagtacatcttatttttgaacttgaagaa

SEQ ID NO: 21988 - DNA, 604 bp, synthetic construct
  source 1..604: mol_type = other DNA
cacaagttcaatagtaggaccatcatccaggtggttcatcgaacaagcacttctgttaccccggtcctagtacctgtgaagctgtacccacggcggaaggggaaaacgatcgttacccggctatctacttcgagaagcctagtaacagcattgaaactcttgagcgttgcgttcagcacagtaacccctgtgtagctttggctgatgagtctgggcattccccactggcgacagtggcccaggctgcgttggcggccaaccgatccgggcaaccgggtcggacgcttatttgtggacatggtgtgaagagcctattgagctagatagtagtcctccggcccctgaatgcggctaatcctaactccggagcaaatgcacgcaacccagcgtgtagtttgtcgtaacgcgtaagtctggagcggaaccgactactttgggtgtccgtgtttcctgttttaccttatttggctgcttatggtgacaatatagtattgttaccatatagctattggattggccatccggtgaacagatttcgacaaactctattttactgttgttcacagcctaaagttacaaatcttactctgactcagtagtaatc

SEQ ID NO: 21989 - DNA, 554 bp, synthetic construct
  source 1..554: mol_type = other DNA
ttctgttaccccggtcctagtacctgtgaagctgtacccacggcggaaggggaaaacgatcgttacccggctatctacttcgagaagcctagtaacagcattgaaactcttgagcgttgcgttcagcacagtaacccctgtgtagctttggctgatgagtctgggcattccccactggcgacagtggcccaggctgcgttggcggccaaccgatccgggcaaccgggtcggacgcttatttgtggacatggtgtgaagagcctattgagctagatagtagtcctccggcccctgaatgcggctaatcctaactccggagcaaatgcacgcaacccagcgtgtagtttgtcgtaacgcgtaagtctggagcggaaccgactactttgggtgtccgtgtttcctgttttaccttatttggctgcttatggtgacaatatagtattgttaccatatagctattggattggccatccggtgaacagatttcgacaaactctattttactgttgttcacagcctaaagttacaaatcttactctgactcagtagtaatc

SEQ ID NO: 21990 - DNA, 504 bp, synthetic construct
  source 1..504: mol_type = other DNA
ggaaaacgatcgttacccggctatctacttcgagaagcctagtaacagcattgaaactcttgagcgttgcgttcagcacagtaacccctgtgtagctttggctgatgagtctgggcattccccactggcgacagtggcccaggctgcgttggcggccaaccgatccgggcaaccgggtcggacgcttatttgtggacatggtgtgaagagcctattgagctagatagtagtcctccggcccctgaatgcggctaatcctaactccggagcaaatgcacgcaacccagcgtgtagtttgtcgtaacgcgtaagtctggagcggaaccgactactttgggtgtccgtgtttcctgttttaccttatttggctgcttatggtgacaatatagtattgttaccatatagctattggattggccatccggtgaacagatttcgacaaactctattttactgttgttcacagcctaaagttacaaatcttactctgactcagtagtaatc

SEQ ID NO: 21991 - DNA, 605 bp, synthetic construct
  source 1..605: mol_type = other DNA
taaaagcctcaattgtaacaaacatctaagaacactacattaaccccatgcctggtctccactagttgaaggcgacttgcaataagatgagtggaaacaagacgcttaaagcatggtgtaaatcaacttttctaacctgtacattgtatggggtggcagatggcgtgccataattctatcagtgagataccacgcttgtggaccttatgctcacacagccatcctctagtaagtttgtgagacgtctggagacgtgtgggaacttattggaaacaacattttgctgtaaagcatcctactgccagcggaacaacacctggtaacaggtgcctctggggccaaaagccaaggtttaacagaccctctaggattggtttaaaacctgagatgttgtggaaaatattcagtacctaccaatctggtagtagtgcaaacactagttgtaaggcccacgaaggatgcccagaaggtacccgtaggtaacaagtgacactacggatctgatctggggccaggtacctctatctaggtgacctggttaaaaaacgtctagtgggccaaacccgggggggaccccggtttccttttattttatcaatgccact

SEQ ID NO: 21992 - DNA, 555 bp, synthetic construct
  source 1..555: mol_type = other DNA
cctggtctccactagttgaaggcgacttgcaataagatgagtggaaacaagacgcttaaagcatggtgtaaatcaacttttctaacctgtacattgtatggggtggcagatggcgtgccataattctatcagtgagataccacgcttgtggaccttatgctcacacagccatcctctagtaagtttgtgagacgtctggagacgtgtgggaacttattggaaacaacattttgctgtaaagcatcctactgccagcggaacaacacctggtaacaggtgcctctggggccaaaagccaaggtttaacagaccctctaggattggtttaaaacctgagatgttgtggaaaatattcagtacctaccaatctggtagtagtgcaaacactagttgtaaggcccacgaaggatgcccagaaggtacccgtaggtaacaagtgacactacggatctgatctggggccaggtacctctatctaggtgacctggttaaaaaacgtctagtgggccaaacccgggggggaccccggtttccttttattttatcaatgccact

SEQ ID NO: 21993 - DNA, 505 bp, synthetic construct
  source 1..505: mol_type = other DNA
gacgcttaaagcatggtgtaaatcaacttttctaacctgtacattgtatggggtggcagatggcgtgccataattctatcagtgagataccacgcttgtggaccttatgctcacacagccatcctctagtaagtttgtgagacgtctggagacgtgtgggaacttattggaaacaacattttgctgtaaagcatcctactgccagcggaacaacacctggtaacaggtgcctctggggccaaaagccaaggtttaacagaccctctaggattggtttaaaacctgagatgttgtggaaaatattcagtacctaccaatctggtagtagtgcaaacactagttgtaaggcccacgaaggatgcccagaaggtacccgtaggtaacaagtgacactacggatctgatctggggccaggtacctctatctaggtgacctggttaaaaaacgtctagtgggccaaacccgggggggaccccggtttccttttattttatcaatgccact

SEQ ID NO: 21994 - DNA, 605 bp, synthetic construct
  source 1..605: mol_type = other DNA
atagcaaatccaccaacccaggtgggttttcgtcaagcacttctgtttccccggacctagtaccaataggctgtacccacggctgaaagggaaaacgttcgttacccggctacctacttcgagaagcctagtaccatcattgaatgtctcaagtgttacgctcagcacaaccccagtgcagttcaggctgatgagtcaccgaatcccccacgggcgaccgtgtcggtggctgcgttggcggcctgcctgcgagttccactcgcaggacgcttgattcatgacatggtgcgaagagcctattgagctaggtagtagtcctccggcccctgaatgcggctaatcccaaccacggagcatccactgacaaaccagtcagcagggtgtcgtaatgggcaactctgtggcggaaccgactactttgggtgtccgtgtttcctgttttatttactctggctgcttatggtgacaatttacggattgttaccatatagctattggattggccatccggattacaagcaagtaatattactgtttgtgggatttttacccttgaatcacattaactacttcattctactaatagtcttgaagttaagtacatc

SEQ ID NO: 21995 - DNA, 555 bp, synthetic construct
  source 1..555: mol_type = other DNA
ccggacctagtaccaataggctgtacccacggctgaaagggaaaacgttcgttacccggctacctacttcgagaagcctagtaccatcattgaatgtctcaagtgttacgctcagcacaaccccagtgcagttcaggctgatgagtcaccgaatcccccacgggcgaccgtgtcggtggctgcgttggcggcctgcctgcgagttccactcgcaggacgcttgattcatgacatggtgcgaagagcctattgagctaggtagtagtcctccggcccctgaatgcggctaatcccaaccacggagcatccactgacaaaccagtcagcagggtgtcgtaatgggcaactctgtggcggaaccgactactttgggtgtccgtgtttcctgttttatttactctggctgcttatggtgacaatttacggattgttaccatatagctattggattggccatccggattacaagcaagtaatattactgtttgtgggatttttacccttgaatcacattaactacttcattctactaatagtcttgaagttaagtacatc

SEQ ID NO: 21996 - DNA, 505 bp, synthetic construct
  source 1..505: mol_type = other DNA
gttacccggctacctacttcgagaagcctagtaccatcattgaatgtctcaagtgttacgctcagcacaaccccagtgcagttcaggctgatgagtcaccgaatcccccacgggcgaccgtgtcggtggctgcgttggcggcctgcctgcgagttccactcgcaggacgcttgattcatgacatggtgcgaagagcctattgagctaggtagtagtcctccggcccctgaatgcggctaatcccaaccacggagcatccactgacaaaccagtcagcagggtgtcgtaatgggcaactctgtggcggaaccgactactttgggtgtccgtgtttcctgttttatttactctggctgcttatggtgacaatttacggattgttaccatatagctattggattggccatccggattacaagcaagtaatattactgtttgtgggatttttacccttgaatcacattaactacttcattctactaatagtcttgaagttaagtacatc

SEQ ID NO: 21997 - DNA, 614 bp, synthetic construct
  source 1..614: mol_type = other DNA
atctcccttcccccgtaacgttagaagaaaacacaaccgacaactagcagattcaccaatccaggtgagtcttcgtcaagcacttctgtttccccggacttagtaccaataggctgtacccacggctgaaggggaaaacgttcgttatccggctacctacttcgagaagcctagtaccaccattgaatgtctcaagtgttacgttcagcacaaccccagtgtagttcaggtcgatgagtcaccgaattccccacgggcgaccgtgtcggtggctgcgttggcggcctgcctgcgggtttcacccgcaggacgcttgattcatgacatggtgcgaagagcctattgagctaggtagtagtcctccggcccctgaatgcggctaatcctaaccacggagccatgcgttacaatccagtaacgttgtggtcgtaacgagtaattctgtggcggaaccgactactttgggtgtccgtgtttcctgttttactcattttggctgcttatggtgacaatctagggttgtcatcatatagcgattggattggccatccggatttgtctttgtgtgatttatctcttgctcacaagcaattttcataggtcatagcatcatc

SEQ ID NO: 21998 - DNA, 564 bp, synthetic construct
  source 1..564: mol_type = other DNA
attcaccaatccaggtgagtcttcgtcaagcacttctgtttccccggacttagtaccaataggctgtacccacggctgaaggggaaaacgttcgttatccggctacctacttcgagaagcctagtaccaccattgaatgtctcaagtgttacgttcagcacaaccccagtgtagttcaggtcgatgagtcaccgaattccccacgggcgaccgtgtcggtggctgcgttggcggcctgcctgcgggtttcacccgcaggacgcttgattcatgacatggtgcgaagagcctattgagctaggtagtagtcctccggcccctgaatgcggctaatcctaaccacggagccatgcgttacaatccagtaacgttgtggtcgtaacgagtaattctgtggcggaaccgactactttgggtgtccgtgtttcctgttttactcattttggctgcttatggtgacaatctagggttgtcatcatatagcgattggattggccatccggatttgtctttgtgtgatttatctcttgctcacaagcaattttcataggtcatagcatcatc

SEQ ID NO: 21999 - DNA, 514 bp, synthetic construct
  source 1..514: mol_type = other DNA
tagtaccaataggctgtacccacggctgaaggggaaaacgttcgttatccggctacctacttcgagaagcctagtaccaccattgaatgtctcaagtgttacgttcagcacaaccccagtgtagttcaggtcgatgagtcaccgaattccccacgggcgaccgtgtcggtggctgcgttggcggcctgcctgcgggtttcacccgcaggacgcttgattcatgacatggtgcgaagagcctattgagctaggtagtagtcctccggcccctgaatgcggctaatcctaaccacggagccatgcgttacaatccagtaacgttgtggtcgtaacgagtaattctgtggcggaaccgactactttgggtgtccgtgtttcctgttttactcattttggctgcttatggtgacaatctagggttgtcatcatatagcgattggattggccatccggatttgtctttgtgtgatttatctcttgctcacaagcaattttcataggtcatagcatcatc

SEQ ID NO: 22000 - DNA, 616 bp, synthetic construct
  source 1..616: mol_type = other DNA
actctggtattgcggtacctttgtatgcctattttacctcccttccccctgaaacttagaagaaagaaacaaacacgctcactaggtacactgcatccagcagtgtaatgagcaagcacttctgtttccccggaagggatatatggtacgctgtgcaaacggcggaaattaatcctaccgttaaccgcccatctactccgagaagcctagtacctaattgaacttatcaatggagttgcgctcagcaggtgaccctgacctgccagctccggctgatggacctgggcatcccccacaggcgactgtggcccaggtcgcgtggcggccggcccactcttttgagtgggacgccttgataatgacaaggtgggaagagcctattgggctagctggtttcctccggcctcctgaatgcggctaaccctaaccccggagcatatggtggcaacccagccactggtatgtcgtaacgcgtaagtctgggatgggaccgactactttggagagtccgtgtttccattattttctttattgaatcttatggtgacaaattgggagttactcgggtgacgattgattattacttctgaaaacgtagagatatagaatcaacaca

SEQ ID NO: 22001 - DNA, 566 bp, synthetic construct
  source 1..566: mol_type = other DNA
gaaacttagaagaaagaaacaaacacgctcactaggtacactgcatccagcagtgtaatgagcaagcacttctgtttccccggaagggatatatggtacgctgtgcaaacggcggaaattaatcctaccgttaaccgcccatctactccgagaagcctagtacctaattgaacttatcaatggagttgcgctcagcaggtgaccctgacctgccagctccggctgatggacctgggcatcccccacaggcgactgtggcccaggtcgcgtggcggccggcccactcttttgagtgggacgccttgataatgacaaggtgggaagagcctattgggctagctggtttcctccggcctcctgaatgcggctaaccctaaccccggagcatatggtggcaacccagccactggtatgtcgtaacgcgtaagtctgggatgggaccgactactttggagagtccgtgtttccattattttctttattgaatcttatggtgacaaattgggagttactcgggtgacgattgattattacttctgaaaacgtagagatatagaatcaacaca

SEQ ID NO: 22002 - DNA, 516 bp, synthetic construct
  source 1..516: mol_type = other DNA
cagtgtaatgagcaagcacttctgtttccccggaagggatatatggtacgctgtgcaaacggcggaaattaatcctaccgttaaccgcccatctactccgagaagcctagtacctaattgaacttatcaatggagttgcgctcagcaggtgaccctgacctgccagctccggctgatggacctgggcatcccccacaggcgactgtggcccaggtcgcgtggcggccggcccactcttttgagtgggacgccttgataatgacaaggtgggaagagcctattgggctagctggtttcctccggcctcctgaatgcggctaaccctaaccccggagcatatggtggcaacccagccactggtatgtcgtaacgcgtaagtctgggatgggaccgactactttggagagtccgtgtttccattattttctttattgaatcttatggtgacaaattgggagttactcgggtgacgattgattattacttctgaaaacgtagagatatagaatcaacaca

SEQ ID NO: 22003 - DNA, 617 bp, synthetic construct
  source 1..617: mol_type = other DNA
tcagtggttggatgctcagtcctgagggactgtgcatccagtggttaagagccacattctttatttatcaactattgatctttgtaactaagtttaagccagagttctattatggttccacatccagtgggattcagaacaagtacttctgttaccccggtcattattagctgttaagacgtacccacgtctgaaggctgagaagatcgttacccggctgttgtctacgggaaggttagtaacttttagtgaaaggtgatttcattgatccgagaggtgaccccgacctctcagaaactagtgatgagtgtccacatccctcttatggtaacataaggtggtcgctgcgctggcactagggcccaaaaggcatgaatgaaccaagatctgattgtgaagacccaactgtgcacttcagtattcctccggcccctgaatgcggctaatcctaacccatctgcatgtgcctacaacccagtaggtagcatgtcgtaatgcgtaagagatggatggaaccgactactttgggtgaccgtgtttcttttatttttatcaagtctcttatggtcacaagcatagaaaacaagatgcctgtgatcacacgtgagacatccaat

SEQ ID NO: 22004 - DNA, 567 bp, synthetic construct
  source 1..567: mol_type = other DNA
gccacattctttatttatcaactattgatctttgtaactaagtttaagccagagttctattatggttccacatccagtgggattcagaacaagtacttctgttaccccggtcattattagctgttaagacgtacccacgtctgaaggctgagaagatcgttacccggctgttgtctacgggaaggttagtaacttttagtgaaaggtgatttcattgatccgagaggtgaccccgacctctcagaaactagtgatgagtgtccacatccctcttatggtaacataaggtggtcgctgcgctggcactagggcccaaaaggcatgaatgaaccaagatctgattgtgaagacccaactgtgcacttcagtattcctccggcccctgaatgcggctaatcctaacccatctgcatgtgcctacaacccagtaggtagcatgtcgtaatgcgtaagagatggatggaaccgactactttgggtgaccgtgtttcttttatttttatcaagtctcttatggtcacaagcatagaaaacaagatgcctgtgatcacacgtgagacatccaat

SEQ ID NO: 22005 - DNA, 517 bp, synthetic construct
  source 1..517: mol_type = other DNA
agagttctattatggttccacatccagtgggattcagaacaagtacttctgttaccccggtcattattagctgttaagacgtacccacgtctgaaggctgagaagatcgttacccggctgttgtctacgggaaggttagtaacttttagtgaaaggtgatttcattgatccgagaggtgaccccgacctctcagaaactagtgatgagtgtccacatccctcttatggtaacataaggtggtcgctgcgctggcactagggcccaaaaggcatgaatgaaccaagatctgattgtgaagacccaactgtgcacttcagtattcctccggcccctgaatgcggctaatcctaacccatctgcatgtgcctacaacccagtaggtagcatgtcgtaatgcgtaagagatggatggaaccgactactttgggtgaccgtgtttcttttatttttatcaagtctcttatggtcacaagcatagaaaacaagatgcctgtgatcacacgtgagacatccaat

SEQ ID NO: 22006 - DNA, 622 bp, synthetic construct
  source 1..622: mol_type = other DNA
gtacaccggtatctcggtacccttgtacgcctgttttatcttccctccccaaaagtaactttagaagcaagtaaactcacagctcaatagccgtcgcaccgccagtgcgactatgagcaagcactcctgtttccccggttgcgtcctatatgctgtggaaacggcagaaggggacaatatcgttacccgcttatctactacgggaagcctagtaacaccattgaacactttgagggttgcgttcagcgccaaacccggcgtagctcaggccgatggggcttcggaatccccacgggtgaccgtgtcgaagcccgcgttggcggcctgcccacaccaatgggtgtgggacgctcaatttgtgacatggtgcgaagagcctactgtgctaggtgagagtcctccggcccctgaatgtggctaatcccaaccaccgaacccgtggttgcaatccagcaactagcgggccgtaatgcgcaagtcggtgacggaaccaactactttgggtgaccgtgtttcctttatctcttatattgcaattttatggtgacatttatagtatttaagtgttaccatatattgcgcaaacatattgtaataatacagagttactactgcagaaatc

SEQ ID NO: 22007 - DNA, 572 bp, synthetic construct
  source 1..572: mol_type = other DNA
aaaagtaactttagaagcaagtaaactcacagctcaatagccgtcgcaccgccagtgcgactatgagcaagcactcctgtttccccggttgcgtcctatatgctgtggaaacggcagaaggggacaatatcgttacccgcttatctactacgggaagcctagtaacaccattgaacactttgagggttgcgttcagcgccaaacccggcgtagctcaggccgatggggcttcggaatccccacgggtgaccgtgtcgaagcccgcgttggcggcctgcccacaccaatgggtgtgggacgctcaatttgtgacatggtgcgaagagcctactgtgctaggtgagagtcctccggcccctgaatgtggctaatcccaaccaccgaacccgtggttgcaatccagcaactagcgggccgtaatgcgcaagtcggtgacggaaccaactactttgggtgaccgtgtttcctttatctcttatattgcaattttatggtgacatttatagtatttaagtgttaccatatattgcgcaaacatattgtaataatacagagttactactgcagaaatc

SEQ ID NO: 22008 - DNA, 522 bp, synthetic construct
  source 1..522: mol_type = other DNA
gccagtgcgactatgagcaagcactcctgtttccccggttgcgtcctatatgctgtggaaacggcagaaggggacaatatcgttacccgcttatctactacgggaagcctagtaacaccattgaacactttgagggttgcgttcagcgccaaacccggcgtagctcaggccgatggggcttcggaatccccacgggtgaccgtgtcgaagcccgcgttggcggcctgcccacaccaatgggtgtgggacgctcaatttgtgacatggtgcgaagagcctactgtgctaggtgagagtcctccggcccctgaatgtggctaatcccaaccaccgaacccgtggttgcaatccagcaactagcgggccgtaatgcgcaagtcggtgacggaaccaactactttgggtgaccgtgtttcctttatctcttatattgcaattttatggtgacatttatagtatttaagtgttaccatatattgcgcaaacatattgtaataatacagagttactactgcagaaatc

SEQ ID NO: 22009 - DNA, 623 bp, synthetic construct
  source 1..623: mol_type = other DNA
ttttacccccccttccccattgtaacttagaagataatcaaacagttcaatagtcgggctgccacccaggtagcttactgaacaagcacttctgttaccccggtcttagtacctgagaagctgtacccacggcggaaggggaaagtgatcgttacccggctatctacttcgagaagcctagtaacaccattgaacttgctgagtgttgcgctccacacagtaaccccctgtgtagctttggctgatgagtctgggcattccccactggcgacagtggcccaggctgcgttggcggccaaccgatccaggcaactgggtcggacgctgagtaacggacatggtgtgaagagcctattgagctagatagtagtcctccggcccctgaatgcggctaatcctaaccccggagcaggtacgcacaatccagtgtggagcctgtcgtaatgcgtaagtccgggacggaaccgactactttgggtgtccgtgtttcctgttttatttaccttggctgcttatggtgacaaactagtgttgtcatcatatagcgtttggattggccatccggttttgtacacgagtgtttcactacccgagactctatcacctctaccttattgagaaaa

SEQ ID NO: 22010 - DNA, 573 bp, synthetic construct
  source 1..573: mol_type = other DNA
tagtcgggctgccacccaggtagcttactgaacaagcacttctgttaccccggtcttagtacctgagaagctgtacccacggcggaaggggaaagtgatcgttacccggctatctacttcgagaagcctagtaacaccattgaacttgctgagtgttgcgctccacacagtaaccccctgtgtagctttggctgatgagtctgggcattccccactggcgacagtggcccaggctgcgttggcggccaaccgatccaggcaactgggtcggacgctgagtaacggacatggtgtgaagagcctattgagctagatagtagtcctccggcccctgaatgcggctaatcctaaccccggagcaggtacgcacaatccagtgtggagcctgtcgtaatgcgtaagtccgggacggaaccgactactttgggtgtccgtgtttcctgttttatttaccttggctgcttatggtgacaaactagtgttgtcatcatatagcgtttggattggccatccggttttgtacacgagtgtttcactacccgagactctatcacctctaccttattgagaaaa

SEQ ID NO: 22011 - DNA, 523 bp, synthetic construct
  source 1..523: mol_type = other DNA
cggtcttagtacctgagaagctgtacccacggcggaaggggaaagtgatcgttacccggctatctacttcgagaagcctagtaacaccattgaacttgctgagtgttgcgctccacacagtaaccccctgtgtagctttggctgatgagtctgggcattccccactggcgacagtggcccaggctgcgttggcggccaaccgatccaggcaactgggtcggacgctgagtaacggacatggtgtgaagagcctattgagctagatagtagtcctccggcccctgaatgcggctaatcctaaccccggagcaggtacgcacaatccagtgtggagcctgtcgtaatgcgtaagtccgggacggaaccgactactttgggtgtccgtgtttcctgttttatttaccttggctgcttatggtgacaaactagtgttgtcatcatatagcgtttggattggccatccggttttgtacacgagtgtttcactacccgagactctatcacctctaccttattgagaaaa

SEQ ID NO: 22012 - DNA, 625 bp, synthetic construct
  source 1..625: mol_type = other DNA
ccaagttcaatagaagggggtacaaaccagtaccaccacgaacaagcacttctgtttccccggtaaagttgcatagactgtacccacggttgaaggcgactgatccgttatccgctcttgtacttcgagaagcctagtaacatcttggaatcttcgatgcgttgcgctcatcactcaaccccagagtgtagcttaggtcgatgagtctggacattccccaccggtgacggtggtccaggctgcgttggcggcctacctgtggtccaaagccacaggacgctagttgtgaacaaggtgtgaagagcctattgagctacaagagagtcctccggcccctgaatgcggctaatctcaaccacggagcaagtgctcacaaaccagtgagtggcttgtcgtaacgggtaactctgtggcggaaccgactactttgggtgtccgtgtttccttttatttttataatggctgcttatggtgacaatcacagattgttatcataaagcgaattggattggccatccggtgaaagtgagatatattatttatctttttgttggatttactccgattacttctttcacttacaaaatcatcaccacagttttgctaattagaaatacataccata

SEQ ID NO: 22013 - DNA, 575 bp, synthetic construct
  source 1..575: mol_type = other DNA
tctgtttccccggtaaagttgcatagactgtacccacggttgaaggcgactgatccgttatccgctcttgtacttcgagaagcctagtaacatcttggaatcttcgatgcgttgcgctcatcactcaaccccagagtgtagcttaggtcgatgagtctggacattccccaccggtgacggtggtccaggctgcgttggcggcctacctgtggtccaaagccacaggacgctagttgtgaacaaggtgtgaagagcctattgagctacaagagagtcctccggcccctgaatgcggctaatctcaaccacggagcaagtgctcacaaaccagtgagtggcttgtcgtaacgggtaactctgtggcggaaccgactactttgggtgtccgtgtttccttttatttttataatggctgcttatggtgacaatcacagattgttatcataaagcgaattggattggccatccggtgaaagtgagatatattatttatctttttgttggatttactccgattacttctttcacttacaaaatcatcaccacagttttgctaattagaaatacataccata

SEQ ID NO: 22014 - DNA, 525 bp, synthetic construct
  source 1..525: mol_type = other DNA
tgatccgttatccgctcttgtacttcgagaagcctagtaacatcttggaatcttcgatgcgttgcgctcatcactcaaccccagagtgtagcttaggtcgatgagtctggacattccccaccggtgacggtggtccaggctgcgttggcggcctacctgtggtccaaagccacaggacgctagttgtgaacaaggtgtgaagagcctattgagctacaagagagtcctccggcccctgaatgcggctaatctcaaccacggagcaagtgctcacaaaccagtgagtggcttgtcgtaacgggtaactctgtggcggaaccgactactttgggtgtccgtgtttccttttatttttataatggctgcttatggtgacaatcacagattgttatcataaagcgaattggattggccatccggtgaaagtgagatatattatttatctttttgttggatttactccgattacttctttcacttacaaaatcatcaccacagttttgctaattagaaatacataccata

SEQ ID NO: 22015 - DNA, 632 bp, synthetic construct
  source 1..632: mol_type = other DNA
agaagtttgaatcatacggtcaatagacaacccagtgcaccagctgggccctgaccaagcacttctgttgccccggaccgagtatcaataagctgctcacgcggctgaaggagaaaacgttcgttacccggccatttacttcgagaaacctagtaacaccatgaaggtagcgcagcgtttcgctccgcacaaccccagtgtagatcaggtcgatgagccaccgcactccccacgggtgaccgtggcggtggctgcgttggcggcctgcccatggggcaacccatgggacgcttcaatactgacatggtgcgaagagtctattgagctaaatggtagtcctccggcccctgaatgcggctaatcccaactgcggagcagatacccacacaccagtgggcagtctgtcgtaacgggcaactctgcagcggaaccgactactttgggtgtccgtgtttccttttattctcacattgactgcttatggtgacaattgaaagattgttaccatatagctattggattggccatccagtgacaaacagagcaattgtgtatctttttgttggtttcataccactgaactgcaaagttttgaaaacccttgacctcattttgctactcaacacaacaaa

SEQ ID NO: 22016 - DNA, 582 bp, synthetic construct
  source 1..582: mol_type = other DNA
ctgaccaagcacttctgttgccccggaccgagtatcaataagctgctcacgcggctgaaggagaaaacgttcgttacccggccatttacttcgagaaacctagtaacaccatgaaggtagcgcagcgtttcgctccgcacaaccccagtgtagatcaggtcgatgagccaccgcactccccacgggtgaccgtggcggtggctgcgttggcggcctgcccatggggcaacccatgggacgcttcaatactgacatggtgcgaagagtctattgagctaaatggtagtcctccggcccctgaatgcggctaatcccaactgcggagcagatacccacacaccagtgggcagtctgtcgtaacgggcaactctgcagcggaaccgactactttgggtgtccgtgtttccttttattctcacattgactgcttatggtgacaattgaaagattgttaccatatagctattggattggccatccagtgacaaacagagcaattgtgtatctttttgttggtttcataccactgaactgcaaagttttgaaaacccttgacctcattttgctactcaacacaacaaa

SEQ ID NO: 22017 - DNA, 532 bp, synthetic construct
  source 1..532: mol_type = other DNA
gcggctgaaggagaaaacgttcgttacccggccatttacttcgagaaacctagtaacaccatgaaggtagcgcagcgtttcgctccgcacaaccccagtgtagatcaggtcgatgagccaccgcactccccacgggtgaccgtggcggtggctgcgttggcggcctgcccatggggcaacccatgggacgcttcaatactgacatggtgcgaagagtctattgagctaaatggtagtcctccggcccctgaatgcggctaatcccaactgcggagcagatacccacacaccagtgggcagtctgtcgtaacgggcaactctgcagcggaaccgactactttgggtgtccgtgtttccttttattctcacattgactgcttatggtgacaattgaaagattgttaccatatagctattggattggccatccagtgacaaacagagcaattgtgtatctttttgttggtttcataccactgaactgcaaagttttgaaaacccttgacctcattttgctactcaacacaacaaa

SEQ ID NO: 22018 - DNA, 633 bp, synthetic construct
  source 1..633: mol_type = other DNA
ggccacgcccgggccaccgatacttcccttcactccttcgggactgttggggaggaacacaacagggctcccctgttttcccattccttcccccttttcccaaccccaaccgccgtatctggtggcggcaagacacacgggtctttccctctaaagcacaattgtgtgtgtgtcccaggtcctcctgcgtacggtgcgggagtgctcccacccaactgttgtaagcctgtccaacgcgtcgtcctggcaagactatgacgtcgcatgttccgctgcggatgccgaccgggtaaccggttccccagtgtgtgtagtgcgatcttccaggtcctcctggttggcgttgtccagaaactgcttcaggtaagtggggtgtgcccaatccctacaaaggttgattctttcaccaccttaggaatgctccggaggtaccccagcaacagctgggatctgaccggaggctaattgtctacgggtggtgtttcctttttcttttcacacaactctactgctgacaactcactgactatccacttgctctcttgtgcctttctgctctggttcaagttccttgattgtttttgactgcttttcactgcttttcttctcacaatccttgctcagttcaaagtc

SEQ ID NO: 22019 - DNA, 583 bp, synthetic construct
  source 1..583: mol_type = other DNA
ggaggaacacaacagggctcccctgttttcccattccttcccccttttcccaaccccaaccgccgtatctggtggcggcaagacacacgggtctttccctctaaagcacaattgtgtgtgtgtcccaggtcctcctgcgtacggtgcgggagtgctcccacccaactgttgtaagcctgtccaacgcgtcgtcctggcaagactatgacgtcgcatgttccgctgcggatgccgaccgggtaaccggttccccagtgtgtgtagtgcgatcttccaggtcctcctggttggcgttgtccagaaactgcttcaggtaagtggggtgtgcccaatccctacaaaggttgattctttcaccaccttaggaatgctccggaggtaccccagcaacagctgggatctgaccggaggctaattgtctacgggtggtgtttcctttttcttttcacacaactctactgctgacaactcactgactatccacttgctctcttgtgcctttctgctctggttcaagttccttgattgtttttgactgcttttcactgcttttcttctcacaatccttgctcagttcaaagtc

SEQ ID NO: 22020 - DNA, 533 bp, synthetic construct
  source 1..533: mol_type = other DNA
caaccccaaccgccgtatctggtggcggcaagacacacgggtctttccctctaaagcacaattgtgtgtgtgtcccaggtcctcctgcgtacggtgcgggagtgctcccacccaactgttgtaagcctgtccaacgcgtcgtcctggcaagactatgacgtcgcatgttccgctgcggatgccgaccgggtaaccggttccccagtgtgtgtagtgcgatcttccaggtcctcctggttggcgttgtccagaaactgcttcaggtaagtggggtgtgcccaatccctacaaaggttgattctttcaccaccttaggaatgctccggaggtaccccagcaacagctgggatctgaccggaggctaattgtctacgggtggtgtttcctttttcttttcacacaactctactgctgacaactcactgactatccacttgctctcttgtgcctttctgctctggttcaagttccttgattgtttttgactgcttttcactgcttttcttctcacaatccttgctcagttcaaagtc

SEQ ID NO: 22021 - DNA, 636 bp, synthetic construct
  source 1..636: mol_type = other DNA
gtacgcctgttttatatcccttccccatgtaactttagaagcaattcacatagttcaatagagggggtacaaaccagtgccaccacgaacaagcacttctgtttccccggtgaagctgtatagactgtccccacggtcaaaaacggcagatccgttatccgctcatgtacttcgagaagcctagtagcatcttggaatcttcgatgcgttgcgttcagcactctaccccgagtgtagcttaggtcgatgagtctgggcataccccaccggcgacggtggcccaggctgcgttggcggcctacccatggctaacgccatgggacgctagttgtgaacaaggtgtgaagagcctattgagctacatgagagtcctccggcccctgaatgcggctaatcctaaccacggagcaagtactcacaacccagtgagcagcttgtcgtaacgcgtaagtctgtggcggaaccgactactttgggtgtccgtgtttccttttatttttgatatggctgcttatggtgacaatcaaagattgttatcatatagcttttggattggccatccggtgatttttgagactataacgtttacttgccttaccacacaacttagtactttgctacattcacacagtcata

SEQ ID NO: 22022 - DNA, 586 bp, synthetic construct
  source 1..586: mol_type = other DNA
tagttcaatagagggggtacaaaccagtgccaccacgaacaagcacttctgtttccccggtgaagctgtatagactgtccccacggtcaaaaacggcagatccgttatccgctcatgtacttcgagaagcctagtagcatcttggaatcttcgatgcgttgcgttcagcactctaccccgagtgtagcttaggtcgatgagtctgggcataccccaccggcgacggtggcccaggctgcgttggcggcctacccatggctaacgccatgggacgctagttgtgaacaaggtgtgaagagcctattgagctacatgagagtcctccggcccctgaatgcggctaatcctaaccacggagcaagtactcacaacccagtgagcagcttgtcgtaacgcgtaagtctgtggcggaaccgactactttgggtgtccgtgtttccttttatttttgatatggctgcttatggtgacaatcaaagattgttatcatatagcttttggattggccatccggtgatttttgagactataacgtttacttgccttaccacacaacttagtactttgctacattcacacagtcata

SEQ ID NO: 22023 - DNA, 536 bp, synthetic construct
  source 1..536: mol_type = other DNA
gtttccccggtgaagctgtatagactgtccccacggtcaaaaacggcagatccgttatccgctcatgtacttcgagaagcctagtagcatcttggaatcttcgatgcgttgcgttcagcactctaccccgagtgtagcttaggtcgatgagtctgggcataccccaccggcgacggtggcccaggctgcgttggcggcctacccatggctaacgccatgggacgctagttgtgaacaaggtgtgaagagcctattgagctacatgagagtcctccggcccctgaatgcggctaatcctaaccacggagcaagtactcacaacccagtgagcagcttgtcgtaacgcgtaagtctgtggcggaaccgactactttgggtgtccgtgtttccttttatttttgatatggctgcttatggtgacaatcaaagattgttatcatatagcttttggattggccatccggtgatttttgagactataacgtttacttgccttaccacacaacttagtactttgctacattcacacagtcata

SEQ ID NO: 22024 - DNA, 639 bp, synthetic construct
  source 1..639: mol_type = other DNA
ctttgtacgcctgttttataccccctccccaagtaactttagaagcaattcacaaagttcaatagagggggtacaaaccagtaccaccacgaacaagcacttctgtttccccggtgaagctacatagactgtccccacggtcgaaggtggcagatccgttatccgctcaagtacttcgagaagcctagtaccaccttggaatcttcgatgcgttgcgctcagcactctaccccgagtgtagcttaggtcgatgagtctgggcatgccccaccggtgacggtggcccaggctgcgttggcggcctacccgtggctaacgccatgggacgctagttgtgaacaaggtgtgaagagcctattgagctacttgagagtcctccggcccctgaatgcggctaatcctaaccacggagcaagtgctcacaaaccagtgagtggcttgtcgtaacgcgtaagtctgtggcggaaccgactactttgggtgtccgtgtttccttttattttcattatggctgcttatggtgacaatctaagattgttatcatatagcttttggattggccatccggtgatttgaaagagatatatttaccttattgttctaccatatctaattactcatcacagccacataatcaca

SEQ ID NO: 22025 - DNA, 589 bp, synthetic construct
  source 1..589: mol_type = other DNA
cacaaagttcaatagagggggtacaaaccagtaccaccacgaacaagcacttctgtttccccggtgaagctacatagactgtccccacggtcgaaggtggcagatccgttatccgctcaagtacttcgagaagcctagtaccaccttggaatcttcgatgcgttgcgctcagcactctaccccgagtgtagcttaggtcgatgagtctgggcatgccccaccggtgacggtggcccaggctgcgttggcggcctacccgtggctaacgccatgggacgctagttgtgaacaaggtgtgaagagcctattgagctacttgagagtcctccggcccctgaatgcggctaatcctaaccacggagcaagtgctcacaaaccagtgagtggcttgtcgtaacgcgtaagtctgtggcggaaccgactactttgggtgtccgtgtttccttttattttcattatggctgcttatggtgacaatctaagattgttatcatatagcttttggattggccatccggtgatttgaaagagatatatttaccttattgttctaccatatctaattactcatcacagccacataatcaca

SEQ ID NO: 22026 - DNA, 539 bp, synthetic construct
  source 1..539: mol_type = other DNA
ttctgtttccccggtgaagctacatagactgtccccacggtcgaaggtggcagatccgttatccgctcaagtacttcgagaagcctagtaccaccttggaatcttcgatgcgttgcgctcagcactctaccccgagtgtagcttaggtcgatgagtctgggcatgccccaccggtgacggtggcccaggctgcgttggcggcctacccgtggctaacgccatgggacgctagttgtgaacaaggtgtgaagagcctattgagctacttgagagtcctccggcccctgaatgcggctaatcctaaccacggagcaagtgctcacaaaccagtgagtggcttgtcgtaacgcgtaagtctgtggcggaaccgactactttgggtgtccgtgtttccttttattttcattatggctgcttatggtgacaatctaagattgttatcatatagcttttggattggccatccggtgatttgaaagagatatatttaccttattgttctaccatatctaattactcatcacagccacataatcaca

SEQ ID NO: 22027 - DNA, 639 bp, synthetic construct
  source 1..639: mol_type = other DNA
caacttagaattataactaaaccggccaatagaaagctcggcaaaccagccgagttctggtcaagcacttctgttgccccggactgagtatcaataagctgctcgcgcggctgaaggagaaaacgttcgttacccgaccaactacttcgagaaacccagtatcaccatgaaagctgcgtagcgtttcgttccgcacaaccccagtgtagatcaggccgatgagtcaccgcaatccccacgggcgaccgtggcggtggctgcgctggcggcctgcccatggggcgacccatgggacgcttcaataccgacatggtgtgaagagtctattgagctagttggtagtcctccggcccctgaatgcggctaatcccaactgcggagcagacgcttgcataccagcaagtagtctgtcgtaacgggcaactctgcagcggaaccgactactttgggtgtccgtgtttccttttattttttatactggctgcttatggtgacaattgaaagattgttgccatatagctattggattggccatccggtgacgaacagagctatcatatactcttttgttgggtttgtcccattgaactacaaggcattgaataccctcaatttcattctagcactaaatacaataaa

SEQ ID NO: 22028 - DNA, 589 bp, synthetic construct
  source 1..589: mol_type = other DNA
cgagttctggtcaagcacttctgttgccccggactgagtatcaataagctgctcgcgcggctgaaggagaaaacgttcgttacccgaccaactacttcgagaaacccagtatcaccatgaaagctgcgtagcgtttcgttccgcacaaccccagtgtagatcaggccgatgagtcaccgcaatccccacgggcgaccgtggcggtggctgcgctggcggcctgcccatggggcgacccatgggacgcttcaataccgacatggtgtgaagagtctattgagctagttggtagtcctccggcccctgaatgcggctaatcccaactgcggagcagacgcttgcataccagcaagtagtctgtcgtaacgggcaactctgcagcggaaccgactactttgggtgtccgtgtttccttttattttttatactggctgcttatggtgacaattgaaagattgttgccatatagctattggattggccatccggtgacgaacagagctatcatatactcttttgttgggtttgtcccattgaactacaaggcattgaataccctcaatttcattctagcactaaatacaataaa

SEQ ID NO: 22029 - DNA, 539 bp, synthetic construct
  source 1..539: mol_type = other DNA
gctcgcgcggctgaaggagaaaacgttcgttacccgaccaactacttcgagaaacccagtatcaccatgaaagctgcgtagcgtttcgttccgcacaaccccagtgtagatcaggccgatgagtcaccgcaatccccacgggcgaccgtggcggtggctgcgctggcggcctgcccatggggcgacccatgggacgcttcaataccgacatggtgtgaagagtctattgagctagttggtagtcctccggcccctgaatgcggctaatcccaactgcggagcagacgcttgcataccagcaagtagtctgtcgtaacgggcaactctgcagcggaaccgactactttgggtgtccgtgtttccttttattttttatactggctgcttatggtgacaattgaaagattgttgccatatagctattggattggccatccggtgacgaacagagctatcatatactcttttgttgggtttgtcccattgaactacaaggcattgaataccctcaatttcattctagcactaaatacaataaa

SEQ ID NO: 22030 - DNA, 643 bp, synthetic construct
  source 1..643: mol_type = other DNA
cagtaacttagaagtcataaactcacatgaccaatagtgggcatgacgcaccagtcatgtctcggtcaagcacttctgtctccccggactgagtatcaataagctacttgcgtggctgaaggagaaaacgttcgttatccggctaactacttcgagaagcttagtagcaccatgaaagttgcggagtgtttcgctcagcacttcccccgtgtagatcaggtcgatgagtcactgcgttcctcacgggagaccgtggcagtggctgcgttggcggcctgcctatggggcaacccataggacgctctaatatggacatggtgtgaagagcctattgagctagttagtggtcctccggcccctgaatgcggctaatcctaactgcggagcacataccctcaacccagggggcagtgtgtcgtaacgggcaactctgcagcggaaccgactactttgggagtccgtgtttccttttattcttatattggctgcttatggtgacaattgagagattgttaccatatagctactggattggccacccggtgtctaatagagccctggtttaccaatttattggatttgtgcctttatcacccacagtttattcaaccttagtatttttgatatatcttaacaataggcg

SEQ ID NO: 22031 - DNA, 593 bp, synthetic construct
  source 1..593: mol_type = other DNA
ccagtcatgtctcggtcaagcacttctgtctccccggactgagtatcaataagctacttgcgtggctgaaggagaaaacgttcgttatccggctaactacttcgagaagcttagtagcaccatgaaagttgcggagtgtttcgctcagcacttcccccgtgtagatcaggtcgatgagtcactgcgttcctcacgggagaccgtggcagtggctgcgttggcggcctgcctatggggcaacccataggacgctctaatatggacatggtgtgaagagcctattgagctagttagtggtcctccggcccctgaatgcggctaatcctaactgcggagcacataccctcaacccagggggcagtgtgtcgtaacgggcaactctgcagcggaaccgactactttgggagtccgtgtttccttttattcttatattggctgcttatggtgacaattgagagattgttaccatatagctactggattggccacccggtgtctaatagagccctggtttaccaatttattggatttgtgcctttatcacccacagtttattcaaccttagtatttttgatatatcttaacaataggcg

SEQ ID NO: 22032 - DNA, 543 bp, synthetic construct
  source 1..543: mol_type = other DNA
aagctacttgcgtggctgaaggagaaaacgttcgttatccggctaactacttcgagaagcttagtagcaccatgaaagttgcggagtgtttcgctcagcacttcccccgtgtagatcaggtcgatgagtcactgcgttcctcacgggagaccgtggcagtggctgcgttggcggcctgcctatggggcaacccataggacgctctaatatggacatggtgtgaagagcctattgagctagttagtggtcctccggcccctgaatgcggctaatcctaactgcggagcacataccctcaacccagggggcagtgtgtcgtaacgggcaactctgcagcggaaccgactactttgggagtccgtgtttccttttattcttatattggctgcttatggtgacaattgagagattgttaccatatagctactggattggccacccggtgtctaatagagccctggtttaccaatttattggatttgtgcctttatcacccacagtttattcaaccttagtatttttgatatatcttaacaataggcg

SEQ ID NO: 22033 - DNA, 643 bp, synthetic construct
  source 1..643: mol_type = other DNA
aacttagaagcaagcaaaccaagttcaatagaagggggtacaaaccagtaccaccacgaacaagcacttctgtttccccggtgaggttgcatagactgtacccacggtcaaaagcgattgatccgttatccgctctagtacttcgagaagcctagtatcaccttgggatcttcgatgcgttgcgctctgcactcgaccccggagtgtagcttaggtcgatgagtctggacacccctcaccggtgacggtggtccaggctgcgttggcggcctacctgtggcccaaagccacaggacgctagttgtgaacaaggtgtgaagagcctattgagctaccagagagtcctccggcccctgaatgcggctaatcccaaccacggagcaagtgctctcaaaccagagagtggcttgtcgtaacgcgcaagtctgtggcggaaccgactactttgggtgaccgtgtttccttttatttttatcatggctgcttatggtgacaatctcagattgttatcataaagcaaattggattagccatccggtgaaagtcaaatcgattatttacttatttattggtttttctccactaacaccacaaacacttaaaattattgaaatagtgctgctaattagataccactatcata

SEQ ID NO: 22034 - DNA, 593 bp, synthetic construct
  source 1..593: mol_type = other DNA
ccaccacgaacaagcacttctgtttccccggtgaggttgcatagactgtacccacggtcaaaagcgattgatccgttatccgctctagtacttcgagaagcctagtatcaccttgggatcttcgatgcgttgcgctctgcactcgaccccggagtgtagcttaggtcgatgagtctggacacccctcaccggtgacggtggtccaggctgcgttggcggcctacctgtggcccaaagccacaggacgctagttgtgaacaaggtgtgaagagcctattgagctaccagagagtcctccggcccctgaatgcggctaatcccaaccacggagcaagtgctctcaaaccagagagtggcttgtcgtaacgcgcaagtctgtggcggaaccgactactttgggtgaccgtgtttccttttatttttatcatggctgcttatggtgacaatctcagattgttatcataaagcaaattggattagccatccggtgaaagtcaaatcgattatttacttatttattggtttttctccactaacaccacaaacacttaaaattattgaaatagtgctgctaattagataccactatcata

SEQ ID NO: 22035 - DNA, 543 bp, synthetic construct
  source 1..543: mol_type = other DNA
cccacggtcaaaagcgattgatccgttatccgctctagtacttcgagaagcctagtatcaccttgggatcttcgatgcgttgcgctctgcactcgaccccggagtgtagcttaggtcgatgagtctggacacccctcaccggtgacggtggtccaggctgcgttggcggcctacctgtggcccaaagccacaggacgctagttgtgaacaaggtgtgaagagcctattgagctaccagagagtcctccggcccctgaatgcggctaatcccaaccacggagcaagtgctctcaaaccagagagtggcttgtcgtaacgcgcaagtctgtggcggaaccgactactttgggtgaccgtgtttccttttatttttatcatggctgcttatggtgacaatctcagattgttatcataaagcaaattggattagccatccggtgaaagtcaaatcgattatttacttatttattggtttttctccactaacaccacaaacacttaaaattattgaaatagtgctgctaattagataccactatcata

SEQ ID NO: 22036 - DNA, 644 bp, synthetic construct
  source 1..644: mol_type = other DNA
aacttagaaaacttcaaaatcaaagttcaataggagggggtacaaaccagtaccaccacgaacaagcacttctgtttccccggtgatgttgtatagactgtctccacggttgaaaacgactgatccgttatccgctctagtacttcgagaagcccagtaccaccttggaatcttcgatgcgttgcgctcagcactcaatcccagagtgtagcttaggttgatgagtctggacatccctcaccggcgacggtggtccaggctgcgttggcggcctacctgtggcccaaagccacaggacgctagttgtgaacaaggtgcgaagagcctattgagctactagagattcctccggcccctgaatgcggctaatcccaaccacggagcaggtactcacaacccagtgagcagcctgtcgtaacgcgcaagtctgtggcggaaccgactactttgggtgtccgtgtttccttttatttttatatggctgcttatggtgacaatcattgattgttatcataaagcgaattggattggccatccggtgaaagttagacttatcatttacttgtttgttggattcactcctttgactaaattcacccctgacatcatcttagttgtgatactgattaggagacttcatcata

SEQ ID NO: 22037 - DNA, 594 bp, synthetic construct
  source 1..594: mol_type = other DNA
taccaccacgaacaagcacttctgtttccccggtgatgttgtatagactgtctccacggttgaaaacgactgatccgttatccgctctagtacttcgagaagcccagtaccaccttggaatcttcgatgcgttgcgctcagcactcaatcccagagtgtagcttaggttgatgagtctggacatccctcaccggcgacggtggtccaggctgcgttggcggcctacctgtggcccaaagccacaggacgctagttgtgaacaaggtgcgaagagcctattgagctactagagattcctccggcccctgaatgcggctaatcccaaccacggagcaggtactcacaacccagtgagcagcctgtcgtaacgcgcaagtctgtggcggaaccgactactttgggtgtccgtgtttccttttatttttatatggctgcttatggtgacaatcattgattgttatcataaagcgaattggattggccatccggtgaaagttagacttatcatttacttgtttgttggattcactcctttgactaaattcacccctgacatcatcttagttgtgatactgattaggagacttcatcata

SEQ ID NO: 22038 - DNA, 544 bp, synthetic construct
  source 1..544: mol_type = other DNA
tctccacggttgaaaacgactgatccgttatccgctctagtacttcgagaagcccagtaccaccttggaatcttcgatgcgttgcgctcagcactcaatcccagagtgtagcttaggttgatgagtctggacatccctcaccggcgacggtggtccaggctgcgttggcggcctacctgtggcccaaagccacaggacgctagttgtgaacaaggtgcgaagagcctattgagctactagagattcctccggcccctgaatgcggctaatcccaaccacggagcaggtactcacaacccagtgagcagcctgtcgtaacgcgcaagtctgtggcggaaccgactactttgggtgtccgtgtttccttttatttttatatggctgcttatggtgacaatcattgattgttatcataaagcgaattggattggccatccggtgaaagttagacttatcatttacttgtttgttggattcactcctttgactaaattcacccctgacatcatcttagttgtgatactgattaggagacttcatcata

SEQ ID NO: 22039 - DNA, 645 bp, synthetic construct
  source 1..645: mol_type = other DNA
ttgaaacatagaagtgatgcgcaccattgatcaatagtaggcgtaacgcgccagttacgtctcgatcaagcacatctgtttccccggaccgagtatcaatagactgctcacgcggttgaaggagaaagcgttcgttacccggctaactacttcgagaaacccagtagcaccatggaagctgcagggtgtttcgctcagcacttcccccgtgtagatcaggtcgatgagccactgcaatccccacgggcgaccgtggcagtggctgcgttggcggcctgcctatggggagacccataggacgctctaatgtggacatggtgcgaagagtctattgagctagttagtagtcctccggcccctgaatgcggctaatcctaactgcggagcacatgccttcaacccagaaggtggtgtgtcgtaacgggcaactctgcagcggaaccgactactttgggtgtccgtgtttcctttcattcttatatcggctgcttatggtgacaattacggaattgttaccatatagctattggattggccatccggtgtgtaatagagctattatatatctgtttgttggctttgtgccattaactttaaagtctacaactactcttgattttatattgaccctcaacacagttaaac

SEQ ID NO: 22040 - DNA, 595 bp, synthetic construct
  source 1..595: mol_type = other DNA
ccagttacgtctcgatcaagcacatctgtttccccggaccgagtatcaatagactgctcacgcggttgaaggagaaagcgttcgttacccggctaactacttcgagaaacccagtagcaccatggaagctgcagggtgtttcgctcagcacttcccccgtgtagatcaggtcgatgagccactgcaatccccacgggcgaccgtggcagtggctgcgttggcggcctgcctatggggagacccataggacgctctaatgtggacatggtgcgaagagtctattgagctagttagtagtcctccggcccctgaatgcggctaatcctaactgcggagcacatgccttcaacccagaaggtggtgtgtcgtaacgggcaactctgcagcggaaccgactactttgggtgtccgtgtttcctttcattcttatatcggctgcttatggtgacaattacggaattgttaccatatagctattggattggccatccggtgtgtaatagagctattatatatctgtttgttggctttgtgccattaactttaaagtctacaactactcttgattttatattgaccctcaacacagttaaac

SEQ ID NO: 22041 - DNA, 545 bp, synthetic construct
  source 1..545: mol_type = other DNA
agactgctcacgcggttgaaggagaaagcgttcgttacccggctaactacttcgagaaacccagtagcaccatggaagctgcagggtgtttcgctcagcacttcccccgtgtagatcaggtcgatgagccactgcaatccccacgggcgaccgtggcagtggctgcgttggcggcctgcctatggggagacccataggacgctctaatgtggacatggtgcgaagagtctattgagctagttagtagtcctccggcccctgaatgcggctaatcctaactgcggagcacatgccttcaacccagaaggtggtgtgtcgtaacgggcaactctgcagcggaaccgactactttgggtgtccgtgtttcctttcattcttatatcggctgcttatggtgacaattacggaattgttaccatatagctattggattggccatccggtgtgtaatagagctattatatatctgtttgttggctttgtgccattaactttaaagtctacaactactcttgattttatattgaccctcaacacagttaaac

SEQ ID NO: 22042 - DNA, 647 bp, synthetic construct
  source 1..647: mol_type = other DNA
cccctaacgtaatttagaagcaagactttaacggtcattaggtggctcagcacaccagccgagtcaagaccaagcacttctgttaccccggactgagtatcaataagctgctcacgtggctgaaagagaaaacgttcgttacccggccaattacttcgagaaacctagtaccaccatggaggttgcgcagcgtttcgctccgcactaccccagtgtagatcaggtcgatgagtcaccgcattccccacgggcgaccgtggcggtggctgcgttggcggcctgcccatggggaaacctatgggacgcttcaatactgacatggtgtgaagagtctattgagctaattggtaatcctccggcccctgaatgcggctaatcctaactgcggagcagacacccacaagccagtgagcagtctgtcgtaacgggcaactctgcagcggaaccgactactttgggtgtccgtgtttccttttattccattactggctgcttatggtgacaattgagagattgttaccatatagctattggattggccatccggtgagcaacagagcacttatatatctctttgttggattcataccactagacaccaggagttttacgtctttggtttatattttaaggttgaacacagcaaa

SEQ ID NO: 22043 - DNA, 597 bp, synthetic construct
  source 1..597: mol_type = other DNA
cacaccagccgagtcaagaccaagcacttctgttaccccggactgagtatcaataagctgctcacgtggctgaaagagaaaacgttcgttacccggccaattacttcgagaaacctagtaccaccatggaggttgcgcagcgtttcgctccgcactaccccagtgtagatcaggtcgatgagtcaccgcattccccacgggcgaccgtggcggtggctgcgttggcggcctgcccatggggaaacctatgggacgcttcaatactgacatggtgtgaagagtctattgagctaattggtaatcctccggcccctgaatgcggctaatcctaactgcggagcagacacccacaagccagtgagcagtctgtcgtaacgggcaactctgcagcggaaccgactactttgggtgtccgtgtttccttttattccattactggctgcttatggtgacaattgagagattgttaccatatagctattggattggccatccggtgagcaacagagcacttatatatctctttgttggattcataccactagacaccaggagttttacgtctttggtttatattttaaggttgaacacagcaaa

SEQ ID NO: 22044 - DNA, 547 bp, synthetic construct
  source 1..547: mol_type = other DNA
caataagctgctcacgtggctgaaagagaaaacgttcgttacccggccaattacttcgagaaacctagtaccaccatggaggttgcgcagcgtttcgctccgcactaccccagtgtagatcaggtcgatgagtcaccgcattccccacgggcgaccgtggcggtggctgcgttggcggcctgcccatggggaaacctatgggacgcttcaatactgacatggtgtgaagagtctattgagctaattggtaatcctccggcccctgaatgcggctaatcctaactgcggagcagacacccacaagccagtgagcagtctgtcgtaacgggcaactctgcagcggaaccgactactttgggtgtccgtgtttccttttattccattactggctgcttatggtgacaattgagagattgttaccatatagctattggattggccatccggtgagcaacagagcacttatatatctctttgttggattcataccactagacaccaggagttttacgtctttggtttatattttaaggttgaacacagcaaa

SEQ ID NO: 22045 - DNA, 648 bp, synthetic construct
  source 1..648: mol_type = other DNA
tactctggtattacggtacctttgtacgcctgttttacaacccttcccccatgtaacttagaagcaacaaataaacgaccaatagcacactcaccaatccagatgagtgatggtcaagcacttctgttaccccgggcttagtaccaatagactgccatcgcggttgaaggggaaaacgctcgttatccggctctctactgcgagaagcctagtaacgccttagaaatgctcaagcgttgcgctcagcacaaccccagtgtagctcaggtcgatgagtcactgcattccccacgggcgaccgtggcagtggctgcgtttgcggcctgcctacagctctacgctgtaggacgcttgtgtatggacatggtgtgaagagcccattgcgctagggagtagtcctccggcccctgaatgcggctaatcctaaccccggagctggtgcttgtaaaccaacaagtggccagtcgtaatgggcaactctgggatggaaccgactactttgggtgtccgtgtttcctgttttatttaccttggctgcttatggtgacaatctagtgttgttgccatatagcgattggattggccatccggatattgttttagacacttgtgtttgtgagtagatctcttctgacataggatataaca

SEQ ID NO: 22046 - DNA, 598 bp, synthetic construct
  source 1..598: mol_type = other DNA
atgtaacttagaagcaacaaataaacgaccaatagcacactcaccaatccagatgagtgatggtcaagcacttctgttaccccgggcttagtaccaatagactgccatcgcggttgaaggggaaaacgctcgttatccggctctctactgcgagaagcctagtaacgccttagaaatgctcaagcgttgcgctcagcacaaccccagtgtagctcaggtcgatgagtcactgcattccccacgggcgaccgtggcagtggctgcgtttgcggcctgcctacagctctacgctgtaggacgcttgtgtatggacatggtgtgaagagcccattgcgctagggagtagtcctccggcccctgaatgcggctaatcctaaccccggagctggtgcttgtaaaccaacaagtggccagtcgtaatgggcaactctgggatggaaccgactactttgggtgtccgtgtttcctgttttatttaccttggctgcttatggtgacaatctagtgttgttgccatatagcgattggattggccatccggatattgttttagacacttgtgtttgtgagtagatctcttctgacataggatataaca

SEQ ID NO: 22047 - DNA, 548 bp, synthetic construct
  source 1..548: mol_type = other DNA
agatgagtgatggtcaagcacttctgttaccccgggcttagtaccaatagactgccatcgcggttgaaggggaaaacgctcgttatccggctctctactgcgagaagcctagtaacgccttagaaatgctcaagcgttgcgctcagcacaaccccagtgtagctcaggtcgatgagtcactgcattccccacgggcgaccgtggcagtggctgcgtttgcggcctgcctacagctctacgctgtaggacgcttgtgtatggacatggtgtgaagagcccattgcgctagggagtagtcctccggcccctgaatgcggctaatcctaaccccggagctggtgcttgtaaaccaacaagtggccagtcgtaatgggcaactctgggatggaaccgactactttgggtgtccgtgtttcctgttttatttaccttggctgcttatggtgacaatctagtgttgttgccatatagcgattggattggccatccggatattgttttagacacttgtgtttgtgagtagatctcttctgacataggatataaca

SEQ ID NO: 22048 - DNA, 648 bp, synthetic construct
  source 1..648: mol_type = other DNA
gtactctggtacttcggtacctttgtacgcctgttttatctcccttcccaatgtaatttagaagctcttaaatcaaggctcaataggcggggcgcaacccagcgctctcatgagcaagcacttctgtctccccggtgtggttgtataaactgttcccacggttgaaaacaacctatccgttatccgctatagtacttcgagaaacctagtatcacctttggattgttgacgcgttgcgctcagcacactaacccgtgtgtagcttgggtcgatgagtctggacataccccactggcgacagtggtccaggctgcgttggcggcctactcatggtgaaaaccatgagacgctaaacatgaacaaggtgtgaagagtctattgagctactatagagtcctccggcccctgaatgcggctaatcctaaccatggagcaagcgctcacaagccagtgagttgcttgtcgtaatgcgcaagtccgtggcggaaccgactactttgggtgtccgtgtttcactttttacttttatgactgcttatggtgacaatttgatattgttaccatttagcttgtcaaattaattacaaaaggttctaaatcttacttaccaacctgcattttgataaccttgatttgaaaattttaata

SEQ ID NO: 22049 - DNA, 598 bp, synthetic construct
  source 1..598: mol_type = other DNA
atgtaatttagaagctcttaaatcaaggctcaataggcggggcgcaacccagcgctctcatgagcaagcacttctgtctccccggtgtggttgtataaactgttcccacggttgaaaacaacctatccgttatccgctatagtacttcgagaaacctagtatcacctttggattgttgacgcgttgcgctcagcacactaacccgtgtgtagcttgggtcgatgagtctggacataccccactggcgacagtggtccaggctgcgttggcggcctactcatggtgaaaaccatgagacgctaaacatgaacaaggtgtgaagagtctattgagctactatagagtcctccggcccctgaatgcggctaatcctaaccatggagcaagcgctcacaagccagtgagttgcttgtcgtaatgcgcaagtccgtggcggaaccgactactttgggtgtccgtgtttcactttttacttttatgactgcttatggtgacaatttgatattgttaccatttagcttgtcaaattaattacaaaaggttctaaatcttacttaccaacctgcattttgataaccttgatttgaaaattttaata

SEQ ID NO: 22050 - DNA, 548 bp, synthetic construct
  source 1..548: mol_type = other DNA
agcgctctcatgagcaagcacttctgtctccccggtgtggttgtataaactgttcccacggttgaaaacaacctatccgttatccgctatagtacttcgagaaacctagtatcacctttggattgttgacgcgttgcgctcagcacactaacccgtgtgtagcttgggtcgatgagtctggacataccccactggcgacagtggtccaggctgcgttggcggcctactcatggtgaaaaccatgagacgctaaacatgaacaaggtgtgaagagtctattgagctactatagagtcctccggcccctgaatgcggctaatcctaaccatggagcaagcgctcacaagccagtgagttgcttgtcgtaatgcgcaagtccgtggcggaaccgactactttgggtgtccgtgtttcactttttacttttatgactgcttatggtgacaatttgatattgttaccatttagcttgtcaaattaattacaaaaggttctaaatcttacttaccaacctgcattttgataaccttgatttgaaaattttaata

SEQ ID NO: 22051 - DNA, 649 bp, synthetic construct
  source 1..649: mol_type = other DNA
actctggtatcaaggtacctttgtacgcctattttatttcccttcccccacagtaacttagaagcttatctcatagttcaacagtagggtcactaaccaagtggctcagcgaacaagcacttctgtttccccggtcctagtacctgtgaagctgtacccacggcggaaggggaaaaagatcgttatccggccccctacttcggaaagcctagtaacaccattgaagcaatcgagtgttgcgctcagcacagtaacccctgtgtagctttggttgatgagtctgggcactccccactggcgacagcggcccaggctgcgttggcggccaaccgactcgggcaaccgggtcggacgctcgtttgtggacatggtgtgaagagcctactgagctagagggtagtcctccggcccctgaatgcggataatcctaaccccggagcacccacactcaatccagagtgcaggatgtcgtaacgcgtaagtctgggacggaaccgactactttgggtgtccgtgtttcctgttttacttactttggctgcttatggtgacaatctagtgttgttaccatatagctattggattggccatccggtgttttgaattgtgtgtttatactaattcttttacatatcacagacaaccaaat

SEQ ID NO: 22052 - DNA, 599 bp, synthetic construct
  source 1..599: mol_type = other DNA
cagtaacttagaagcttatctcatagttcaacagtagggtcactaaccaagtggctcagcgaacaagcacttctgtttccccggtcctagtacctgtgaagctgtacccacggcggaaggggaaaaagatcgttatccggccccctacttcggaaagcctagtaacaccattgaagcaatcgagtgttgcgctcagcacagtaacccctgtgtagctttggttgatgagtctgggcactccccactggcgacagcggcccaggctgcgttggcggccaaccgactcgggcaaccgggtcggacgctcgtttgtggacatggtgtgaagagcctactgagctagagggtagtcctccggcccctgaatgcggataatcctaaccccggagcacccacactcaatccagagtgcaggatgtcgtaacgcgtaagtctgggacggaaccgactactttgggtgtccgtgtttcctgttttacttactttggctgcttatggtgacaatctagtgttgttaccatatagctattggattggccatccggtgttttgaattgtgtgtttatactaattcttttacatatcacagacaaccaaat

SEQ ID NO: 22053 - DNA, 549 bp, synthetic construct
  source 1..549: mol_type = other DNA
gtggctcagcgaacaagcacttctgtttccccggtcctagtacctgtgaagctgtacccacggcggaaggggaaaaagatcgttatccggccccctacttcggaaagcctagtaacaccattgaagcaatcgagtgttgcgctcagcacagtaacccctgtgtagctttggttgatgagtctgggcactccccactggcgacagcggcccaggctgcgttggcggccaaccgactcgggcaaccgggtcggacgctcgtttgtggacatggtgtgaagagcctactgagctagagggtagtcctccggcccctgaatgcggataatcctaaccccggagcacccacactcaatccagagtgcaggatgtcgtaacgcgtaagtctgggacggaaccgactactttgggtgtccgtgtttcctgttttacttactttggctgcttatggtgacaatctagtgttgttaccatatagctattggattggccatccggtgttttgaattgtgtgtttatactaattcttttacatatcacagacaaccaaat

SEQ ID NO: 22054 - DNA, 649 bp, synthetic construct
  source 1..649: mol_type = other DNA
ccccgtaacttagaagcaatcaaaccaagttcaatagaagggggtacaaaccagtaccaccacgaacaagcacttctgtttccccggtgaggttgcatagactgtacccacggttgaaagcgactaatccgttatccgctcaagtacttcgggaagcctagtaccaccttcggatcttcgatgcgttgcgctcagcactcaaccccagagtgtagcttaggctgatgagtctggacattcctcactggcgacagtggtccaggctgcgttggcggcctacctgtggcccaaagccacaggacgctagttgtgaacaaggtgtgaagagcctactgagctacttgagattcctccggcccctgaatgcggctaatcccaaccacggagcaggtggtcataaaccaatggctggcctgtcgtaatgcgcaagtctgtggcggaaccgactactttgggtgtccgtgtttccttttatcttttcattggctgcttatggtgacaatcatagattgttatcataaagcaaattggattggccatccggtgaaaatcagagcgattatatatttgtttactggatttacatcactgacaccatactctccaatactcattaggttggttttattaataaggtattattaccata

SEQ ID NO: 22055 - DNA, 599 bp, synthetic construct
  source 1..599: mol_type = other DNA
ccagtaccaccacgaacaagcacttctgtttccccggtgaggttgcatagactgtacccacggttgaaagcgactaatccgttatccgctcaagtacttcgggaagcctagtaccaccttcggatcttcgatgcgttgcgctcagcactcaaccccagagtgtagcttaggctgatgagtctggacattcctcactggcgacagtggtccaggctgcgttggcggcctacctgtggcccaaagccacaggacgctagttgtgaacaaggtgtgaagagcctactgagctacttgagattcctccggcccctgaatgcggctaatcccaaccacggagcaggtggtcataaaccaatggctggcctgtcgtaatgcgcaagtctgtggcggaaccgactactttgggtgtccgtgtttccttttatcttttcattggctgcttatggtgacaatcatagattgttatcataaagcaaattggattggccatccggtgaaaatcagagcgattatatatttgtttactggatttacatcactgacaccatactctccaatactcattaggttggttttattaataaggtattattaccata

SEQ ID NO: 22056 - DNA, 549 bp, synthetic construct
  source 1..549: mol_type = other DNA
actgtacccacggttgaaagcgactaatccgttatccgctcaagtacttcgggaagcctagtaccaccttcggatcttcgatgcgttgcgctcagcactcaaccccagagtgtagcttaggctgatgagtctggacattcctcactggcgacagtggtccaggctgcgttggcggcctacctgtggcccaaagccacaggacgctagttgtgaacaaggtgtgaagagcctactgagctacttgagattcctccggcccctgaatgcggctaatcccaaccacggagcaggtggtcataaaccaatggctggcctgtcgtaatgcgcaagtctgtggcggaaccgactactttgggtgtccgtgtttccttttatcttttcattggctgcttatggtgacaatcatagattgttatcataaagcaaattggattggccatccggtgaaaatcagagcgattatatatttgtttactggatttacatcactgacaccatactctccaatactcattaggttggttttattaataaggtattattaccata

SEQ ID NO: 22057 - DNA, 650 bp, synthetic construct
  source 1..650: mol_type = other DNA
tacactgatatcacggtacctttgtacgcctgttttatctccctacccccatcgtaacttagaagcttaacaatacagatcaatagcctctgcaccaaaccaggtgtggaatgatcaagcatttctgttaccccggacctagtaccaataggctgtgtcaaacggctgaaggggaaaaagttcgttacccggccacctacttcgagaagcctagtagcatcactgaagctgtgaagcgttacgatcagcacaaccccagtgtagttcaggtcgatgagtcactgcattccccacaggcgactgtagcagtggctgcgttggcggcctgcccttggtctctgaccaagggacgctttggagtggatatggtgcgaagagcctattgagctaggtggtagtcctccggcccctgaatgcggctaatcctaaccccggagctggtgcacacaaaccagtgtgtggccagtcgtaatgagcaattctgggatggaaccgactactttgggtgtccgtgtttcctgtttcacttaccttggctgcttatggtgacaattgtatagttgtcatcatatagctattggattggccatccggatattattcttgtgtttatttgtgtaatttgatataatttagaaccctgtataaga

SEQ ID NO: 22058 - DNA, 600 bp, synthetic construct
  source 1..600: mol_type = other DNA
atcgtaacttagaagcttaacaatacagatcaatagcctctgcaccaaaccaggtgtggaatgatcaagcatttctgttaccccggacctagtaccaataggctgtgtcaaacggctgaaggggaaaaagttcgttacccggccacctacttcgagaagcctagtagcatcactgaagctgtgaagcgttacgatcagcacaaccccagtgtagttcaggtcgatgagtcactgcattccccacaggcgactgtagcagtggctgcgttggcggcctgcccttggtctctgaccaagggacgctttggagtggatatggtgcgaagagcctattgagctaggtggtagtcctccggcccctgaatgcggctaatcctaaccccggagctggtgcacacaaaccagtgtgtggccagtcgtaatgagcaattctgggatggaaccgactactttgggtgtccgtgtttcctgtttcacttaccttggctgcttatggtgacaattgtatagttgtcatcatatagctattggattggccatccggatattattcttgtgtttatttgtgtaatttgatataatttagaaccctgtataaga

SEQ ID NO: 22059 - DNA, 550 bp, synthetic construct
  source 1..550: mol_type = other DNA
caggtgtggaatgatcaagcatttctgttaccccggacctagtaccaataggctgtgtcaaacggctgaaggggaaaaagttcgttacccggccacctacttcgagaagcctagtagcatcactgaagctgtgaagcgttacgatcagcacaaccccagtgtagttcaggtcgatgagtcactgcattccccacaggcgactgtagcagtggctgcgttggcggcctgcccttggtctctgaccaagggacgctttggagtggatatggtgcgaagagcctattgagctaggtggtagtcctccggcccctgaatgcggctaatcctaaccccggagctggtgcacacaaaccagtgtgtggccagtcgtaatgagcaattctgggatggaaccgactactttgggtgtccgtgtttcctgtttcacttaccttggctgcttatggtgacaattgtatagttgtcatcatatagctattggattggccatccggatattattcttgtgtttatttgtgtaatttgatataatttagaaccctgtataaga

SEQ ID NO: 22060 - DNA, 500 bp, synthetic construct
  source 1..500: mol_type = other DNA
ggctgtgtcaaacggctgaaggggaaaaagttcgttacccggccacctacttcgagaagcctagtagcatcactgaagctgtgaagcgttacgatcagcacaaccccagtgtagttcaggtcgatgagtcactgcattccccacaggcgactgtagcagtggctgcgttggcggcctgcccttggtctctgaccaagggacgctttggagtggatatggtgcgaagagcctattgagctaggtggtagtcctccggcccctgaatgcggctaatcctaaccccggagctggtgcacacaaaccagtgtgtggccagtcgtaatgagcaattctgggatggaaccgactactttgggtgtccgtgtttcctgtttcacttaccttggctgcttatggtgacaattgtatagttgtcatcatatagctattggattggccatccggatattattcttgtgtttatttgtgtaatttgatataatttagaaccctgtataaga

SEQ ID NO: 22061 - DNA, 652 bp, synthetic construct
  source 1..652: mol_type = other DNA
cttccccaagcagcaacttagaagcttcgcgccaccacgaccagtagtgggcgtgacacaccagtcacgttttggtcaagcacttctgtttccccggactgagtatcaatagactgctcacgcggttgaaggagaaaacgttcgttatccggccaactacttcgagaaacctagtagcatcgtggaagttgcggagtgtttcgctcagcacttcccccgtgtagatcaggtcgatgagtcactgtaaaccccacgggcgaccgtgacagtggctgcgttggcggcctgcccatggggcaacccatgggacgctctaatacagacacggtgtgaagagtctattgagctagttggtagtcctccggcccctgaatgcggctaatcctaactgcggagcgcgcaccctcaacccagggggcagtgcgtcgtaacgggtaactctgcagcggaaccgactactttgggtgtccgtgtttccttttattctctattggctgcttatggtgacaattgaaaagttgttaccatatagctattggattagccatccggtgaccaacagagctattatttacctgtttgttgggtatatccctctcactctcaaggccattcaaactcttaactatatattactccttaactgtaagag

SEQ ID NO: 22062 - DNA, 602 bp, synthetic construct
  source 1..602: mol_type = other DNA
gcgtgacacaccagtcacgttttggtcaagcacttctgtttccccggactgagtatcaatagactgctcacgcggttgaaggagaaaacgttcgttatccggccaactacttcgagaaacctagtagcatcgtggaagttgcggagtgtttcgctcagcacttcccccgtgtagatcaggtcgatgagtcactgtaaaccccacgggcgaccgtgacagtggctgcgttggcggcctgcccatggggcaacccatgggacgctctaatacagacacggtgtgaagagtctattgagctagttggtagtcctccggcccctgaatgcggctaatcctaactgcggagcgcgcaccctcaacccagggggcagtgcgtcgtaacgggtaactctgcagcggaaccgactactttgggtgtccgtgtttccttttattctctattggctgcttatggtgacaattgaaaagttgttaccatatagctattggattagccatccggtgaccaacagagctattatttacctgtttgttgggtatatccctctcactctcaaggccattcaaactcttaactatatattactccttaactgtaagag

SEQ ID NO: 22063 - DNA, 552 bp, synthetic construct
  source 1..552: mol_type = other DNA
gagtatcaatagactgctcacgcggttgaaggagaaaacgttcgttatccggccaactacttcgagaaacctagtagcatcgtggaagttgcggagtgtttcgctcagcacttcccccgtgtagatcaggtcgatgagtcactgtaaaccccacgggcgaccgtgacagtggctgcgttggcggcctgcccatggggcaacccatgggacgctctaatacagacacggtgtgaagagtctattgagctagttggtagtcctccggcccctgaatgcggctaatcctaactgcggagcgcgcaccctcaacccagggggcagtgcgtcgtaacgggtaactctgcagcggaaccgactactttgggtgtccgtgtttccttttattctctattggctgcttatggtgacaattgaaaagttgttaccatatagctattggattagccatccggtgaccaacagagctattatttacctgtttgttgggtatatccctctcactctcaaggccattcaaactcttaactatatattactccttaactgtaagag

SEQ ID NO: 22064 - DNA, 502 bp, synthetic construct
  source 1..502: mol_type = other DNA
ggccaactacttcgagaaacctagtagcatcgtggaagttgcggagtgtttcgctcagcacttcccccgtgtagatcaggtcgatgagtcactgtaaaccccacgggcgaccgtgacagtggctgcgttggcggcctgcccatggggcaacccatgggacgctctaatacagacacggtgtgaagagtctattgagctagttggtagtcctccggcccctgaatgcggctaatcctaactgcggagcgcgcaccctcaacccagggggcagtgcgtcgtaacgggtaactctgcagcggaaccgactactttgggtgtccgtgtttccttttattctctattggctgcttatggtgacaattgaaaagttgttaccatatagctattggattagccatccggtgaccaacagagctattatttacctgtttgttgggtatatccctctcactctcaaggccattcaaactcttaactatatattactccttaactgtaagag

SEQ ID NO: 22065 - DNA, 654 bp, synthetic construct
  source 1..654: mol_type = other DNA
cctcgtaacttagaagcaaacaaaccaagttcaatagaaaggggtacaaaccagtaccaccacgaacaagcacttctgttgccccggtgatgtcgtatagattgtacccacggtcgaaaacgattgatccgttatccgcttttgtacttcgagaagcctagtaccaccttggaatcttcgatgcgttgcgctcggcactcaatcccagagtgtagcttaggtcgatgagtctggacataccccaccggtgacggtggtccaggctgcgttggcggcctacctgtggcccaaagccacaggacgctagttgtgaacaaggtgtgaagagcatattgagctacaaaagagtcctccggcccctgaatgcggctaatcctaaccacggagcaagggtgcacaaaccagtgtataccttgtcgtaacgcgtaagtctgtggcggaaccgactactttgggtgtccgtgtttcctgttattttttatcatggctgcttatggtgacaatcagagattgttatcataaagcaaattggattggccatccggtgagtgttgtgtcaagtatacaactgtttgttggaaccactgtgttagcttcacttctcatttaaccaattaatcaaaaacaatacgaggataaaacaataatactaca

SEQ ID NO: 22066 - DNA, 604 bp, synthetic construct
  source 1..604: mol_type = other DNA
ccagtaccaccacgaacaagcacttctgttgccccggtgatgtcgtatagattgtacccacggtcgaaaacgattgatccgttatccgcttttgtacttcgagaagcctagtaccaccttggaatcttcgatgcgttgcgctcggcactcaatcccagagtgtagcttaggtcgatgagtctggacataccccaccggtgacggtggtccaggctgcgttggcggcctacctgtggcccaaagccacaggacgctagttgtgaacaaggtgtgaagagcatattgagctacaaaagagtcctccggcccctgaatgcggctaatcctaaccacggagcaagggtgcacaaaccagtgtataccttgtcgtaacgcgtaagtctgtggcggaaccgactactttgggtgtccgtgtttcctgttattttttatcatggctgcttatggtgacaatcagagattgttatcataaagcaaattggattggccatccggtgagtgttgtgtcaagtatacaactgtttgttggaaccactgtgttagcttcacttctcatttaaccaattaatcaaaaacaatacgaggataaaacaataatactaca

SEQ ID NO: 22067 - DNA, 554 bp, synthetic construct
  source 1..554: mol_type = other DNA
attgtacccacggtcgaaaacgattgatccgttatccgcttttgtacttcgagaagcctagtaccaccttggaatcttcgatgcgttgcgctcggcactcaatcccagagtgtagcttaggtcgatgagtctggacataccccaccggtgacggtggtccaggctgcgttggcggcctacctgtggcccaaagccacaggacgctagttgtgaacaaggtgtgaagagcatattgagctacaaaagagtcctccggcccctgaatgcggctaatcctaaccacggagcaagggtgcacaaaccagtgtataccttgtcgtaacgcgtaagtctgtggcggaaccgactactttgggtgtccgtgtttcctgttattttttatcatggctgcttatggtgacaatcagagattgttatcataaagcaaattggattggccatccggtgagtgttgtgtcaagtatacaactgtttgttggaaccactgtgttagcttcacttctcatttaaccaattaatcaaaaacaatacgaggataaaacaataatactaca

SEQ ID NO: 22068 - DNA, 504 bp, synthetic construct
  source 1..504: mol_type = other DNA
gagaagcctagtaccaccttggaatcttcgatgcgttgcgctcggcactcaatcccagagtgtagcttaggtcgatgagtctggacataccccaccggtgacggtggtccaggctgcgttggcggcctacctgtggcccaaagccacaggacgctagttgtgaacaaggtgtgaagagcatattgagctacaaaagagtcctccggcccctgaatgcggctaatcctaaccacggagcaagggtgcacaaaccagtgtataccttgtcgtaacgcgtaagtctgtggcggaaccgactactttgggtgtccgtgtttcctgttattttttatcatggctgcttatggtgacaatcagagattgttatcataaagcaaattggattggccatccggtgagtgttgtgtcaagtatacaactgtttgttggaaccactgtgttagcttcacttctcatttaaccaattaatcaaaaacaatacgaggataaaacaataatactaca

SEQ ID NO: 22069 - DNA, 654 bp, synthetic construct
  source 1..654: mol_type = other DNA
tacccctccccaaacgtaacttagaagcacatcacacatggtcaacaggtggcacagtacaccaactgggccgtgaccaagcacttctgttaccccggaccgagtatcaatagactgctcgcgcggttgaaggagaaaacgttcgttacccggccaattacttcgagaaacccagtaccaccgtgaaggttgcgcagcgtttcgctccgcacaaccccagtgtagatcaggtcgatgagccaccgcattccccacgggtgaccgtggcggtggctgcgttggcggcctgcccatggggcaacccatgggacgcttcaatactgacacggtgcgaagagtctattgagctaattggtattcctccggcccctgaatgcggctaatcctaactgcggagcagatacccacaagccagtgggcagtctgtcgtaacgggtaactctgcagcggaaccgactactttgggtgaccgtgtttccttttattcttatattggctgcttatggtgacaattgaaagattgttgccatatagctattggattggccacccagtgacaaacagagctattgtttacctatttgttggctttataccactgaatcttaaagttttagaaactctcaacctgatcttattactcaattcggtaaa

SEQ ID NO: 22070 - DNA, 604 bp, synthetic construct
  source 1..604: mol_type = other DNA
ggcacagtacaccaactgggccgtgaccaagcacttctgttaccccggaccgagtatcaatagactgctcgcgcggttgaaggagaaaacgttcgttacccggccaattacttcgagaaacccagtaccaccgtgaaggttgcgcagcgtttcgctccgcacaaccccagtgtagatcaggtcgatgagccaccgcattccccacgggtgaccgtggcggtggctgcgttggcggcctgcccatggggcaacccatgggacgcttcaatactgacacggtgcgaagagtctattgagctaattggtattcctccggcccctgaatgcggctaatcctaactgcggagcagatacccacaagccagtgggcagtctgtcgtaacgggtaactctgcagcggaaccgactactttgggtgaccgtgtttccttttattcttatattggctgcttatggtgacaattgaaagattgttgccatatagctattggattggccacccagtgacaaacagagctattgtttacctatttgttggctttataccactgaatcttaaagttttagaaactctcaacctgatcttattactcaattcggtaaa

SEQ ID NO: 22071 - DNA, 554 bp, synthetic construct
  source 1..554: mol_type = other DNA
cgagtatcaatagactgctcgcgcggttgaaggagaaaacgttcgttacccggccaattacttcgagaaacccagtaccaccgtgaaggttgcgcagcgtttcgctccgcacaaccccagtgtagatcaggtcgatgagccaccgcattccccacgggtgaccgtggcggtggctgcgttggcggcctgcccatggggcaacccatgggacgcttcaatactgacacggtgcgaagagtctattgagctaattggtattcctccggcccctgaatgcggctaatcctaactgcggagcagatacccacaagccagtgggcagtctgtcgtaacgggtaactctgcagcggaaccgactactttgggtgaccgtgtttccttttattcttatattggctgcttatggtgacaattgaaagattgttgccatatagctattggattggccacccagtgacaaacagagctattgtttacctatttgttggctttataccactgaatcttaaagttttagaaactctcaacctgatcttattactcaattcggtaaa

SEQ ID NO: 22072 - DNA, 504 bp, synthetic construct
  source 1..504: mol_type = other DNA
cggccaattacttcgagaaacccagtaccaccgtgaaggttgcgcagcgtttcgctccgcacaaccccagtgtagatcaggtcgatgagccaccgcattccccacgggtgaccgtggcggtggctgcgttggcggcctgcccatggggcaacccatgggacgcttcaatactgacacggtgcgaagagtctattgagctaattggtattcctccggcccctgaatgcggctaatcctaactgcggagcagatacccacaagccagtgggcagtctgtcgtaacgggtaactctgcagcggaaccgactactttgggtgaccgtgtttccttttattcttatattggctgcttatggtgacaattgaaagattgttgccatatagctattggattggccacccagtgacaaacagagctattgtttacctatttgttggctttataccactgaatcttaaagttttagaaactctcaacctgatcttattactcaattcggtaaa

SEQ ID NO: 22073 - DNA, 657 bp, synthetic construct
  source 1..657: mol_type = other DNA
tcccttcccccgtaacttagaagtaaataacacaagttcaatagaagggggtacaaaccagtaccaccacgaacaagcacttctgttcccccggtgaggtcacatagactgtctccacggttgaaagtgactgatccgttatccgctcttgtacttcgggaagcctagtagcatcttcggatcttcgatgcgttgcgctcagcactcaatcccagagtgtagcttaggtcgatgagtctggacatccctcactggcgacagtggtccaggctgcgttggcggcctacctgtggcccaaagccacaggacgctagttgtgaacaaggtgtgaagagcctactgagctacttgagagtcctccggcccctgaatgcggctaatcccaaccacggagcaaatgactgcaatccagcagttagtttgtcgtaatgcgtaagtctgtggcggaaccgactactttgggtgtccgtgtttccttttatattttatattggctgcttatggtgacaatcactgattgttatcataaagcgacttggattggccatccggtgaaaataagagttattatctacttatttgttggatttactccactatcaacctacacaccagagctcatacgcattgttatagtactaagaaatatacatcaca

SEQ ID NO: 22074 - DNA, 607 bp, synthetic construct
  source 1..607: mol_type = other DNA
gtacaaaccagtaccaccacgaacaagcacttctgttcccccggtgaggtcacatagactgtctccacggttgaaagtgactgatccgttatccgctcttgtacttcgggaagcctagtagcatcttcggatcttcgatgcgttgcgctcagcactcaatcccagagtgtagcttaggtcgatgagtctggacatccctcactggcgacagtggtccaggctgcgttggcggcctacctgtggcccaaagccacaggacgctagttgtgaacaaggtgtgaagagcctactgagctacttgagagtcctccggcccctgaatgcggctaatcccaaccacggagcaaatgactgcaatccagcagttagtttgtcgtaatgcgtaagtctgtggcggaaccgactactttgggtgtccgtgtttccttttatattttatattggctgcttatggtgacaatcactgattgttatcataaagcgacttggattggccatccggtgaaaataagagttattatctacttatttgttggatttactccactatcaacctacacaccagagctcatacgcattgttatagtactaagaaatatacatcaca

SEQ ID NO: 22075 - DNA, 557 bp, synthetic construct
  source 1..557: mol_type = other DNA
cacatagactgtctccacggttgaaagtgactgatccgttatccgctcttgtacttcgggaagcctagtagcatcttcggatcttcgatgcgttgcgctcagcactcaatcccagagtgtagcttaggtcgatgagtctggacatccctcactggcgacagtggtccaggctgcgttggcggcctacctgtggcccaaagccacaggacgctagttgtgaacaaggtgtgaagagcctactgagctacttgagagtcctccggcccctgaatgcggctaatcccaaccacggagcaaatgactgcaatccagcagttagtttgtcgtaatgcgtaagtctgtggcggaaccgactactttgggtgtccgtgtttccttttatattttatattggctgcttatggtgacaatcactgattgttatcataaagcgacttggattggccatccggtgaaaataagagttattatctacttatttgttggatttactccactatcaacctacacaccagagctcatacgcattgttatagtactaagaaatatacatcaca

SEQ ID NO: 22076 - DNA, 507 bp, synthetic construct
  source 1..507: mol_type = other DNA
gtacttcgggaagcctagtagcatcttcggatcttcgatgcgttgcgctcagcactcaatcccagagtgtagcttaggtcgatgagtctggacatccctcactggcgacagtggtccaggctgcgttggcggcctacctgtggcccaaagccacaggacgctagttgtgaacaaggtgtgaagagcctactgagctacttgagagtcctccggcccctgaatgcggctaatcccaaccacggagcaaatgactgcaatccagcagttagtttgtcgtaatgcgtaagtctgtggcggaaccgactactttgggtgtccgtgtttccttttatattttatattggctgcttatggtgacaatcactgattgttatcataaagcgacttggattggccatccggtgaaaataagagttattatctacttatttgttggatttactccactatcaacctacacaccagagctcatacgcattgttatagtactaagaaatatacatcaca

SEQ ID NO: 22077 - DNA, 657 bp, synthetic construct
  source 1..657: mol_type = other DNA
actctggtatcaaggtacctttgtacgcctgttttatatcccctcccccaagtaactttagaagcaattcaaacagttcaatagagggggtacaaaccagtaccaccacgaacaagcacttctgtttccccggtgaggctgtatagactgttcccacggttgaaaatggctgatccgttatccgctcatgtacttcgagaagcctagtatctccttggaatcttcgatgcgttgcgctcagcactctaccccgagtgtagcttaggctgatgagtctgggcataccccaccggtgacggtggcccaggctgcgttggcggcctacccatggctaacgccatgggacgctagttgtgaacaaggtgtgaagagcctattgagctacttgagagtcctccggcccctgaatgcggctaatcccaaccacggagcaagtgcctgcataccagcaggtagcttgtcgtaacgcgcaagtctgtggcggaaccgactactttgggtgtccgtgtttccttttattcttatcatggctgcttatggtgacaatctaagattgttatcatatagcttttggattggccatccggtgattgtttgatatttgaacacttgtttaccttatcttattacacaccaatttacatacctaacttcatt

SEQ ID NO: 22078 - DNA, 607 bp, synthetic construct
  source 1..607: mol_type = other DNA
agtaactttagaagcaattcaaacagttcaatagagggggtacaaaccagtaccaccacgaacaagcacttctgtttccccggtgaggctgtatagactgttcccacggttgaaaatggctgatccgttatccgctcatgtacttcgagaagcctagtatctccttggaatcttcgatgcgttgcgctcagcactctaccccgagtgtagcttaggctgatgagtctgggcataccccaccggtgacggtggcccaggctgcgttggcggcctacccatggctaacgccatgggacgctagttgtgaacaaggtgtgaagagcctattgagctacttgagagtcctccggcccctgaatgcggctaatcccaaccacggagcaagtgcctgcataccagcaggtagcttgtcgtaacgcgcaagtctgtggcggaaccgactactttgggtgtccgtgtttccttttattcttatcatggctgcttatggtgacaatctaagattgttatcatatagcttttggattggccatccggtgattgtttgatatttgaacacttgtttaccttatcttattacacaccaatttacatacctaacttcatt

SEQ ID NO: 22079 - DNA, 557 bp, synthetic construct
  source 1..557: mol_type = other DNA
taccaccacgaacaagcacttctgtttccccggtgaggctgtatagactgttcccacggttgaaaatggctgatccgttatccgctcatgtacttcgagaagcctagtatctccttggaatcttcgatgcgttgcgctcagcactctaccccgagtgtagcttaggctgatgagtctgggcataccccaccggtgacggtggcccaggctgcgttggcggcctacccatggctaacgccatgggacgctagttgtgaacaaggtgtgaagagcctattgagctacttgagagtcctccggcccctgaatgcggctaatcccaaccacggagcaagtgcctgcataccagcaggtagcttgtcgtaacgcgcaagtctgtggcggaaccgactactttgggtgtccgtgtttccttttattcttatcatggctgcttatggtgacaatctaagattgttatcatatagcttttggattggccatccggtgattgtttgatatttgaacacttgtttaccttatcttattacacaccaatttacatacctaacttcatt

SEQ ID NO: 22080 - DNA, 507 bp, synthetic construct
  source 1..507: mol_type = other DNA
ttcccacggttgaaaatggctgatccgttatccgctcatgtacttcgagaagcctagtatctccttggaatcttcgatgcgttgcgctcagcactctaccccgagtgtagcttaggctgatgagtctgggcataccccaccggtgacggtggcccaggctgcgttggcggcctacccatggctaacgccatgggacgctagttgtgaacaaggtgtgaagagcctattgagctacttgagagtcctccggcccctgaatgcggctaatcccaaccacggagcaagtgcctgcataccagcaggtagcttgtcgtaacgcgcaagtctgtggcggaaccgactactttgggtgtccgtgtttccttttattcttatcatggctgcttatggtgacaatctaagattgttatcatatagcttttggattggccatccggtgattgtttgatatttgaacacttgtttaccttatcttattacacaccaatttacatacctaacttcatt

SEQ ID NO: 22081 - DNA, 658 bp, synthetic construct
  source 1..658: mol_type = other DNA
tatctaccctccccccaacgcaacttagaagcataacttaaatggtcaacagataactcagtatgccaactgagccctgaccaagcacttctgttatcccggactgagtaccaataggctgctcacgcggccgaaggggaaaccgttcgttacccggccaattacttcgagaaacctagtaccaccatgaaagttgcgcagtgtttcgctccgcacaaccccagtgtagatcaggtcgatgagtcaccgcaaaccccacgggcgaccgtggcggtggctgcgttggcggcctgcccatggggcaacccatgggacgcttcaatactgacatggtgcgaagagtctattgagctaattggtagtcctccggcccctgaatgcggctaatcccaactgcggagcagatacccacacaccagcgggcagtctgtcgtaatgggcaactctgcagcggaaccgactactttgggtgtccgtgtttccttttattctcatactggctgcttatggtgacaattgagagattgttaccatatagctattggattggccatccggttacaaacagagcaattatttacttatttgttggttttgtaccactgaactacagagtcctgaaaaccctcaatctcattataacactcaatacgttaaa

SEQ ID NO: 22082 - DNA, 608 bp, synthetic construct
  source 1..608: mol_type = other DNA
agataactcagtatgccaactgagccctgaccaagcacttctgttatcccggactgagtaccaataggctgctcacgcggccgaaggggaaaccgttcgttacccggccaattacttcgagaaacctagtaccaccatgaaagttgcgcagtgtttcgctccgcacaaccccagtgtagatcaggtcgatgagtcaccgcaaaccccacgggcgaccgtggcggtggctgcgttggcggcctgcccatggggcaacccatgggacgcttcaatactgacatggtgcgaagagtctattgagctaattggtagtcctccggcccctgaatgcggctaatcccaactgcggagcagatacccacacaccagcgggcagtctgtcgtaatgggcaactctgcagcggaaccgactactttgggtgtccgtgtttccttttattctcatactggctgcttatggtgacaattgagagattgttaccatatagctattggattggccatccggttacaaacagagcaattatttacttatttgttggttttgtaccactgaactacagagtcctgaaaaccctcaatctcattataacactcaatacgttaaa

SEQ ID NO: 22083 - DNA, 558 bp, synthetic construct
  source 1..558: mol_type = other DNA
ggactgagtaccaataggctgctcacgcggccgaaggggaaaccgttcgttacccggccaattacttcgagaaacctagtaccaccatgaaagttgcgcagtgtttcgctccgcacaaccccagtgtagatcaggtcgatgagtcaccgcaaaccccacgggcgaccgtggcggtggctgcgttggcggcctgcccatggggcaacccatgggacgcttcaatactgacatggtgcgaagagtctattgagctaattggtagtcctccggcccctgaatgcggctaatcccaactgcggagcagatacccacacaccagcgggcagtctgtcgtaatgggcaactctgcagcggaaccgactactttgggtgtccgtgtttccttttattctcatactggctgcttatggtgacaattgagagattgttaccatatagctattggattggccatccggttacaaacagagcaattatttacttatttgttggttttgtaccactgaactacagagtcctgaaaaccctcaatctcattataacactcaatacgttaaa

SEQ ID NO: 22084 - DNA, 508 bp, synthetic construct
  source 1..508: mol_type = other DNA
tacccggccaattacttcgagaaacctagtaccaccatgaaagttgcgcagtgtttcgctccgcacaaccccagtgtagatcaggtcgatgagtcaccgcaaaccccacgggcgaccgtggcggtggctgcgttggcggcctgcccatggggcaacccatgggacgcttcaatactgacatggtgcgaagagtctattgagctaattggtagtcctccggcccctgaatgcggctaatcccaactgcggagcagatacccacacaccagcgggcagtctgtcgtaatgggcaactctgcagcggaaccgactactttgggtgtccgtgtttccttttattctcatactggctgcttatggtgacaattgagagattgttaccatatagctattggattggccatccggttacaaacagagcaattatttacttatttgttggttttgtaccactgaactacagagtcctgaaaaccctcaatctcattataacactcaatacgttaaa

SEQ ID NO: 22085 - DNA, 608 bp, synthetic construct
  source 1..608: mol_type = other DNA
aggaaacccagtgcaccaactggggcgcgaccaagcactcctgtaaccccggactgagtatcaataagctgcttgcgtggctgaaggagaaaacgttcgttacccggccaattacttcgagaaacctagtaccaccatgaaagttgcgcagcgtttcgctccgcacaaccccagtgtagatcaggccgatgagtcaccgcattccccacgggcgaccgtggcggtggctgcgttggcggcctgcccatgggataacccatgggacgcttcaatactgacatggtgcgaagagtctattgagctaattggtagtcctccggcccctgaatgcggctaatcctaactgcggagcagacacccacaagccagtgggcagtctgtcgtaacgggtaactctgcagcggaaccgactactttgggtgtccgtgtttccttttatttctatactggctgcttatggtgacaattgaaaggttgttaccatatagctattggattggccatccggtgtctaacagagcaatcatttatttatttgttggattcgtacccctaaatcctaaagtctttaacactctcaacttcatattacgattaaatacagcaag

SEQ ID NO: 22086 - DNA, 558 bp, synthetic construct
  source 1..558: mol_type = other DNA
ggactgagtatcaataagctgcttgcgtggctgaaggagaaaacgttcgttacccggccaattacttcgagaaacctagtaccaccatgaaagttgcgcagcgtttcgctccgcacaaccccagtgtagatcaggccgatgagtcaccgcattccccacgggcgaccgtggcggtggctgcgttggcggcctgcccatgggataacccatgggacgcttcaatactgacatggtgcgaagagtctattgagctaattggtagtcctccggcccctgaatgcggctaatcctaactgcggagcagacacccacaagccagtgggcagtctgtcgtaacgggtaactctgcagcggaaccgactactttgggtgtccgtgtttccttttatttctatactggctgcttatggtgacaattgaaaggttgttaccatatagctattggattggccatccggtgtctaacagagcaatcatttatttatttgttggattcgtacccctaaatcctaaagtctttaacactctcaacttcatattacgattaaatacagcaag

SEQ ID NO: 22087 - DNA, 508 bp, synthetic construct
  source 1..508: mol_type = other DNA
tacccggccaattacttcgagaaacctagtaccaccatgaaagttgcgcagcgtttcgctccgcacaaccccagtgtagatcaggccgatgagtcaccgcattccccacgggcgaccgtggcggtggctgcgttggcggcctgcccatgggataacccatgggacgcttcaatactgacatggtgcgaagagtctattgagctaattggtagtcctccggcccctgaatgcggctaatcctaactgcggagcagacacccacaagccagtgggcagtctgtcgtaacgggtaactctgcagcggaaccgactactttgggtgtccgtgtttccttttatttctatactggctgcttatggtgacaattgaaaggttgttaccatatagctattggattggccatccggtgtctaacagagcaatcatttatttatttgttggattcgtacccctaaatcctaaagtctttaacactctcaacttcatattacgattaaatacagcaag

SEQ ID NO: 22088 - DNA, 659 bp, synthetic construct
  source 1..659: mol_type = other DNA
tttatttacccccccccaacgtaacttagaagcacaacctaatcggtcaatagataactcagtacaccaactgagtccagaccaagcacttctgttaccccggaccgagtatcaataagctgctcgcgcggctgaaggagaaaaggttcgttacccgaccaattacttcgagaaacccagtaccaccatggaagttgcgcagtgtttcgctccgcacaaccccagtgtagatcaggtcgatgagtcaccgcgttccccacgggcgaccgtggtggtggctgcgttggcggcctgcccatgaggtaacccatgggacgcttcaatactgacatggtgcgaagagtctattgagctaattggtagtcctccggcccctgaatgcggctaatcctaactgcggagcagatacctacacgccagtaggcagtctgtcgtaatgggcaactctgcagcggaaccgactactttgggtgtccgtgtttccttttattcttacattggctgcttatggtgacaattgagagattgttaccatatagctattggattggccatccagtgacaaacagagcgatcatctacttgtttgttggttttataccactaaattacaaagtcttaaacacactcaatttcattctgtcacttaatacattgag

SEQ ID NO: 22089 - DNA, 609 bp, synthetic construct
  source 1..609: mol_type = other DNA
tagataactcagtacaccaactgagtccagaccaagcacttctgttaccccggaccgagtatcaataagctgctcgcgcggctgaaggagaaaaggttcgttacccgaccaattacttcgagaaacccagtaccaccatggaagttgcgcagtgtttcgctccgcacaaccccagtgtagatcaggtcgatgagtcaccgcgttccccacgggcgaccgtggtggtggctgcgttggcggcctgcccatgaggtaacccatgggacgcttcaatactgacatggtgcgaagagtctattgagctaattggtagtcctccggcccctgaatgcggctaatcctaactgcggagcagatacctacacgccagtaggcagtctgtcgtaatgggcaactctgcagcggaaccgactactttgggtgtccgtgtttccttttattcttacattggctgcttatggtgacaattgagagattgttaccatatagctattggattggccatccagtgacaaacagagcgatcatctacttgtttgttggttttataccactaaattacaaagtcttaaacacactcaatttcattctgtcacttaatacattgag

SEQ ID NO: 22090 - DNA, 559 bp, synthetic construct
  source 1..559: mol_type = other DNA
cggaccgagtatcaataagctgctcgcgcggctgaaggagaaaaggttcgttacccgaccaattacttcgagaaacccagtaccaccatggaagttgcgcagtgtttcgctccgcacaaccccagtgtagatcaggtcgatgagtcaccgcgttccccacgggcgaccgtggtggtggctgcgttggcggcctgcccatgaggtaacccatgggacgcttcaatactgacatggtgcgaagagtctattgagctaattggtagtcctccggcccctgaatgcggctaatcctaactgcggagcagatacctacacgccagtaggcagtctgtcgtaatgggcaactctgcagcggaaccgactactttgggtgtccgtgtttccttttattcttacattggctgcttatggtgacaattgagagattgttaccatatagctattggattggccatccagtgacaaacagagcgatcatctacttgtttgttggttttataccactaaattacaaagtcttaaacacactcaatttcattctgtcacttaatacattgag

SEQ ID NO: 22091 - DNA, 509 bp, synthetic construct
  source 1..509: mol_type = other DNA
ttacccgaccaattacttcgagaaacccagtaccaccatggaagttgcgcagtgtttcgctccgcacaaccccagtgtagatcaggtcgatgagtcaccgcgttccccacgggcgaccgtggtggtggctgcgttggcggcctgcccatgaggtaacccatgggacgcttcaatactgacatggtgcgaagagtctattgagctaattggtagtcctccggcccctgaatgcggctaatcctaactgcggagcagatacctacacgccagtaggcagtctgtcgtaatgggcaactctgcagcggaaccgactactttgggtgtccgtgtttccttttattcttacattggctgcttatggtgacaattgagagattgttaccatatagctattggattggccatccagtgacaaacagagcgatcatctacttgtttgttggttttataccactaaattacaaagtcttaaacacactcaatttcattctgtcacttaatacattgag

SEQ ID NO: 22092 - DNA, 660 bp, synthetic construct
  source 1..660: mol_type = other DNA
gtactctggtattgcggtacctttgtacgcctgttttatacccccttccccagtaactttagaagcaattcattcagttcaatagagggggtacaaaccagtaccaccacgaacaagcacttctgtttccccggtgaagccgtatagactgtacccacggttgaaaatggcagatccgttatccgctcatgtacttcgagaagcctagtatcatcttggaatcttcgatgcgttgcgctcagcactctaccccgagtgtagcttaggctgatgagtctgggcataccccaccggcgacggtggcccaggctgcgttggcggcctacccatggctaacgccatgggacgctagatgtgaacaaggtgtgaagagcctattgagctacttgagagtcctccggcccctgaatgcggctaatcctaaccacggagcaagcgcttacaaaccagtaagtagcttgtcgtaacgcgcaagtctgtggcggaaccgactactttgggtgtccgtgtttccctttatttttattgtggctgcttatggtgacaatctaagattgttatcatatagctattggattggccatccggtgatttgtcgagtttcaaacgcttgtttatttctccacaacacttgcctactcaatacatttacaaaccata

SEQ ID NO: 22093 - DNA, 610 bp, synthetic construct
  source 1..610: mol_type = other DNA
cagtaactttagaagcaattcattcagttcaatagagggggtacaaaccagtaccaccacgaacaagcacttctgtttccccggtgaagccgtatagactgtacccacggttgaaaatggcagatccgttatccgctcatgtacttcgagaagcctagtatcatcttggaatcttcgatgcgttgcgctcagcactctaccccgagtgtagcttaggctgatgagtctgggcataccccaccggcgacggtggcccaggctgcgttggcggcctacccatggctaacgccatgggacgctagatgtgaacaaggtgtgaagagcctattgagctacttgagagtcctccggcccctgaatgcggctaatcctaaccacggagcaagcgcttacaaaccagtaagtagcttgtcgtaacgcgcaagtctgtggcggaaccgactactttgggtgtccgtgtttccctttatttttattgtggctgcttatggtgacaatctaagattgttatcatatagctattggattggccatccggtgatttgtcgagtttcaaacgcttgtttatttctccacaacacttgcctactcaatacatttacaaaccata

SEQ ID NO: 22094 - DNA, 560 bp, synthetic construct
  source 1..560: mol_type = other DNA
gtaccaccacgaacaagcacttctgtttccccggtgaagccgtatagactgtacccacggttgaaaatggcagatccgttatccgctcatgtacttcgagaagcctagtatcatcttggaatcttcgatgcgttgcgctcagcactctaccccgagtgtagcttaggctgatgagtctgggcataccccaccggcgacggtggcccaggctgcgttggcggcctacccatggctaacgccatgggacgctagatgtgaacaaggtgtgaagagcctattgagctacttgagagtcctccggcccctgaatgcggctaatcctaaccacggagcaagcgcttacaaaccagtaagtagcttgtcgtaacgcgcaagtctgtggcggaaccgactactttgggtgtccgtgtttccctttatttttattgtggctgcttatggtgacaatctaagattgttatcatatagctattggattggccatccggtgatttgtcgagtttcaaacgcttgtttatttctccacaacacttgcctactcaatacatttacaaaccata

SEQ ID NO: 22095 - DNA, 510 bp, synthetic construct
  source 1..510: mol_type = other DNA
gtacccacggttgaaaatggcagatccgttatccgctcatgtacttcgagaagcctagtatcatcttggaatcttcgatgcgttgcgctcagcactctaccccgagtgtagcttaggctgatgagtctgggcataccccaccggcgacggtggcccaggctgcgttggcggcctacccatggctaacgccatgggacgctagatgtgaacaaggtgtgaagagcctattgagctacttgagagtcctccggcccctgaatgcggctaatcctaaccacggagcaagcgcttacaaaccagtaagtagcttgtcgtaacgcgcaagtctgtggcggaaccgactactttgggtgtccgtgtttccctttatttttattgtggctgcttatggtgacaatctaagattgttatcatatagctattggattggccatccggtgatttgtcgagtttcaaacgcttgtttatttctccacaacacttgcctactcaatacatttacaaaccata

SEQ ID NO: 22096 - DNA, 660 bp, synthetic construct
  source 1..660: mol_type = other DNA
tatttctgggtcttcggtacctttgtacgcctgttttatctccctccccaatgtaacttagaagctttcaaatcaaagctcaataggtggagcgcaaaccagcgctttcgtgagcaagcactcctgtttccccggtgcggttgtatagactgttcccacggttgaaaacaacctatccgttatccgctatagtacttcgagaaacctagtatcacctttggattgttgatgcgttgcgctcaacacactaacccgtgtgtagcttgggtcgatgagtctggacataccccactggtaacagtggtccaggctgcgttggcggcctactcatggtgaaaaccatgagacgctagacatgaacaaggtgtgaagagtctattgagctactatagagtcctccggcccctgaatgcggctaatcttaaccatggagcaagtgctcacaaaccagtgagttgcttgtcgtaatgcgcaagtccgtggcggaaccgactactttgggtgtccgtgtttcactttttacttttatgactgcttatggtgacaatttaatattgttaccattcagctagtcgaaataatcgcataaaactttaaatcctatctaacaattcacatttggatagtttcattttgaggactttaaacctacttacaaag

SEQ ID NO: 22097 - DNA, 610 bp, synthetic construct
  source 1..610: mol_type = other DNA
atgtaacttagaagctttcaaatcaaagctcaataggtggagcgcaaaccagcgctttcgtgagcaagcactcctgtttccccggtgcggttgtatagactgttcccacggttgaaaacaacctatccgttatccgctatagtacttcgagaaacctagtatcacctttggattgttgatgcgttgcgctcaacacactaacccgtgtgtagcttgggtcgatgagtctggacataccccactggtaacagtggtccaggctgcgttggcggcctactcatggtgaaaaccatgagacgctagacatgaacaaggtgtgaagagtctattgagctactatagagtcctccggcccctgaatgcggctaatcttaaccatggagcaagtgctcacaaaccagtgagttgcttgtcgtaatgcgcaagtccgtggcggaaccgactactttgggtgtccgtgtttcactttttacttttatgactgcttatggtgacaatttaatattgttaccattcagctagtcgaaataatcgcataaaactttaaatcctatctaacaattcacatttggatagtttcattttgaggactttaaacctacttacaaag

SEQ ID NO: 22098 - DNA, 560 bp, synthetic construct
  source 1..560: mol_type = other DNA
agcgctttcgtgagcaagcactcctgtttccccggtgcggttgtatagactgttcccacggttgaaaacaacctatccgttatccgctatagtacttcgagaaacctagtatcacctttggattgttgatgcgttgcgctcaacacactaacccgtgtgtagcttgggtcgatgagtctggacataccccactggtaacagtggtccaggctgcgttggcggcctactcatggtgaaaaccatgagacgctagacatgaacaaggtgtgaagagtctattgagctactatagagtcctccggcccctgaatgcggctaatcttaaccatggagcaagtgctcacaaaccagtgagttgcttgtcgtaatgcgcaagtccgtggcggaaccgactactttgggtgtccgtgtttcactttttacttttatgactgcttatggtgacaatttaatattgttaccattcagctagtcgaaataatcgcataaaactttaaatcctatctaacaattcacatttggatagtttcattttgaggactttaaacctacttacaaag

SEQ ID NO: 22099 - DNA, 510 bp, synthetic construct
  source 1..510: mol_type = other DNA
tgttcccacggttgaaaacaacctatccgttatccgctatagtacttcgagaaacctagtatcacctttggattgttgatgcgttgcgctcaacacactaacccgtgtgtagcttgggtcgatgagtctggacataccccactggtaacagtggtccaggctgcgttggcggcctactcatggtgaaaaccatgagacgctagacatgaacaaggtgtgaagagtctattgagctactatagagtcctccggcccctgaatgcggctaatcttaaccatggagcaagtgctcacaaaccagtgagttgcttgtcgtaatgcgcaagtccgtggcggaaccgactactttgggtgtccgtgtttcactttttacttttatgactgcttatggtgacaatttaatattgttaccattcagctagtcgaaataatcgcataaaactttaaatcctatctaacaattcacatttggatagtttcattttgaggactttaaacctacttacaaag

SEQ ID NO: 22100 - DNA, 661 bp, synthetic construct
  source 1..661: mol_type = other DNA
gtactctggtatcgaggtacctttgtacgcctgttttacaccccttcccctgtgcaactttagaagcaaatcacaaagttcaatagagggggtgcaaaccagcaccaccacgaacaagcacttctgtttccccggtgatgctgtatagactgttcccacggtcaaaaatggcagatccgttatccgcttgagtacttcgagaagcctagtaccaccttggaatcttcgatgtgttgcgctcagcactctaccccgagtgtagcttaggctgatgagtctgggcataccccaccggcgacggtggcccaggctgcgttggcggcctacccatggctaacgccatgggacgctagttgtgaacaaggtgtgaagagcctattgagctactcaagagtcctccggcccctgaatgcggctaatcctaaccacggagcaagtactcacaaaccagtgagcggcttgtcgtaacgcgtaagtctgtggcggaaccgactactttgggtgtccgtgtttccttttatttttattgtggctgcttatggtgacaatctaagattgttatcatatagcttttggattggccatccggtgattgttgagattatattactcatttgttttactacggttcttgcccaattgttacatttgcactaacata

SEQ ID NO: 22101 - DNA, 611 bp, synthetic construct
  source 1..611: mol_type = other DNA
tgtgcaactttagaagcaaatcacaaagttcaatagagggggtgcaaaccagcaccaccacgaacaagcacttctgtttccccggtgatgctgtatagactgttcccacggtcaaaaatggcagatccgttatccgcttgagtacttcgagaagcctagtaccaccttggaatcttcgatgtgttgcgctcagcactctaccccgagtgtagcttaggctgatgagtctgggcataccccaccggcgacggtggcccaggctgcgttggcggcctacccatggctaacgccatgggacgctagttgtgaacaaggtgtgaagagcctattgagctactcaagagtcctccggcccctgaatgcggctaatcctaaccacggagcaagtactcacaaaccagtgagcggcttgtcgtaacgcgtaagtctgtggcggaaccgactactttgggtgtccgtgtttccttttatttttattgtggctgcttatggtgacaatctaagattgttatcatatagcttttggattggccatccggtgattgttgagattatattactcatttgttttactacggttcttgcccaattgttacatttgcactaacata

SEQ ID NO: 22102 - DNA, 561 bp, synthetic construct
  source 1..561: mol_type = other DNA
agcaccaccacgaacaagcacttctgtttccccggtgatgctgtatagactgttcccacggtcaaaaatggcagatccgttatccgcttgagtacttcgagaagcctagtaccaccttggaatcttcgatgtgttgcgctcagcactctaccccgagtgtagcttaggctgatgagtctgggcataccccaccggcgacggtggcccaggctgcgttggcggcctacccatggctaacgccatgggacgctagttgtgaacaaggtgtgaagagcctattgagctactcaagagtcctccggcccctgaatgcggctaatcctaaccacggagcaagtactcacaaaccagtgagcggcttgtcgtaacgcgtaagtctgtggcggaaccgactactttgggtgtccgtgtttccttttatttttattgtggctgcttatggtgacaatctaagattgttatcatatagcttttggattggccatccggtgattgttgagattatattactcatttgttttactacggttcttgcccaattgttacatttgcactaacata

SEQ ID NO: 22103 - DNA, 511 bp, synthetic construct
  source 1..511: mol_type = other DNA
tgttcccacggtcaaaaatggcagatccgttatccgcttgagtacttcgagaagcctagtaccaccttggaatcttcgatgtgttgcgctcagcactctaccccgagtgtagcttaggctgatgagtctgggcataccccaccggcgacggtggcccaggctgcgttggcggcctacccatggctaacgccatgggacgctagttgtgaacaaggtgtgaagagcctattgagctactcaagagtcctccggcccctgaatgcggctaatcctaaccacggagcaagtactcacaaaccagtgagcggcttgtcgtaacgcgtaagtctgtggcggaaccgactactttgggtgtccgtgtttccttttatttttattgtggctgcttatggtgacaatctaagattgttatcatatagcttttggattggccatccggtgattgttgagattatattactcatttgttttactacggttcttgcccaattgttacatttgcactaacata

SEQ ID NO: 22104 - DNA, 661 bp, synthetic construct
  source 1..661: mol_type = other DNA
gtacactggtatcacggtacctttgtacgcctgttttatatcccctcccccatgcaactttagaagtaattcaaatagttcaatagagggggtacaaaccagtaccaccacgaacaagcacttctgtttccccggtgaggctatatagactgttcccacggtcgaaggtggctgatccgttatccgcttgagtacttcgagaagcctagtaccacctttggatcttcgatgcgttgcgctcagcactctaccccgagtgtagcttaggctgatgagtctgggcataccccaccggcgacggtggcccaggctgcgttggcggcctacccgtggctaacgccatgggacgctagttgtgaacaaggtgtgaagagcctattgagctacttaagagtcctccggcccctgaatgcggctaatcccaaccacggagcaagtgctcacaaaccagtgggtggcttgtcgtaacgcgcaagtctgtggcggaaccgactactttgggtgtccgtgtttccttttatttttatcatggctgcttatggtgacaatctaagattgttgtcatatagcgtttggattggccatccggtgacttcgaaagcgatatatttgactcattgtcttactgaatttacctatttattacacttgtataacaata

SEQ ID NO: 22105 - DNA, 611 bp, synthetic construct
  source 1..611: mol_type = other DNA
catgcaactttagaagtaattcaaatagttcaatagagggggtacaaaccagtaccaccacgaacaagcacttctgtttccccggtgaggctatatagactgttcccacggtcgaaggtggctgatccgttatccgcttgagtacttcgagaagcctagtaccacctttggatcttcgatgcgttgcgctcagcactctaccccgagtgtagcttaggctgatgagtctgggcataccccaccggcgacggtggcccaggctgcgttggcggcctacccgtggctaacgccatgggacgctagttgtgaacaaggtgtgaagagcctattgagctacttaagagtcctccggcccctgaatgcggctaatcccaaccacggagcaagtgctcacaaaccagtgggtggcttgtcgtaacgcgcaagtctgtggcggaaccgactactttgggtgtccgtgtttccttttatttttatcatggctgcttatggtgacaatctaagattgttgtcatatagcgtttggattggccatccggtgacttcgaaagcgatatatttgactcattgtcttactgaatttacctatttattacacttgtataacaata

SEQ ID NO: 22106 - DNA, 561 bp, synthetic construct
  source 1..561: mol_type = other DNA
agtaccaccacgaacaagcacttctgtttccccggtgaggctatatagactgttcccacggtcgaaggtggctgatccgttatccgcttgagtacttcgagaagcctagtaccacctttggatcttcgatgcgttgcgctcagcactctaccccgagtgtagcttaggctgatgagtctgggcataccccaccggcgacggtggcccaggctgcgttggcggcctacccgtggctaacgccatgggacgctagttgtgaacaaggtgtgaagagcctattgagctacttaagagtcctccggcccctgaatgcggctaatcccaaccacggagcaagtgctcacaaaccagtgggtggcttgtcgtaacgcgcaagtctgtggcggaaccgactactttgggtgtccgtgtttccttttatttttatcatggctgcttatggtgacaatctaagattgttgtcatatagcgtttggattggccatccggtgacttcgaaagcgatatatttgactcattgtcttactgaatttacctatttattacacttgtataacaata

SEQ ID NO: 22107 - DNA, 511 bp, synthetic construct
  source 1..511: mol_type = other DNA
tgttcccacggtcgaaggtggctgatccgttatccgcttgagtacttcgagaagcctagtaccacctttggatcttcgatgcgttgcgctcagcactctaccccgagtgtagcttaggctgatgagtctgggcataccccaccggcgacggtggcccaggctgcgttggcggcctacccgtggctaacgccatgggacgctagttgtgaacaaggtgtgaagagcctattgagctacttaagagtcctccggcccctgaatgcggctaatcccaaccacggagcaagtgctcacaaaccagtgggtggcttgtcgtaacgcgcaagtctgtggcggaaccgactactttgggtgtccgtgtttccttttatttttatcatggctgcttatggtgacaatctaagattgttgtcatatagcgtttggattggccatccggtgacttcgaaagcgatatatttgactcattgtcttactgaatttacctatttattacacttgtataacaata

SEQ ID NO: 22108 - DNA, 661 bp, synthetic construct
  source 1..661: mol_type = other DNA
gtactctggtattgcggtacctttgtacgcctgttttatatcccctccccaagtaactttagaagcaattcacaaagttcaatagagggggtacaaaccagtaccaccatgaacaagcacttctgtttccccggtgaagctgtatagactgttcccacggtcgaaaatggcagatccgttatccgctcacgtacttcgagaagcctagtatcatcttggaatcttcgacgcgttgcgctcagcactctaccccgagtgtagcttaggccgatgagtctgggcataccccaccggcgacggtggcccaggctgcgttggcggcctacccatggctaatgtcatgggacgctagttgtgaacaaggtgtgaagagcctattgagctacttgagagtcctccggcccctgaatgcggctaatcctaaccatggagcaagtgcccacaagccagtgggtggcttgtcgtaatgcgcaagtctatggcggaaccgactactttgggtgtccgtgtttccttttattcttattatggctgcttatggtgacaacctaagattgttgtcatatagcttttggattggccatccggtgatctttgagattaatataccttccttattacttcatagtactcatttattcattacactactgtagttaca

SEQ ID NO: 22109 - DNA, 611 bp, synthetic construct
  source 1..611: mol_type = other DNA
aagtaactttagaagcaattcacaaagttcaatagagggggtacaaaccagtaccaccatgaacaagcacttctgtttccccggtgaagctgtatagactgttcccacggtcgaaaatggcagatccgttatccgctcacgtacttcgagaagcctagtatcatcttggaatcttcgacgcgttgcgctcagcactctaccccgagtgtagcttaggccgatgagtctgggcataccccaccggcgacggtggcccaggctgcgttggcggcctacccatggctaatgtcatgggacgctagttgtgaacaaggtgtgaagagcctattgagctacttgagagtcctccggcccctgaatgcggctaatcctaaccatggagcaagtgcccacaagccagtgggtggcttgtcgtaatgcgcaagtctatggcggaaccgactactttgggtgtccgtgtttccttttattcttattatggctgcttatggtgacaacctaagattgttgtcatatagcttttggattggccatccggtgatctttgagattaatataccttccttattacttcatagtactcatttattcattacactactgtagttaca

SEQ ID NO: 22110 - DNA, 561 bp, synthetic construct
  source 1..561: mol_type = other DNA
gtaccaccatgaacaagcacttctgtttccccggtgaagctgtatagactgttcccacggtcgaaaatggcagatccgttatccgctcacgtacttcgagaagcctagtatcatcttggaatcttcgacgcgttgcgctcagcactctaccccgagtgtagcttaggccgatgagtctgggcataccccaccggcgacggtggcccaggctgcgttggcggcctacccatggctaatgtcatgggacgctagttgtgaacaaggtgtgaagagcctattgagctacttgagagtcctccggcccctgaatgcggctaatcctaaccatggagcaagtgcccacaagccagtgggtggcttgtcgtaatgcgcaagtctatggcggaaccgactactttgggtgtccgtgtttccttttattcttattatggctgcttatggtgacaacctaagattgttgtcatatagcttttggattggccatccggtgatctttgagattaatataccttccttattacttcatagtactcatttattcattacactactgtagttaca

SEQ ID NO: 22111 - DNA, 511 bp, synthetic construct
  source 1..511: mol_type = other DNA
gttcccacggtcgaaaatggcagatccgttatccgctcacgtacttcgagaagcctagtatcatcttggaatcttcgacgcgttgcgctcagcactctaccccgagtgtagcttaggccgatgagtctgggcataccccaccggcgacggtggcccaggctgcgttggcggcctacccatggctaatgtcatgggacgctagttgtgaacaaggtgtgaagagcctattgagctacttgagagtcctccggcccctgaatgcggctaatcctaaccatggagcaagtgcccacaagccagtgggtggcttgtcgtaatgcgcaagtctatggcggaaccgactactttgggtgtccgtgtttccttttattcttattatggctgcttatggtgacaacctaagattgttgtcatatagcttttggattggccatccggtgatctttgagattaatataccttccttattacttcatagtactcatttattcattacactactgtagttaca

SEQ ID NO: 22112 - DNA, 661 bp, synthetic construct
  source 1..661: mol_type = other DNA
gtactctggtatttcggtacccttgtacgcctgttttatctccctccccaatgtaacttagaagctttcaaatcaaagctcaataggtggagcgcaagccagcgcttccgtgagcaagcactcctgtttccccggtgcggttgtatagactgttcccacggttgaaaacaacctatccgttatccgctatagtacttcgagaaacctagtatcacctttggattgttgatgcgttgcgctcagcacactaacccgtgtgtagcttgggtcgatgagtctggacataccccactggtgacagtggtccaggctgcgttggcggcctactcatggtgaaaaccatgagacgctagacatgaacaaggtgtgaagagtctattgagctactatagagtcctccggcccctgaatgcggctaatcttaaccatggagcaagtgctcacaaaccagtgagttgcttgtcgtaatgcgcaagtccgtggcggaaccgactactttgggtgtccgtgtttcactttttacttttatgactgcttatggtgacaatttaatattgttaccatttagctagtcaaattaatcacataaaaactttaaatcctatctaacaattcacatttggatagcttcattttgaggactttaaacctatttacaaag

SEQ ID NO: 22113 - DNA, 611 bp, synthetic construct
  source 1..611: mol_type = other DNA
atgtaacttagaagctttcaaatcaaagctcaataggtggagcgcaagccagcgcttccgtgagcaagcactcctgtttccccggtgcggttgtatagactgttcccacggttgaaaacaacctatccgttatccgctatagtacttcgagaaacctagtatcacctttggattgttgatgcgttgcgctcagcacactaacccgtgtgtagcttgggtcgatgagtctggacataccccactggtgacagtggtccaggctgcgttggcggcctactcatggtgaaaaccatgagacgctagacatgaacaaggtgtgaagagtctattgagctactatagagtcctccggcccctgaatgcggctaatcttaaccatggagcaagtgctcacaaaccagtgagttgcttgtcgtaatgcgcaagtccgtggcggaaccgactactttgggtgtccgtgtttcactttttacttttatgactgcttatggtgacaatttaatattgttaccatttagctagtcaaattaatcacataaaaactttaaatcctatctaacaattcacatttggatagcttcattttgaggactttaaacctatttacaaag

SEQ ID NO: 22114 - DNA, 561 bp, synthetic construct
  source 1..561: mol_type = other DNA
agcgcttccgtgagcaagcactcctgtttccccggtgcggttgtatagactgttcccacggttgaaaacaacctatccgttatccgctatagtacttcgagaaacctagtatcacctttggattgttgatgcgttgcgctcagcacactaacccgtgtgtagcttgggtcgatgagtctggacataccccactggtgacagtggtccaggctgcgttggcggcctactcatggtgaaaaccatgagacgctagacatgaacaaggtgtgaagagtctattgagctactatagagtcctccggcccctgaatgcggctaatcttaaccatggagcaagtgctcacaaaccagtgagttgcttgtcgtaatgcgcaagtccgtggcggaaccgactactttgggtgtccgtgtttcactttttacttttatgactgcttatggtgacaatttaatattgttaccatttagctagtcaaattaatcacataaaaactttaaatcctatctaacaattcacatttggatagcttcattttgaggactttaaacctatttacaaag

SEQ ID NO: 22115 - DNA, 511 bp, synthetic construct
  source 1..511: mol_type = other DNA
tgttcccacggttgaaaacaacctatccgttatccgctatagtacttcgagaaacctagtatcacctttggattgttgatgcgttgcgctcagcacactaacccgtgtgtagcttgggtcgatgagtctggacataccccactggtgacagtggtccaggctgcgttggcggcctactcatggtgaaaaccatgagacgctagacatgaacaaggtgtgaagagtctattgagctactatagagtcctccggcccctgaatgcggctaatcttaaccatggagcaagtgctcacaaaccagtgagttgcttgtcgtaatgcgcaagtccgtggcggaaccgactactttgggtgtccgtgtttcactttttacttttatgactgcttatggtgacaatttaatattgttaccatttagctagtcaaattaatcacataaaaactttaaatcctatctaacaattcacatttggatagcttcattttgaggactttaaacctatttacaaag

SEQ ID NO: 22116 - DNA, 661 bp, synthetic construct
  source 1..661: mol_type = other DNA
gttttatttccccatccccgccgtaacttagaagtctcacttaagcggtcaatagatagcccagtaaaccaactgggttccgaccaggcacttctgttaccccggaccgagtatcaataggctactcacgtggccgaaggagaaaacgttcgttacccggccaattacttcgagaaacttagtaacaccatggaagttgcgcagtgtttcgctccgcacaaccccagtgtagatcaggtcgatgagtcaccgcgtaccccacgggcgaccgtggcggtggctgcgttggcggcctgcccatggggcaacccatgggacgcttcaataccgacatggtgcgaagagtctattgagctaattggtagtcctccggcccctgaatgcggctaatcctaactgcggagcagacgcctacgaaccagtgggtagtctgtcgtaacgggcaactctgcagcggaaccgactactttgggtgtccgtgtttccttttattcttacactggctgcttatggtgacaattgagagattgttaccatatagctattggattggccatccggtgacaaacagagctattgtttatctatttattggtttcataccactaaacttcaaggtcctaggaaccctcaatttaatattactacttaatagtgcaaa

SEQ ID NO: 22117 - DNA, 611 bp, synthetic construct
  source 1..611: mol_type = other DNA
aatagatagcccagtaaaccaactgggttccgaccaggcacttctgttaccccggaccgagtatcaataggctactcacgtggccgaaggagaaaacgttcgttacccggccaattacttcgagaaacttagtaacaccatggaagttgcgcagtgtttcgctccgcacaaccccagtgtagatcaggtcgatgagtcaccgcgtaccccacgggcgaccgtggcggtggctgcgttggcggcctgcccatggggcaacccatgggacgcttcaataccgacatggtgcgaagagtctattgagctaattggtagtcctccggcccctgaatgcggctaatcctaactgcggagcagacgcctacgaaccagtgggtagtctgtcgtaacgggcaactctgcagcggaaccgactactttgggtgtccgtgtttccttttattcttacactggctgcttatggtgacaattgagagattgttaccatatagctattggattggccatccggtgacaaacagagctattgtttatctatttattggtttcataccactaaacttcaaggtcctaggaaccctcaatttaatattactacttaatagtgcaaa

SEQ ID NO: 22118 - DNA, 561 bp, synthetic construct
  source 1..561: mol_type = other DNA
cccggaccgagtatcaataggctactcacgtggccgaaggagaaaacgttcgttacccggccaattacttcgagaaacttagtaacaccatggaagttgcgcagtgtttcgctccgcacaaccccagtgtagatcaggtcgatgagtcaccgcgtaccccacgggcgaccgtggcggtggctgcgttggcggcctgcccatggggcaacccatgggacgcttcaataccgacatggtgcgaagagtctattgagctaattggtagtcctccggcccctgaatgcggctaatcctaactgcggagcagacgcctacgaaccagtgggtagtctgtcgtaacgggcaactctgcagcggaaccgactactttgggtgtccgtgtttccttttattcttacactggctgcttatggtgacaattgagagattgttaccatatagctattggattggccatccggtgacaaacagagctattgtttatctatttattggtttcataccactaaacttcaaggtcctaggaaccctcaatttaatattactacttaatagtgcaaa

SEQ ID NO: 22119 - DNA, 511 bp, synthetic construct
  source 1..511: mol_type = other DNA
cgttacccggccaattacttcgagaaacttagtaacaccatggaagttgcgcagtgtttcgctccgcacaaccccagtgtagatcaggtcgatgagtcaccgcgtaccccacgggcgaccgtggcggtggctgcgttggcggcctgcccatggggcaacccatgggacgcttcaataccgacatggtgcgaagagtctattgagctaattggtagtcctccggcccctgaatgcggctaatcctaactgcggagcagacgcctacgaaccagtgggtagtctgtcgtaacgggcaactctgcagcggaaccgactactttgggtgtccgtgtttccttttattcttacactggctgcttatggtgacaattgagagattgttaccatatagctattggattggccatccggtgacaaacagagctattgtttatctatttattggtttcataccactaaacttcaaggtcctaggaaccctcaatttaatattactacttaatagtgcaaa

SEQ ID NO: 22120 - DNA, 662 bp, synthetic construct
  source 1..662: mol_type = other DNA
cttcttcggaacctgttcggaggaattaaatgggcacccactcacccttcccctcttctcgtaactaagtgtgtgcccaatctcttgactcctactggctccaccgaccggtagtgtccaaaatgctaggtggacttcctcccttcccttctgggcatcttgcccagcttcctccccccagcctgacgtgtcacaggctgtgcaaagaccccgcgaaagctgccaaaagtggcaattgtgggtcccccctttgtcaaggcgtcgagtctttctcccttaaggctagtcccatcagtgaattctgatgggcaactagtgacgccactgcatgcctccgacctcggccgcggagtgctgccccccaagtcgtgcccctgaccacaagttgtgctgtctggcaaacattgtctgtgagaatgttccgctgtggctgccaagcctggtaacaggctgccccagtgtgcgtagttctcatccagacttcggtctggcaacttgttgttaagacacggcgtaaggggcgtgtgccaacgcccaggaacgagtgtccactctaataccccgaggaatgctacgcaggtacccctggtccaccagggatctgagcgtaggctaactgtctaagggtattttcatttcccactctctctttctcgttcata

SEQ ID NO: 22121 - DNA, 612 bp, synthetic construct
  source 1..612: mol_type = other DNA
ccctcttctcgtaactaagtgtgtgcccaatctcttgactcctactggctccaccgaccggtagtgtccaaaatgctaggtggacttcctcccttcccttctgggcatcttgcccagcttcctccccccagcctgacgtgtcacaggctgtgcaaagaccccgcgaaagctgccaaaagtggcaattgtgggtcccccctttgtcaaggcgtcgagtctttctcccttaaggctagtcccatcagtgaattctgatgggcaactagtgacgccactgcatgcctccgacctcggccgcggagtgctgccccccaagtcgtgcccctgaccacaagttgtgctgtctggcaaacattgtctgtgagaatgttccgctgtggctgccaagcctggtaacaggctgccccagtgtgcgtagttctcatccagacttcggtctggcaacttgttgttaagacacggcgtaaggggcgtgtgccaacgcccaggaacgagtgtccactctaataccccgaggaatgctacgcaggtacccctggtccaccagggatctgagcgtaggctaactgtctaagggtattttcatttcccactctctctttctcgttcata

SEQ ID NO: 22122 - DNA, 562 bp, synthetic construct
  source 1..562: mol_type = other DNA
ccaccgaccggtagtgtccaaaatgctaggtggacttcctcccttcccttctgggcatcttgcccagcttcctccccccagcctgacgtgtcacaggctgtgcaaagaccccgcgaaagctgccaaaagtggcaattgtgggtcccccctttgtcaaggcgtcgagtctttctcccttaaggctagtcccatcagtgaattctgatgggcaactagtgacgccactgcatgcctccgacctcggccgcggagtgctgccccccaagtcgtgcccctgaccacaagttgtgctgtctggcaaacattgtctgtgagaatgttccgctgtggctgccaagcctggtaacaggctgccccagtgtgcgtagttctcatccagacttcggtctggcaacttgttgttaagacacggcgtaaggggcgtgtgccaacgcccaggaacgagtgtccactctaataccccgaggaatgctacgcaggtacccctggtccaccagggatctgagcgtaggctaactgtctaagggtattttcatttcccactctctctttctcgttcata

SEQ ID NO: 22123 - DNA, 512 bp, synthetic construct
  source 1..512: mol_type = other DNA
ctgggcatcttgcccagcttcctccccccagcctgacgtgtcacaggctgtgcaaagaccccgcgaaagctgccaaaagtggcaattgtgggtcccccctttgtcaaggcgtcgagtctttctcccttaaggctagtcccatcagtgaattctgatgggcaactagtgacgccactgcatgcctccgacctcggccgcggagtgctgccccccaagtcgtgcccctgaccacaagttgtgctgtctggcaaacattgtctgtgagaatgttccgctgtggctgccaagcctggtaacaggctgccccagtgtgcgtagttctcatccagacttcggtctggcaacttgttgttaagacacggcgtaaggggcgtgtgccaacgcccaggaacgagtgtccactctaataccccgaggaatgctacgcaggtacccctggtccaccagggatctgagcgtaggctaactgtctaagggtattttcatttcccactctctctttctcgttcata

SEQ ID NO: 22124 - DNA, 662 bp, synthetic construct
  source 1..662: mol_type = other DNA
gtactctggtattacggtacctttgtacgcctgttttatatcccctcccccaagtaactttagaagcaattcaaacagttcaatagagggggtacaaaccagtaccaccacgaacaagcacttctgtttccccggtgaagctgtatagactgttcccacggttgaaaatggcagatccgttatccgcttgagtacttcgagaagcctagtatcaccttggaatcttcgacgcgttgcgctcagcactctaccccgagtgtagcttaggtcgatgagtctgggcataccccaccggcgacggtggcccaggctgcgttggcggcctacccatggccaacgccatgggacgctagttgtgaacaaggtgagaagagcctattgagctacttaagagtcctccggcccctgaatgcggctaatcccaaccacggagcaagtgctcacaaaccagtgagtagcttgtcgtaacgcgcaagtctgtggcggaaccgactactttgggtgtccgtgtttccttttatttttactatggctgcttatggtgacaatctaagattgttatcatatagctgttggattggccatccggtgatttattgagatttaacgttcgcctgtttttcttactacatctacccaccagtttcactcatataacaaca

SEQ ID NO: 22125 - DNA, 612 bp, synthetic construct
  source 1..612: mol_type = other DNA
caagtaactttagaagcaattcaaacagttcaatagagggggtacaaaccagtaccaccacgaacaagcacttctgtttccccggtgaagctgtatagactgttcccacggttgaaaatggcagatccgttatccgcttgagtacttcgagaagcctagtatcaccttggaatcttcgacgcgttgcgctcagcactctaccccgagtgtagcttaggtcgatgagtctgggcataccccaccggcgacggtggcccaggctgcgttggcggcctacccatggccaacgccatgggacgctagttgtgaacaaggtgagaagagcctattgagctacttaagagtcctccggcccctgaatgcggctaatcccaaccacggagcaagtgctcacaaaccagtgagtagcttgtcgtaacgcgcaagtctgtggcggaaccgactactttgggtgtccgtgtttccttttatttttactatggctgcttatggtgacaatctaagattgttatcatatagctgttggattggccatccggtgatttattgagatttaacgttcgcctgtttttcttactacatctacccaccagtttcactcatataacaaca

SEQ ID NO: 22126 - DNA, 562 bp, synthetic construct
  source 1..562: mol_type = other DNA
agtaccaccacgaacaagcacttctgtttccccggtgaagctgtatagactgttcccacggttgaaaatggcagatccgttatccgcttgagtacttcgagaagcctagtatcaccttggaatcttcgacgcgttgcgctcagcactctaccccgagtgtagcttaggtcgatgagtctgggcataccccaccggcgacggtggcccaggctgcgttggcggcctacccatggccaacgccatgggacgctagttgtgaacaaggtgagaagagcctattgagctacttaagagtcctccggcccctgaatgcggctaatcccaaccacggagcaagtgctcacaaaccagtgagtagcttgtcgtaacgcgcaagtctgtggcggaaccgactactttgggtgtccgtgtttccttttatttttactatggctgcttatggtgacaatctaagattgttatcatatagctgttggattggccatccggtgatttattgagatttaacgttcgcctgtttttcttactacatctacccaccagtttcactcatataacaaca

SEQ ID NO: 22127 - DNA, 512 bp, synthetic construct
  source 1..512: mol_type = other DNA
tgttcccacggttgaaaatggcagatccgttatccgcttgagtacttcgagaagcctagtatcaccttggaatcttcgacgcgttgcgctcagcactctaccccgagtgtagcttaggtcgatgagtctgggcataccccaccggcgacggtggcccaggctgcgttggcggcctacccatggccaacgccatgggacgctagttgtgaacaaggtgagaagagcctattgagctacttaagagtcctccggcccctgaatgcggctaatcccaaccacggagcaagtgctcacaaaccagtgagtagcttgtcgtaacgcgcaagtctgtggcggaaccgactactttgggtgtccgtgtttccttttatttttactatggctgcttatggtgacaatctaagattgttatcatatagctgttggattggccatccggtgatttattgagatttaacgttcgcctgtttttcttactacatctacccaccagtttcactcatataacaaca

SEQ ID NO: 22128 - DNA, 662 bp, synthetic construct
  source 1..662: mol_type = other DNA
ttatactcccttcccccgtaacttagaagcaatgaaaccaagttcaatagaagggggtacaaaccagtaccaccacgaacaagcacttctgtttccccggtgacgttgcatagactgtccccacggttgaaggcggctgatccgttatccgcttgtgtacttcgagaagcctagtaccatcttggaatctccgatgcgttgcgctcagcactcaaccccagagtgtagcttaggctgatgagtctggacattccccaccggcgacggtggtccaggctgcgttggcggcctacctgtggtccaaaaccacaggacgctagttgtgaacaaggtgtgaagagcctattgagctacatgagagtcctccggcccctgaatgcggctaatcccaaccacggagcaggtgtttgcaatccagcaaatagcctgtcgtaacgcgcaagtctgtggcggaaccgactactttgggtgtccgtgtttccttttattttcatactggctgcttatggtgacaatctcggattgttatcatagagcaaattggattggccatccggtgaaaatcagattgattatttaactttttgttggatttacatctttgacatcacatactccgaatctcattaagatagtgctcttgatacgacatcatcgtcatt

SEQ ID NO: 22129 - DNA, 612 bp, synthetic construct
  source 1..612: mol_type = other DNA
aagggggtacaaaccagtaccaccacgaacaagcacttctgtttccccggtgacgttgcatagactgtccccacggttgaaggcggctgatccgttatccgcttgtgtacttcgagaagcctagtaccatcttggaatctccgatgcgttgcgctcagcactcaaccccagagtgtagcttaggctgatgagtctggacattccccaccggcgacggtggtccaggctgcgttggcggcctacctgtggtccaaaaccacaggacgctagttgtgaacaaggtgtgaagagcctattgagctacatgagagtcctccggcccctgaatgcggctaatcccaaccacggagcaggtgtttgcaatccagcaaatagcctgtcgtaacgcgcaagtctgtggcggaaccgactactttgggtgtccgtgtttccttttattttcatactggctgcttatggtgacaatctcggattgttatcatagagcaaattggattggccatccggtgaaaatcagattgattatttaactttttgttggatttacatctttgacatcacatactccgaatctcattaagatagtgctcttgatacgacatcatcgtcatt

SEQ ID NO: 22130 - DNA, 562 bp, synthetic construct
  source 1..562: mol_type = other DNA
tgacgttgcatagactgtccccacggttgaaggcggctgatccgttatccgcttgtgtacttcgagaagcctagtaccatcttggaatctccgatgcgttgcgctcagcactcaaccccagagtgtagcttaggctgatgagtctggacattccccaccggcgacggtggtccaggctgcgttggcggcctacctgtggtccaaaaccacaggacgctagttgtgaacaaggtgtgaagagcctattgagctacatgagagtcctccggcccctgaatgcggctaatcccaaccacggagcaggtgtttgcaatccagcaaatagcctgtcgtaacgcgcaagtctgtggcggaaccgactactttgggtgtccgtgtttccttttattttcatactggctgcttatggtgacaatctcggattgttatcatagagcaaattggattggccatccggtgaaaatcagattgattatttaactttttgttggatttacatctttgacatcacatactccgaatctcattaagatagtgctcttgatacgacatcatcgtcatt

SEQ ID NO: 22131 - DNA, 512 bp, synthetic construct
  source 1..512: mol_type = other DNA
gcttgtgtacttcgagaagcctagtaccatcttggaatctccgatgcgttgcgctcagcactcaaccccagagtgtagcttaggctgatgagtctggacattccccaccggcgacggtggtccaggctgcgttggcggcctacctgtggtccaaaaccacaggacgctagttgtgaacaaggtgtgaagagcctattgagctacatgagagtcctccggcccctgaatgcggctaatcccaaccacggagcaggtgtttgcaatccagcaaatagcctgtcgtaacgcgcaagtctgtggcggaaccgactactttgggtgtccgtgtttccttttattttcatactggctgcttatggtgacaatctcggattgttatcatagagcaaattggattggccatccggtgaaaatcagattgattatttaactttttgttggatttacatctttgacatcacatactccgaatctcattaagatagtgctcttgatacgacatcatcgtcatt

SEQ ID NO: 22132 - DNA, 663 bp, synthetic construct
  source 1..663: mol_type = other DNA
cttcttcggaacctgttcggaggaattaaacgggcacccactaaccccaacccccttctcgtaactaagtgtgtgcccaatctcttgactcctgctggaaccaccgaccagtagtgtccaaaatgccaggtggaaaatcctcccttcccctctgggctacatgcccagcatcctccccccagcctgacgtgccacaggctgtgcaaagaccccgcgaaagctgccaaaagtggcaattgtgggtcccccctttgtcaaggcgtcgagtctttctcccttaaggctagccccgtcagtgaactctgtcgggcaactagtgacgccactgcatgcctccgacctcggccgcggagtgctgccccccaagtcatgcccctgaccacaagttgtgctgcctggcaagcactgcccgtgagaatgttccgctgtggctgccaagcctggtaacaggctgccccagtgtgcgtagttctcatccagacctcggtctggcaacttgctgttaagacatggcgtaaggggcgtgtgtcaacgccctggaacgagtgtccactctaataccccgaggaatgctacgcaggtacccctggctcgccagggatctgagcgtaggctaattgtctaagggtattttcatttcccactctctctttcttgttcata

SEQ ID NO: 22133 - DNA, 613 bp, synthetic construct
  source 1..613: mol_type = other DNA
cccccttctcgtaactaagtgtgtgcccaatctcttgactcctgctggaaccaccgaccagtagtgtccaaaatgccaggtggaaaatcctcccttcccctctgggctacatgcccagcatcctccccccagcctgacgtgccacaggctgtgcaaagaccccgcgaaagctgccaaaagtggcaattgtgggtcccccctttgtcaaggcgtcgagtctttctcccttaaggctagccccgtcagtgaactctgtcgggcaactagtgacgccactgcatgcctccgacctcggccgcggagtgctgccccccaagtcatgcccctgaccacaagttgtgctgcctggcaagcactgcccgtgagaatgttccgctgtggctgccaagcctggtaacaggctgccccagtgtgcgtagttctcatccagacctcggtctggcaacttgctgttaagacatggcgtaaggggcgtgtgtcaacgccctggaacgagtgtccactctaataccccgaggaatgctacgcaggtacccctggctcgccagggatctgagcgtaggctaattgtctaagggtattttcatttcccactctctctttcttgttcata

SEQ ID NO: 22134 - DNA, 563 bp, synthetic construct
  source 1..563: mol_type = other DNA
ccaccgaccagtagtgtccaaaatgccaggtggaaaatcctcccttcccctctgggctacatgcccagcatcctccccccagcctgacgtgccacaggctgtgcaaagaccccgcgaaagctgccaaaagtggcaattgtgggtcccccctttgtcaaggcgtcgagtctttctcccttaaggctagccccgtcagtgaactctgtcgggcaactagtgacgccactgcatgcctccgacctcggccgcggagtgctgccccccaagtcatgcccctgaccacaagttgtgctgcctggcaagcactgcccgtgagaatgttccgctgtggctgccaagcctggtaacaggctgccccagtgtgcgtagttctcatccagacctcggtctggcaacttgctgttaagacatggcgtaaggggcgtgtgtcaacgccctggaacgagtgtccactctaataccccgaggaatgctacgcaggtacccctggctcgccagggatctgagcgtaggctaattgtctaagggtattttcatttcccactctctctttcttgttcata

SEQ ID NO: 22135 - DNA, 513 bp, synthetic construct
  source 1..513: mol_type = other DNA
tctgggctacatgcccagcatcctccccccagcctgacgtgccacaggctgtgcaaagaccccgcgaaagctgccaaaagtggcaattgtgggtcccccctttgtcaaggcgtcgagtctttctcccttaaggctagccccgtcagtgaactctgtcgggcaactagtgacgccactgcatgcctccgacctcggccgcggagtgctgccccccaagtcatgcccctgaccacaagttgtgctgcctggcaagcactgcccgtgagaatgttccgctgtggctgccaagcctggtaacaggctgccccagtgtgcgtagttctcatccagacctcggtctggcaacttgctgttaagacatggcgtaaggggcgtgtgtcaacgccctggaacgagtgtccactctaataccccgaggaatgctacgcaggtacccctggctcgccagggatctgagcgtaggctaattgtctaagggtattttcatttcccactctctctttcttgttcata

SEQ ID NO: 22136 - DNA, 664 bp, synthetic construct
  source 1..664: mol_type = other DNA
gtactctggtatcacggtacctttgtacgcctgttttatatcccttcccccgcaactttagaagcttaacaaaagttcaacagcaggggtacaaaccagtgcctctacgaacaagcacttctgtttccccggtgaaatcacatagactgtacccacggtcaaaagtgattgatccgttatccgcttgagtacttcgagaagcctagtatcaccttggaatcttcgacgcgttgcgctcaacactctaccccgggtgtagcttaggctgatgagtctgggtactccccaccggtgacggtgacccaggctgcgttggcggcctacccatggctaatgccatgggacgctagttgtgaacaaggtgtgaagagcctattgagctactcaagaatcctccggcccctgaatgcggctaatcctaaccacggagcaatcgctcacgacccagtgagtaggttgtcgtaatgcgtaagtccgtggcggaaccgactactttgggtgtccgtgtttcccttttttattcatattggctgcttatggtgacaatttacagattgttaccatatagctattggattggccatccagtattgtgtcatacatattaaaatacttttctacaagcaataacaacattgtatttgaaccacaatagccattacaa

SEQ ID NO: 22137 - DNA, 614 bp, synthetic construct
  source 1..614: mol_type = other DNA
cgcaactttagaagcttaacaaaagttcaacagcaggggtacaaaccagtgcctctacgaacaagcacttctgtttccccggtgaaatcacatagactgtacccacggtcaaaagtgattgatccgttatccgcttgagtacttcgagaagcctagtatcaccttggaatcttcgacgcgttgcgctcaacactctaccccgggtgtagcttaggctgatgagtctgggtactccccaccggtgacggtgacccaggctgcgttggcggcctacccatggctaatgccatgggacgctagttgtgaacaaggtgtgaagagcctattgagctactcaagaatcctccggcccctgaatgcggctaatcctaaccacggagcaatcgctcacgacccagtgagtaggttgtcgtaatgcgtaagtccgtggcggaaccgactactttgggtgtccgtgtttcccttttttattcatattggctgcttatggtgacaatttacagattgttaccatatagctattggattggccatccagtattgtgtcatacatattaaaatacttttctacaagcaataacaacattgtatttgaaccacaatagccattacaa

SEQ ID NO: 22138 - DNA, 564 bp, synthetic construct
  source 1..564: mol_type = other DNA
gcctctacgaacaagcacttctgtttccccggtgaaatcacatagactgtacccacggtcaaaagtgattgatccgttatccgcttgagtacttcgagaagcctagtatcaccttggaatcttcgacgcgttgcgctcaacactctaccccgggtgtagcttaggctgatgagtctgggtactccccaccggtgacggtgacccaggctgcgttggcggcctacccatggctaatgccatgggacgctagttgtgaacaaggtgtgaagagcctattgagctactcaagaatcctccggcccctgaatgcggctaatcctaaccacggagcaatcgctcacgacccagtgagtaggttgtcgtaatgcgtaagtccgtggcggaaccgactactttgggtgtccgtgtttcccttttttattcatattggctgcttatggtgacaatttacagattgttaccatatagctattggattggccatccagtattgtgtcatacatattaaaatacttttctacaagcaataacaacattgtatttgaaccacaatagccattacaa

SEQ ID NO: 22139 - DNA, 514 bp, synthetic construct
  source 1..514: mol_type = other DNA
acccacggtcaaaagtgattgatccgttatccgcttgagtacttcgagaagcctagtatcaccttggaatcttcgacgcgttgcgctcaacactctaccccgggtgtagcttaggctgatgagtctgggtactccccaccggtgacggtgacccaggctgcgttggcggcctacccatggctaatgccatgggacgctagttgtgaacaaggtgtgaagagcctattgagctactcaagaatcctccggcccctgaatgcggctaatcctaaccacggagcaatcgctcacgacccagtgagtaggttgtcgtaatgcgtaagtccgtggcggaaccgactactttgggtgtccgtgtttcccttttttattcatattggctgcttatggtgacaatttacagattgttaccatatagctattggattggccatccagtattgtgtcatacatattaaaatacttttctacaagcaataacaacattgtatttgaaccacaatagccattacaa

SEQ ID NO: 22140 - DNA, 664 bp, synthetic construct
  source 1..664: mol_type = other DNA
gtactctggtatcacggtacctttgtacgcctgttttatatccccttcccccgcaacttagaagaaaacaaatcaagttcactaggagggggtacaaaccagtaccaccacgaacaagcacttctgtttccccggtgatgtcgtatagactgtaaccacggttgaaaacgattgatccgttatccgctcttgtacttcgaaaagcccagtatcaccttggaatcttcgatgcgttgcgctcagcactcaaccccagagtgtagcttaggtcgatgagtctggacactcctcaccggcgacggtggtccaggctgcgttggcggcctacctgtggtccaaagccacaggacgctagttgtgaacaaggtgtgaagagcctattgagctacaagagaatcctccggcccctgaatgcggctaatcctaaccacggagcaagggtacacaaaccagtgtatatcttgtcgtaacgcgcaagtctgtggcggaaccgactactttgggtgtccgtgtttccttttgtttttatcatggctgcttatggtgacaatctaagattgttatcatatagctgttggattggccatccggtaatttattgagatttgagcatttgcttgtttcttcaacaatttcacctattcattgcatttcagcagtcaaa

SEQ ID NO: 22141 - DNA, 614 bp, synthetic construct
  source 1..614: mol_type = other DNA
ccgcaacttagaagaaaacaaatcaagttcactaggagggggtacaaaccagtaccaccacgaacaagcacttctgtttccccggtgatgtcgtatagactgtaaccacggttgaaaacgattgatccgttatccgctcttgtacttcgaaaagcccagtatcaccttggaatcttcgatgcgttgcgctcagcactcaaccccagagtgtagcttaggtcgatgagtctggacactcctcaccggcgacggtggtccaggctgcgttggcggcctacctgtggtccaaagccacaggacgctagttgtgaacaaggtgtgaagagcctattgagctacaagagaatcctccggcccctgaatgcggctaatcctaaccacggagcaagggtacacaaaccagtgtatatcttgtcgtaacgcgcaagtctgtggcggaaccgactactttgggtgtccgtgtttccttttgtttttatcatggctgcttatggtgacaatctaagattgttatcatatagctgttggattggccatccggtaatttattgagatttgagcatttgcttgtttcttcaacaatttcacctattcattgcatttcagcagtcaaa

SEQ ID NO: 22142 - DNA, 564 bp, synthetic construct
  source 1..564: mol_type = other DNA
agtaccaccacgaacaagcacttctgtttccccggtgatgtcgtatagactgtaaccacggttgaaaacgattgatccgttatccgctcttgtacttcgaaaagcccagtatcaccttggaatcttcgatgcgttgcgctcagcactcaaccccagagtgtagcttaggtcgatgagtctggacactcctcaccggcgacggtggtccaggctgcgttggcggcctacctgtggtccaaagccacaggacgctagttgtgaacaaggtgtgaagagcctattgagctacaagagaatcctccggcccctgaatgcggctaatcctaaccacggagcaagggtacacaaaccagtgtatatcttgtcgtaacgcgcaagtctgtggcggaaccgactactttgggtgtccgtgtttccttttgtttttatcatggctgcttatggtgacaatctaagattgttatcatatagctgttggattggccatccggtaatttattgagatttgagcatttgcttgtttcttcaacaatttcacctattcattgcatttcagcagtcaaa

SEQ ID NO: 22143 - DNA, 514 bp, synthetic construct
  source 1..514: mol_type = other DNA
tgtaaccacggttgaaaacgattgatccgttatccgctcttgtacttcgaaaagcccagtatcaccttggaatcttcgatgcgttgcgctcagcactcaaccccagagtgtagcttaggtcgatgagtctggacactcctcaccggcgacggtggtccaggctgcgttggcggcctacctgtggtccaaagccacaggacgctagttgtgaacaaggtgtgaagagcctattgagctacaagagaatcctccggcccctgaatgcggctaatcctaaccacggagcaagggtacacaaaccagtgtatatcttgtcgtaacgcgcaagtctgtggcggaaccgactactttgggtgtccgtgtttccttttgtttttatcatggctgcttatggtgacaatctaagattgttatcatatagctgttggattggccatccggtaatttattgagatttgagcatttgcttgtttcttcaacaatttcacctattcattgcatttcagcagtcaaa

SEQ ID NO: 22144 - DNA, 665 bp, synthetic construct
  source 1..665: mol_type = other DNA
ctgttttatacacccttcccccaaaagaaacttagaagcttgactataacggtcaataggaaacccagtataccagctgggttacgaccaagcacttctgtaaccccggactgagtatcaataggctgctcacgcggctgaaggagaaaacgttcgttacccggccaattacttcgagaaacctagtaccaccatgaaagttgcgcggcgtttcgctccgcacaatcccagtgtagatcaggtcgatgagccaccgcgttccccacgggtgaccgtggcggtggctgcgttggcggcctgcccatggggcaacccatgggacgcttcaatactgacatggtgcgaagagtctattgagctaattggtagtcctccggcccctgaatgcggctaatcctaactgcggagcagatacccacataccagtgggctgtctgtcgtaacgggtaactccgcagcggaaccgactactttgggtgtccgtgtttccttttattcttatactggctgcttatggtgacaattgagagattgttaccatatagctattggattggccatccggtgtctaacagagcgatcatctatctgtttgttggtttcatacccttgaattttaaagtcctcaacactcttaaccttgtgctacaactaaactcggtaaa

SEQ ID NO: 22145 - DNA, 615 bp, synthetic construct
  source 1..615: mol_type = other DNA
ggtcaataggaaacccagtataccagctgggttacgaccaagcacttctgtaaccccggactgagtatcaataggctgctcacgcggctgaaggagaaaacgttcgttacccggccaattacttcgagaaacctagtaccaccatgaaagttgcgcggcgtttcgctccgcacaatcccagtgtagatcaggtcgatgagccaccgcgttccccacgggtgaccgtggcggtggctgcgttggcggcctgcccatggggcaacccatgggacgcttcaatactgacatggtgcgaagagtctattgagctaattggtagtcctccggcccctgaatgcggctaatcctaactgcggagcagatacccacataccagtgggctgtctgtcgtaacgggtaactccgcagcggaaccgactactttgggtgtccgtgtttccttttattcttatactggctgcttatggtgacaattgagagattgttaccatatagctattggattggccatccggtgtctaacagagcgatcatctatctgtttgttggtttcatacccttgaattttaaagtcctcaacactcttaaccttgtgctacaactaaactcggtaaa

SEQ ID NO: 22146 - DNA, 565 bp, synthetic construct
  source 1..565: mol_type = other DNA
taaccccggactgagtatcaataggctgctcacgcggctgaaggagaaaacgttcgttacccggccaattacttcgagaaacctagtaccaccatgaaagttgcgcggcgtttcgctccgcacaatcccagtgtagatcaggtcgatgagccaccgcgttccccacgggtgaccgtggcggtggctgcgttggcggcctgcccatggggcaacccatgggacgcttcaatactgacatggtgcgaagagtctattgagctaattggtagtcctccggcccctgaatgcggctaatcctaactgcggagcagatacccacataccagtgggctgtctgtcgtaacgggtaactccgcagcggaaccgactactttgggtgtccgtgtttccttttattcttatactggctgcttatggtgacaattgagagattgttaccatatagctattggattggccatccggtgtctaacagagcgatcatctatctgtttgttggtttcatacccttgaattttaaagtcctcaacactcttaaccttgtgctacaactaaactcggtaaa

SEQ ID NO: 22147 - DNA, 515 bp, synthetic construct
  source 1..515: mol_type = other DNA
cgttcgttacccggccaattacttcgagaaacctagtaccaccatgaaagttgcgcggcgtttcgctccgcacaatcccagtgtagatcaggtcgatgagccaccgcgttccccacgggtgaccgtggcggtggctgcgttggcggcctgcccatggggcaacccatgggacgcttcaatactgacatggtgcgaagagtctattgagctaattggtagtcctccggcccctgaatgcggctaatcctaactgcggagcagatacccacataccagtgggctgtctgtcgtaacgggtaactccgcagcggaaccgactactttgggtgtccgtgtttccttttattcttatactggctgcttatggtgacaattgagagattgttaccatatagctattggattggccatccggtgtctaacagagcgatcatctatctgtttgttggtttcatacccttgaattttaaagtcctcaacactcttaaccttgtgctacaactaaactcggtaaa

SEQ ID NO: 22148 - DNA, 665 bp, synthetic construct
  source 1..665: mol_type = other DNA
acctttgtacgcctgttttatacccccttcccccgcaacttagaagcatgaaatcttaagctcaacaggaggggtgcaaaccagcacctctacgagcaagcactactgtctccccggtgaggttacatagactgttcccacggttgaaagtagccgatccgttatccgctcatgtacttcgagaagcctagtattgctctggaatcttcgatgcgttgcgctcaacactcgaccccggagtgtagcttaggccgatgagtctggacattccccactggcgacagtggtccaggctgcgttggcggcctacctgtggtccaaagccacaggacgctagttgtgaacagggtgtgaagagcctattgagctacatgagagtcctccggcccctgaatgcggctaatcccaaccatggagcaggcaactgcaacccagcagtcagcctgtcgtaacgcgcaagtccgtggcggaaccgactactttgggtgtccgtgtttccttttatcttttgaatggctgcttatggtgacaatcatagattgttatcataaagcgaattggattggccatccagagaattactaccgtgtttattgagtctactcttgaaaaacctaactcctcaacgtactagaattatttgaagacaggatatcgacacgaca

SEQ ID NO: 22149 - DNA, 615 bp, synthetic construct
  source 1..615: mol_type = other DNA
aaatcttaagctcaacaggaggggtgcaaaccagcacctctacgagcaagcactactgtctccccggtgaggttacatagactgttcccacggttgaaagtagccgatccgttatccgctcatgtacttcgagaagcctagtattgctctggaatcttcgatgcgttgcgctcaacactcgaccccggagtgtagcttaggccgatgagtctggacattccccactggcgacagtggtccaggctgcgttggcggcctacctgtggtccaaagccacaggacgctagttgtgaacagggtgtgaagagcctattgagctacatgagagtcctccggcccctgaatgcggctaatcccaaccatggagcaggcaactgcaacccagcagtcagcctgtcgtaacgcgcaagtccgtggcggaaccgactactttgggtgtccgtgtttccttttatcttttgaatggctgcttatggtgacaatcatagattgttatcataaagcgaattggattggccatccagagaattactaccgtgtttattgagtctactcttgaaaaacctaactcctcaacgtactagaattatttgaagacaggatatcgacacgaca

SEQ ID NO: 22150 - DNA, 565 bp, synthetic construct
  source 1..565: mol_type = other DNA
cactactgtctccccggtgaggttacatagactgttcccacggttgaaagtagccgatccgttatccgctcatgtacttcgagaagcctagtattgctctggaatcttcgatgcgttgcgctcaacactcgaccccggagtgtagcttaggccgatgagtctggacattccccactggcgacagtggtccaggctgcgttggcggcctacctgtggtccaaagccacaggacgctagttgtgaacagggtgtgaagagcctattgagctacatgagagtcctccggcccctgaatgcggctaatcccaaccatggagcaggcaactgcaacccagcagtcagcctgtcgtaacgcgcaagtccgtggcggaaccgactactttgggtgtccgtgtttccttttatcttttgaatggctgcttatggtgacaatcatagattgttatcataaagcgaattggattggccatccagagaattactaccgtgtttattgagtctactcttgaaaaacctaactcctcaacgtactagaattatttgaagacaggatatcgacacgaca

SEQ ID NO: 22151 - DNA, 515 bp, synthetic construct
  source 1..515: mol_type = other DNA
tagccgatccgttatccgctcatgtacttcgagaagcctagtattgctctggaatcttcgatgcgttgcgctcaacactcgaccccggagtgtagcttaggccgatgagtctggacattccccactggcgacagtggtccaggctgcgttggcggcctacctgtggtccaaagccacaggacgctagttgtgaacagggtgtgaagagcctattgagctacatgagagtcctccggcccctgaatgcggctaatcccaaccatggagcaggcaactgcaacccagcagtcagcctgtcgtaacgcgcaagtccgtggcggaaccgactactttgggtgtccgtgtttccttttatcttttgaatggctgcttatggtgacaatcatagattgttatcataaagcgaattggattggccatccagagaattactaccgtgtttattgagtctactcttgaaaaacctaactcctcaacgtactagaattatttgaagacaggatatcgacacgaca

SEQ ID NO: 22152 - DNA, 666 bp, synthetic construct
  source 1..666: mol_type = other DNA
tctggtatcacggtacctttgtacgcctattttacatcccttccccgtaacttagaagctttcaactataagttcactagcagggctaccaaccaggtagttcatcgaacaagcacttctgttaccccggtcctagtacctgagaagctgtacccacggcggaaggggaaaaagatcgttacccggctatctacttcgagaagcctagtaacgtcattgaaactcttgagcgttgcgttcagcacagtaccccctgtgtagctttggctgatgagtctgggcattccccactggcgacagtggcccaggctgcgttggcggccaaccgatccgggcaaccgggtcggacgctcatttgtggacatggtgtgaagagcctattgagctaggtagtagtcctccggcccctgaatgcggctaatcccaactccggagcaagtgcgcacaatccagtgtgtggcttgtcgtaatgcgtaagtctggagcggaaccgactactttgggtgtccgtgtttcctgtttttccttatttggctgcttatggtgacaatctagtgttgttaccatatagcgattggattggccatccggtgaatagctttgtgacaattccctacgttatttttcataactcaacttcacgagagtcattgagtttgactaatt

SEQ ID NO: 22153 - DNA, 616 bp, synthetic construct
  source 1..616: mol_type = other DNA
cttagaagctttcaactataagttcactagcagggctaccaaccaggtagttcatcgaacaagcacttctgttaccccggtcctagtacctgagaagctgtacccacggcggaaggggaaaaagatcgttacccggctatctacttcgagaagcctagtaacgtcattgaaactcttgagcgttgcgttcagcacagtaccccctgtgtagctttggctgatgagtctgggcattccccactggcgacagtggcccaggctgcgttggcggccaaccgatccgggcaaccgggtcggacgctcatttgtggacatggtgtgaagagcctattgagctaggtagtagtcctccggcccctgaatgcggctaatcccaactccggagcaagtgcgcacaatccagtgtgtggcttgtcgtaatgcgtaagtctggagcggaaccgactactttgggtgtccgtgtttcctgtttttccttatttggctgcttatggtgacaatctagtgttgttaccatatagcgattggattggccatccggtgaatagctttgtgacaattccctacgttatttttcataactcaacttcacgagagtcattgagtttgactaatt

SEQ ID NO: 22154 - DNA, 566 bp, synthetic construct
  source 1..566: mol_type = other DNA
ttcatcgaacaagcacttctgttaccccggtcctagtacctgagaagctgtacccacggcggaaggggaaaaagatcgttacccggctatctacttcgagaagcctagtaacgtcattgaaactcttgagcgttgcgttcagcacagtaccccctgtgtagctttggctgatgagtctgggcattccccactggcgacagtggcccaggctgcgttggcggccaaccgatccgggcaaccgggtcggacgctcatttgtggacatggtgtgaagagcctattgagctaggtagtagtcctccggcccctgaatgcggctaatcccaactccggagcaagtgcgcacaatccagtgtgtggcttgtcgtaatgcgtaagtctggagcggaaccgactactttgggtgtccgtgtttcctgtttttccttatttggctgcttatggtgacaatctagtgttgttaccatatagcgattggattggccatccggtgaatagctttgtgacaattccctacgttatttttcataactcaacttcacgagagtcattgagtttgactaatt

SEQ ID NO: 22155 - DNA, 516 bp, synthetic construct
  source 1..516: mol_type = other DNA
tacccacggcggaaggggaaaaagatcgttacccggctatctacttcgagaagcctagtaacgtcattgaaactcttgagcgttgcgttcagcacagtaccccctgtgtagctttggctgatgagtctgggcattccccactggcgacagtggcccaggctgcgttggcggccaaccgatccgggcaaccgggtcggacgctcatttgtggacatggtgtgaagagcctattgagctaggtagtagtcctccggcccctgaatgcggctaatcccaactccggagcaagtgcgcacaatccagtgtgtggcttgtcgtaatgcgtaagtctggagcggaaccgactactttgggtgtccgtgtttcctgtttttccttatttggctgcttatggtgacaatctagtgttgttaccatatagcgattggattggccatccggtgaatagctttgtgacaattccctacgttatttttcataactcaacttcacgagagtcattgagtttgactaatt

SEQ ID NO: 22156 - DNA, 666 bp, synthetic construct
  source 1..666: mol_type = other DNA
cctgttttataccccctttcccgctttgtaacttagaagtaacacaacttcggtcaatagtcgacgcaacaacccagttgcgttttgatcaagcacctctgtgaccccggactgagtatcaataggctgctcgcgcggctgaaggagaaaccgttcgttacccggctaactacttcgagaagcctagtagcatcatgaacgttgcggagtgtttcgctcagcacttcccccgtgtagatcaggtcgatgagtcaccgcgttccccacgggtgaccgtggcggtggctgcgttggcggcctgcctgtggggcaacccacaggacgctctaatacagacatggtgcgaagagtctattgagctagttagtagtcctccggcccctgaatgcggctaatcctaactgcggagcacattctcacaagccagtgagcggtgtgtcgtaacgggcaactctgcagcggaaccgactactttgggtgtccgtgtttccttttattctaatactggctgcttatggtgacaattgagagattgttaccatatagctattggattggccatccggtgtctaacagagcaattatttacctgtttgttggtttcacacccctaaatctcaaggttttaaataccctcaatttcgtactgaaactaaactcagtaaa

SEQ ID NO: 22157 - DNA, 616 bp, synthetic construct
  source 1..616: mol_type = other DNA
cggtcaatagtcgacgcaacaacccagttgcgttttgatcaagcacctctgtgaccccggactgagtatcaataggctgctcgcgcggctgaaggagaaaccgttcgttacccggctaactacttcgagaagcctagtagcatcatgaacgttgcggagtgtttcgctcagcacttcccccgtgtagatcaggtcgatgagtcaccgcgttccccacgggtgaccgtggcggtggctgcgttggcggcctgcctgtggggcaacccacaggacgctctaatacagacatggtgcgaagagtctattgagctagttagtagtcctccggcccctgaatgcggctaatcctaactgcggagcacattctcacaagccagtgagcggtgtgtcgtaacgggcaactctgcagcggaaccgactactttgggtgtccgtgtttccttttattctaatactggctgcttatggtgacaattgagagattgttaccatatagctattggattggccatccggtgtctaacagagcaattatttacctgtttgttggtttcacacccctaaatctcaaggttttaaataccctcaatttcgtactgaaactaaactcagtaaa

SEQ ID NO: 22158 - DNA, 566 bp, synthetic construct
  source 1..566: mol_type = other DNA
gtgaccccggactgagtatcaataggctgctcgcgcggctgaaggagaaaccgttcgttacccggctaactacttcgagaagcctagtagcatcatgaacgttgcggagtgtttcgctcagcacttcccccgtgtagatcaggtcgatgagtcaccgcgttccccacgggtgaccgtggcggtggctgcgttggcggcctgcctgtggggcaacccacaggacgctctaatacagacatggtgcgaagagtctattgagctagttagtagtcctccggcccctgaatgcggctaatcctaactgcggagcacattctcacaagccagtgagcggtgtgtcgtaacgggcaactctgcagcggaaccgactactttgggtgtccgtgtttccttttattctaatactggctgcttatggtgacaattgagagattgttaccatatagctattggattggccatccggtgtctaacagagcaattatttacctgtttgttggtttcacacccctaaatctcaaggttttaaataccctcaatttcgtactgaaactaaactcagtaaa

SEQ ID NO: 22159 - DNA, 516 bp, synthetic construct
  source 1..516: mol_type = other DNA
ccgttcgttacccggctaactacttcgagaagcctagtagcatcatgaacgttgcggagtgtttcgctcagcacttcccccgtgtagatcaggtcgatgagtcaccgcgttccccacgggtgaccgtggcggtggctgcgttggcggcctgcctgtggggcaacccacaggacgctctaatacagacatggtgcgaagagtctattgagctagttagtagtcctccggcccctgaatgcggctaatcctaactgcggagcacattctcacaagccagtgagcggtgtgtcgtaacgggcaactctgcagcggaaccgactactttgggtgtccgtgtttccttttattctaatactggctgcttatggtgacaattgagagattgttaccatatagctattggattggccatccggtgtctaacagagcaattatttacctgtttgttggtttcacacccctaaatctcaaggttttaaataccctcaatttcgtactgaaactaaactcagtaaa

SEQ ID NO: 22160 - DNA, 666 bp, synthetic construct
  source 1..666: mol_type = other DNA
tggtacttcggtacctttgtacgcctgttttatctcccttcccaatgtaacttagaagttcttaaatcaatgctcaataggtggggcgcaaaccagcgctctcatgagcaagcactcctgtctccccggtgaggttgtataaactgttcccacggttgaaaacaacctatccgttatccgctatagtacttcgagaaacctagtaccacctttggattgttgacgcgttgcgctcagcacactaacccgtgtgtagcttgggtcgatgagtctggacatacctcactggcgacagtggtccaggctgcgttggcggcctactcatggtgaaagccatgagacgctagacatgaacaaggtgtgaagagtctattgagctactatagagtcctccggcccctgaatgcggctaatcctaaccatggagcaagtgctcacaggccagtgagttgcttgtcgtaatgcgcaagtccgtggcggaaccgactactttgggtgtccgtgtttcactttttacttttatgactgcttatggtgacaatttgatattgttaccatttagcttgtcaaatcaattgcaaaagatcctaactcttatttatcaacttgcatctcgataactctaatttgaaaatatcatctctaaccaatttgaaaattttaaca

SEQ ID NO: 22161 - DNA, 616 bp, synthetic construct
  source 1..616: mol_type = other DNA
cttagaagttcttaaatcaatgctcaataggtggggcgcaaaccagcgctctcatgagcaagcactcctgtctccccggtgaggttgtataaactgttcccacggttgaaaacaacctatccgttatccgctatagtacttcgagaaacctagtaccacctttggattgttgacgcgttgcgctcagcacactaacccgtgtgtagcttgggtcgatgagtctggacatacctcactggcgacagtggtccaggctgcgttggcggcctactcatggtgaaagccatgagacgctagacatgaacaaggtgtgaagagtctattgagctactatagagtcctccggcccctgaatgcggctaatcctaaccatggagcaagtgctcacaggccagtgagttgcttgtcgtaatgcgcaagtccgtggcggaaccgactactttgggtgtccgtgtttcactttttacttttatgactgcttatggtgacaatttgatattgttaccatttagcttgtcaaatcaattgcaaaagatcctaactcttatttatcaacttgcatctcgataactctaatttgaaaatatcatctctaaccaatttgaaaattttaaca

SEQ ID NO: 22162 - DNA, 566 bp, synthetic construct
  source 1..566: mol_type = other DNA
ctcatgagcaagcactcctgtctccccggtgaggttgtataaactgttcccacggttgaaaacaacctatccgttatccgctatagtacttcgagaaacctagtaccacctttggattgttgacgcgttgcgctcagcacactaacccgtgtgtagcttgggtcgatgagtctggacatacctcactggcgacagtggtccaggctgcgttggcggcctactcatggtgaaagccatgagacgctagacatgaacaaggtgtgaagagtctattgagctactatagagtcctccggcccctgaatgcggctaatcctaaccatggagcaagtgctcacaggccagtgagttgcttgtcgtaatgcgcaagtccgtggcggaaccgactactttgggtgtccgtgtttcactttttacttttatgactgcttatggtgacaatttgatattgttaccatttagcttgtcaaatcaattgcaaaagatcctaactcttatttatcaacttgcatctcgataactctaatttgaaaatatcatctctaaccaatttgaaaattttaaca

SEQ ID NO: 22163 - DNA, 516 bp, synthetic construct
  source 1..516: mol_type = other DNA
cacggttgaaaacaacctatccgttatccgctatagtacttcgagaaacctagtaccacctttggattgttgacgcgttgcgctcagcacactaacccgtgtgtagcttgggtcgatgagtctggacatacctcactggcgacagtggtccaggctgcgttggcggcctactcatggtgaaagccatgagacgctagacatgaacaaggtgtgaagagtctattgagctactatagagtcctccggcccctgaatgcggctaatcctaaccatggagcaagtgctcacaggccagtgagttgcttgtcgtaatgcgcaagtccgtggcggaaccgactactttgggtgtccgtgtttcactttttacttttatgactgcttatggtgacaatttgatattgttaccatttagcttgtcaaatcaattgcaaaagatcctaactcttatttatcaacttgcatctcgataactctaatttgaaaatatcatctctaaccaatttgaaaattttaaca

SEQ ID NO: 22164 - DNA, 667 bp, synthetic construct
  source 1..667: mol_type = other DNA
ctgttttataaccctcccccgaaacttgcaacttagaagttatgtacgttactgatcaacagcaggcgtggcacaccagccatgtcttgatcaagcacttctgtaaccccggactgagtatcaatagactgctcacgtggtcgaaagagaaaacgttcgttatccggctaactacttcgagaaacttagtagcaccactgaaactgcggagtgtttcgctcagcacttcccccgtgtagatcaggtcgatgagtcactgcttaccccacgggtgaccgtggcagtggctgcgttggcggcctgcctatggggcaacccataggacgctctaaagtggacatggtgtgaagagtctattgagctagttagtagtcctccggcccctgaatgcggctaatcctaactgcggagcacatgccctcaatccagggggtggtgtgtcgtaacgggcaactctgcagcggaaccgactactttgggtgtccgtgtttcttttattctcataatggctgcttatggtgacaattgaggaattgttgccatatagctattggattggccatccagtgacaaacagagctttgatatacttgttcgtgggtttcgttccactcaccagtcgtacagttcatactctaaagtacattctgattctgaacaatagaaa

SEQ ID NO: 22165 - DNA, 617 bp, synthetic construct
  source 1..617: mol_type = other DNA
actgatcaacagcaggcgtggcacaccagccatgtcttgatcaagcacttctgtaaccccggactgagtatcaatagactgctcacgtggtcgaaagagaaaacgttcgttatccggctaactacttcgagaaacttagtagcaccactgaaactgcggagtgtttcgctcagcacttcccccgtgtagatcaggtcgatgagtcactgcttaccccacgggtgaccgtggcagtggctgcgttggcggcctgcctatggggcaacccataggacgctctaaagtggacatggtgtgaagagtctattgagctagttagtagtcctccggcccctgaatgcggctaatcctaactgcggagcacatgccctcaatccagggggtggtgtgtcgtaacgggcaactctgcagcggaaccgactactttgggtgtccgtgtttcttttattctcataatggctgcttatggtgacaattgaggaattgttgccatatagctattggattggccatccagtgacaaacagagctttgatatacttgttcgtgggtttcgttccactcaccagtcgtacagttcatactctaaagtacattctgattctgaacaatagaaa

SEQ ID NO: 22166 - DNA, 567 bp, synthetic construct
  source 1..567: mol_type = other DNA
ctgtaaccccggactgagtatcaatagactgctcacgtggtcgaaagagaaaacgttcgttatccggctaactacttcgagaaacttagtagcaccactgaaactgcggagtgtttcgctcagcacttcccccgtgtagatcaggtcgatgagtcactgcttaccccacgggtgaccgtggcagtggctgcgttggcggcctgcctatggggcaacccataggacgctctaaagtggacatggtgtgaagagtctattgagctagttagtagtcctccggcccctgaatgcggctaatcctaactgcggagcacatgccctcaatccagggggtggtgtgtcgtaacgggcaactctgcagcggaaccgactactttgggtgtccgtgtttcttttattctcataatggctgcttatggtgacaattgaggaattgttgccatatagctattggattggccatccagtgacaaacagagctttgatatacttgttcgtgggtttcgttccactcaccagtcgtacagttcatactctaaagtacattctgattctgaacaatagaaa

SEQ ID NO: 22167 - DNA, 517 bp, synthetic construct
  source 1..517: mol_type = other DNA
aaacgttcgttatccggctaactacttcgagaaacttagtagcaccactgaaactgcggagtgtttcgctcagcacttcccccgtgtagatcaggtcgatgagtcactgcttaccccacgggtgaccgtggcagtggctgcgttggcggcctgcctatggggcaacccataggacgctctaaagtggacatggtgtgaagagtctattgagctagttagtagtcctccggcccctgaatgcggctaatcctaactgcggagcacatgccctcaatccagggggtggtgtgtcgtaacgggcaactctgcagcggaaccgactactttgggtgtccgtgtttcttttattctcataatggctgcttatggtgacaattgaggaattgttgccatatagctattggattggccatccagtgacaaacagagctttgatatacttgttcgtgggtttcgttccactcaccagtcgtacagttcatactctaaagtacattctgattctgaacaatagaaa

SEQ ID NO: 22168 - DNA, 667 bp, synthetic construct
  source 1..667: mol_type = other DNA
tacaccggtatcacggtacccttgtacgcctgttttataatccccttcccccgtaacattagaagcacaaaagcaaccgctcaatagacaccatacatccagtgtggttacgagcaagcacttctgtctccccggttgcgccctatatgctgtgcgaacggcaaaaaggggcaatatcgttacccgcttgactactacgggaaacccagtatcatcttcgattgatttgagagttgcgttcagcgccttacccccggcgtagctcaggctgatgaggctccgaacaccccacaggcgactgtgtcggagcctgcgttggcggcctgcccataccctgcggtatgggacgctcacttcatgacatggtgcgaagagtctactgtgctagtcaagattcctccggcccctgaatgtggataatcccaaccactgatcctacgttcgcaatccagcgttcagtaggtcgtaacgcgcaagtcggtggcggaaccaactactttgggtgtccgtgtttcctttatttcctactgaatgcttatggtgacaattgttttgatcagttgttgccaatactcgcgttcagtgtgtaattacaaaaacaagattatcagttattacaatccctcacgttcagtgcacaattacgaaaacgagattttctgtcata

SEQ ID NO: 22169 - DNA, 617 bp, synthetic construct
  source 1..617: mol_type = other DNA
ccgtaacattagaagcacaaaagcaaccgctcaatagacaccatacatccagtgtggttacgagcaagcacttctgtctccccggttgcgccctatatgctgtgcgaacggcaaaaaggggcaatatcgttacccgcttgactactacgggaaacccagtatcatcttcgattgatttgagagttgcgttcagcgccttacccccggcgtagctcaggctgatgaggctccgaacaccccacaggcgactgtgtcggagcctgcgttggcggcctgcccataccctgcggtatgggacgctcacttcatgacatggtgcgaagagtctactgtgctagtcaagattcctccggcccctgaatgtggataatcccaaccactgatcctacgttcgcaatccagcgttcagtaggtcgtaacgcgcaagtcggtggcggaaccaactactttgggtgtccgtgtttcctttatttcctactgaatgcttatggtgacaattgttttgatcagttgttgccaatactcgcgttcagtgtgtaattacaaaaacaagattatcagttattacaatccctcacgttcagtgcacaattacgaaaacgagattttctgtcata

SEQ ID NO: 22170 - DNA, 567 bp, synthetic construct
  source 1..567: mol_type = other DNA
agtgtggttacgagcaagcacttctgtctccccggttgcgccctatatgctgtgcgaacggcaaaaaggggcaatatcgttacccgcttgactactacgggaaacccagtatcatcttcgattgatttgagagttgcgttcagcgccttacccccggcgtagctcaggctgatgaggctccgaacaccccacaggcgactgtgtcggagcctgcgttggcggcctgcccataccctgcggtatgggacgctcacttcatgacatggtgcgaagagtctactgtgctagtcaagattcctccggcccctgaatgtggataatcccaaccactgatcctacgttcgcaatccagcgttcagtaggtcgtaacgcgcaagtcggtggcggaaccaactactttgggtgtccgtgtttcctttatttcctactgaatgcttatggtgacaattgttttgatcagttgttgccaatactcgcgttcagtgtgtaattacaaaaacaagattatcagttattacaatccctcacgttcagtgcacaattacgaaaacgagattttctgtcata

SEQ ID NO: 22171 - DNA, 517 bp, synthetic construct
  source 1..517: mol_type = other DNA
tgtgcgaacggcaaaaaggggcaatatcgttacccgcttgactactacgggaaacccagtatcatcttcgattgatttgagagttgcgttcagcgccttacccccggcgtagctcaggctgatgaggctccgaacaccccacaggcgactgtgtcggagcctgcgttggcggcctgcccataccctgcggtatgggacgctcacttcatgacatggtgcgaagagtctactgtgctagtcaagattcctccggcccctgaatgtggataatcccaaccactgatcctacgttcgcaatccagcgttcagtaggtcgtaacgcgcaagtcggtggcggaaccaactactttgggtgtccgtgtttcctttatttcctactgaatgcttatggtgacaattgttttgatcagttgttgccaatactcgcgttcagtgtgtaattacaaaaacaagattatcagttattacaatccctcacgttcagtgcacaattacgaaaacgagattttctgtcata

SEQ ID NO: 22172 - DNA, 669 bp, synthetic construct
  source 1..669: mol_type = other DNA
ctgttttataacccctcccccaaactatgtaacttagaagttatgcactctaccgatcaacagcaggcatggcgctccagccatgtctcgatcaagcacttctgtttccccggactgagtatcaatagactgctcacgtggtcgaaggagaaaacgttcgttatccgactaactacttcgagaagcctagtagcaccatcgagactgcggagcgtttcgttcagcactccccccgtgtagatcaggtcgatgagtcactgcataccccacgggcgaccgtggcagtggctgcgttggcggcctgcctatggggtgacccataggacgctctaaagtggacatggtgtgaagagcctattgagctagttagtagtcctccggcccctgaatgcggctaatcctaactgcggagcgcatgccctcgaaccagagggtagtgcgtcgtaacgggcaactctgcagcggaaccgactactttgggtgtccgtgtttctttttattcacttattggctgcttatggtgacaatcaaggaattgttaccatatagctgttggattggccatccggtgtgtaatagagcaattatctatttgtttgttggttacattccattaacatttaagtccctcaatacattacactacattttaaccctaaacgcaagaag

SEQ ID NO: 22173 - DNA, 619 bp, synthetic construct
  source 1..619: mol_type = other DNA
taccgatcaacagcaggcatggcgctccagccatgtctcgatcaagcacttctgtttccccggactgagtatcaatagactgctcacgtggtcgaaggagaaaacgttcgttatccgactaactacttcgagaagcctagtagcaccatcgagactgcggagcgtttcgttcagcactccccccgtgtagatcaggtcgatgagtcactgcataccccacgggcgaccgtggcagtggctgcgttggcggcctgcctatggggtgacccataggacgctctaaagtggacatggtgtgaagagcctattgagctagttagtagtcctccggcccctgaatgcggctaatcctaactgcggagcgcatgccctcgaaccagagggtagtgcgtcgtaacgggcaactctgcagcggaaccgactactttgggtgtccgtgtttctttttattcacttattggctgcttatggtgacaatcaaggaattgttaccatatagctgttggattggccatccggtgtgtaatagagcaattatctatttgtttgttggttacattccattaacatttaagtccctcaatacattacactacattttaaccctaaacgcaagaag

SEQ ID NO: 22174 - DNA, 569 bp, synthetic construct
  source 1..569: mol_type = other DNA
tctgtttccccggactgagtatcaatagactgctcacgtggtcgaaggagaaaacgttcgttatccgactaactacttcgagaagcctagtagcaccatcgagactgcggagcgtttcgttcagcactccccccgtgtagatcaggtcgatgagtcactgcataccccacgggcgaccgtggcagtggctgcgttggcggcctgcctatggggtgacccataggacgctctaaagtggacatggtgtgaagagcctattgagctagttagtagtcctccggcccctgaatgcggctaatcctaactgcggagcgcatgccctcgaaccagagggtagtgcgtcgtaacgggcaactctgcagcggaaccgactactttgggtgtccgtgtttctttttattcacttattggctgcttatggtgacaatcaaggaattgttaccatatagctgttggattggccatccggtgtgtaatagagcaattatctatttgtttgttggttacattccattaacatttaagtccctcaatacattacactacattttaaccctaaacgcaagaag

SEQ ID NO: 22175 - DNA, 519 bp, synthetic construct
  source 1..519: mol_type = other DNA
aaaacgttcgttatccgactaactacttcgagaagcctagtagcaccatcgagactgcggagcgtttcgttcagcactccccccgtgtagatcaggtcgatgagtcactgcataccccacgggcgaccgtggcagtggctgcgttggcggcctgcctatggggtgacccataggacgctctaaagtggacatggtgtgaagagcctattgagctagttagtagtcctccggcccctgaatgcggctaatcctaactgcggagcgcatgccctcgaaccagagggtagtgcgtcgtaacgggcaactctgcagcggaaccgactactttgggtgtccgtgtttctttttattcacttattggctgcttatggtgacaatcaaggaattgttaccatatagctgttggattggccatccggtgtgtaatagagcaattatctatttgtttgttggttacattccattaacatttaagtccctcaatacattacactacattttaaccctaaacgcaagaag

SEQ ID NO: 22176 - DNA, 669 bp, synthetic construct
  source 1..669: mol_type = other DNA
gcctgttttatactcccttccccgtaacttagaagaaccaaaccaagttcaatagaagggggtacaaaccagtaccaccacgaacaagtacttctgtttccccggtgaagttgtatagactgtacccacggttgaaaacgactgatccgttatccgctttcatacttcgagaagcctagtatcatcttggaatcttcgatgcgttgcgctcaacactcaaccccagagtgtagcttaggctgatgagtctggacgtccctcaccggcgacggtggtccaggctgcgttggcggcctacctgtggcccaaagcctcaggacgctagttgtgaacaaggtgtgaagagcctattgagctatgaaagagtcctccggcccctgaatgcggctaatcccaaccacggagcgagagtgtgcaaaccagcgcatttatcgtcgtaacgcgcaagtctgtggcggaaccgactactttgggtgtccgtgtttccttttatttttctacattggctgcttatggtgacaatcatagattgttatcataaagcgaattggattggccatccggtgaaagtgaaacatattattcacctccttgttggatttactccaatcaacctctccacttataagattatcatcacagtcttaccaaatagaagcatattcaaca

SEQ ID NO: 22177 - DNA, 619 bp, synthetic construct
  source 1..619: mol_type = other DNA
aatagaagggggtacaaaccagtaccaccacgaacaagtacttctgtttccccggtgaagttgtatagactgtacccacggttgaaaacgactgatccgttatccgctttcatacttcgagaagcctagtatcatcttggaatcttcgatgcgttgcgctcaacactcaaccccagagtgtagcttaggctgatgagtctggacgtccctcaccggcgacggtggtccaggctgcgttggcggcctacctgtggcccaaagcctcaggacgctagttgtgaacaaggtgtgaagagcctattgagctatgaaagagtcctccggcccctgaatgcggctaatcccaaccacggagcgagagtgtgcaaaccagcgcatttatcgtcgtaacgcgcaagtctgtggcggaaccgactactttgggtgtccgtgtttccttttatttttctacattggctgcttatggtgacaatcatagattgttatcataaagcgaattggattggccatccggtgaaagtgaaacatattattcacctccttgttggatttactccaatcaacctctccacttataagattatcatcacagtcttaccaaatagaagcatattcaaca

SEQ ID NO: 22178 - DNA, 569 bp, synthetic construct
  source 1..569: mol_type = other DNA
cccggtgaagttgtatagactgtacccacggttgaaaacgactgatccgttatccgctttcatacttcgagaagcctagtatcatcttggaatcttcgatgcgttgcgctcaacactcaaccccagagtgtagcttaggctgatgagtctggacgtccctcaccggcgacggtggtccaggctgcgttggcggcctacctgtggcccaaagcctcaggacgctagttgtgaacaaggtgtgaagagcctattgagctatgaaagagtcctccggcccctgaatgcggctaatcccaaccacggagcgagagtgtgcaaaccagcgcatttatcgtcgtaacgcgcaagtctgtggcggaaccgactactttgggtgtccgtgtttccttttatttttctacattggctgcttatggtgacaatcatagattgttatcataaagcgaattggattggccatccggtgaaagtgaaacatattattcacctccttgttggatttactccaatcaacctctccacttataagattatcatcacagtcttaccaaatagaagcatattcaaca

SEQ ID NO: 22179 - DNA, 519 bp, synthetic construct
  source 1..519: mol_type = other DNA
tatccgctttcatacttcgagaagcctagtatcatcttggaatcttcgatgcgttgcgctcaacactcaaccccagagtgtagcttaggctgatgagtctggacgtccctcaccggcgacggtggtccaggctgcgttggcggcctacctgtggcccaaagcctcaggacgctagttgtgaacaaggtgtgaagagcctattgagctatgaaagagtcctccggcccctgaatgcggctaatcccaaccacggagcgagagtgtgcaaaccagcgcatttatcgtcgtaacgcgcaagtctgtggcggaaccgactactttgggtgtccgtgtttccttttatttttctacattggctgcttatggtgacaatcatagattgttatcataaagcgaattggattggccatccggtgaaagtgaaacatattattcacctccttgttggatttactccaatcaacctctccacttataagattatcatcacagtcttaccaaatagaagcatattcaaca

SEQ ID NO: 22180 - DNA, 671 bp, synthetic construct
  source 1..671: mol_type = other DNA
gtgcgcctgttttatacccctccccaaatgagtaacttagaagtttaatatgttcatgaccaatagcaggcgtgacacaccagtcacgtcttggtcaagcactcctgtttccccggactgagtatcaataagctgctcacgcggctgaaagagaaaacgttcgttacccggctaactacttcgagaaacctagtaacaccatgaaagttgcagagtgtttcgttcagcacttcccccgtgtagatcaggtcgatgagtcactgcaaaccccacgggtgaccgtggcagtggctgcgttggcggcctgcccatggggtaacccatgggacgctctaatacagacatggtgcgaagagtctattgagctagttagtagtcctccggcccctgaatgcggctaatcctaactgcggagcacataccctcaatccagagggcagtgtgtcgtaacgggcaactctgcagcggaaccgactactttgggtgtccgtgtttccttttatctcattatggctgcttatggtgacaattgaagaattgttaccatatagctattggattggccatccggtgtctaacagagcaattgtatttctatttgttggatttgttcctttgtcgcacacatctctcaatactttatactacattataaagttaaatacaggaag

SEQ ID NO: 22181 - DNA, 621 bp, synthetic construct
  source 1..621: mol_type = other DNA
tgttcatgaccaatagcaggcgtgacacaccagtcacgtcttggtcaagcactcctgtttccccggactgagtatcaataagctgctcacgcggctgaaagagaaaacgttcgttacccggctaactacttcgagaaacctagtaacaccatgaaagttgcagagtgtttcgttcagcacttcccccgtgtagatcaggtcgatgagtcactgcaaaccccacgggtgaccgtggcagtggctgcgttggcggcctgcccatggggtaacccatgggacgctctaatacagacatggtgcgaagagtctattgagctagttagtagtcctccggcccctgaatgcggctaatcctaactgcggagcacataccctcaatccagagggcagtgtgtcgtaacgggcaactctgcagcggaaccgactactttgggtgtccgtgtttccttttatctcattatggctgcttatggtgacaattgaagaattgttaccatatagctattggattggccatccggtgtctaacagagcaattgtatttctatttgttggatttgttcctttgtcgcacacatctctcaatactttatactacattataaagttaaatacaggaag

SEQ ID NO: 22182 - DNA, 571 bp, synthetic construct
  source 1..571: mol_type = other DNA
actcctgtttccccggactgagtatcaataagctgctcacgcggctgaaagagaaaacgttcgttacccggctaactacttcgagaaacctagtaacaccatgaaagttgcagagtgtttcgttcagcacttcccccgtgtagatcaggtcgatgagtcactgcaaaccccacgggtgaccgtggcagtggctgcgttggcggcctgcccatggggtaacccatgggacgctctaatacagacatggtgcgaagagtctattgagctagttagtagtcctccggcccctgaatgcggctaatcctaactgcggagcacataccctcaatccagagggcagtgtgtcgtaacgggcaactctgcagcggaaccgactactttgggtgtccgtgtttccttttatctcattatggctgcttatggtgacaattgaagaattgttaccatatagctattggattggccatccggtgtctaacagagcaattgtatttctatttgttggatttgttcctttgtcgcacacatctctcaatactttatactacattataaagttaaatacaggaag

SEQ ID NO: 22183 - DNA, 521 bp, synthetic construct
  source 1..521: mol_type = other DNA
gagaaaacgttcgttacccggctaactacttcgagaaacctagtaacaccatgaaagttgcagagtgtttcgttcagcacttcccccgtgtagatcaggtcgatgagtcactgcaaaccccacgggtgaccgtggcagtggctgcgttggcggcctgcccatggggtaacccatgggacgctctaatacagacatggtgcgaagagtctattgagctagttagtagtcctccggcccctgaatgcggctaatcctaactgcggagcacataccctcaatccagagggcagtgtgtcgtaacgggcaactctgcagcggaaccgactactttgggtgtccgtgtttccttttatctcattatggctgcttatggtgacaattgaagaattgttaccatatagctattggattggccatccggtgtctaacagagcaattgtatttctatttgttggatttgttcctttgtcgcacacatctctcaatactttatactacattataaagttaaatacaggaag

SEQ ID NO: 22184 - DNA, 671 bp, synthetic construct
  source 1..671: mol_type = other DNA
tgtgcgcctgttttatttaccctcccccaactgaaaattagaagccaaactcaaacggtcaataggaaacccagtgaaccaactgggctgcgaccaagcacttctgttaccccggactgagtatcaataggctgctcgcgcggctgaaggagaaaacgttcgttacccggccaattacttcgagaaacctagtaccaccatgaaagttgcgaaacgtttcactccgcacaaccccagtgtagatcgggtcgatgagtcaccgcattccccacgggtgaccgtggcggtggctgcgttggcggcccgcccatggggcaacccatgggacgcttcaatactgacatggtgtgaagagtctattgagctaattggtagtcctccggcccctgaatgcggctaatcctaactgcggatcagacacccacacgccagtgggcagtctgtcgtaatgggcaactctgcagcggaaccgactactttgggtgtccgtgtttctttttatccttatactggctgcttatggtgacaattgaaagattgttaccatatagctattggattggccatccggtatctaacagagctattatttacttatttgttggtttcgtacctctcagtatcagagttttgagaacacttaacttcatactactgctaaacactgcaag

SEQ ID NO: 22185 - DNA, 621 bp, synthetic construct
  source 1..621: mol_type = other DNA
tcaaacggtcaataggaaacccagtgaaccaactgggctgcgaccaagcacttctgttaccccggactgagtatcaataggctgctcgcgcggctgaaggagaaaacgttcgttacccggccaattacttcgagaaacctagtaccaccatgaaagttgcgaaacgtttcactccgcacaaccccagtgtagatcgggtcgatgagtcaccgcattccccacgggtgaccgtggcggtggctgcgttggcggcccgcccatggggcaacccatgggacgcttcaatactgacatggtgtgaagagtctattgagctaattggtagtcctccggcccctgaatgcggctaatcctaactgcggatcagacacccacacgccagtgggcagtctgtcgtaatgggcaactctgcagcggaaccgactactttgggtgtccgtgtttctttttatccttatactggctgcttatggtgacaattgaaagattgttaccatatagctattggattggccatccggtatctaacagagctattatttacttatttgttggtttcgtacctctcagtatcagagttttgagaacacttaacttcatactactgctaaacactgcaag

SEQ ID NO: 22186 - DNA, 571 bp, synthetic construct
  source 1..571: mol_type = other DNA
cttctgttaccccggactgagtatcaataggctgctcgcgcggctgaaggagaaaacgttcgttacccggccaattacttcgagaaacctagtaccaccatgaaagttgcgaaacgtttcactccgcacaaccccagtgtagatcgggtcgatgagtcaccgcattccccacgggtgaccgtggcggtggctgcgttggcggcccgcccatggggcaacccatgggacgcttcaatactgacatggtgtgaagagtctattgagctaattggtagtcctccggcccctgaatgcggctaatcctaactgcggatcagacacccacacgccagtgggcagtctgtcgtaatgggcaactctgcagcggaaccgactactttgggtgtccgtgtttctttttatccttatactggctgcttatggtgacaattgaaagattgttaccatatagctattggattggccatccggtatctaacagagctattatttacttatttgttggtttcgtacctctcagtatcagagttttgagaacacttaacttcatactactgctaaacactgcaag

SEQ ID NO: 22187 - DNA, 521 bp, synthetic construct
  source 1..521: mol_type = other DNA
agaaaacgttcgttacccggccaattacttcgagaaacctagtaccaccatgaaagttgcgaaacgtttcactccgcacaaccccagtgtagatcgggtcgatgagtcaccgcattccccacgggtgaccgtggcggtggctgcgttggcggcccgcccatggggcaacccatgggacgcttcaatactgacatggtgtgaagagtctattgagctaattggtagtcctccggcccctgaatgcggctaatcctaactgcggatcagacacccacacgccagtgggcagtctgtcgtaatgggcaactctgcagcggaaccgactactttgggtgtccgtgtttctttttatccttatactggctgcttatggtgacaattgaaagattgttaccatatagctattggattggccatccggtatctaacagagctattatttacttatttgttggtttcgtacctctcagtatcagagttttgagaacacttaacttcatactactgctaaacactgcaag

SEQ ID NO: 22188 - DNA, 672 bp, synthetic construct
  source 1..672: mol_type = other DNA
acttggtattccggtacctttgtacacctatttacaaaccctaccccttgtaaccttagaagcaattatttaaccgctcactagggggtgtgctatccaagcacatcaagagcaagcacttctgtctccccgggaggggctaatggtacgctgtgcccacggcggaaatgagccctaccgttaaccggcagtctacttcgggaagcccagtaactacattgaaactttgaggcgttacactcagcacataaccccaatgtgtagttctggtcgatgagccttggcatcccccacaggcgactgtggccaaggctgcgttggcggccagcctgcggaccaaaagtccgtaggacgcctaattgtggacatggtgtgaagagcctactgagctagactgtagtcctccggcccctgaatgcggctaatcctaaccctggagcatccgcgtgcaacccagtacgtagggtgtcgtaatgcgtaagtctgggatggaaccgactactttgggtgtccgtgtttcttgtttttcatactgggtcgcttatggttacaactaattgttgtaatcattggcagtgcgcgctgaccacgcgattattgatatttccatttgttggatactccaatagtgtcaactcatatacacaacttttaccactgatcaagataaaa

SEQ ID NO: 22189 - DNA, 622 bp, synthetic construct
  source 1..622: mol_type = other DNA
taaccttagaagcaattatttaaccgctcactagggggtgtgctatccaagcacatcaagagcaagcacttctgtctccccgggaggggctaatggtacgctgtgcccacggcggaaatgagccctaccgttaaccggcagtctacttcgggaagcccagtaactacattgaaactttgaggcgttacactcagcacataaccccaatgtgtagttctggtcgatgagccttggcatcccccacaggcgactgtggccaaggctgcgttggcggccagcctgcggaccaaaagtccgtaggacgcctaattgtggacatggtgtgaagagcctactgagctagactgtagtcctccggcccctgaatgcggctaatcctaaccctggagcatccgcgtgcaacccagtacgtagggtgtcgtaatgcgtaagtctgggatggaaccgactactttgggtgtccgtgtttcttgtttttcatactgggtcgcttatggttacaactaattgttgtaatcattggcagtgcgcgctgaccacgcgattattgatatttccatttgttggatactccaatagtgtcaactcatatacacaacttttaccactgatcaagataaaa

SEQ ID NO: 22190 - DNA, 572 bp, synthetic construct
  source 1..572: mol_type = other DNA
gcacatcaagagcaagcacttctgtctccccgggaggggctaatggtacgctgtgcccacggcggaaatgagccctaccgttaaccggcagtctacttcgggaagcccagtaactacattgaaactttgaggcgttacactcagcacataaccccaatgtgtagttctggtcgatgagccttggcatcccccacaggcgactgtggccaaggctgcgttggcggccagcctgcggaccaaaagtccgtaggacgcctaattgtggacatggtgtgaagagcctactgagctagactgtagtcctccggcccctgaatgcggctaatcctaaccctggagcatccgcgtgcaacccagtacgtagggtgtcgtaatgcgtaagtctgggatggaaccgactactttgggtgtccgtgtttcttgtttttcatactgggtcgcttatggttacaactaattgttgtaatcattggcagtgcgcgctgaccacgcgattattgatatttccatttgttggatactccaatagtgtcaactcatatacacaacttttaccactgatcaagataaaa

SEQ ID NO: 22191 - DNA, 522 bp, synthetic construct
  source 1..522: mol_type = other DNA
ctgtgcccacggcggaaatgagccctaccgttaaccggcagtctacttcgggaagcccagtaactacattgaaactttgaggcgttacactcagcacataaccccaatgtgtagttctggtcgatgagccttggcatcccccacaggcgactgtggccaaggctgcgttggcggccagcctgcggaccaaaagtccgtaggacgcctaattgtggacatggtgtgaagagcctactgagctagactgtagtcctccggcccctgaatgcggctaatcctaaccctggagcatccgcgtgcaacccagtacgtagggtgtcgtaatgcgtaagtctgggatggaaccgactactttgggtgtccgtgtttcttgtttttcatactgggtcgcttatggttacaactaattgttgtaatcattggcagtgcgcgctgaccacgcgattattgatatttccatttgttggatactccaatagtgtcaactcatatacacaacttttaccactgatcaagataaaa

SEQ ID NO: 22192 - DNA, 673 bp, synthetic construct
  source 1..673: mol_type = other DNA
gtgcgcctgttttatccccccaaacccccgtaacactacactagaagatagacaatgcgaccaatagccagtggggcaacccagcctcaccttggtcaagcacctctgttttcccgggcttagtaccaataagctgctcgcgtggctgaaggggaacgcgctcgttatccggctaactacttcgagaaacctagtatcaccatggaagttgcagagtgtttcgatcagcacaaccccagtgtagatcaggccgatgagtcaccgtgtaccccacgggcgaccgtgacggtggctgcgttggcggcctgcccatggagtacaccatgggacgctctaatacagacatggtgcgaagagtctattgagctagttagtagtcctccggcccctgaatgcggctaatcctaactgcggagcacgcgctctcaacccagagagtagcgtgtcgtaacgggcaactctgcagcggaaccgactactttgggtgtccgtgtttctctttattcttacattggctgcttatggtgacaattgaaagattgttaccatatagctattggattggccatccggtgtgcaacagagctatcatatattcttttgttggctttgtgccactagattatactgcaattattactttaaggtatatcttgcttttgaacacagcaaa

SEQ ID NO: 22193 - DNA, 623 bp, synthetic construct
  source 1..623: mol_type = other DNA
gacaatgcgaccaatagccagtggggcaacccagcctcaccttggtcaagcacctctgttttcccgggcttagtaccaataagctgctcgcgtggctgaaggggaacgcgctcgttatccggctaactacttcgagaaacctagtatcaccatggaagttgcagagtgtttcgatcagcacaaccccagtgtagatcaggccgatgagtcaccgtgtaccccacgggcgaccgtgacggtggctgcgttggcggcctgcccatggagtacaccatgggacgctctaatacagacatggtgcgaagagtctattgagctagttagtagtcctccggcccctgaatgcggctaatcctaactgcggagcacgcgctctcaacccagagagtagcgtgtcgtaacgggcaactctgcagcggaaccgactactttgggtgtccgtgtttctctttattcttacattggctgcttatggtgacaattgaaagattgttaccatatagctattggattggccatccggtgtgcaacagagctatcatatattcttttgttggctttgtgccactagattatactgcaattattactttaaggtatatcttgcttttgaacacagcaaa

SEQ ID NO: 22194 - DNA, 573 bp, synthetic construct
  source 1..573: mol_type = other DNA
cacctctgttttcccgggcttagtaccaataagctgctcgcgtggctgaaggggaacgcgctcgttatccggctaactacttcgagaaacctagtatcaccatggaagttgcagagtgtttcgatcagcacaaccccagtgtagatcaggccgatgagtcaccgtgtaccccacgggcgaccgtgacggtggctgcgttggcggcctgcccatggagtacaccatgggacgctctaatacagacatggtgcgaagagtctattgagctagttagtagtcctccggcccctgaatgcggctaatcctaactgcggagcacgcgctctcaacccagagagtagcgtgtcgtaacgggcaactctgcagcggaaccgactactttgggtgtccgtgtttctctttattcttacattggctgcttatggtgacaattgaaagattgttaccatatagctattggattggccatccggtgtgcaacagagctatcatatattcttttgttggctttgtgccactagattatactgcaattattactttaaggtatatcttgcttttgaacacagcaaa

SEQ ID NO: 22195 - DNA, 523 bp, synthetic construct
  source 1..523: mol_type = other DNA
ggggaacgcgctcgttatccggctaactacttcgagaaacctagtatcaccatggaagttgcagagtgtttcgatcagcacaaccccagtgtagatcaggccgatgagtcaccgtgtaccccacgggcgaccgtgacggtggctgcgttggcggcctgcccatggagtacaccatgggacgctctaatacagacatggtgcgaagagtctattgagctagttagtagtcctccggcccctgaatgcggctaatcctaactgcggagcacgcgctctcaacccagagagtagcgtgtcgtaacgggcaactctgcagcggaaccgactactttgggtgtccgtgtttctctttattcttacattggctgcttatggtgacaattgaaagattgttaccatatagctattggattggccatccggtgtgcaacagagctatcatatattcttttgttggctttgtgccactagattatactgcaattattactttaaggtatatcttgcttttgaacacagcaaa

SEQ ID NO: 22196 - DNA, 673 bp, synthetic construct
  source 1..673: mol_type = other DNA
acctttgtgcgcctgttttatccaccctccccaacgtaacttagaagcttatttaaaccgaccaacagacggtccagcataccagctgggttacggtcaagcacttctgttaccccggactgagtatcaataggccgctcgcgcggctgaaggagaaaacgttcgttacccggccaattacttcgagaaacctagtaccaccgtggaggtcgcgaagtgtttcgctccgcacaaccccagtgtagatcaggtcgatgagtcaccgcattccccactggcgacagtggcggtggctgcgtggcggcctgcccatggggtaacccatgggacgcttcaatactgacacggtgtgaagagtctattgagctaattggtagtcctccggcccctgaatgcggctaatcctaactgcggagcagatatccacgagccagtggacagtctgtcgtaatgggtaactctgcagcggaaccgactactttgggtgtccgtgtttccatttattcctatactggctgcttatggtgacaattgagagattgttaccatatagctattggattggccatccggtgacaaacagagcaattatatatctctttgttggttatattccactcaacattaaggttttaagaacgcttaattacatcctattgttaaacacattaag

SEQ ID NO: 22197 - DNA, 623 bp, synthetic construct
  source 1..623: mol_type = other DNA
atttaaaccgaccaacagacggtccagcataccagctgggttacggtcaagcacttctgttaccccggactgagtatcaataggccgctcgcgcggctgaaggagaaaacgttcgttacccggccaattacttcgagaaacctagtaccaccgtggaggtcgcgaagtgtttcgctccgcacaaccccagtgtagatcaggtcgatgagtcaccgcattccccactggcgacagtggcggtggctgcgtggcggcctgcccatggggtaacccatgggacgcttcaatactgacacggtgtgaagagtctattgagctaattggtagtcctccggcccctgaatgcggctaatcctaactgcggagcagatatccacgagccagtggacagtctgtcgtaatgggtaactctgcagcggaaccgactactttgggtgtccgtgtttccatttattcctatactggctgcttatggtgacaattgagagattgttaccatatagctattggattggccatccggtgacaaacagagcaattatatatctctttgttggttatattccactcaacattaaggttttaagaacgcttaattacatcctattgttaaacacattaag

SEQ ID NO: 22198 - DNA, 573 bp, synthetic construct
  source 1..573: mol_type = other DNA
gcacttctgttaccccggactgagtatcaataggccgctcgcgcggctgaaggagaaaacgttcgttacccggccaattacttcgagaaacctagtaccaccgtggaggtcgcgaagtgtttcgctccgcacaaccccagtgtagatcaggtcgatgagtcaccgcattccccactggcgacagtggcggtggctgcgtggcggcctgcccatggggtaacccatgggacgcttcaatactgacacggtgtgaagagtctattgagctaattggtagtcctccggcccctgaatgcggctaatcctaactgcggagcagatatccacgagccagtggacagtctgtcgtaatgggtaactctgcagcggaaccgactactttgggtgtccgtgtttccatttattcctatactggctgcttatggtgacaattgagagattgttaccatatagctattggattggccatccggtgacaaacagagcaattatatatctctttgttggttatattccactcaacattaaggttttaagaacgcttaattacatcctattgttaaacacattaag

SEQ ID NO: 22199 - DNA, 523 bp, synthetic construct
  source 1..523: mol_type = other DNA
aggagaaaacgttcgttacccggccaattacttcgagaaacctagtaccaccgtggaggtcgcgaagtgtttcgctccgcacaaccccagtgtagatcaggtcgatgagtcaccgcattccccactggcgacagtggcggtggctgcgtggcggcctgcccatggggtaacccatgggacgcttcaatactgacacggtgtgaagagtctattgagctaattggtagtcctccggcccctgaatgcggctaatcctaactgcggagcagatatccacgagccagtggacagtctgtcgtaatgggtaactctgcagcggaaccgactactttgggtgtccgtgtttccatttattcctatactggctgcttatggtgacaattgagagattgttaccatatagctattggattggccatccggtgacaaacagagcaattatatatctctttgttggttatattccactcaacattaaggttttaagaacgcttaattacatcctattgttaaacacattaag

SEQ ID NO: 22200 - DNA, 673 bp, synthetic construct
  source 1..673: mol_type = other DNA
tttgtgcgcctgttttataccccctcctccaaccgtaacctagaagcagcaccatatggccaatagtagacgtggcgcaccagccacgttttggtcaagcacttctgtttccccgggccgagtatcaataggctgctcacgcggctgaaggagaaagcgtccgttacccggccaattacttcgagaaacctagtaccaccatggaagttgcgcggcgtttcgctccacacaaccccagtgtagatcgggtcgatgagtcaccgcatttccccacgggtgaccgtggcggtggctgcgttggcggcctgcccatgaggaaactcatgggacgcttcaatactgacatggtgtgaagagtctattgagctaattggtagtcctccggcccctgaatgcggctaatcctaactgcggagcagatgctcacaaaccagtgggtggtctgtcgtaatgggcaactctgcagcggaaccgactactttgggtgtccgtgtttccttttattttcacactggctgcttatggtgacaattgaaggattgttaccatatagctattggattggccatccggtgacaaacagagcgattgtctatctatttgttggttttgtaccattagatttcaaagtcctgaaaaccctcaatttcgtcttaacactcaattcggcaag

SEQ ID NO: 22201 - DNA, 623 bp, synthetic construct
  source 1..623: mol_type = other DNA
accatatggccaatagtagacgtggcgcaccagccacgttttggtcaagcacttctgtttccccgggccgagtatcaataggctgctcacgcggctgaaggagaaagcgtccgttacccggccaattacttcgagaaacctagtaccaccatggaagttgcgcggcgtttcgctccacacaaccccagtgtagatcgggtcgatgagtcaccgcatttccccacgggtgaccgtggcggtggctgcgttggcggcctgcccatgaggaaactcatgggacgcttcaatactgacatggtgtgaagagtctattgagctaattggtagtcctccggcccctgaatgcggctaatcctaactgcggagcagatgctcacaaaccagtgggtggtctgtcgtaatgggcaactctgcagcggaaccgactactttgggtgtccgtgtttccttttattttcacactggctgcttatggtgacaattgaaggattgttaccatatagctattggattggccatccggtgacaaacagagcgattgtctatctatttgttggttttgtaccattagatttcaaagtcctgaaaaccctcaatttcgtcttaacactcaattcggcaag

SEQ ID NO: 22202 - DNA, 573 bp, synthetic construct
  source 1..573: mol_type = other DNA
acttctgtttccccgggccgagtatcaataggctgctcacgcggctgaaggagaaagcgtccgttacccggccaattacttcgagaaacctagtaccaccatggaagttgcgcggcgtttcgctccacacaaccccagtgtagatcgggtcgatgagtcaccgcatttccccacgggtgaccgtggcggtggctgcgttggcggcctgcccatgaggaaactcatgggacgcttcaatactgacatggtgtgaagagtctattgagctaattggtagtcctccggcccctgaatgcggctaatcctaactgcggagcagatgctcacaaaccagtgggtggtctgtcgtaatgggcaactctgcagcggaaccgactactttgggtgtccgtgtttccttttattttcacactggctgcttatggtgacaattgaaggattgttaccatatagctattggattggccatccggtgacaaacagagcgattgtctatctatttgttggttttgtaccattagatttcaaagtcctgaaaaccctcaatttcgtcttaacactcaattcggcaag

SEQ ID NO: 22203 - DNA, 523 bp, synthetic construct
  source 1..523: mol_type = other DNA
gagaaagcgtccgttacccggccaattacttcgagaaacctagtaccaccatggaagttgcgcggcgtttcgctccacacaaccccagtgtagatcgggtcgatgagtcaccgcatttccccacgggtgaccgtggcggtggctgcgttggcggcctgcccatgaggaaactcatgggacgcttcaatactgacatggtgtgaagagtctattgagctaattggtagtcctccggcccctgaatgcggctaatcctaactgcggagcagatgctcacaaaccagtgggtggtctgtcgtaatgggcaactctgcagcggaaccgactactttgggtgtccgtgtttccttttattttcacactggctgcttatggtgacaattgaaggattgttaccatatagctattggattggccatccggtgacaaacagagcgattgtctatctatttgttggttttgtaccattagatttcaaagtcctgaaaaccctcaatttcgtcttaacactcaattcggcaag

SEQ ID NO: 22204 - DNA, 673 bp, synthetic construct
  source 1..673: mol_type = other DNA
cctttgtgcgcctgttttatctaccccccccaacgcaactcagaagctcaactgaaccgaccaatagatgacccggcaagccagcagggccctggtcaagcacttctgttaccccggactgagtatcaataagctgctcgcgcggctaaaggagaaaacgttcgttacccggccaattacttcgagaaacccagtaccaccgtgaaagttgcgcagtgtttcgctccgcacaaccccagtgtagatcaggccgatgagtcaccgcattccccactggtgacagtggcggtggctgcgttggcggcctgcccatggggcaacccatgggacgcttcaatactgacacggtgcgaagagtctattgagctaattggtagacctccggcccctgaatgcggctaatcctaactgcggagcagatacccacgcgccagtgggcagtctgtcgtaatgggcaactctgcagcggaaccgactactttgggtgtccgtgtttccttttattcttatactggctgcttatggtgacaattgaaagattgttgccatatagctattggattggccatccagtgactaacaaagcaattgtctatctatttgttggttttataccattaaactacaaagctataagcacactcaaatttatattggtactcaactcagcaaa

SEQ ID NO: 22205 - DNA, 623 bp, synthetic construct
  source 1..623: mol_type = other DNA
actgaaccgaccaatagatgacccggcaagccagcagggccctggtcaagcacttctgttaccccggactgagtatcaataagctgctcgcgcggctaaaggagaaaacgttcgttacccggccaattacttcgagaaacccagtaccaccgtgaaagttgcgcagtgtttcgctccgcacaaccccagtgtagatcaggccgatgagtcaccgcattccccactggtgacagtggcggtggctgcgttggcggcctgcccatggggcaacccatgggacgcttcaatactgacacggtgcgaagagtctattgagctaattggtagacctccggcccctgaatgcggctaatcctaactgcggagcagatacccacgcgccagtgggcagtctgtcgtaatgggcaactctgcagcggaaccgactactttgggtgtccgtgtttccttttattcttatactggctgcttatggtgacaattgaaagattgttgccatatagctattggattggccatccagtgactaacaaagcaattgtctatctatttgttggttttataccattaaactacaaagctataagcacactcaaatttatattggtactcaactcagcaaa

SEQ ID NO: 22206 - DNA, 573 bp, synthetic construct
  source 1..573: mol_type = other DNA
cacttctgttaccccggactgagtatcaataagctgctcgcgcggctaaaggagaaaacgttcgttacccggccaattacttcgagaaacccagtaccaccgtgaaagttgcgcagtgtttcgctccgcacaaccccagtgtagatcaggccgatgagtcaccgcattccccactggtgacagtggcggtggctgcgttggcggcctgcccatggggcaacccatgggacgcttcaatactgacacggtgcgaagagtctattgagctaattggtagacctccggcccctgaatgcggctaatcctaactgcggagcagatacccacgcgccagtgggcagtctgtcgtaatgggcaactctgcagcggaaccgactactttgggtgtccgtgtttccttttattcttatactggctgcttatggtgacaattgaaagattgttgccatatagctattggattggccatccagtgactaacaaagcaattgtctatctatttgttggttttataccattaaactacaaagctataagcacactcaaatttatattggtactcaactcagcaaa

SEQ ID NO: 22207 - DNA, 523 bp, synthetic construct
  source 1..523: mol_type = other DNA
ggagaaaacgttcgttacccggccaattacttcgagaaacccagtaccaccgtgaaagttgcgcagtgtttcgctccgcacaaccccagtgtagatcaggccgatgagtcaccgcattccccactggtgacagtggcggtggctgcgttggcggcctgcccatggggcaacccatgggacgcttcaatactgacacggtgcgaagagtctattgagctaattggtagacctccggcccctgaatgcggctaatcctaactgcggagcagatacccacgcgccagtgggcagtctgtcgtaatgggcaactctgcagcggaaccgactactttgggtgtccgtgtttccttttattcttatactggctgcttatggtgacaattgaaagattgttgccatatagctattggattggccatccagtgactaacaaagcaattgtctatctatttgttggttttataccattaaactacaaagctataagcacactcaaatttatattggtactcaactcagcaaa

SEQ ID NO: 22208 - DNA, 674 bp, synthetic construct
  source 1..674: mol_type = other DNA
gtgcgcctgttttataaccccttccccaaatttgcaatttagaagcaaagcacactaacgatcaacagcaggcgtggcataccagctacgtcacgatcaagcacttctgtttccccggactgagtatcaataagctgcttgcgcggctgaaggagaaaatgtccgttatccggctaactacttcgagaaacctagtagcaccattgaagctgcagagtgtttcgctcggcacttcccccgtgtagatcaggtcgatgagtcactgcactccccacgggcgaccgtggcagtggctgcgttggcggcctgcctatggggcaacccataggacgctctaatgtggacatggtgtgaagagtctattgagctagttagtagtcctccggcccctgaatgcggctaatcctaactgcggagcgcatgcccccaaaccagggggaggtgcgtcgtaatgggcaactctgcagcggaaccgactactttgggtgtccgtgtttccttttatctttatattggctgcttatggtgacaattgagagattgttaccatatagctattggattggccatccggtgagcaatagagcaattatttattcctttattggatttgtaccgttgaattatactgcttttattacactgaaacacatcctattgttgaacacaataaa

SEQ ID NO: 22209 - DNA, 624 bp, synthetic construct
  source 1..624: mol_type = other DNA
cacactaacgatcaacagcaggcgtggcataccagctacgtcacgatcaagcacttctgtttccccggactgagtatcaataagctgcttgcgcggctgaaggagaaaatgtccgttatccggctaactacttcgagaaacctagtagcaccattgaagctgcagagtgtttcgctcggcacttcccccgtgtagatcaggtcgatgagtcactgcactccccacgggcgaccgtggcagtggctgcgttggcggcctgcctatggggcaacccataggacgctctaatgtggacatggtgtgaagagtctattgagctagttagtagtcctccggcccctgaatgcggctaatcctaactgcggagcgcatgcccccaaaccagggggaggtgcgtcgtaatgggcaactctgcagcggaaccgactactttgggtgtccgtgtttccttttatctttatattggctgcttatggtgacaattgagagattgttaccatatagctattggattggccatccggtgagcaatagagcaattatttattcctttattggatttgtaccgttgaattatactgcttttattacactgaaacacatcctattgttgaacacaataaa

SEQ ID NO: 22210 - DNA, 574 bp, synthetic construct
  source 1..574: mol_type = other DNA
gcacttctgtttccccggactgagtatcaataagctgcttgcgcggctgaaggagaaaatgtccgttatccggctaactacttcgagaaacctagtagcaccattgaagctgcagagtgtttcgctcggcacttcccccgtgtagatcaggtcgatgagtcactgcactccccacgggcgaccgtggcagtggctgcgttggcggcctgcctatggggcaacccataggacgctctaatgtggacatggtgtgaagagtctattgagctagttagtagtcctccggcccctgaatgcggctaatcctaactgcggagcgcatgcccccaaaccagggggaggtgcgtcgtaatgggcaactctgcagcggaaccgactactttgggtgtccgtgtttccttttatctttatattggctgcttatggtgacaattgagagattgttaccatatagctattggattggccatccggtgagcaatagagcaattatttattcctttattggatttgtaccgttgaattatactgcttttattacactgaaacacatcctattgttgaacacaataaa

SEQ ID NO: 22211 - DNA, 524 bp, synthetic construct
  source 1..524: mol_type = other DNA
aggagaaaatgtccgttatccggctaactacttcgagaaacctagtagcaccattgaagctgcagagtgtttcgctcggcacttcccccgtgtagatcaggtcgatgagtcactgcactccccacgggcgaccgtggcagtggctgcgttggcggcctgcctatggggcaacccataggacgctctaatgtggacatggtgtgaagagtctattgagctagttagtagtcctccggcccctgaatgcggctaatcctaactgcggagcgcatgcccccaaaccagggggaggtgcgtcgtaatgggcaactctgcagcggaaccgactactttgggtgtccgtgtttccttttatctttatattggctgcttatggtgacaattgagagattgttaccatatagctattggattggccatccggtgagcaatagagcaattatttattcctttattggatttgtaccgttgaattatactgcttttattacactgaaacacatcctattgttgaacacaataaa

SEQ ID NO: 22212 - DNA, 674 bp, synthetic construct
  source 1..674: mol_type = other DNA
acggtacccttgtacgcctgttttatactcccttccccgtaacttagaagtaacaaacctatgttcaatagaagggggtacaaaccagtaccaccacgaacaagcacttctgtttccccggtgagatcacatagactgttcccacggttgaaagtgatcgatccgttatccgctcttgtacttcgagaagcctagtattatcttgggaccaacgatgcgttgcgatcagcactcgaccccagagtgtagcttaggtcgatgagtctggacattcctcaccggtgacggtggtccaggctgcgttggcggcctacctgtggcccaaagccacaggacgctagttgtgaacaaggtgtgaagagcctattgagctacatgagagtcctccggcccctgaatgcggctaatcctaaccacggagcaggcgattgcaaaccagcaattagcttgtcgtaatgcgtaagtctgtggcggaaccgactactttgggtgtccgtgtttccttttattttatcaatggctgcttatggtgacaatcatagattgttgtcataaagcgaattggattggccatccggtgacgttcagagttatttgtttgtgaaattcattctctcaatcctgtccacatttgacatacttccttaaatctttatacagaacaccttaacaca

SEQ ID NO: 22213 - DNA, 624 bp, synthetic construct
  source 1..624: mol_type = other DNA
taacaaacctatgttcaatagaagggggtacaaaccagtaccaccacgaacaagcacttctgtttccccggtgagatcacatagactgttcccacggttgaaagtgatcgatccgttatccgctcttgtacttcgagaagcctagtattatcttgggaccaacgatgcgttgcgatcagcactcgaccccagagtgtagcttaggtcgatgagtctggacattcctcaccggtgacggtggtccaggctgcgttggcggcctacctgtggcccaaagccacaggacgctagttgtgaacaaggtgtgaagagcctattgagctacatgagagtcctccggcccctgaatgcggctaatcctaaccacggagcaggcgattgcaaaccagcaattagcttgtcgtaatgcgtaagtctgtggcggaaccgactactttgggtgtccgtgtttccttttattttatcaatggctgcttatggtgacaatcatagattgttgtcataaagcgaattggattggccatccggtgacgttcagagttatttgtttgtgaaattcattctctcaatcctgtccacatttgacatacttccttaaatctttatacagaacaccttaacaca

SEQ ID NO: 22214 - DNA, 574 bp, synthetic construct
  source 1..574: mol_type = other DNA
caagcacttctgtttccccggtgagatcacatagactgttcccacggttgaaagtgatcgatccgttatccgctcttgtacttcgagaagcctagtattatcttgggaccaacgatgcgttgcgatcagcactcgaccccagagtgtagcttaggtcgatgagtctggacattcctcaccggtgacggtggtccaggctgcgttggcggcctacctgtggcccaaagccacaggacgctagttgtgaacaaggtgtgaagagcctattgagctacatgagagtcctccggcccctgaatgcggctaatcctaaccacggagcaggcgattgcaaaccagcaattagcttgtcgtaatgcgtaagtctgtggcggaaccgactactttgggtgtccgtgtttccttttattttatcaatggctgcttatggtgacaatcatagattgttgtcataaagcgaattggattggccatccggtgacgttcagagttatttgtttgtgaaattcattctctcaatcctgtccacatttgacatacttccttaaatctttatacagaacaccttaacaca

SEQ ID NO: 22215 - DNA, 524 bp, synthetic construct
  source 1..524: mol_type = other DNA
aaagtgatcgatccgttatccgctcttgtacttcgagaagcctagtattatcttgggaccaacgatgcgttgcgatcagcactcgaccccagagtgtagcttaggtcgatgagtctggacattcctcaccggtgacggtggtccaggctgcgttggcggcctacctgtggcccaaagccacaggacgctagttgtgaacaaggtgtgaagagcctattgagctacatgagagtcctccggcccctgaatgcggctaatcctaaccacggagcaggcgattgcaaaccagcaattagcttgtcgtaatgcgtaagtctgtggcggaaccgactactttgggtgtccgtgtttccttttattttatcaatggctgcttatggtgacaatcatagattgttgtcataaagcgaattggattggccatccggtgacgttcagagttatttgtttgtgaaattcattctctcaatcctgtccacatttgacatacttccttaaatctttatacagaacaccttaacaca

SEQ ID NO: 22216 - DNA, 675 bp, synthetic construct
  source 1..675: mol_type = other DNA
tttgtgcgcctgttttatacctcctccccgaagagtaacttagaagcttaacatacccatggccagcagcaggcgtgacataccagtcatgccccggtcaagcacttctgtctccccggactgagtatcaatagactgctcgcgcggttgaaggagaaaacgttcgttatccggctaactacttcgagaaacctagtaacaccatgaaagttgcagagtgtttcgttcagcacttcccccgtgtagatcaggtcgatgagtcactgcaaaccccacgggcgaccgtggcagtggctgcgttggcggcctgcccatgggaccacccatgggacgctctaatacagacatggtgtgaagagtctattgagctagttagtagtcctccggcccctgaatgcggctaatcctaactgtggagcacacgccctcaacccagggggtagtgtgtcgtaatgggcaactctacagcggaaccgactactttgggtgtccgtgtttccttttatctttatattggctgcttatggtgacaattgaagaattgttaccatatagctattggattggccatccggtgtctaatagagcaattgtatacctatttgttggatttgtccccttgtcatacacatctataaacaccctacaatatattgtaaaattgaatacaggaaa

SEQ ID NO: 22217 - DNA, 625 bp, synthetic construct
  source 1..625: mol_type = other DNA
acatacccatggccagcagcaggcgtgacataccagtcatgccccggtcaagcacttctgtctccccggactgagtatcaatagactgctcgcgcggttgaaggagaaaacgttcgttatccggctaactacttcgagaaacctagtaacaccatgaaagttgcagagtgtttcgttcagcacttcccccgtgtagatcaggtcgatgagtcactgcaaaccccacgggcgaccgtggcagtggctgcgttggcggcctgcccatgggaccacccatgggacgctctaatacagacatggtgtgaagagtctattgagctagttagtagtcctccggcccctgaatgcggctaatcctaactgtggagcacacgccctcaacccagggggtagtgtgtcgtaatgggcaactctacagcggaaccgactactttgggtgtccgtgtttccttttatctttatattggctgcttatggtgacaattgaagaattgttaccatatagctattggattggccatccggtgtctaatagagcaattgtatacctatttgttggatttgtccccttgtcatacacatctataaacaccctacaatatattgtaaaattgaatacaggaaa

SEQ ID NO: 22218 - DNA, 575 bp, synthetic construct
  source 1..575: mol_type = other DNA
agcacttctgtctccccggactgagtatcaatagactgctcgcgcggttgaaggagaaaacgttcgttatccggctaactacttcgagaaacctagtaacaccatgaaagttgcagagtgtttcgttcagcacttcccccgtgtagatcaggtcgatgagtcactgcaaaccccacgggcgaccgtggcagtggctgcgttggcggcctgcccatgggaccacccatgggacgctctaatacagacatggtgtgaagagtctattgagctagttagtagtcctccggcccctgaatgcggctaatcctaactgtggagcacacgccctcaacccagggggtagtgtgtcgtaatgggcaactctacagcggaaccgactactttgggtgtccgtgtttccttttatctttatattggctgcttatggtgacaattgaagaattgttaccatatagctattggattggccatccggtgtctaatagagcaattgtatacctatttgttggatttgtccccttgtcatacacatctataaacaccctacaatatattgtaaaattgaatacaggaaa

SEQ ID NO: 22219 - DNA, 525 bp, synthetic construct
  source 1..525: mol_type = other DNA
aaggagaaaacgttcgttatccggctaactacttcgagaaacctagtaacaccatgaaagttgcagagtgtttcgttcagcacttcccccgtgtagatcaggtcgatgagtcactgcaaaccccacgggcgaccgtggcagtggctgcgttggcggcctgcccatgggaccacccatgggacgctctaatacagacatggtgtgaagagtctattgagctagttagtagtcctccggcccctgaatgcggctaatcctaactgtggagcacacgccctcaacccagggggtagtgtgtcgtaatgggcaactctacagcggaaccgactactttgggtgtccgtgtttccttttatctttatattggctgcttatggtgacaattgaagaattgttaccatatagctattggattggccatccggtgtctaatagagcaattgtatacctatttgttggatttgtccccttgtcatacacatctataaacaccctacaatatattgtaaaattgaatacaggaaa

SEQ ID NO: 22220 - DNA, 675 bp, synthetic construct
  source 1..675: mol_type = other DNA
gtgcgcctgttttatatccctcccccccaaaagtgtaacgtagaagtttaatacactcacgaccaatagcaggcgtgacgcaccagtcacgtcttggtcaagtacttctgtctccccgggccaagtatcaatagactgcttacgcggttgaaggagaaaacgctcgttacccggctaactacttcgagaaacccagtagcaccatgaaagttgcagggtgtttcgttcagcacttcccccgtgtagaccaggtcgatgagtcactgcaaaccccacgggcgaccgtggcagtggctgcgttggcggcctgcccatggggtaacccatgggacgctctaatacagacatggtgtgaagagtctattgagctagttagtagtcctccggcccctgaatgcggctaatcctaactgcggagcacacaccctcaacccagggggcggtgtgtcgtaacgggtaactctgcagcggaaccgactactttgggtgtccgtgtttccttttatatttattatggctgcttatggtgacaattgaagaattgttaccatatagctattggattggccatccggtgtctaacagagcaattgtatacctatttgttggatttgtccctctgtcacacacacctctcaataccctatactatattatagagttgaatacaggaag

SEQ ID NO: 22221 - DNA, 625 bp, synthetic construct
  source 1..625: mol_type = other DNA
atacactcacgaccaatagcaggcgtgacgcaccagtcacgtcttggtcaagtacttctgtctccccgggccaagtatcaatagactgcttacgcggttgaaggagaaaacgctcgttacccggctaactacttcgagaaacccagtagcaccatgaaagttgcagggtgtttcgttcagcacttcccccgtgtagaccaggtcgatgagtcactgcaaaccccacgggcgaccgtggcagtggctgcgttggcggcctgcccatggggtaacccatgggacgctctaatacagacatggtgtgaagagtctattgagctagttagtagtcctccggcccctgaatgcggctaatcctaactgcggagcacacaccctcaacccagggggcggtgtgtcgtaacgggtaactctgcagcggaaccgactactttgggtgtccgtgtttccttttatatttattatggctgcttatggtgacaattgaagaattgttaccatatagctattggattggccatccggtgtctaacagagcaattgtatacctatttgttggatttgtccctctgtcacacacacctctcaataccctatactatattatagagttgaatacaggaag

SEQ ID NO: 22222 - DNA, 575 bp, synthetic construct
  source 1..575: mol_type = other DNA
agtacttctgtctccccgggccaagtatcaatagactgcttacgcggttgaaggagaaaacgctcgttacccggctaactacttcgagaaacccagtagcaccatgaaagttgcagggtgtttcgttcagcacttcccccgtgtagaccaggtcgatgagtcactgcaaaccccacgggcgaccgtggcagtggctgcgttggcggcctgcccatggggtaacccatgggacgctctaatacagacatggtgtgaagagtctattgagctagttagtagtcctccggcccctgaatgcggctaatcctaactgcggagcacacaccctcaacccagggggcggtgtgtcgtaacgggtaactctgcagcggaaccgactactttgggtgtccgtgtttccttttatatttattatggctgcttatggtgacaattgaagaattgttaccatatagctattggattggccatccggtgtctaacagagcaattgtatacctatttgttggatttgtccctctgtcacacacacctctcaataccctatactatattatagagttgaatacaggaag

SEQ ID NO: 22223 - DNA, 525 bp, synthetic construct
  source 1..525: mol_type = other DNA
aaggagaaaacgctcgttacccggctaactacttcgagaaacccagtagcaccatgaaagttgcagggtgtttcgttcagcacttcccccgtgtagaccaggtcgatgagtcactgcaaaccccacgggcgaccgtggcagtggctgcgttggcggcctgcccatggggtaacccatgggacgctctaatacagacatggtgtgaagagtctattgagctagttagtagtcctccggcccctgaatgcggctaatcctaactgcggagcacacaccctcaacccagggggcggtgtgtcgtaacgggtaactctgcagcggaaccgactactttgggtgtccgtgtttccttttatatttattatggctgcttatggtgacaattgaagaattgttaccatatagctattggattggccatccggtgtctaacagagcaattgtatacctatttgttggatttgtccctctgtcacacacacctctcaataccctatactatattatagagttgaatacaggaag

SEQ ID NO: 22224 - DNA, 675 bp, synthetic construct
  source 1..675: mol_type = other DNA
acctttgtgcgcctgttttatcaccctaccccatatgaaacttagaagtaatacatagccgaccaatagcaggtgtggcgtgccagccacatcttggtcaagcacttctgtttccccgggtcgagtatcaataagctgttcacacggctgaaggagaaaacacccgttatccggccaactacttcgagaaacctagtaccaccatgaacgttgcaaggtgtttcgctcagcacttcccccgtgtagatcaggccgatgagtcaccgcataccccacgggtgaccgtggcggtggctgcgttggcggcctgcctatgggttaacccataggacgccttaatactgacatggtgcgaagagtctattgagctagttggtagtcctccggcccctgaatgcggctaatcctaactgcggagcacacactcacaaaccagtgagcggtgtgtcgtaacgggcaactctgcagcggaaccgactactttgggtgtccgtgtttccttttacctttatattggctgcttatggtgacaatcagagaattgttaccatatagctattggattggccatccggtgtctaatagagctattgtatatctgtttgttggattcactccgctgacctacaaatctctaaacaccttgtgctatattttgaatctaaatacacgaaa

SEQ ID NO: 22225 - DNA, 625 bp, synthetic construct
  source 1..625: mol_type = other DNA
atacatagccgaccaatagcaggtgtggcgtgccagccacatcttggtcaagcacttctgtttccccgggtcgagtatcaataagctgttcacacggctgaaggagaaaacacccgttatccggccaactacttcgagaaacctagtaccaccatgaacgttgcaaggtgtttcgctcagcacttcccccgtgtagatcaggccgatgagtcaccgcataccccacgggtgaccgtggcggtggctgcgttggcggcctgcctatgggttaacccataggacgccttaatactgacatggtgcgaagagtctattgagctagttggtagtcctccggcccctgaatgcggctaatcctaactgcggagcacacactcacaaaccagtgagcggtgtgtcgtaacgggcaactctgcagcggaaccgactactttgggtgtccgtgtttccttttacctttatattggctgcttatggtgacaatcagagaattgttaccatatagctattggattggccatccggtgtctaatagagctattgtatatctgtttgttggattcactccgctgacctacaaatctctaaacaccttgtgctatattttgaatctaaatacacgaaa

SEQ ID NO: 22226 - DNA, 575 bp, synthetic construct
  source 1..575: mol_type = other DNA
agcacttctgtttccccgggtcgagtatcaataagctgttcacacggctgaaggagaaaacacccgttatccggccaactacttcgagaaacctagtaccaccatgaacgttgcaaggtgtttcgctcagcacttcccccgtgtagatcaggccgatgagtcaccgcataccccacgggtgaccgtggcggtggctgcgttggcggcctgcctatgggttaacccataggacgccttaatactgacatggtgcgaagagtctattgagctagttggtagtcctccggcccctgaatgcggctaatcctaactgcggagcacacactcacaaaccagtgagcggtgtgtcgtaacgggcaactctgcagcggaaccgactactttgggtgtccgtgtttccttttacctttatattggctgcttatggtgacaatcagagaattgttaccatatagctattggattggccatccggtgtctaatagagctattgtatatctgtttgttggattcactccgctgacctacaaatctctaaacaccttgtgctatattttgaatctaaatacacgaaa

SEQ ID NO: 22227 - DNA, 525 bp, synthetic construct
  source 1..525: mol_type = other DNA
aaggagaaaacacccgttatccggccaactacttcgagaaacctagtaccaccatgaacgttgcaaggtgtttcgctcagcacttcccccgtgtagatcaggccgatgagtcaccgcataccccacgggtgaccgtggcggtggctgcgttggcggcctgcctatgggttaacccataggacgccttaatactgacatggtgcgaagagtctattgagctagttggtagtcctccggcccctgaatgcggctaatcctaactgcggagcacacactcacaaaccagtgagcggtgtgtcgtaacgggcaactctgcagcggaaccgactactttgggtgtccgtgtttccttttacctttatattggctgcttatggtgacaatcagagaattgttaccatatagctattggattggccatccggtgtctaatagagctattgtatatctgtttgttggattcactccgctgacctacaaatctctaaacaccttgtgctatattttgaatctaaatacacgaaa

SEQ ID NO: 22228 - DNA, 675 bp, synthetic construct
  source 1..675: mol_type = other DNA
actctggtatcacggtacctttgcacgcctattttataccccttccccatcgtaacttagaagcaacaaacaaactgcccaatagcagcacaacacccagttgtgttaggggcaagcacttctgtttccccggaagggtctgacggtatgctgtacccacggcagaagtatgacctaccgttaaccggccatgtacttcgagaagcctagtaccattatgaaggttgattgatgttacgctccccagcaaccccagctggtagttctggtcgatgagtctcggcattccccacgggcgaccgtggccgaggctgcgttggcggccagcctacaccatacggtgtaggacgtcaagatactgacatggtgtgaagagcctattgagctacgtggtagtcctccggcccctgaatgcggctaatcctaactccggagcatccgccagtaagcccactggaagggtgtcgtaatgcgaaagtctggagcggaaccgactactttgggtgtccgtgtttcctgttttacttattgtttggctgcttatggtgacaacttatagttatcatcataagctacttggtcttgccaaccggagaattatttggttatttgttggtttcataaacctacagtcgtattttcctgtcttattaattgttctcaaaattaacaaca

SEQ ID NO: 22229 - DNA, 625 bp, synthetic construct
  source 1..625: mol_type = other DNA
cgtaacttagaagcaacaaacaaactgcccaatagcagcacaacacccagttgtgttaggggcaagcacttctgtttccccggaagggtctgacggtatgctgtacccacggcagaagtatgacctaccgttaaccggccatgtacttcgagaagcctagtaccattatgaaggttgattgatgttacgctccccagcaaccccagctggtagttctggtcgatgagtctcggcattccccacgggcgaccgtggccgaggctgcgttggcggccagcctacaccatacggtgtaggacgtcaagatactgacatggtgtgaagagcctattgagctacgtggtagtcctccggcccctgaatgcggctaatcctaactccggagcatccgccagtaagcccactggaagggtgtcgtaatgcgaaagtctggagcggaaccgactactttgggtgtccgtgtttcctgttttacttattgtttggctgcttatggtgacaacttatagttatcatcataagctacttggtcttgccaaccggagaattatttggttatttgttggtttcataaacctacagtcgtattttcctgtcttattaattgttctcaaaattaacaaca

SEQ ID NO: 22230 - DNA, 575 bp, synthetic construct
  source 1..575: mol_type = other DNA
ttgtgttaggggcaagcacttctgtttccccggaagggtctgacggtatgctgtacccacggcagaagtatgacctaccgttaaccggccatgtacttcgagaagcctagtaccattatgaaggttgattgatgttacgctccccagcaaccccagctggtagttctggtcgatgagtctcggcattccccacgggcgaccgtggccgaggctgcgttggcggccagcctacaccatacggtgtaggacgtcaagatactgacatggtgtgaagagcctattgagctacgtggtagtcctccggcccctgaatgcggctaatcctaactccggagcatccgccagtaagcccactggaagggtgtcgtaatgcgaaagtctggagcggaaccgactactttgggtgtccgtgtttcctgttttacttattgtttggctgcttatggtgacaacttatagttatcatcataagctacttggtcttgccaaccggagaattatttggttatttgttggtttcataaacctacagtcgtattttcctgtcttattaattgttctcaaaattaacaaca

SEQ ID NO: 22231 - DNA, 525 bp, synthetic construct
  source 1..525: mol_type = other DNA
ctgtacccacggcagaagtatgacctaccgttaaccggccatgtacttcgagaagcctagtaccattatgaaggttgattgatgttacgctccccagcaaccccagctggtagttctggtcgatgagtctcggcattccccacgggcgaccgtggccgaggctgcgttggcggccagcctacaccatacggtgtaggacgtcaagatactgacatggtgtgaagagcctattgagctacgtggtagtcctccggcccctgaatgcggctaatcctaactccggagcatccgccagtaagcccactggaagggtgtcgtaatgcgaaagtctggagcggaaccgactactttgggtgtccgtgtttcctgttttacttattgtttggctgcttatggtgacaacttatagttatcatcataagctacttggtcttgccaaccggagaattatttggttatttgttggtttcataaacctacagtcgtattttcctgtcttattaattgttctcaaaattaacaaca

SEQ ID NO: 22232 - DNA, 675 bp, synthetic construct
  source 1..675: mol_type = other DNA
ctttgtacgcctgttttatattccttcccctatcgtaacttagaagtttcaaacacagctcaacagacagtagtacataccagtactgctacgagcaagcacttctgttaccccggtgaagtcacatagactgtgcccacggttgaaagtgactgatccgttacccgctttagtacttcgagaagcctagtaatatcttggaatcttcgatgcgttgcgctcaacactcaaccccagagtgtagcttaggtcgatgagtctggacactccccaccggcgacggtggtccaggctgcgttggcggcctacctgtggcccaaagccacaggacgctagttgtgaacaaggtgtgaagagcctattgagctactaaagagtcctccggcccctgaatgcggctaatcccaaccacggagcaagtgctcacaatccagtgagtggcttgtcgtaacgagcaattctgtggcggaaccgactactttgggtgtccgtgtttccttttatttttatcattggctgcttatggtgacaatctaagattgccatcatatagcttttggattggccatccggtgatattttgaattactcagcttgctgttcacagcactcttcaaatagtaattatttattaccacctgcagtttgttcttaaattgtctccagacagtcaaa

SEQ ID NO: 22233 - DNA, 625 bp, synthetic construct
  source 1..625: mol_type = other DNA
aaacacagctcaacagacagtagtacataccagtactgctacgagcaagcacttctgttaccccggtgaagtcacatagactgtgcccacggttgaaagtgactgatccgttacccgctttagtacttcgagaagcctagtaatatcttggaatcttcgatgcgttgcgctcaacactcaaccccagagtgtagcttaggtcgatgagtctggacactccccaccggcgacggtggtccaggctgcgttggcggcctacctgtggcccaaagccacaggacgctagttgtgaacaaggtgtgaagagcctattgagctactaaagagtcctccggcccctgaatgcggctaatcccaaccacggagcaagtgctcacaatccagtgagtggcttgtcgtaacgagcaattctgtggcggaaccgactactttgggtgtccgtgtttccttttatttttatcattggctgcttatggtgacaatctaagattgccatcatatagcttttggattggccatccggtgatattttgaattactcagcttgctgttcacagcactcttcaaatagtaattatttattaccacctgcagtttgttcttaaattgtctccagacagtcaaa

SEQ ID NO: 22234 - DNA, 575 bp, synthetic construct
  source 1..575: mol_type = other DNA
acttctgttaccccggtgaagtcacatagactgtgcccacggttgaaagtgactgatccgttacccgctttagtacttcgagaagcctagtaatatcttggaatcttcgatgcgttgcgctcaacactcaaccccagagtgtagcttaggtcgatgagtctggacactccccaccggcgacggtggtccaggctgcgttggcggcctacctgtggcccaaagccacaggacgctagttgtgaacaaggtgtgaagagcctattgagctactaaagagtcctccggcccctgaatgcggctaatcccaaccacggagcaagtgctcacaatccagtgagtggcttgtcgtaacgagcaattctgtggcggaaccgactactttgggtgtccgtgtttccttttatttttatcattggctgcttatggtgacaatctaagattgccatcatatagcttttggattggccatccggtgatattttgaattactcagcttgctgttcacagcactcttcaaatagtaattatttattaccacctgcagtttgttcttaaattgtctccagacagtcaaa

SEQ ID NO: 22235 - DNA, 525 bp, synthetic construct
  source 1..525: mol_type = other DNA
gactgatccgttacccgctttagtacttcgagaagcctagtaatatcttggaatcttcgatgcgttgcgctcaacactcaaccccagagtgtagcttaggtcgatgagtctggacactccccaccggcgacggtggtccaggctgcgttggcggcctacctgtggcccaaagccacaggacgctagttgtgaacaaggtgtgaagagcctattgagctactaaagagtcctccggcccctgaatgcggctaatcccaaccacggagcaagtgctcacaatccagtgagtggcttgtcgtaacgagcaattctgtggcggaaccgactactttgggtgtccgtgtttccttttatttttatcattggctgcttatggtgacaatctaagattgccatcatatagcttttggattggccatccggtgatattttgaattactcagcttgctgttcacagcactcttcaaatagtaattatttattaccacctgcagtttgttcttaaattgtctccagacagtcaaa

SEQ ID NO: 22236 - DNA, 675 bp, synthetic construct
  source 1..675: mol_type = other DNA
cttgtgcgcctgttttatacaccctacccccaaaacgtaatttagaagcaagtcaacaaagaccaatagcaagcacggcacaccagctgtgttttggtcaagcacttctgttaccccggactgagtatcaataggctactcacgtggctgaaggagaaaacgttcgttatccgtccaattacttcgagaagcctagtaacaccatagaggttgcgcagcgtttcgctccgcactaccccagtgtagatcaggtcgatgagtcaccgcattccccacgggtgaccgtggcggtggctgcgttggcggcctgcccatggggcaacccatgggacgcttcaatactgacatggtgcgaagagcctattgagctaattggaagtcctccggcccctgaatgcggctaatcctaactgcggagctggtacccacaaaccagtgggtggccagtcgtaacgggcaactctgcagcggaaccgactactttgggtgtccgtgtttcattttattcctatactggctgcttatggtgacaattgaaagattgttgccatatagctattggattggccatccggtgacaaataaagcgattgtttatcagttcattggtttcgtaccgctaaactacacaacattaaacaccctcaactttatcctattgctcaacacaacaag

SEQ ID NO: 22237 - DNA, 625 bp, synthetic construct
  source 1..625: mol_type = other DNA
agtcaacaaagaccaatagcaagcacggcacaccagctgtgttttggtcaagcacttctgttaccccggactgagtatcaataggctactcacgtggctgaaggagaaaacgttcgttatccgtccaattacttcgagaagcctagtaacaccatagaggttgcgcagcgtttcgctccgcactaccccagtgtagatcaggtcgatgagtcaccgcattccccacgggtgaccgtggcggtggctgcgttggcggcctgcccatggggcaacccatgggacgcttcaatactgacatggtgcgaagagcctattgagctaattggaagtcctccggcccctgaatgcggctaatcctaactgcggagctggtacccacaaaccagtgggtggccagtcgtaacgggcaactctgcagcggaaccgactactttgggtgtccgtgtttcattttattcctatactggctgcttatggtgacaattgaaagattgttgccatatagctattggattggccatccggtgacaaataaagcgattgtttatcagttcattggtttcgtaccgctaaactacacaacattaaacaccctcaactttatcctattgctcaacacaacaag

SEQ ID NO: 22238 - DNA, 575 bp, synthetic construct
  source 1..575: mol_type = other DNA
agcacttctgttaccccggactgagtatcaataggctactcacgtggctgaaggagaaaacgttcgttatccgtccaattacttcgagaagcctagtaacaccatagaggttgcgcagcgtttcgctccgcactaccccagtgtagatcaggtcgatgagtcaccgcattccccacgggtgaccgtggcggtggctgcgttggcggcctgcccatggggcaacccatgggacgcttcaatactgacatggtgcgaagagcctattgagctaattggaagtcctccggcccctgaatgcggctaatcctaactgcggagctggtacccacaaaccagtgggtggccagtcgtaacgggcaactctgcagcggaaccgactactttgggtgtccgtgtttcattttattcctatactggctgcttatggtgacaattgaaagattgttgccatatagctattggattggccatccggtgacaaataaagcgattgtttatcagttcattggtttcgtaccgctaaactacacaacattaaacaccctcaactttatcctattgctcaacacaacaag

SEQ ID NO: 22239 - DNA, 525 bp, synthetic construct
  source 1..525: mol_type = other DNA
aaggagaaaacgttcgttatccgtccaattacttcgagaagcctagtaacaccatagaggttgcgcagcgtttcgctccgcactaccccagtgtagatcaggtcgatgagtcaccgcattccccacgggtgaccgtggcggtggctgcgttggcggcctgcccatggggcaacccatgggacgcttcaatactgacatggtgcgaagagcctattgagctaattggaagtcctccggcccctgaatgcggctaatcctaactgcggagctggtacccacaaaccagtgggtggccagtcgtaacgggcaactctgcagcggaaccgactactttgggtgtccgtgtttcattttattcctatactggctgcttatggtgacaattgaaagattgttgccatatagctattggattggccatccggtgacaaataaagcgattgtttatcagttcattggtttcgtaccgctaaactacacaacattaaacaccctcaactttatcctattgctcaacacaacaag

SEQ ID NO: 22240 - DNA, 676 bp, synthetic construct
  source 1..676: mol_type = other DNA
ccttgtgcgcctgttttataaccctcccccgattcgtaacttagaagcaatgagcctcactgatcaacagtaggcgcggcgcaccagccgtgtcttgatcaagcactcctgtttccccgggctgagtatcaatagactgcttgcgcggttgaaggagaaaacgctcgttacccggctaactacttcgagaaacctagtagcaccatcgaaattgcagagtgtttcgctcagcacttcccccgtgtagatcaggtcgatgagtcactgcaacccccacgggcgaccgtggcagtggctgcgttggcggcctgcctatggggcaacccataggacgctctaaaatggacatggtgtgaagagtctattgagctagttagtagtcctccggcccctgaatgcggctaatcctaactgcggagcgcatgcccccaaaccagagggtggtgcgtcgtaacgggcaactctgcagcggaaccgactactttgggtgtccgtgtttccttttattcttactatggctgcttatggtgacaattgaagaattgttaccatatagctattggattggccatccggtgtctaatagagctattgtatatttatttgttggatttgttccattgacatatacatcacttaatacattaaacttcattgtgagattaaacacaagaaa

SEQ ID NO: 22241 - DNA, 626 bp, synthetic construct
  source 1..626: mol_type = other DNA
tgagcctcactgatcaacagtaggcgcggcgcaccagccgtgtcttgatcaagcactcctgtttccccgggctgagtatcaatagactgcttgcgcggttgaaggagaaaacgctcgttacccggctaactacttcgagaaacctagtagcaccatcgaaattgcagagtgtttcgctcagcacttcccccgtgtagatcaggtcgatgagtcactgcaacccccacgggcgaccgtggcagtggctgcgttggcggcctgcctatggggcaacccataggacgctctaaaatggacatggtgtgaagagtctattgagctagttagtagtcctccggcccctgaatgcggctaatcctaactgcggagcgcatgcccccaaaccagagggtggtgcgtcgtaacgggcaactctgcagcggaaccgactactttgggtgtccgtgtttccttttattcttactatggctgcttatggtgacaattgaagaattgttaccatatagctattggattggccatccggtgtctaatagagctattgtatatttatttgttggatttgttccattgacatatacatcacttaatacattaaacttcattgtgagattaaacacaagaaa

SEQ ID NO: 22242 - DNA, 576 bp, synthetic construct
  source 1..576: mol_type = other DNA
aagcactcctgtttccccgggctgagtatcaatagactgcttgcgcggttgaaggagaaaacgctcgttacccggctaactacttcgagaaacctagtagcaccatcgaaattgcagagtgtttcgctcagcacttcccccgtgtagatcaggtcgatgagtcactgcaacccccacgggcgaccgtggcagtggctgcgttggcggcctgcctatggggcaacccataggacgctctaaaatggacatggtgtgaagagtctattgagctagttagtagtcctccggcccctgaatgcggctaatcctaactgcggagcgcatgcccccaaaccagagggtggtgcgtcgtaacgggcaactctgcagcggaaccgactactttgggtgtccgtgtttccttttattcttactatggctgcttatggtgacaattgaagaattgttaccatatagctattggattggccatccggtgtctaatagagctattgtatatttatttgttggatttgttccattgacatatacatcacttaatacattaaacttcattgtgagattaaacacaagaaa

SEQ ID NO: 22243 - DNA, 526 bp, synthetic construct
  source 1..526: mol_type = other DNA
gaaggagaaaacgctcgttacccggctaactacttcgagaaacctagtagcaccatcgaaattgcagagtgtttcgctcagcacttcccccgtgtagatcaggtcgatgagtcactgcaacccccacgggcgaccgtggcagtggctgcgttggcggcctgcctatggggcaacccataggacgctctaaaatggacatggtgtgaagagtctattgagctagttagtagtcctccggcccctgaatgcggctaatcctaactgcggagcgcatgcccccaaaccagagggtggtgcgtcgtaacgggcaactctgcagcggaaccgactactttgggtgtccgtgtttccttttattcttactatggctgcttatggtgacaattgaagaattgttaccatatagctattggattggccatccggtgtctaatagagctattgtatatttatttgttggatttgttccattgacatatacatcacttaatacattaaacttcattgtgagattaaacacaagaaa

SEQ ID NO: 22244 - DNA, 676 bp, synthetic construct
  source 1..676: mol_type = other DNA
gtacaccggtatcacggtacccttgtacgcctgttttatactccctaccccgtaacttagaagcattgactcaagttcaatagtaggggtacaaaccagtaccaccacgaacaagcacttctgtttccccggtgatgtcgtatagactgtacccacggttgaaagtgacagatccgttacccgcttttgtacttcgagaagcccagtaccaccttggaatcttcgatgcgttgcgctcagcactcaatcccagagtgtagcttaggtcgatgagtctggacgttcctcaccggcgacggtggtccaggctgcgttggcggcctacctgtggcccaaagccacaggacgctagttgtgaacaaggtgtgaagagcctattgagctacaaaagagtcctccggcccctgaatgcggctaatcctaaccacggagcaggtgatcacaagccagtgattagcctgtcgtaatgcgcaagtctgtggcggaaccgactactttgggtgtccgtgtttccttttatttcatttatggctgcttatggtgacaatcatagattgttgtcataaagcgaattggattggccatccggtgagagtttagcgctttatttgtctgctcatcgaacttgcacttttgaattcttaccccttgcaccttattagacagtggtatcatc

SEQ ID NO: 22245 - DNA, 626 bp, synthetic construct
  source 1..626: mol_type = other DNA
cgtaacttagaagcattgactcaagttcaatagtaggggtacaaaccagtaccaccacgaacaagcacttctgtttccccggtgatgtcgtatagactgtacccacggttgaaagtgacagatccgttacccgcttttgtacttcgagaagcccagtaccaccttggaatcttcgatgcgttgcgctcagcactcaatcccagagtgtagcttaggtcgatgagtctggacgttcctcaccggcgacggtggtccaggctgcgttggcggcctacctgtggcccaaagccacaggacgctagttgtgaacaaggtgtgaagagcctattgagctacaaaagagtcctccggcccctgaatgcggctaatcctaaccacggagcaggtgatcacaagccagtgattagcctgtcgtaatgcgcaagtctgtggcggaaccgactactttgggtgtccgtgtttccttttatttcatttatggctgcttatggtgacaatcatagattgttgtcataaagcgaattggattggccatccggtgagagtttagcgctttatttgtctgctcatcgaacttgcacttttgaattcttaccccttgcaccttattagacagtggtatcatc

SEQ ID NO: 22246 - DNA, 576 bp, synthetic construct
  source 1..576: mol_type = other DNA
accaccacgaacaagcacttctgtttccccggtgatgtcgtatagactgtacccacggttgaaagtgacagatccgttacccgcttttgtacttcgagaagcccagtaccaccttggaatcttcgatgcgttgcgctcagcactcaatcccagagtgtagcttaggtcgatgagtctggacgttcctcaccggcgacggtggtccaggctgcgttggcggcctacctgtggcccaaagccacaggacgctagttgtgaacaaggtgtgaagagcctattgagctacaaaagagtcctccggcccctgaatgcggctaatcctaaccacggagcaggtgatcacaagccagtgattagcctgtcgtaatgcgcaagtctgtggcggaaccgactactttgggtgtccgtgtttccttttatttcatttatggctgcttatggtgacaatcatagattgttgtcataaagcgaattggattggccatccggtgagagtttagcgctttatttgtctgctcatcgaacttgcacttttgaattcttaccccttgcaccttattagacagtggtatcatc

SEQ ID NO: 22247 - DNA, 526 bp, synthetic construct
  source 1..526: mol_type = other DNA
acccacggttgaaagtgacagatccgttacccgcttttgtacttcgagaagcccagtaccaccttggaatcttcgatgcgttgcgctcagcactcaatcccagagtgtagcttaggtcgatgagtctggacgttcctcaccggcgacggtggtccaggctgcgttggcggcctacctgtggcccaaagccacaggacgctagttgtgaacaaggtgtgaagagcctattgagctacaaaagagtcctccggcccctgaatgcggctaatcctaaccacggagcaggtgatcacaagccagtgattagcctgtcgtaatgcgcaagtctgtggcggaaccgactactttgggtgtccgtgtttccttttatttcatttatggctgcttatggtgacaatcatagattgttgtcataaagcgaattggattggccatccggtgagagtttagcgctttatttgtctgctcatcgaacttgcacttttgaattcttaccccttgcaccttattagacagtggtatcatc

SEQ ID NO: 22248 - DNA, 676 bp, synthetic construct
  source 1..676: mol_type = other DNA
cccttgtacgcctgttttatactccctaccccgtaacttagaagcaaaaactcaagttcaatagcaggggggtacaaaccagtaccaccacgaacaagcacttctgtttccccggtgacttcgcataaactgtacccacggttgaaagcgatagatccgttatccgcttttgtacttcgagaagcctagtaccatcttggaatcttcgatgcgttgcgatcagcactcaaacccagagtgtagcttaggtcgatgagtctggacgatcctcaccggcgacggtggtccaggctgcgttggcggcctacctgtggtccaaagccacaggacgctagttgtgaacaaggtgtgaagagcctattgagctacaaaagagtcctccggcccctgaatgcggctaatcccaaccacggagcaggcgatcacaacccagtgactagcctgtcgtaatgcgcaagtctgtggcggaaccgactactttgggtgtccgtgtttctctttattccattaatggctgcttatggtgacaatcatagattgttatcataaagcgattcggattggccatccagtgaaaatcaagtgtactactcacttatttattgagtttacaactctaacccatcactcactacaacccattttattgtgtcactatccagacagtggtatcatc

SEQ ID NO: 22249 - DNA, 626 bp, synthetic construct
  source 1..626: mol_type = other DNA
ctcaagttcaatagcaggggggtacaaaccagtaccaccacgaacaagcacttctgtttccccggtgacttcgcataaactgtacccacggttgaaagcgatagatccgttatccgcttttgtacttcgagaagcctagtaccatcttggaatcttcgatgcgttgcgatcagcactcaaacccagagtgtagcttaggtcgatgagtctggacgatcctcaccggcgacggtggtccaggctgcgttggcggcctacctgtggtccaaagccacaggacgctagttgtgaacaaggtgtgaagagcctattgagctacaaaagagtcctccggcccctgaatgcggctaatcccaaccacggagcaggcgatcacaacccagtgactagcctgtcgtaatgcgcaagtctgtggcggaaccgactactttgggtgtccgtgtttctctttattccattaatggctgcttatggtgacaatcatagattgttatcataaagcgattcggattggccatccagtgaaaatcaagtgtactactcacttatttattgagtttacaactctaacccatcactcactacaacccattttattgtgtcactatccagacagtggtatcatc

SEQ ID NO: 22250 - DNA, 576 bp, synthetic construct
  source 1..576: mol_type = other DNA
cttctgtttccccggtgacttcgcataaactgtacccacggttgaaagcgatagatccgttatccgcttttgtacttcgagaagcctagtaccatcttggaatcttcgatgcgttgcgatcagcactcaaacccagagtgtagcttaggtcgatgagtctggacgatcctcaccggcgacggtggtccaggctgcgttggcggcctacctgtggtccaaagccacaggacgctagttgtgaacaaggtgtgaagagcctattgagctacaaaagagtcctccggcccctgaatgcggctaatcccaaccacggagcaggcgatcacaacccagtgactagcctgtcgtaatgcgcaagtctgtggcggaaccgactactttgggtgtccgtgtttctctttattccattaatggctgcttatggtgacaatcatagattgttatcataaagcgattcggattggccatccagtgaaaatcaagtgtactactcacttatttattgagtttacaactctaacccatcactcactacaacccattttattgtgtcactatccagacagtggtatcatc

SEQ ID NO: 22251 - DNA, 526 bp, synthetic construct
  source 1..526: mol_type = other DNA
atagatccgttatccgcttttgtacttcgagaagcctagtaccatcttggaatcttcgatgcgttgcgatcagcactcaaacccagagtgtagcttaggtcgatgagtctggacgatcctcaccggcgacggtggtccaggctgcgttggcggcctacctgtggtccaaagccacaggacgctagttgtgaacaaggtgtgaagagcctattgagctacaaaagagtcctccggcccctgaatgcggctaatcccaaccacggagcaggcgatcacaacccagtgactagcctgtcgtaatgcgcaagtctgtggcggaaccgactactttgggtgtccgtgtttctctttattccattaatggctgcttatggtgacaatcatagattgttatcataaagcgattcggattggccatccagtgaaaatcaagtgtactactcacttatttattgagtttacaactctaacccatcactcactacaacccattttattgtgtcactatccagacagtggtatcatc

SEQ ID NO: 22252 - DNA, 676 bp, synthetic construct
  source 1..676: mol_type = other DNA
tttgtgcgcctgttttaaaacccctacccccaaacgcaacttagaagataagcacacagtccaatagagggcgtggcactccagccatgtcttggacaggcactcctgttaccccggactaagtaccaataaactgctcacgcggttgaaggggaaaacgttcgttatccggctaactacttcgaggaacctagtaacaccgtgaaagttgcagagtgtttcgctcagcacaaccccagtgtagatcaggtcgatgagtcaccacgttccccacgggcgaccgtggtggtggctgcgctggcggcctgcctatgggtcaacccataggacgctctaacacagacacggtgtgaagagtcgattgagctagttagtagtcctccggcccctgaatgcggctaatcctaactgcggagcgtgcgtccccaaaccaggagatagcgcgtcgtaacgggcaactctgcagcggaaccgactactttgggtgtccgtgtttccttttttttacctctatttggctgcttatggtgacaattgaagaattgttaccatatagctattggattggccatccggtgactaatagagctattgtttacctctttgttggttttgtaccactgaacctcatagttctaaatacccttaatttgattttagtgcttaacacatcaaa

SEQ ID NO: 22253 - DNA, 626 bp, synthetic construct
  source 1..626: mol_type = other DNA
agcacacagtccaatagagggcgtggcactccagccatgtcttggacaggcactcctgttaccccggactaagtaccaataaactgctcacgcggttgaaggggaaaacgttcgttatccggctaactacttcgaggaacctagtaacaccgtgaaagttgcagagtgtttcgctcagcacaaccccagtgtagatcaggtcgatgagtcaccacgttccccacgggcgaccgtggtggtggctgcgctggcggcctgcctatgggtcaacccataggacgctctaacacagacacggtgtgaagagtcgattgagctagttagtagtcctccggcccctgaatgcggctaatcctaactgcggagcgtgcgtccccaaaccaggagatagcgcgtcgtaacgggcaactctgcagcggaaccgactactttgggtgtccgtgtttccttttttttacctctatttggctgcttatggtgacaattgaagaattgttaccatatagctattggattggccatccggtgactaatagagctattgtttacctctttgttggttttgtaccactgaacctcatagttctaaatacccttaatttgattttagtgcttaacacatcaaa

SEQ ID NO: 22254 - DNA, 576 bp, synthetic construct
  source 1..576: mol_type = other DNA
cactcctgttaccccggactaagtaccaataaactgctcacgcggttgaaggggaaaacgttcgttatccggctaactacttcgaggaacctagtaacaccgtgaaagttgcagagtgtttcgctcagcacaaccccagtgtagatcaggtcgatgagtcaccacgttccccacgggcgaccgtggtggtggctgcgctggcggcctgcctatgggtcaacccataggacgctctaacacagacacggtgtgaagagtcgattgagctagttagtagtcctccggcccctgaatgcggctaatcctaactgcggagcgtgcgtccccaaaccaggagatagcgcgtcgtaacgggcaactctgcagcggaaccgactactttgggtgtccgtgtttccttttttttacctctatttggctgcttatggtgacaattgaagaattgttaccatatagctattggattggccatccggtgactaatagagctattgtttacctctttgttggttttgtaccactgaacctcatagttctaaatacccttaatttgattttagtgcttaacacatcaaa

SEQ ID NO: 22255 - DNA, 526 bp, synthetic construct
  source 1..526: mol_type = other DNA
ggggaaaacgttcgttatccggctaactacttcgaggaacctagtaacaccgtgaaagttgcagagtgtttcgctcagcacaaccccagtgtagatcaggtcgatgagtcaccacgttccccacgggcgaccgtggtggtggctgcgctggcggcctgcctatgggtcaacccataggacgctctaacacagacacggtgtgaagagtcgattgagctagttagtagtcctccggcccctgaatgcggctaatcctaactgcggagcgtgcgtccccaaaccaggagatagcgcgtcgtaacgggcaactctgcagcggaaccgactactttgggtgtccgtgtttccttttttttacctctatttggctgcttatggtgacaattgaagaattgttaccatatagctattggattggccatccggtgactaatagagctattgtttacctctttgttggttttgtaccactgaacctcatagttctaaatacccttaatttgattttagtgcttaacacatcaaa

SEQ ID NO: 22256 - DNA, 677 bp, synthetic construct
  source 1..677: mol_type = other DNA
gtactccggtaccccggtacccttgtacgcctgttttatactccctttcccaagtaactttagaagaaataaactaatgttcaacaggagggggtacaaaccagtaccaccacgaacacacacttctgtttccccggtgaagttgcatagactgtacccacggttgaaagcgatgaatccgttacccgcttaggtacttcgagaagcctagtatcatcttggaatcttcgatgcgttgcgatcagcactctaccccgagtgtagcttgggtcgatgagtctggacaccccacaccggcgacggtggtccaggctgcgttggcggcctacccatggctagcaccatgggacgctagttgtgaacaaggtgcgaagagcctattgagctacctgagagtcctccggcccctgaatgcggctaatcccaaccacggagcaaatgctcacaatccagtgagtggtttgtcgtaatgcgcaagtctgtggcggaaccgactactttgggcgtccgtgtttccttttatttttattatggctgcttatggtgacaatctgagattgttatcatatagctattggattagccatccggtgatatcttgaaattttgccataactttttcacaaatcctacaacattacactacactttctcttgaataattgagacaactcata

SEQ ID NO: 22257 - DNA, 627 bp, synthetic construct
  source 1..627: mol_type = other DNA
caagtaactttagaagaaataaactaatgttcaacaggagggggtacaaaccagtaccaccacgaacacacacttctgtttccccggtgaagttgcatagactgtacccacggttgaaagcgatgaatccgttacccgcttaggtacttcgagaagcctagtatcatcttggaatcttcgatgcgttgcgatcagcactctaccccgagtgtagcttgggtcgatgagtctggacaccccacaccggcgacggtggtccaggctgcgttggcggcctacccatggctagcaccatgggacgctagttgtgaacaaggtgcgaagagcctattgagctacctgagagtcctccggcccctgaatgcggctaatcccaaccacggagcaaatgctcacaatccagtgagtggtttgtcgtaatgcgcaagtctgtggcggaaccgactactttgggcgtccgtgtttccttttatttttattatggctgcttatggtgacaatctgagattgttatcatatagctattggattagccatccggtgatatcttgaaattttgccataactttttcacaaatcctacaacattacactacactttctcttgaataattgagacaactcata

SEQ ID NO: 22258 - DNA, 577 bp, synthetic construct
  source 1..577: mol_type = other DNA
ccagtaccaccacgaacacacacttctgtttccccggtgaagttgcatagactgtacccacggttgaaagcgatgaatccgttacccgcttaggtacttcgagaagcctagtatcatcttggaatcttcgatgcgttgcgatcagcactctaccccgagtgtagcttgggtcgatgagtctggacaccccacaccggcgacggtggtccaggctgcgttggcggcctacccatggctagcaccatgggacgctagttgtgaacaaggtgcgaagagcctattgagctacctgagagtcctccggcccctgaatgcggctaatcccaaccacggagcaaatgctcacaatccagtgagtggtttgtcgtaatgcgcaagtctgtggcggaaccgactactttgggcgtccgtgtttccttttatttttattatggctgcttatggtgacaatctgagattgttatcatatagctattggattagccatccggtgatatcttgaaattttgccataactttttcacaaatcctacaacattacactacactttctcttgaataattgagacaactcata

SEQ ID NO: 22259 - DNA, 527 bp, synthetic construct
  source 1..527: mol_type = other DNA
actgtacccacggttgaaagcgatgaatccgttacccgcttaggtacttcgagaagcctagtatcatcttggaatcttcgatgcgttgcgatcagcactctaccccgagtgtagcttgggtcgatgagtctggacaccccacaccggcgacggtggtccaggctgcgttggcggcctacccatggctagcaccatgggacgctagttgtgaacaaggtgcgaagagcctattgagctacctgagagtcctccggcccctgaatgcggctaatcccaaccacggagcaaatgctcacaatccagtgagtggtttgtcgtaatgcgcaagtctgtggcggaaccgactactttgggcgtccgtgtttccttttatttttattatggctgcttatggtgacaatctgagattgttatcatatagctattggattagccatccggtgatatcttgaaattttgccataactttttcacaaatcctacaacattacactacactttctcttgaataattgagacaactcata

SEQ ID NO: 22260 - DNA, 678 bp, synthetic construct
  source 1..678: mol_type = other DNA
ctttgtacgcctgttttatatccctttccccattgtaacttagaagtttcaaagtacagttcaatagacagtagtacaaaccagtactgctacgaacaagcacttctgttgccccggtgtagttgcatagactgtacccacggttgaaagcaactgatccgttatccgctttagtacttcgagaagcctagtagcaccttgggatcttcgatgcgttgcgctcagcactcaaccccagagtgtagcttgggtcgatgagtctggacattcctcaccggcgacggtggtccaggctgcgttggcggcctacctgtggcccaaagccacaggacgctagttgtgaacaaggtgtgaagagcctattgagctactaaagagtcctccggcccctgaatgcggctaatcctaaccacggagcaagtgctcacagtccagtgagtagcttgtcgtaatgagcaattctgtggcggaaccgactactttgggtgtccgtgtttccttttatttttatcattggctgcttatggtgacaatctaaggttgccatcatatagcttttggattggccatcccggtgatatttcgaattattcaatttgctgtttgcagctccttttaaacagtattcactcaccagcattcatattttactcttgagttattaacaaatagtcaaaa

SEQ ID NO: 22261 - DNA, 628 bp, synthetic construct
  source 1..628: mol_type = other DNA
aaagtacagttcaatagacagtagtacaaaccagtactgctacgaacaagcacttctgttgccccggtgtagttgcatagactgtacccacggttgaaagcaactgatccgttatccgctttagtacttcgagaagcctagtagcaccttgggatcttcgatgcgttgcgctcagcactcaaccccagagtgtagcttgggtcgatgagtctggacattcctcaccggcgacggtggtccaggctgcgttggcggcctacctgtggcccaaagccacaggacgctagttgtgaacaaggtgtgaagagcctattgagctactaaagagtcctccggcccctgaatgcggctaatcctaaccacggagcaagtgctcacagtccagtgagtagcttgtcgtaatgagcaattctgtggcggaaccgactactttgggtgtccgtgtttccttttatttttatcattggctgcttatggtgacaatctaaggttgccatcatatagcttttggattggccatcccggtgatatttcgaattattcaatttgctgtttgcagctccttttaaacagtattcactcaccagcattcatattttactcttgagttattaacaaatagtcaaaa

SEQ ID NO: 22262 - DNA, 578 bp, synthetic construct
  source 1..578: mol_type = other DNA
cacttctgttgccccggtgtagttgcatagactgtacccacggttgaaagcaactgatccgttatccgctttagtacttcgagaagcctagtagcaccttgggatcttcgatgcgttgcgctcagcactcaaccccagagtgtagcttgggtcgatgagtctggacattcctcaccggcgacggtggtccaggctgcgttggcggcctacctgtggcccaaagccacaggacgctagttgtgaacaaggtgtgaagagcctattgagctactaaagagtcctccggcccctgaatgcggctaatcctaaccacggagcaagtgctcacagtccagtgagtagcttgtcgtaatgagcaattctgtggcggaaccgactactttgggtgtccgtgtttccttttatttttatcattggctgcttatggtgacaatctaaggttgccatcatatagcttttggattggccatcccggtgatatttcgaattattcaatttgctgtttgcagctccttttaaacagtattcactcaccagcattcatattttactcttgagttattaacaaatagtcaaaa

SEQ ID NO: 22263 - DNA, 528 bp, synthetic construct
  source 1..528: mol_type = other DNA
caactgatccgttatccgctttagtacttcgagaagcctagtagcaccttgggatcttcgatgcgttgcgctcagcactcaaccccagagtgtagcttgggtcgatgagtctggacattcctcaccggcgacggtggtccaggctgcgttggcggcctacctgtggcccaaagccacaggacgctagttgtgaacaaggtgtgaagagcctattgagctactaaagagtcctccggcccctgaatgcggctaatcctaaccacggagcaagtgctcacagtccagtgagtagcttgtcgtaatgagcaattctgtggcggaaccgactactttgggtgtccgtgtttccttttatttttatcattggctgcttatggtgacaatctaaggttgccatcatatagcttttggattggccatcccggtgatatttcgaattattcaatttgctgtttgcagctccttttaaacagtattcactcaccagcattcatattttactcttgagttattaacaaatagtcaaaa

SEQ ID NO: 22264 - DNA, 679 bp, synthetic construct
  source 1..679: mol_type = other DNA
acctcagtcctcttggtactttctcgcctgagtcaacaaagcgagaaacctgcccctccagcgccagacgagcggcataaaacttgaacttctggcatgctccaccacccttttccccattccaacccccattgcgctctcaaggtcgcgctttttcgagactagctcggattcaaaagttcctggcaccctttgccccttcaggcccttaaggtaggaactgaccttgtgctgtgccctcggtgcggaagtgctactgcgtagcgattgtaagatccctttgtggttctgccctggcaaggttatagagtactgtgatccgctgcggatgccatcctggtaacaggacccccagtgtgcgcaacagtatgttcacggtcttccgtgtccaccacattcggaacactgctctcgtgaaacagtgtgtgtccaatccctgcaatcagtatcaactacaccacctaggaatgctaggaaggtaccccggtccgccgggatctgatcctaggctaattgtctacggtggtgctcctttttattttccacttcaattcattggttacaactgctcgatccctgtgtttgctgcccttctctgctctcatcgccattctcaagtgttcacactgtccaagttcctttggttgttcgcttccacttgccactgtcaactcttgtc

SEQ ID NO: 22265 - DNA, 629 bp, synthetic construct
  source 1..629: mol_type = other DNA
tgcccctccagcgccagacgagcggcataaaacttgaacttctggcatgctccaccacccttttccccattccaacccccattgcgctctcaaggtcgcgctttttcgagactagctcggattcaaaagttcctggcaccctttgccccttcaggcccttaaggtaggaactgaccttgtgctgtgccctcggtgcggaagtgctactgcgtagcgattgtaagatccctttgtggttctgccctggcaaggttatagagtactgtgatccgctgcggatgccatcctggtaacaggacccccagtgtgcgcaacagtatgttcacggtcttccgtgtccaccacattcggaacactgctctcgtgaaacagtgtgtgtccaatccctgcaatcagtatcaactacaccacctaggaatgctaggaaggtaccccggtccgccgggatctgatcctaggctaattgtctacggtggtgctcctttttattttccacttcaattcattggttacaactgctcgatccctgtgtttgctgcccttctctgctctcatcgccattctcaagtgttcacactgtccaagttcctttggttgttcgcttccacttgccactgtcaactcttgtc

SEQ ID NO: 22266 - DNA, 579 bp, synthetic construct
  source 1..579: mol_type = other DNA
tccaccacccttttccccattccaacccccattgcgctctcaaggtcgcgctttttcgagactagctcggattcaaaagttcctggcaccctttgccccttcaggcccttaaggtaggaactgaccttgtgctgtgccctcggtgcggaagtgctactgcgtagcgattgtaagatccctttgtggttctgccctggcaaggttatagagtactgtgatccgctgcggatgccatcctggtaacaggacccccagtgtgcgcaacagtatgttcacggtcttccgtgtccaccacattcggaacactgctctcgtgaaacagtgtgtgtccaatccctgcaatcagtatcaactacaccacctaggaatgctaggaaggtaccccggtccgccgggatctgatcctaggctaattgtctacggtggtgctcctttttattttccacttcaattcattggttacaactgctcgatccctgtgtttgctgcccttctctgctctcatcgccattctcaagtgttcacactgtccaagttcctttggttgttcgcttccacttgccactgtcaactcttgtc

SEQ ID NO: 22267 - DNA, 529 bp, synthetic construct
  source 1..529: mol_type = other DNA
ctttttcgagactagctcggattcaaaagttcctggcaccctttgccccttcaggcccttaaggtaggaactgaccttgtgctgtgccctcggtgcggaagtgctactgcgtagcgattgtaagatccctttgtggttctgccctggcaaggttatagagtactgtgatccgctgcggatgccatcctggtaacaggacccccagtgtgcgcaacagtatgttcacggtcttccgtgtccaccacattcggaacactgctctcgtgaaacagtgtgtgtccaatccctgcaatcagtatcaactacaccacctaggaatgctaggaaggtaccccggtccgccgggatctgatcctaggctaattgtctacggtggtgctcctttttattttccacttcaattcattggttacaactgctcgatccctgtgtttgctgcccttctctgctctcatcgccattctcaagtgttcacactgtccaagttcctttggttgttcgcttccacttgccactgtcaactcttgtc

SEQ ID NO: 22268 - DNA, 679 bp, synthetic construct
  source 1..679: mol_type = other DNA
aatctttgtgcgcctgttttatatccccttccctattcgtaacttagaagtaatgagcaacaacgatcaatagcaggcgtggcgcaccagccatgtcttgatcaagcacttctgttaccccggactgagtatcaatagactgctcacgcggttgaaggagaaaacgttcgttacccggctaaccacttcggaaaacctagtagcaccattgaagctgcagagtgtttcgctcagcacttcccccgtgtagatcaggtcgatgagtcactgcaacccccacgggcgaccgtggcagtggctgcgttggcggcctgcctatggggtaacccataggacgctctaatgtggacatggtgtgaagagtctactgagctggttagtagtcctccggcccctgaatgcggctaatcctaactgtggagcgcacactctcaaaccagggagcagtgcgtcgtaacgggcaactccgcagcggaaccgactactttgggtgtccgtgtttccttttatccttatattggctgcttatggtgacaatcacggaattgttgccatatagctattggattggccatccggtgtctaatagagctattgtgtacctatttgttggatttactccactgtcatataaatctctgaacactttgtgctttatattgaacttaaacacacgaaa

SEQ ID NO: 22269 - DNA, 629 bp, synthetic construct
  source 1..629: mol_type = other DNA
taatgagcaacaacgatcaatagcaggcgtggcgcaccagccatgtcttgatcaagcacttctgttaccccggactgagtatcaatagactgctcacgcggttgaaggagaaaacgttcgttacccggctaaccacttcggaaaacctagtagcaccattgaagctgcagagtgtttcgctcagcacttcccccgtgtagatcaggtcgatgagtcactgcaacccccacgggcgaccgtggcagtggctgcgttggcggcctgcctatggggtaacccataggacgctctaatgtggacatggtgtgaagagtctactgagctggttagtagtcctccggcccctgaatgcggctaatcctaactgtggagcgcacactctcaaaccagggagcagtgcgtcgtaacgggcaactccgcagcggaaccgactactttgggtgtccgtgtttccttttatccttatattggctgcttatggtgacaatcacggaattgttgccatatagctattggattggccatccggtgtctaatagagctattgtgtacctatttgttggatttactccactgtcatataaatctctgaacactttgtgctttatattgaacttaaacacacgaaa

SEQ ID NO: 22270 - DNA, 579 bp, synthetic construct
  source 1..579: mol_type = other DNA
atcaagcacttctgttaccccggactgagtatcaatagactgctcacgcggttgaaggagaaaacgttcgttacccggctaaccacttcggaaaacctagtagcaccattgaagctgcagagtgtttcgctcagcacttcccccgtgtagatcaggtcgatgagtcactgcaacccccacgggcgaccgtggcagtggctgcgttggcggcctgcctatggggtaacccataggacgctctaatgtggacatggtgtgaagagtctactgagctggttagtagtcctccggcccctgaatgcggctaatcctaactgtggagcgcacactctcaaaccagggagcagtgcgtcgtaacgggcaactccgcagcggaaccgactactttgggtgtccgtgtttccttttatccttatattggctgcttatggtgacaatcacggaattgttgccatatagctattggattggccatccggtgtctaatagagctattgtgtacctatttgttggatttactccactgtcatataaatctctgaacactttgtgctttatattgaacttaaacacacgaaa

SEQ ID NO: 22271 - DNA, 529 bp, synthetic construct
  source 1..529: mol_type = other DNA
gttgaaggagaaaacgttcgttacccggctaaccacttcggaaaacctagtagcaccattgaagctgcagagtgtttcgctcagcacttcccccgtgtagatcaggtcgatgagtcactgcaacccccacgggcgaccgtggcagtggctgcgttggcggcctgcctatggggtaacccataggacgctctaatgtggacatggtgtgaagagtctactgagctggttagtagtcctccggcccctgaatgcggctaatcctaactgtggagcgcacactctcaaaccagggagcagtgcgtcgtaacgggcaactccgcagcggaaccgactactttgggtgtccgtgtttccttttatccttatattggctgcttatggtgacaatcacggaattgttgccatatagctattggattggccatccggtgtctaatagagctattgtgtacctatttgttggatttactccactgtcatataaatctctgaacactttgtgctttatattgaacttaaacacacgaaa

SEQ ID NO: 22272 - DNA, 679 bp, synthetic construct
  source 1..679: mol_type = other DNA
agtactctggtattacggtacctttgtacgcctgttttatatcccctttcccctgtaactcagaagcatgaagtttaagctcaacaggaggggtgcaaaccagcacctctacgagcaagcactactgtttccccggtgaagttacatagactgttcccacggttgaaagtgattgatccgttatccgctcatgtacttcgagaagcctagtatcgctctggaatcttcgatgcgttgcgctcaacactcgaccccggagtgtagcttaggccgatgagtctggacattccccactggcgacagtggtccaggctgcgttggcggcctacctgtggtccaaagccacaggacgctagttgtgaacagggtgtgaagagcctattgagctgcatgagagtcctccggcccctgaatgcggataatcctaaccatggagcaggcaactgcaacccagcagtcagcctgtcgtaacgcgtaagtccgtggcggaaccgactactttgggtgtccgtgtttccttttatttttgaatggctgcttatggtgacaatcacagattgttatcataaagcaaattggattggccatccagtgaatcactaccgagtttgttaaatctatttcagagacacacaactcctcaacgcactatacctaaacagaggattatactacagcg

SEQ ID NO: 22273 - DNA, 629 bp, synthetic construct
  source 1..629: mol_type = other DNA
ccctgtaactcagaagcatgaagtttaagctcaacaggaggggtgcaaaccagcacctctacgagcaagcactactgtttccccggtgaagttacatagactgttcccacggttgaaagtgattgatccgttatccgctcatgtacttcgagaagcctagtatcgctctggaatcttcgatgcgttgcgctcaacactcgaccccggagtgtagcttaggccgatgagtctggacattccccactggcgacagtggtccaggctgcgttggcggcctacctgtggtccaaagccacaggacgctagttgtgaacagggtgtgaagagcctattgagctgcatgagagtcctccggcccctgaatgcggataatcctaaccatggagcaggcaactgcaacccagcagtcagcctgtcgtaacgcgtaagtccgtggcggaaccgactactttgggtgtccgtgtttccttttatttttgaatggctgcttatggtgacaatcacagattgttatcataaagcaaattggattggccatccagtgaatcactaccgagtttgttaaatctatttcagagacacacaactcctcaacgcactatacctaaacagaggattatactacagcg

SEQ ID NO: 22274 - DNA, 579 bp, synthetic construct
  source 1..579: mol_type = other DNA
cagcacctctacgagcaagcactactgtttccccggtgaagttacatagactgttcccacggttgaaagtgattgatccgttatccgctcatgtacttcgagaagcctagtatcgctctggaatcttcgatgcgttgcgctcaacactcgaccccggagtgtagcttaggccgatgagtctggacattccccactggcgacagtggtccaggctgcgttggcggcctacctgtggtccaaagccacaggacgctagttgtgaacagggtgtgaagagcctattgagctgcatgagagtcctccggcccctgaatgcggataatcctaaccatggagcaggcaactgcaacccagcagtcagcctgtcgtaacgcgtaagtccgtggcggaaccgactactttgggtgtccgtgtttccttttatttttgaatggctgcttatggtgacaatcacagattgttatcataaagcaaattggattggccatccagtgaatcactaccgagtttgttaaatctatttcagagacacacaactcctcaacgcactatacctaaacagaggattatactacagcg

SEQ ID NO: 22275 - DNA, 529 bp, synthetic construct
  source 1..529: mol_type = other DNA
ctgttcccacggttgaaagtgattgatccgttatccgctcatgtacttcgagaagcctagtatcgctctggaatcttcgatgcgttgcgctcaacactcgaccccggagtgtagcttaggccgatgagtctggacattccccactggcgacagtggtccaggctgcgttggcggcctacctgtggtccaaagccacaggacgctagttgtgaacagggtgtgaagagcctattgagctgcatgagagtcctccggcccctgaatgcggataatcctaaccatggagcaggcaactgcaacccagcagtcagcctgtcgtaacgcgtaagtccgtggcggaaccgactactttgggtgtccgtgtttccttttatttttgaatggctgcttatggtgacaatcacagattgttatcataaagcaaattggattggccatccagtgaatcactaccgagtttgttaaatctatttcagagacacacaactcctcaacgcactatacctaaacagaggattatactacagcg

SEQ ID NO: 22276 - DNA, 679 bp, synthetic construct
  source 1..679: mol_type = other DNA
tacctttgtgcgcctgttttatccaccccaccccctcaacgtaacttagaagcacatcccacacggtcaatagttggctcgataagccaatcgagtctggatcaagcacttctgttaccccggactgagtatcagtaagctgcttgcgcggctgatggagaaaacgttcgttacccggccatttacttcgggaaacctagtaccaccatgaatgttgcgcagcgtttcgctccacactaccccagtgtagatcaggtcgatgagtcactgcataccccacgggcgaccgtggcagtggctgcgctggcggcctgcccatggggcaacccatgggacgcttcaatactgacatggtgcgaagagtctactgagctaagtggtagtcctccggcccctgaatgcggctaatcctaactgcggagcagatacccacgaaccagtgggcagtctgtcgtaatgggcaactctgcagcggaaccgactactttgggtgtccgtgtttccttttattctaatactggctgcttatggtgacaattgaacgattgttaccatatagctattggattggccatccggtgacaaacagagcgattatatactcatttgttgggttcgtaccacttaattacaaagttctaaacacccttaactatatactagcactcaacacatcaaa

SEQ ID NO: 22277 - DNA, 629 bp, synthetic construct
  source 1..629: mol_type = other DNA
agcacatcccacacggtcaatagttggctcgataagccaatcgagtctggatcaagcacttctgttaccccggactgagtatcagtaagctgcttgcgcggctgatggagaaaacgttcgttacccggccatttacttcgggaaacctagtaccaccatgaatgttgcgcagcgtttcgctccacactaccccagtgtagatcaggtcgatgagtcactgcataccccacgggcgaccgtggcagtggctgcgctggcggcctgcccatggggcaacccatgggacgcttcaatactgacatggtgcgaagagtctactgagctaagtggtagtcctccggcccctgaatgcggctaatcctaactgcggagcagatacccacgaaccagtgggcagtctgtcgtaatgggcaactctgcagcggaaccgactactttgggtgtccgtgtttccttttattctaatactggctgcttatggtgacaattgaacgattgttaccatatagctattggattggccatccggtgacaaacagagcgattatatactcatttgttgggttcgtaccacttaattacaaagttctaaacacccttaactatatactagcactcaacacatcaaa

SEQ ID NO: 22278 - DNA, 579 bp, synthetic construct
  source 1..579: mol_type = other DNA
atcaagcacttctgttaccccggactgagtatcagtaagctgcttgcgcggctgatggagaaaacgttcgttacccggccatttacttcgggaaacctagtaccaccatgaatgttgcgcagcgtttcgctccacactaccccagtgtagatcaggtcgatgagtcactgcataccccacgggcgaccgtggcagtggctgcgctggcggcctgcccatggggcaacccatgggacgcttcaatactgacatggtgcgaagagtctactgagctaagtggtagtcctccggcccctgaatgcggctaatcctaactgcggagcagatacccacgaaccagtgggcagtctgtcgtaatgggcaactctgcagcggaaccgactactttgggtgtccgtgtttccttttattctaatactggctgcttatggtgacaattgaacgattgttaccatatagctattggattggccatccggtgacaaacagagcgattatatactcatttgttgggttcgtaccacttaattacaaagttctaaacacccttaactatatactagcactcaacacatcaaa

SEQ ID NO: 22279 - DNA, 529 bp, synthetic construct
  source 1..529: mol_type = other DNA
gctgatggagaaaacgttcgttacccggccatttacttcgggaaacctagtaccaccatgaatgttgcgcagcgtttcgctccacactaccccagtgtagatcaggtcgatgagtcactgcataccccacgggcgaccgtggcagtggctgcgctggcggcctgcccatggggcaacccatgggacgcttcaatactgacatggtgcgaagagtctactgagctaagtggtagtcctccggcccctgaatgcggctaatcctaactgcggagcagatacccacgaaccagtgggcagtctgtcgtaatgggcaactctgcagcggaaccgactactttgggtgtccgtgtttccttttattctaatactggctgcttatggtgacaattgaacgattgttaccatatagctattggattggccatccggtgacaaacagagcgattatatactcatttgttgggttcgtaccacttaattacaaagttctaaacacccttaactatatactagcactcaacacatcaaa

SEQ ID NO: 22280 - DNA, 680 bp, synthetic construct
  source 1..680: mol_type = other DNA
gtactctggtatcacggtacctttgtatgcctgttttatctcccttcccccgtaacgttagaagaataaacaaatgacaactagcaaatccaccaacccaggtgggttttcgtcaagcacttctgtttccccggacttagtaccaataggctgtacccacggctgaaggggaaaatgttcgttacccggctacctacttcgaaaagcctagtaccaccaatgattgtctcaagtgttacgttcagcacaaccccagtgtagttcaggccgatgagtcaccgaattccccacgggcgaccgtgtcggtggctgcgttggcggcctgcctgcgggtttcacccgcaggacgcttgattcatgacatggtgcgaagagcctattgagctaggtagtagtcctccggcccctgaatgcggctaatcctaaccacggagcattcactggcaaaccagccagcagaatgtcgtaatgggtaactctgtggcggaaccgactactttgggtgtccgtgtttcctgttttacttattttggctgcttatggtgacaatttacggattgttaccatatagctattggattggccatccggattattgcaatactactatttgtgggatttctccctttgtgttataataactaccccattctaacattagctctcaagtttaatacact

SEQ ID NO: 22281 - DNA, 630 bp, synthetic construct
  source 1..630: mol_type = other DNA
cgtaacgttagaagaataaacaaatgacaactagcaaatccaccaacccaggtgggttttcgtcaagcacttctgtttccccggacttagtaccaataggctgtacccacggctgaaggggaaaatgttcgttacccggctacctacttcgaaaagcctagtaccaccaatgattgtctcaagtgttacgttcagcacaaccccagtgtagttcaggccgatgagtcaccgaattccccacgggcgaccgtgtcggtggctgcgttggcggcctgcctgcgggtttcacccgcaggacgcttgattcatgacatggtgcgaagagcctattgagctaggtagtagtcctccggcccctgaatgcggctaatcctaaccacggagcattcactggcaaaccagccagcagaatgtcgtaatgggtaactctgtggcggaaccgactactttgggtgtccgtgtttcctgttttacttattttggctgcttatggtgacaatttacggattgttaccatatagctattggattggccatccggattattgcaatactactatttgtgggatttctccctttgtgttataataactaccccattctaacattagctctcaagtttaatacact

SEQ ID NO: 22282 - DNA, 580 bp, synthetic construct
  source 1..580: mol_type = other DNA
ggtgggttttcgtcaagcacttctgtttccccggacttagtaccaataggctgtacccacggctgaaggggaaaatgttcgttacccggctacctacttcgaaaagcctagtaccaccaatgattgtctcaagtgttacgttcagcacaaccccagtgtagttcaggccgatgagtcaccgaattccccacgggcgaccgtgtcggtggctgcgttggcggcctgcctgcgggtttcacccgcaggacgcttgattcatgacatggtgcgaagagcctattgagctaggtagtagtcctccggcccctgaatgcggctaatcctaaccacggagcattcactggcaaaccagccagcagaatgtcgtaatgggtaactctgtggcggaaccgactactttgggtgtccgtgtttcctgttttacttattttggctgcttatggtgacaatttacggattgttaccatatagctattggattggccatccggattattgcaatactactatttgtgggatttctccctttgtgttataataactaccccattctaacattagctctcaagtttaatacact

SEQ ID NO: 22283 - DNA, 530 bp, synthetic construct
  source 1..530: mol_type = other DNA
ctgtacccacggctgaaggggaaaatgttcgttacccggctacctacttcgaaaagcctagtaccaccaatgattgtctcaagtgttacgttcagcacaaccccagtgtagttcaggccgatgagtcaccgaattccccacgggcgaccgtgtcggtggctgcgttggcggcctgcctgcgggtttcacccgcaggacgcttgattcatgacatggtgcgaagagcctattgagctaggtagtagtcctccggcccctgaatgcggctaatcctaaccacggagcattcactggcaaaccagccagcagaatgtcgtaatgggtaactctgtggcggaaccgactactttgggtgtccgtgtttcctgttttacttattttggctgcttatggtgacaatttacggattgttaccatatagctattggattggccatccggattattgcaatactactatttgtgggatttctccctttgtgttataataactaccccattctaacattagctctcaagtttaatacact

SEQ ID NO: 22284 - DNA, 680 bp, synthetic construct
  source 1..680: mol_type = other DNA
tccttgtgcgcctgttttataaccccccccctcaattaggtaacatagaagttagaaacatatatggccaatagcaggcgtggcgcaccagtcgcgtctcggtcaagcacttctgtttccccggactgagtatcaataagctgctcgcgcggctgaaggagaaaacgttcgttatccggctaactacttcgagaaacctagtagcaccatgaaagttgcggagtgtttcgctcagcacttcccccgtgtagatcaggtcgatgagtcactgcattccccacgggcgaccgtggcagtggctgcgttggcggcctgcctatggggtaacccataggacgctctaatacggacatggtgcgaagagtcaattgagctagttagtagtcctccggcccctgaatgcggctaatcctaactgcggagcacataccctcaatccagggggcggtgtgtcgtaatgggcaactctgcagcggaaccgactactttgggtgtccgtgtttccttttattcttatattggctgcttatggtgacaattgagagattgttaccatatagctattggattggccatccggtgtccaacagagctctggtttacttgttcgttggctttatacctctgtcacccacagtttattcaactctagtgttcttaatacgccttaacagtaagag

SEQ ID NO: 22285 - DNA, 630 bp, synthetic construct
  source 1..630: mol_type = other DNA
gttagaaacatatatggccaatagcaggcgtggcgcaccagtcgcgtctcggtcaagcacttctgtttccccggactgagtatcaataagctgctcgcgcggctgaaggagaaaacgttcgttatccggctaactacttcgagaaacctagtagcaccatgaaagttgcggagtgtttcgctcagcacttcccccgtgtagatcaggtcgatgagtcactgcattccccacgggcgaccgtggcagtggctgcgttggcggcctgcctatggggtaacccataggacgctctaatacggacatggtgcgaagagtcaattgagctagttagtagtcctccggcccctgaatgcggctaatcctaactgcggagcacataccctcaatccagggggcggtgtgtcgtaatgggcaactctgcagcggaaccgactactttgggtgtccgtgtttccttttattcttatattggctgcttatggtgacaattgagagattgttaccatatagctattggattggccatccggtgtccaacagagctctggtttacttgttcgttggctttatacctctgtcacccacagtttattcaactctagtgttcttaatacgccttaacagtaagag

SEQ ID NO: 22286 - DNA, 580 bp, synthetic construct
  source 1..580: mol_type = other DNA
ggtcaagcacttctgtttccccggactgagtatcaataagctgctcgcgcggctgaaggagaaaacgttcgttatccggctaactacttcgagaaacctagtagcaccatgaaagttgcggagtgtttcgctcagcacttcccccgtgtagatcaggtcgatgagtcactgcattccccacgggcgaccgtggcagtggctgcgttggcggcctgcctatggggtaacccataggacgctctaatacggacatggtgcgaagagtcaattgagctagttagtagtcctccggcccctgaatgcggctaatcctaactgcggagcacataccctcaatccagggggcggtgtgtcgtaatgggcaactctgcagcggaaccgactactttgggtgtccgtgtttccttttattcttatattggctgcttatggtgacaattgagagattgttaccatatagctattggattggccatccggtgtccaacagagctctggtttacttgttcgttggctttatacctctgtcacccacagtttattcaactctagtgttcttaatacgccttaacagtaagag

SEQ ID NO: 22287 - DNA, 530 bp, synthetic construct
  source 1..530: mol_type = other DNA
ggctgaaggagaaaacgttcgttatccggctaactacttcgagaaacctagtagcaccatgaaagttgcggagtgtttcgctcagcacttcccccgtgtagatcaggtcgatgagtcactgcattccccacgggcgaccgtggcagtggctgcgttggcggcctgcctatggggtaacccataggacgctctaatacggacatggtgcgaagagtcaattgagctagttagtagtcctccggcccctgaatgcggctaatcctaactgcggagcacataccctcaatccagggggcggtgtgtcgtaatgggcaactctgcagcggaaccgactactttgggtgtccgtgtttccttttattcttatattggctgcttatggtgacaattgagagattgttaccatatagctattggattggccatccggtgtccaacagagctctggtttacttgttcgttggctttatacctctgtcacccacagtttattcaactctagtgttcttaatacgccttaacagtaagag

SEQ ID NO: 22288 - DNA, 680 bp, synthetic construct
  source 1..680: mol_type = other DNA
aatctttgtgcgcctgttttataaccccctccccaatttgtaacttagaagcaatgaaccccatcgatcaatagcaggcataacgcaccagttatgtctcgatcaagcacttctgttttcccggactgagtatcaatagactgcttgcgcggtcgaaggagaaaacgttcgttacccggctaactacctcgagaagcctagtagcaccactgaaactgcagagtgtttcgttcaacacttcccccgtgtagatcaggtcgatgagtcactgctctccccacgggtgaccgtggcagtggctgcgttggcggcctgcctatggggtaacccataggacgctctgaagtggacatggtgtgaagagcctattgagctagttagtagtcctccggcccctgaatgcggctaatcctaactgtggagcgcatgccctcaaaccagggggtggtgcgtcgtaacgggtaactccgcagcggaaccgactactttgggtgtccgtgtttccttttattatcctattggctgcttatggtgacaattaaagaattgttaccatatagctattggattggccatccggtgtgtaatagagcgattatctacctatttgttggatacattccgttaacattcaaatctctcaacacattatactacattctgaccttgaacacaagaaa

SEQ ID NO: 22289 - DNA, 630 bp, synthetic construct
  source 1..630: mol_type = other DNA
gcaatgaaccccatcgatcaatagcaggcataacgcaccagttatgtctcgatcaagcacttctgttttcccggactgagtatcaatagactgcttgcgcggtcgaaggagaaaacgttcgttacccggctaactacctcgagaagcctagtagcaccactgaaactgcagagtgtttcgttcaacacttcccccgtgtagatcaggtcgatgagtcactgctctccccacgggtgaccgtggcagtggctgcgttggcggcctgcctatggggtaacccataggacgctctgaagtggacatggtgtgaagagcctattgagctagttagtagtcctccggcccctgaatgcggctaatcctaactgtggagcgcatgccctcaaaccagggggtggtgcgtcgtaacgggtaactccgcagcggaaccgactactttgggtgtccgtgtttccttttattatcctattggctgcttatggtgacaattaaagaattgttaccatatagctattggattggccatccggtgtgtaatagagcgattatctacctatttgttggatacattccgttaacattcaaatctctcaacacattatactacattctgaccttgaacacaagaaa

SEQ ID NO: 22290 - DNA, 580 bp, synthetic construct
  source 1..580: mol_type = other DNA
gatcaagcacttctgttttcccggactgagtatcaatagactgcttgcgcggtcgaaggagaaaacgttcgttacccggctaactacctcgagaagcctagtagcaccactgaaactgcagagtgtttcgttcaacacttcccccgtgtagatcaggtcgatgagtcactgctctccccacgggtgaccgtggcagtggctgcgttggcggcctgcctatggggtaacccataggacgctctgaagtggacatggtgtgaagagcctattgagctagttagtagtcctccggcccctgaatgcggctaatcctaactgtggagcgcatgccctcaaaccagggggtggtgcgtcgtaacgggtaactccgcagcggaaccgactactttgggtgtccgtgtttccttttattatcctattggctgcttatggtgacaattaaagaattgttaccatatagctattggattggccatccggtgtgtaatagagcgattatctacctatttgttggatacattccgttaacattcaaatctctcaacacattatactacattctgaccttgaacacaagaaa

SEQ ID NO: 22291 - DNA, 530 bp, synthetic construct
  source 1..530: mol_type = other DNA
ggtcgaaggagaaaacgttcgttacccggctaactacctcgagaagcctagtagcaccactgaaactgcagagtgtttcgttcaacacttcccccgtgtagatcaggtcgatgagtcactgctctccccacgggtgaccgtggcagtggctgcgttggcggcctgcctatggggtaacccataggacgctctgaagtggacatggtgtgaagagcctattgagctagttagtagtcctccggcccctgaatgcggctaatcctaactgtggagcgcatgccctcaaaccagggggtggtgcgtcgtaacgggtaactccgcagcggaaccgactactttgggtgtccgtgtttccttttattatcctattggctgcttatggtgacaattaaagaattgttaccatatagctattggattggccatccggtgtgtaatagagcgattatctacctatttgttggatacattccgttaacattcaaatctctcaacacattatactacattctgaccttgaacacaagaaa

SEQ ID NO: 22292 - DNA, 681 bp, synthetic construct
  source 1..681: mol_type = other DNA
actctggtatctcggtacctttgtacgcctattttatatccccttccccctttgtaacttagaagaaataagcaaactgcccaatagcggcacaatacccaattgtgttacgggcaagcactcctgtttccccggaagggtctatcggtatgctgtacccacggcagaagtatgacctaccgttaaccggccatgtacttcgagaagcctagtaccaccatgaaggttgattgatgttacgttccccagcaaccccagctggtagttctggtcgatgagtctcggcatcccccacgggcgaccgtggccgaggctgcgctggcggccagcctacacctctttggtgtaggacgtcaagatattgacatggtgtgaagagcctattgagctacgtggtagtcctccggcccctgaatgcggctaatcctaactccggatcgtccgctggcaatcccgccagaagggcgtcgtaatgcgcaagtctggagcggaaccgactactttgggtgtccgtgtttcctgttttatttactgtttggctgcttatggtgacaacttatagttatcatcataagctacttggtcttgccaaccggagaataatttggttatttgttggttttacaaacctacaagagtcagtactcatcctattaattgttctaagaataaacacacaag

SEQ ID NO: 22293 - DNA, 631 bp, synthetic construct
  source 1..631: mol_type = other DNA
tttgtaacttagaagaaataagcaaactgcccaatagcggcacaatacccaattgtgttacgggcaagcactcctgtttccccggaagggtctatcggtatgctgtacccacggcagaagtatgacctaccgttaaccggccatgtacttcgagaagcctagtaccaccatgaaggttgattgatgttacgttccccagcaaccccagctggtagttctggtcgatgagtctcggcatcccccacgggcgaccgtggccgaggctgcgctggcggccagcctacacctctttggtgtaggacgtcaagatattgacatggtgtgaagagcctattgagctacgtggtagtcctccggcccctgaatgcggctaatcctaactccggatcgtccgctggcaatcccgccagaagggcgtcgtaatgcgcaagtctggagcggaaccgactactttgggtgtccgtgtttcctgttttatttactgtttggctgcttatggtgacaacttatagttatcatcataagctacttggtcttgccaaccggagaataatttggttatttgttggttttacaaacctacaagagtcagtactcatcctattaattgttctaagaataaacacacaag

SEQ ID NO: 22294 - DNA, 581 bp, synthetic construct
  source 1..581: mol_type = other DNA
aattgtgttacgggcaagcactcctgtttccccggaagggtctatcggtatgctgtacccacggcagaagtatgacctaccgttaaccggccatgtacttcgagaagcctagtaccaccatgaaggttgattgatgttacgttccccagcaaccccagctggtagttctggtcgatgagtctcggcatcccccacgggcgaccgtggccgaggctgcgctggcggccagcctacacctctttggtgtaggacgtcaagatattgacatggtgtgaagagcctattgagctacgtggtagtcctccggcccctgaatgcggctaatcctaactccggatcgtccgctggcaatcccgccagaagggcgtcgtaatgcgcaagtctggagcggaaccgactactttgggtgtccgtgtttcctgttttatttactgtttggctgcttatggtgacaacttatagttatcatcataagctacttggtcttgccaaccggagaataatttggttatttgttggttttacaaacctacaagagtcagtactcatcctattaattgttctaagaataaacacacaag

SEQ ID NO: 22295 - DNA, 531 bp, synthetic construct
  source 1..531: mol_type = other DNA
tgctgtacccacggcagaagtatgacctaccgttaaccggccatgtacttcgagaagcctagtaccaccatgaaggttgattgatgttacgttccccagcaaccccagctggtagttctggtcgatgagtctcggcatcccccacgggcgaccgtggccgaggctgcgctggcggccagcctacacctctttggtgtaggacgtcaagatattgacatggtgtgaagagcctattgagctacgtggtagtcctccggcccctgaatgcggctaatcctaactccggatcgtccgctggcaatcccgccagaagggcgtcgtaatgcgcaagtctggagcggaaccgactactttgggtgtccgtgtttcctgttttatttactgtttggctgcttatggtgacaacttatagttatcatcataagctacttggtcttgccaaccggagaataatttggttatttgttggttttacaaacctacaagagtcagtactcatcctattaattgttctaagaataaacacacaag

SEQ ID NO: 22296 - DNA, 682 bp, synthetic construct
  source 1..682: mol_type = other DNA
gtacaccggtattgcggtacccttgtacgcctgttttatactcccttttccctgtaacttagaagaaacaaaccaagttcaatagaagggggtacaaaccagtaccaccacgaacaagcacttctgtttccccggtgatgttgcatagactgtacccacggttgaaagcgattgatccgttacccgctcttgtacttcgagaagcctagtatcatcttggaatcttcgatgcgttgcgctcagcactcaaccccagagtgtagcttaggtcgatgagtctggacattcctcaccggcgacggtggtccaggctgcgttggcggcctacctgtggcccaaagccacaggacgctagttttgaacaaggtgtgaagagcctattgagctacatgagagtcctccggcccctgaatgcggctaatcccaaccacggagcaagggtgcacatgccagtgtataccttgtcgtaacgcgcaagtctgtggcggaaccgactactttgggtgtccgtgtttccttttatttttacattggctgcttatggtgacaatcgaagattgttatcataaagcgagttggattggccatccggtgaaagtaaagcatattatttacttggttgttgggattataccactcaatccttttactaacaatacgaggataaaacaacaatactaca

SEQ ID NO: 22297 - DNA, 632 bp, synthetic construct
  source 1..632: mol_type = other DNA
cctgtaacttagaagaaacaaaccaagttcaatagaagggggtacaaaccagtaccaccacgaacaagcacttctgtttccccggtgatgttgcatagactgtacccacggttgaaagcgattgatccgttacccgctcttgtacttcgagaagcctagtatcatcttggaatcttcgatgcgttgcgctcagcactcaaccccagagtgtagcttaggtcgatgagtctggacattcctcaccggcgacggtggtccaggctgcgttggcggcctacctgtggcccaaagccacaggacgctagttttgaacaaggtgtgaagagcctattgagctacatgagagtcctccggcccctgaatgcggctaatcccaaccacggagcaagggtgcacatgccagtgtataccttgtcgtaacgcgcaagtctgtggcggaaccgactactttgggtgtccgtgtttccttttatttttacattggctgcttatggtgacaatcgaagattgttatcataaagcgagttggattggccatccggtgaaagtaaagcatattatttacttggttgttgggattataccactcaatccttttactaacaatacgaggataaaacaacaatactaca

SEQ ID NO: 22298 - DNA, 582 bp, synthetic construct
  source 1..582: mol_type = other DNA
agtaccaccacgaacaagcacttctgtttccccggtgatgttgcatagactgtacccacggttgaaagcgattgatccgttacccgctcttgtacttcgagaagcctagtatcatcttggaatcttcgatgcgttgcgctcagcactcaaccccagagtgtagcttaggtcgatgagtctggacattcctcaccggcgacggtggtccaggctgcgttggcggcctacctgtggcccaaagccacaggacgctagttttgaacaaggtgtgaagagcctattgagctacatgagagtcctccggcccctgaatgcggctaatcccaaccacggagcaagggtgcacatgccagtgtataccttgtcgtaacgcgcaagtctgtggcggaaccgactactttgggtgtccgtgtttccttttatttttacattggctgcttatggtgacaatcgaagattgttatcataaagcgagttggattggccatccggtgaaagtaaagcatattatttacttggttgttgggattataccactcaatccttttactaacaatacgaggataaaacaacaatactaca

SEQ ID NO: 22299 - DNA, 532 bp, synthetic construct
  source 1..532: mol_type = other DNA
tgtacccacggttgaaagcgattgatccgttacccgctcttgtacttcgagaagcctagtatcatcttggaatcttcgatgcgttgcgctcagcactcaaccccagagtgtagcttaggtcgatgagtctggacattcctcaccggcgacggtggtccaggctgcgttggcggcctacctgtggcccaaagccacaggacgctagttttgaacaaggtgtgaagagcctattgagctacatgagagtcctccggcccctgaatgcggctaatcccaaccacggagcaagggtgcacatgccagtgtataccttgtcgtaacgcgcaagtctgtggcggaaccgactactttgggtgtccgtgtttccttttatttttacattggctgcttatggtgacaatcgaagattgttatcataaagcgagttggattggccatccggtgaaagtaaagcatattatttacttggttgttgggattataccactcaatccttttactaacaatacgaggataaaacaacaatactaca

SEQ ID NO: 22300 - DNA, 682 bp, synthetic construct
  source 1..682: mol_type = other DNA
caaggtacctttgtacgcctgttttataccccctccccgatccgaaacttagaagtaaagcaaacccgatcaatagtaggtgcgacactccagtcgtatctcgatcaagcacttctgtttccccggactgagtatcaatagactgcccacgcggttgaaggagaaaacgtccgtcatccggctaactacttcgagaaacccagtagcaccatggaagttgcagagtgtttcgctcagcactaaccccgtgtagatcaggctgatgagtcaccgcattccccacgggtgaccgtggcggtggctgcgttggcggcctgcctatggggcaacccataggacgctctaatacggacatggtgtgaagagtctattgagctagttagtaatcctccggcccctgaatgcggctaatcctaactgcggagcacatactcctactccaaggagcagtgtgtcgtaacgggcaactctgcagcggaaccgactactttgggtgtccgtgtttcctattaacatatcactggctgcttatggtgacaattgaaagattgttaccatatagctattggattggccatccggtgtcaaacagagcaatagtgtacctattcgctgggtttatcccattgactgttaaagatatacaaactctctacttgataatacaactaaacactgtaaa

SEQ ID NO: 22301 - DNA, 632 bp, synthetic construct
  source 1..632: mol_type = other DNA
agaagtaaagcaaacccgatcaatagtaggtgcgacactccagtcgtatctcgatcaagcacttctgtttccccggactgagtatcaatagactgcccacgcggttgaaggagaaaacgtccgtcatccggctaactacttcgagaaacccagtagcaccatggaagttgcagagtgtttcgctcagcactaaccccgtgtagatcaggctgatgagtcaccgcattccccacgggtgaccgtggcggtggctgcgttggcggcctgcctatggggcaacccataggacgctctaatacggacatggtgtgaagagtctattgagctagttagtaatcctccggcccctgaatgcggctaatcctaactgcggagcacatactcctactccaaggagcagtgtgtcgtaacgggcaactctgcagcggaaccgactactttgggtgtccgtgtttcctattaacatatcactggctgcttatggtgacaattgaaagattgttaccatatagctattggattggccatccggtgtcaaacagagcaatagtgtacctattcgctgggtttatcccattgactgttaaagatatacaaactctctacttgataatacaactaaacactgtaaa

SEQ ID NO: 22302 - DNA, 582 bp, synthetic construct
  source 1..582: mol_type = other DNA
tcgatcaagcacttctgtttccccggactgagtatcaatagactgcccacgcggttgaaggagaaaacgtccgtcatccggctaactacttcgagaaacccagtagcaccatggaagttgcagagtgtttcgctcagcactaaccccgtgtagatcaggctgatgagtcaccgcattccccacgggtgaccgtggcggtggctgcgttggcggcctgcctatggggcaacccataggacgctctaatacggacatggtgtgaagagtctattgagctagttagtaatcctccggcccctgaatgcggctaatcctaactgcggagcacatactcctactccaaggagcagtgtgtcgtaacgggcaactctgcagcggaaccgactactttgggtgtccgtgtttcctattaacatatcactggctgcttatggtgacaattgaaagattgttaccatatagctattggattggccatccggtgtcaaacagagcaatagtgtacctattcgctgggtttatcccattgactgttaaagatatacaaactctctacttgataatacaactaaacactgtaaa

SEQ ID NO: 22303 - DNA, 532 bp, synthetic construct
  source 1..532: mol_type = other DNA
gcggttgaaggagaaaacgtccgtcatccggctaactacttcgagaaacccagtagcaccatggaagttgcagagtgtttcgctcagcactaaccccgtgtagatcaggctgatgagtcaccgcattccccacgggtgaccgtggcggtggctgcgttggcggcctgcctatggggcaacccataggacgctctaatacggacatggtgtgaagagtctattgagctagttagtaatcctccggcccctgaatgcggctaatcctaactgcggagcacatactcctactccaaggagcagtgtgtcgtaacgggcaactctgcagcggaaccgactactttgggtgtccgtgtttcctattaacatatcactggctgcttatggtgacaattgaaagattgttaccatatagctattggattggccatccggtgtcaaacagagcaatagtgtacctattcgctgggtttatcccattgactgttaaagatatacaaactctctacttgataatacaactaaacactgtaaa

SEQ ID NO: 22304 - DNA, 682 bp, synthetic construct
  source 1..682: mol_type = other DNA
ttgcggtacctttgtgcgcctgttttatccaccctttccccatagtaacttagaagtacgttcaaatggtcaataggcggctcagtataccaactgagtctcgaccaagcacttctgttaccccggaccgagtatcaataagctactcacgtggctgaaggagaaaacgttcgttacccggccaactacttcgagaaacctagtaccaccatggatgttgcgcggcgtttcgctccgcactaccccagtgtagatcaggtcgatgagtcaccgcattcctcacgggcgaccgtggtggtggctgcgctggcggcctgcccatggggcaacccatgggacgcttcaatacagacatggtgtgaagagtctattgagctagttggtagtcctccggcccctgaatgcggctaatcctaactgcggagcagatccccacacaccagtgggcagtctgtcgtaatgggtaactctgcagcggaaccgactactttgggtgtccgtgtttccttttattcttatactggctgcttatggtgacaattgaaagattgttaccatatagctattggattggccatccagtgtctaacagagcaataatctatctttttgttggattcgtcccacttgactacagagcacttgcaacgctcaattacattatagatctcaacacaacgaa

SEQ ID NO: 22305 - DNA, 632 bp, synthetic construct
  source 1..632: mol_type = other DNA
tagaagtacgttcaaatggtcaataggcggctcagtataccaactgagtctcgaccaagcacttctgttaccccggaccgagtatcaataagctactcacgtggctgaaggagaaaacgttcgttacccggccaactacttcgagaaacctagtaccaccatggatgttgcgcggcgtttcgctccgcactaccccagtgtagatcaggtcgatgagtcaccgcattcctcacgggcgaccgtggtggtggctgcgctggcggcctgcccatggggcaacccatgggacgcttcaatacagacatggtgtgaagagtctattgagctagttggtagtcctccggcccctgaatgcggctaatcctaactgcggagcagatccccacacaccagtgggcagtctgtcgtaatgggtaactctgcagcggaaccgactactttgggtgtccgtgtttccttttattcttatactggctgcttatggtgacaattgaaagattgttaccatatagctattggattggccatccagtgtctaacagagcaataatctatctttttgttggattcgtcccacttgactacagagcacttgcaacgctcaattacattatagatctcaacacaacgaa

SEQ ID NO: 22306 - DNA, 582 bp, synthetic construct
  source 1..582: mol_type = other DNA
tcgaccaagcacttctgttaccccggaccgagtatcaataagctactcacgtggctgaaggagaaaacgttcgttacccggccaactacttcgagaaacctagtaccaccatggatgttgcgcggcgtttcgctccgcactaccccagtgtagatcaggtcgatgagtcaccgcattcctcacgggcgaccgtggtggtggctgcgctggcggcctgcccatggggcaacccatgggacgcttcaatacagacatggtgtgaagagtctattgagctagttggtagtcctccggcccctgaatgcggctaatcctaactgcggagcagatccccacacaccagtgggcagtctgtcgtaatgggtaactctgcagcggaaccgactactttgggtgtccgtgtttccttttattcttatactggctgcttatggtgacaattgaaagattgttaccatatagctattggattggccatccagtgtctaacagagcaataatctatctttttgttggattcgtcccacttgactacagagcacttgcaacgctcaattacattatagatctcaacacaacgaa

SEQ ID NO: 22307 - DNA, 532 bp, synthetic construct
  source 1..532: mol_type = other DNA
gtggctgaaggagaaaacgttcgttacccggccaactacttcgagaaacctagtaccaccatggatgttgcgcggcgtttcgctccgcactaccccagtgtagatcaggtcgatgagtcaccgcattcctcacgggcgaccgtggtggtggctgcgctggcggcctgcccatggggcaacccatgggacgcttcaatacagacatggtgtgaagagtctattgagctagttggtagtcctccggcccctgaatgcggctaatcctaactgcggagcagatccccacacaccagtgggcagtctgtcgtaatgggtaactctgcagcggaaccgactactttgggtgtccgtgtttccttttattcttatactggctgcttatggtgacaattgaaagattgttaccatatagctattggattggccatccagtgtctaacagagcaataatctatctttttgttggattcgtcccacttgactacagagcacttgcaacgctcaattacattatagatctcaacacaacgaa

SEQ ID NO: 22308 - DNA, 683 bp, synthetic construct
  source 1..683: mol_type = other DNA
aatctttgtgcgcctgttttataaccccttccccaacttgaaacgtagaagcaatacacataaccgatcaatagcaggcgtgacgcaccagtctcgtctcgatcaagcacttctgtttccccggaccgagtaacaatagactgctaacgcggttgaaggtgaaaacgttcgttatccggctaactacttcgagaagcccagtaacactatgaaagctgcggagcgttacgttcagcactcccccccgtgtagttcaggccgatgagtcactgcgatccctacgggcgaccgtagcagtggctgcgctggcggcctgcctatggggcaacccataggacgctctaaagtggacatggtgcgaagagctaattgagctagttagtagtcctccggcccctgaatgcggctaatcctaactgcggagcgcacgcctccaacccagggggtggtgcgtcgtaacgggcaactctgcagcggaaccgactactttgggtgtccgtgtttccttttattcttatattggctgcttatggtgacaatcacagagttgttaccatatagctattggattggccatccggtgtgcaacagagctatcatttatctatttataggttttgtaccattaactttgagatctacgaccaccctagagtacatattggttttaaattcaattagac

SEQ ID NO: 22309 - DNA, 633 bp, synthetic construct
  source 1..633: mol_type = other DNA
gcaatacacataaccgatcaatagcaggcgtgacgcaccagtctcgtctcgatcaagcacttctgtttccccggaccgagtaacaatagactgctaacgcggttgaaggtgaaaacgttcgttatccggctaactacttcgagaagcccagtaacactatgaaagctgcggagcgttacgttcagcactcccccccgtgtagttcaggccgatgagtcactgcgatccctacgggcgaccgtagcagtggctgcgctggcggcctgcctatggggcaacccataggacgctctaaagtggacatggtgcgaagagctaattgagctagttagtagtcctccggcccctgaatgcggctaatcctaactgcggagcgcacgcctccaacccagggggtggtgcgtcgtaacgggcaactctgcagcggaaccgactactttgggtgtccgtgtttccttttattcttatattggctgcttatggtgacaatcacagagttgttaccatatagctattggattggccatccggtgtgcaacagagctatcatttatctatttataggttttgtaccattaactttgagatctacgaccaccctagagtacatattggttttaaattcaattagac

SEQ ID NO: 22310 - DNA, 583 bp, synthetic construct
  source 1..583: mol_type = other DNA
gatcaagcacttctgtttccccggaccgagtaacaatagactgctaacgcggttgaaggtgaaaacgttcgttatccggctaactacttcgagaagcccagtaacactatgaaagctgcggagcgttacgttcagcactcccccccgtgtagttcaggccgatgagtcactgcgatccctacgggcgaccgtagcagtggctgcgctggcggcctgcctatggggcaacccataggacgctctaaagtggacatggtgcgaagagctaattgagctagttagtagtcctccggcccctgaatgcggctaatcctaactgcggagcgcacgcctccaacccagggggtggtgcgtcgtaacgggcaactctgcagcggaaccgactactttgggtgtccgtgtttccttttattcttatattggctgcttatggtgacaatcacagagttgttaccatatagctattggattggccatccggtgtgcaacagagctatcatttatctatttataggttttgtaccattaactttgagatctacgaccaccctagagtacatattggttttaaattcaattagac

SEQ ID NO: 22311 - DNA, 533 bp, synthetic construct
  source 1..533: mol_type = other DNA
ggttgaaggtgaaaacgttcgttatccggctaactacttcgagaagcccagtaacactatgaaagctgcggagcgttacgttcagcactcccccccgtgtagttcaggccgatgagtcactgcgatccctacgggcgaccgtagcagtggctgcgctggcggcctgcctatggggcaacccataggacgctctaaagtggacatggtgcgaagagctaattgagctagttagtagtcctccggcccctgaatgcggctaatcctaactgcggagcgcacgcctccaacccagggggtggtgcgtcgtaacgggcaactctgcagcggaaccgactactttgggtgtccgtgtttccttttattcttatattggctgcttatggtgacaatcacagagttgttaccatatagctattggattggccatccggtgtgcaacagagctatcatttatctatttataggttttgtaccattaactttgagatctacgaccaccctagagtacatattggttttaaattcaattagac

SEQ ID NO: 22312 - DNA, 683 bp, synthetic construct
  source 1..683: mol_type = other DNA
ccacggaatctttgtgcgcctgttttacaaccctccccaatttgtaacgtagaagcaatacacactactgatcaatagtaggcatggcgcgccagtcatgtcatgatcaagcacttctgttccccggactgagtatcaatagactgctcacgcggttgaaggagaaaacgttcgttacccggctaactacttcaagaaacctagtagcaccatggaagctgcggagtgtttcgctcagcacttcccccgtgtagatcaggtcgatgagtcactgcaatccccacgggcgaccgtggcagtggctgcgttggcggcctgcctatggggtaacccataggacgctctaatgtggacatggtgcgaagagtctattgagctagttagtagtcctccggcccctgaatgcggctaatcctaactgcggagcacatgccttcaacccaggaggtggtgtgtcgtaacgggtaactctgcagcggaaccgactactttgggtgtccgtgtttccttttatccttatattggctgcttatggtgacaatcacggaattgttgccatatagctattggattggccatccggtgtctaacagagctattgtatacctatttgttggatttgtaccactaaattacaaggttttaaacactctcaaccttataatactactcaactcagcaaa

SEQ ID NO: 22313 - DNA, 633 bp, synthetic construct
  source 1..633: mol_type = other DNA
agaagcaatacacactactgatcaatagtaggcatggcgcgccagtcatgtcatgatcaagcacttctgttccccggactgagtatcaatagactgctcacgcggttgaaggagaaaacgttcgttacccggctaactacttcaagaaacctagtagcaccatggaagctgcggagtgtttcgctcagcacttcccccgtgtagatcaggtcgatgagtcactgcaatccccacgggcgaccgtggcagtggctgcgttggcggcctgcctatggggtaacccataggacgctctaatgtggacatggtgcgaagagtctattgagctagttagtagtcctccggcccctgaatgcggctaatcctaactgcggagcacatgccttcaacccaggaggtggtgtgtcgtaacgggtaactctgcagcggaaccgactactttgggtgtccgtgtttccttttatccttatattggctgcttatggtgacaatcacggaattgttgccatatagctattggattggccatccggtgtctaacagagctattgtatacctatttgttggatttgtaccactaaattacaaggttttaaacactctcaaccttataatactactcaactcagcaaa

SEQ ID NO: 22314 - DNA, 583 bp, synthetic construct
  source 1..583: mol_type = other DNA
tcatgatcaagcacttctgttccccggactgagtatcaatagactgctcacgcggttgaaggagaaaacgttcgttacccggctaactacttcaagaaacctagtagcaccatggaagctgcggagtgtttcgctcagcacttcccccgtgtagatcaggtcgatgagtcactgcaatccccacgggcgaccgtggcagtggctgcgttggcggcctgcctatggggtaacccataggacgctctaatgtggacatggtgcgaagagtctattgagctagttagtagtcctccggcccctgaatgcggctaatcctaactgcggagcacatgccttcaacccaggaggtggtgtgtcgtaacgggtaactctgcagcggaaccgactactttgggtgtccgtgtttccttttatccttatattggctgcttatggtgacaatcacggaattgttgccatatagctattggattggccatccggtgtctaacagagctattgtatacctatttgttggatttgtaccactaaattacaaggttttaaacactctcaaccttataatactactcaactcagcaaa

SEQ ID NO: 22315 - DNA, 533 bp, synthetic construct
  source 1..533: mol_type = other DNA
cgcggttgaaggagaaaacgttcgttacccggctaactacttcaagaaacctagtagcaccatggaagctgcggagtgtttcgctcagcacttcccccgtgtagatcaggtcgatgagtcactgcaatccccacgggcgaccgtggcagtggctgcgttggcggcctgcctatggggtaacccataggacgctctaatgtggacatggtgcgaagagtctattgagctagttagtagtcctccggcccctgaatgcggctaatcctaactgcggagcacatgccttcaacccaggaggtggtgtgtcgtaacgggtaactctgcagcggaaccgactactttgggtgtccgtgtttccttttatccttatattggctgcttatggtgacaatcacggaattgttgccatatagctattggattggccatccggtgtctaacagagctattgtatacctatttgttggatttgtaccactaaattacaaggttttaaacactctcaaccttataatactactcaactcagcaaa

SEQ ID NO: 22316 - DNA, 683 bp, synthetic construct
  source 1..683: mol_type = other DNA
gtactctggtatctcggtacctttgtacgcctgttttaattccctccccaacgtaacttagaagcttttaaaccaaagctcaataggcggagcgcaaaccagcgctcttatgagcaagcacttctgtctccccggtgtggttgtatagactgtccccacggttgaaaacaacttatccgttaaccgctatagtacttcgagaaacctagtattgccttcggagtgtcgatgcgttgcgctcagcacactaacccgtgtgtagcttgggtcgatgagtctggacgtaccccactggcgacagtggtccaggctgcgttggcggcctactcgtggtgaaaaccatgagacgctagacatgaacaaggtgtgaagagtctattgagctactatagagtcctccggcccctgaatgcggctaatcctaaccatggagcaagtgctcacaaaccagtgggttacttgtcgtaatgcgcaagtccgtggcggaaccgactactttgggtgtccgtgtttcactttttacttttatgactgctaatggtgacaatttaatattgttaccatttggcttgtcgaattgatcacataagatctatagttttgttcactgatttgctttcaaataatctcacctcaaaacctccagtacataacatttaaagagtttaaacttatttataaca

SEQ ID NO: 22317 - DNA, 633 bp, synthetic construct
  source 1..633: mol_type = other DNA
acgtaacttagaagcttttaaaccaaagctcaataggcggagcgcaaaccagcgctcttatgagcaagcacttctgtctccccggtgtggttgtatagactgtccccacggttgaaaacaacttatccgttaaccgctatagtacttcgagaaacctagtattgccttcggagtgtcgatgcgttgcgctcagcacactaacccgtgtgtagcttgggtcgatgagtctggacgtaccccactggcgacagtggtccaggctgcgttggcggcctactcgtggtgaaaaccatgagacgctagacatgaacaaggtgtgaagagtctattgagctactatagagtcctccggcccctgaatgcggctaatcctaaccatggagcaagtgctcacaaaccagtgggttacttgtcgtaatgcgcaagtccgtggcggaaccgactactttgggtgtccgtgtttcactttttacttttatgactgctaatggtgacaatttaatattgttaccatttggcttgtcgaattgatcacataagatctatagttttgttcactgatttgctttcaaataatctcacctcaaaacctccagtacataacatttaaagagtttaaacttatttataaca

SEQ ID NO: 22318 - DNA, 583 bp, synthetic construct
  source 1..583: mol_type = other DNA
agcgctcttatgagcaagcacttctgtctccccggtgtggttgtatagactgtccccacggttgaaaacaacttatccgttaaccgctatagtacttcgagaaacctagtattgccttcggagtgtcgatgcgttgcgctcagcacactaacccgtgtgtagcttgggtcgatgagtctggacgtaccccactggcgacagtggtccaggctgcgttggcggcctactcgtggtgaaaaccatgagacgctagacatgaacaaggtgtgaagagtctattgagctactatagagtcctccggcccctgaatgcggctaatcctaaccatggagcaagtgctcacaaaccagtgggttacttgtcgtaatgcgcaagtccgtggcggaaccgactactttgggtgtccgtgtttcactttttacttttatgactgctaatggtgacaatttaatattgttaccatttggcttgtcgaattgatcacataagatctatagttttgttcactgatttgctttcaaataatctcacctcaaaacctccagtacataacatttaaagagtttaaacttatttataaca

SEQ ID NO: 22319 - DNA, 533 bp, synthetic construct
  source 1..533: mol_type = other DNA
tgtccccacggttgaaaacaacttatccgttaaccgctatagtacttcgagaaacctagtattgccttcggagtgtcgatgcgttgcgctcagcacactaacccgtgtgtagcttgggtcgatgagtctggacgtaccccactggcgacagtggtccaggctgcgttggcggcctactcgtggtgaaaaccatgagacgctagacatgaacaaggtgtgaagagtctattgagctactatagagtcctccggcccctgaatgcggctaatcctaaccatggagcaagtgctcacaaaccagtgggttacttgtcgtaatgcgcaagtccgtggcggaaccgactactttgggtgtccgtgtttcactttttacttttatgactgctaatggtgacaatttaatattgttaccatttggcttgtcgaattgatcacataagatctatagttttgttcactgatttgctttcaaataatctcacctcaaaacctccagtacataacatttaaagagtttaaacttatttataaca

SEQ ID NO: 22320 - DNA, 684 bp, synthetic construct
  source 1..684: mol_type = other DNA
caccacggtacctttgtgcgcctgttttatcaccctaccccattcggaacttagaagcaatacacaaccgaccaatagtgggtgtggcacaccagccgcatcttggtcaagtacttctgtttccccgggttgagtatcaataagctgctcacacggctgaaggagaaaacacccgtcacccggccaactacttcgagaaacctagtaccactatgaatgttgcaaggcgtttcgctcagcacttcccccgtgtagatcaggtcgatgagtcaccgcattccccacgggcgaccgtggcggtggctgcgttggcggcctgcctatgggttaacccatgggacgccttaatactgacatggtgcgaagagtctattgagctagttggtagtcctccggcccctgaatgcggctaatcctaactgcggagcacatactcacaagccagtgagcggtgtgtcgtaacgggtaactctgcagcggaaccgactactttgggagtccgtgtttccttttatccttatattggctgcttatggtgacaattggagaattgttaccatatagctattggattggccatccggtgtctaatagagctattatatacctatttgttggatttactccactaacacacaaatccctaaacactttgtgctttatcttaaacttaaatacacgaaa

SEQ ID NO: 22321 - DNA, 634 bp, synthetic construct
  source 1..634: mol_type = other DNA
ttagaagcaatacacaaccgaccaatagtgggtgtggcacaccagccgcatcttggtcaagtacttctgtttccccgggttgagtatcaataagctgctcacacggctgaaggagaaaacacccgtcacccggccaactacttcgagaaacctagtaccactatgaatgttgcaaggcgtttcgctcagcacttcccccgtgtagatcaggtcgatgagtcaccgcattccccacgggcgaccgtggcggtggctgcgttggcggcctgcctatgggttaacccatgggacgccttaatactgacatggtgcgaagagtctattgagctagttggtagtcctccggcccctgaatgcggctaatcctaactgcggagcacatactcacaagccagtgagcggtgtgtcgtaacgggtaactctgcagcggaaccgactactttgggagtccgtgtttccttttatccttatattggctgcttatggtgacaattggagaattgttaccatatagctattggattggccatccggtgtctaatagagctattatatacctatttgttggatttactccactaacacacaaatccctaaacactttgtgctttatcttaaacttaaatacacgaaa

SEQ ID NO: 22322 - DNA, 584 bp, synthetic construct
  source 1..584: mol_type = other DNA
tcttggtcaagtacttctgtttccccgggttgagtatcaataagctgctcacacggctgaaggagaaaacacccgtcacccggccaactacttcgagaaacctagtaccactatgaatgttgcaaggcgtttcgctcagcacttcccccgtgtagatcaggtcgatgagtcaccgcattccccacgggcgaccgtggcggtggctgcgttggcggcctgcctatgggttaacccatgggacgccttaatactgacatggtgcgaagagtctattgagctagttggtagtcctccggcccctgaatgcggctaatcctaactgcggagcacatactcacaagccagtgagcggtgtgtcgtaacgggtaactctgcagcggaaccgactactttgggagtccgtgtttccttttatccttatattggctgcttatggtgacaattggagaattgttaccatatagctattggattggccatccggtgtctaatagagctattatatacctatttgttggatttactccactaacacacaaatccctaaacactttgtgctttatcttaaacttaaatacacgaaa

SEQ ID NO: 22323 - DNA, 534 bp, synthetic construct
  source 1..534: mol_type = other DNA
acacggctgaaggagaaaacacccgtcacccggccaactacttcgagaaacctagtaccactatgaatgttgcaaggcgtttcgctcagcacttcccccgtgtagatcaggtcgatgagtcaccgcattccccacgggcgaccgtggcggtggctgcgttggcggcctgcctatgggttaacccatgggacgccttaatactgacatggtgcgaagagtctattgagctagttggtagtcctccggcccctgaatgcggctaatcctaactgcggagcacatactcacaagccagtgagcggtgtgtcgtaacgggtaactctgcagcggaaccgactactttgggagtccgtgtttccttttatccttatattggctgcttatggtgacaattggagaattgttaccatatagctattggattggccatccggtgtctaatagagctattatatacctatttgttggatttactccactaacacacaaatccctaaacactttgtgctttatcttaaacttaaatacacgaaa

SEQ ID NO: 22324 - DNA, 684 bp, synthetic construct
  source 1..684: mol_type = other DNA
cacggtacccttgtacgcctgttttatacccccttcccccgtaacttagaagcaataatccaagttcaatagaagggggtacaaaccagtaccaccacgaacaagcacttctgttaccccggtgaagttgtatagactgtgcccacggttgaaagcgaccgatccgttatccgctcttgtacttcgagaagcccagtatcatcttggaatcttcgatgcgttgcgctcagcactcaaccccagagtgtagcttaggtcgatgagtctggacggtcctcaccggtgacggtggtccaggctgcgttggcggcctacctgtggtccaaagccacaggacgctagttgtgaacaaggtgtgaagagcctattgagctacatgagagtcctccggcccctgaatgcggctaatcctaaccacggagcaagtgctcacaacccagtgagtggcttgtcgtaacgagcaattctgtggcggaaccgactactttgggtgtccgtgtttcctttattttattatatggctgcttatggtgacaatcattgattgttatcataaagcgagttggattggccatccggtgaaagtaaagcacattatttatctttttgttggatttactccattgagtgtttttactccagacgtgattcgagcagtcttattgattagaagcatctgccaca

SEQ ID NO: 22325 - DNA, 634 bp, synthetic construct
  source 1..634: mol_type = other DNA
agcaataatccaagttcaatagaagggggtacaaaccagtaccaccacgaacaagcacttctgttaccccggtgaagttgtatagactgtgcccacggttgaaagcgaccgatccgttatccgctcttgtacttcgagaagcccagtatcatcttggaatcttcgatgcgttgcgctcagcactcaaccccagagtgtagcttaggtcgatgagtctggacggtcctcaccggtgacggtggtccaggctgcgttggcggcctacctgtggtccaaagccacaggacgctagttgtgaacaaggtgtgaagagcctattgagctacatgagagtcctccggcccctgaatgcggctaatcctaaccacggagcaagtgctcacaacccagtgagtggcttgtcgtaacgagcaattctgtggcggaaccgactactttgggtgtccgtgtttcctttattttattatatggctgcttatggtgacaatcattgattgttatcataaagcgagttggattggccatccggtgaaagtaaagcacattatttatctttttgttggatttactccattgagtgtttttactccagacgtgattcgagcagtcttattgattagaagcatctgccaca

SEQ ID NO: 22326 - DNA, 584 bp, synthetic construct
  source 1..584: mol_type = other DNA
acaagcacttctgttaccccggtgaagttgtatagactgtgcccacggttgaaagcgaccgatccgttatccgctcttgtacttcgagaagcccagtatcatcttggaatcttcgatgcgttgcgctcagcactcaaccccagagtgtagcttaggtcgatgagtctggacggtcctcaccggtgacggtggtccaggctgcgttggcggcctacctgtggtccaaagccacaggacgctagttgtgaacaaggtgtgaagagcctattgagctacatgagagtcctccggcccctgaatgcggctaatcctaaccacggagcaagtgctcacaacccagtgagtggcttgtcgtaacgagcaattctgtggcggaaccgactactttgggtgtccgtgtttcctttattttattatatggctgcttatggtgacaatcattgattgttatcataaagcgagttggattggccatccggtgaaagtaaagcacattatttatctttttgttggatttactccattgagtgtttttactccagacgtgattcgagcagtcttattgattagaagcatctgccaca

SEQ ID NO: 22327 - DNA, 534 bp, synthetic construct
  source 1..534: mol_type = other DNA
gaaagcgaccgatccgttatccgctcttgtacttcgagaagcccagtatcatcttggaatcttcgatgcgttgcgctcagcactcaaccccagagtgtagcttaggtcgatgagtctggacggtcctcaccggtgacggtggtccaggctgcgttggcggcctacctgtggtccaaagccacaggacgctagttgtgaacaaggtgtgaagagcctattgagctacatgagagtcctccggcccctgaatgcggctaatcctaaccacggagcaagtgctcacaacccagtgagtggcttgtcgtaacgagcaattctgtggcggaaccgactactttgggtgtccgtgtttcctttattttattatatggctgcttatggtgacaatcattgattgttatcataaagcgagttggattggccatccggtgaaagtaaagcacattatttatctttttgttggatttactccattgagtgtttttactccagacgtgattcgagcagtcttattgattagaagcatctgccaca

SEQ ID NO: 22328 - DNA, 684 bp, synthetic construct
  source 1..684: mol_type = other DNA
tattccggtacctttgtgcgcctgttttatccaccctccccaatgtaacgtagaagctacgctcaaacggtcaacagatagtccagtaatccagctgggccacgaccaagcacttctgtttccccggacagagtaccaataagctgctcgcgcggctgaaggggaaaacgttcgttacccggccaattacttcgagaaacctagtaccgccatggacgttgcgcagcgtttcgctccacacaaccccagtgtagatcaggtcgatgagccaccgcattccccacgggcgaccgtggcggtggctgcgttggcggcctgcccatggggtaacccatgggacgcttcaatacagacatggtgcgaagagtctattgagctaattggtagtcctccggcccctgaatgcggctaatcctaactgcggagcaggtacccacaacccagtgggtcacctgtcgtaatgggcaactctgcagcggaaccgactactttgggtgtccgtgtttccttttaacctttacactggctgcttatggtgacaattgaaagattgttaccatatagctattggattggccatcctgtgagtaatagagcgattgtatacttatttgttggctttataccactcaatttgaaagctttacagacactgaattatattgtggcattaaacacagcaaa

SEQ ID NO: 22329 - DNA, 634 bp, synthetic construct; identical to SEQ ID NO: 20863
  source 1..634: mol_type = other DNA

SEQ ID NO: 22330 - DNA, 584 bp, synthetic construct
  source 1..584: mol_type = other DNA
cacgaccaagcacttctgtttccccggacagagtaccaataagctgctcgcgcggctgaaggggaaaacgttcgttacccggccaattacttcgagaaacctagtaccgccatggacgttgcgcagcgtttcgctccacacaaccccagtgtagatcaggtcgatgagccaccgcattccccacgggcgaccgtggcggtggctgcgttggcggcctgcccatggggtaacccatgggacgcttcaatacagacatggtgcgaagagtctattgagctaattggtagtcctccggcccctgaatgcggctaatcctaactgcggagcaggtacccacaacccagtgggtcacctgtcgtaatgggcaactctgcagcggaaccgactactttgggtgtccgtgtttccttttaacctttacactggctgcttatggtgacaattgaaagattgttaccatatagctattggattggccatcctgtgagtaatagagcgattgtatacttatttgttggctttataccactcaatttgaaagctttacagacactgaattatattgtggcattaaacacagcaaa

SEQ ID NO: 22331 - DNA, 534 bp, synthetic construct
  source 1..534: mol_type = other DNA
cgcggctgaaggggaaaacgttcgttacccggccaattacttcgagaaacctagtaccgccatggacgttgcgcagcgtttcgctccacacaaccccagtgtagatcaggtcgatgagccaccgcattccccacgggcgaccgtggcggtggctgcgttggcggcctgcccatggggtaacccatgggacgcttcaatacagacatggtgcgaagagtctattgagctaattggtagtcctccggcccctgaatgcggctaatcctaactgcggagcaggtacccacaacccagtgggtcacctgtcgtaatgggcaactctgcagcggaaccgactactttgggtgtccgtgtttccttttaacctttacactggctgcttatggtgacaattgaaagattgttaccatatagctattggattggccatcctgtgagtaatagagcgattgtatacttatttgttggctttataccactcaatttgaaagctttacagacactgaattatattgtggcattaaacacagcaaa

SEQ ID NO: 22332 - DNA, 684 bp, synthetic construct
  source 1..684: mol_type = other DNA
atcaaggtacctttgtgcgcctgttttatagccccttccccgaatgtaacgtagaagctgaacccaagcggtcaacaggcggctcagaacaccatctgggtcttgaccaagcacttctgttaccccggactgagtatcaataagctgctcacgcggctgaaggagaaaatgttcgttatccggccaattacttcgagaaacctagtaccaccatgaaggttgcgcagtgtttcgctccgcacaatcccagtgtagatcaggtcgatgagtcaccgcgttcctcacgggcgaccgtggcggtggctgcgctggcggcctgcccatggggcaacccatgggacgcttcaatactgacatggtgcgaagagtcaattgagctaattggtagtcctccggcccctgaatgcggctaatcctaactgcggagcagatgcccaagctccagtgggtagtctgtcgtaacgggtaactctgcagcggaaccgactactttgggtgtccgtgtttccttttattcttacattggctgcttatggtgacaattgagaaattgttgccatatagctattggattggccatccggtgacgaatagagcaattgtgtatctttttgttggattcataccactagataatacaaacttcaaaaccttgtgttacatcattaggttaaacacagcaag

SEQ ID NO: 22333 - DNA, 634 bp, synthetic construct
  source 1..634: mol_type = other DNA
gtagaagctgaacccaagcggtcaacaggcggctcagaacaccatctgggtcttgaccaagcacttctgttaccccggactgagtatcaataagctgctcacgcggctgaaggagaaaatgttcgttatccggccaattacttcgagaaacctagtaccaccatgaaggttgcgcagtgtttcgctccgcacaatcccagtgtagatcaggtcgatgagtcaccgcgttcctcacgggcgaccgtggcggtggctgcgctggcggcctgcccatggggcaacccatgggacgcttcaatactgacatggtgcgaagagtcaattgagctaattggtagtcctccggcccctgaatgcggctaatcctaactgcggagcagatgcccaagctccagtgggtagtctgtcgtaacgggtaactctgcagcggaaccgactactttgggtgtccgtgtttccttttattcttacattggctgcttatggtgacaattgagaaattgttgccatatagctattggattggccatccggtgacgaatagagcaattgtgtatctttttgttggattcataccactagataatacaaacttcaaaaccttgtgttacatcattaggttaaacacagcaag

SEQ ID NO: 22334 - DNA, 584 bp, synthetic construct
  source 1..584: mol_type = other DNA
tcttgaccaagcacttctgttaccccggactgagtatcaataagctgctcacgcggctgaaggagaaaatgttcgttatccggccaattacttcgagaaacctagtaccaccatgaaggttgcgcagtgtttcgctccgcacaatcccagtgtagatcaggtcgatgagtcaccgcgttcctcacgggcgaccgtggcggtggctgcgctggcggcctgcccatggggcaacccatgggacgcttcaatactgacatggtgcgaagagtcaattgagctaattggtagtcctccggcccctgaatgcggctaatcctaactgcggagcagatgcccaagctccagtgggtagtctgtcgtaacgggtaactctgcagcggaaccgactactttgggtgtccgtgtttccttttattcttacattggctgcttatggtgacaattgagaaattgttgccatatagctattggattggccatccggtgacgaatagagcaattgtgtatctttttgttggattcataccactagataatacaaacttcaaaaccttgtgttacatcattaggttaaacacagcaag

SEQ ID NO: 22335 - DNA, 534 bp, synthetic construct
  source 1..534: mol_type = other DNA
acgcggctgaaggagaaaatgttcgttatccggccaattacttcgagaaacctagtaccaccatgaaggttgcgcagtgtttcgctccgcacaatcccagtgtagatcaggtcgatgagtcaccgcgttcctcacgggcgaccgtggcggtggctgcgctggcggcctgcccatggggcaacccatgggacgcttcaatactgacatggtgcgaagagtcaattgagctaattggtagtcctccggcccctgaatgcggctaatcctaactgcggagcagatgcccaagctccagtgggtagtctgtcgtaacgggtaactctgcagcggaaccgactactttgggtgtccgtgtttccttttattcttacattggctgcttatggtgacaattgagaaattgttgccatatagctattggattggccatccggtgacgaatagagcaattgtgtatctttttgttggattcataccactagataatacaaacttcaaaaccttgtgttacatcattaggttaaacacagcaag

SEQ ID NO: 22336 - DNA, 685 bp, synthetic construct
  source 1..685: mol_type = other DNA
accgttactccattcagcttcttcggaacctgttcggaggaattaaacgggcacccactcacccccatctccccctgtaacttgaagtgtgtgctcgtgaccttgactcctgcgggcttcaccgacccgtccagtgaacaaactgctaggtgatttcttcccctcccctagcctggatgttccacatccaggtcttcttcccccagcccgacatgtcatgggctgtttggaatccccgcgaaagctgctaacgtggcaattgtgggtcccccttccaacaagacaccgagtctttctcccttaaggctagccccgtgtggtgaattccaccgggcaactagtggtgtcaatgcatgcctccgacctcggccgcggagtgctgccccccaagttgcgaaactgaccaaggattgtgctgcctggcaagcatagtctgaggagatgttccgctgtggttgccaaacctggtaacaggtgccccagtgcgcgtagtctccttccggttcgtccggctgtcctttggtaaagacacaatgtaaggggcgtgtgccaacgccctggaaagagtgaacttctactgccctaggaatgccacgcaggtacccctggtttcttaccagggatctgagcgtgggctaattgtctaacgggtagtttcatttccctcccttcttttgttgacatc

SEQ ID NO: 22337 - DNA, 635 bp, synthetic construct
  source 1..635: mol_type = other DNA
gcacccactcacccccatctccccctgtaacttgaagtgtgtgctcgtgaccttgactcctgcgggcttcaccgacccgtccagtgaacaaactgctaggtgatttcttcccctcccctagcctggatgttccacatccaggtcttcttcccccagcccgacatgtcatgggctgtttggaatccccgcgaaagctgctaacgtggcaattgtgggtcccccttccaacaagacaccgagtctttctcccttaaggctagccccgtgtggtgaattccaccgggcaactagtggtgtcaatgcatgcctccgacctcggccgcggagtgctgccccccaagttgcgaaactgaccaaggattgtgctgcctggcaagcatagtctgaggagatgttccgctgtggttgccaaacctggtaacaggtgccccagtgcgcgtagtctccttccggttcgtccggctgtcctttggtaaagacacaatgtaaggggcgtgtgccaacgccctggaaagagtgaacttctactgccctaggaatgccacgcaggtacccctggtttcttaccagggatctgagcgtgggctaattgtctaacgggtagtttcatttccctcccttcttttgttgacatc

SEQ ID NO: 22338 - DNA, 585 bp, synthetic construct
  source 1..585: mol_type = other DNA
ccttgactcctgcgggcttcaccgacccgtccagtgaacaaactgctaggtgatttcttcccctcccctagcctggatgttccacatccaggtcttcttcccccagcccgacatgtcatgggctgtttggaatccccgcgaaagctgctaacgtggcaattgtgggtcccccttccaacaagacaccgagtctttctcccttaaggctagccccgtgtggtgaattccaccgggcaactagtggtgtcaatgcatgcctccgacctcggccgcggagtgctgccccccaagttgcgaaactgaccaaggattgtgctgcctggcaagcatagtctgaggagatgttccgctgtggttgccaaacctggtaacaggtgccccagtgcgcgtagtctccttccggttcgtccggctgtcctttggtaaagacacaatgtaaggggcgtgtgccaacgccctggaaagagtgaacttctactgccctaggaatgccacgcaggtacccctggtttcttaccagggatctgagcgtgggctaattgtctaacgggtagtttcatttccctcccttcttttgttgacatc

SEQ ID NO: 22339 - DNA, 535 bp, synthetic construct
  source 1..535: mol_type = other DNA
tgatttcttcccctcccctagcctggatgttccacatccaggtcttcttcccccagcccgacatgtcatgggctgtttggaatccccgcgaaagctgctaacgtggcaattgtgggtcccccttccaacaagacaccgagtctttctcccttaaggctagccccgtgtggtgaattccaccgggcaactagtggtgtcaatgcatgcctccgacctcggccgcggagtgctgccccccaagttgcgaaactgaccaaggattgtgctgcctggcaagcatagtctgaggagatgttccgctgtggttgccaaacctggtaacaggtgccccagtgcgcgtagtctccttccggttcgtccggctgtcctttggtaaagacacaatgtaaggggcgtgtgccaacgccctggaaagagtgaacttctactgccctaggaatgccacgcaggtacccctggtttcttaccagggatctgagcgtgggctaattgtctaacgggtagtttcatttccctcccttcttttgttgacatc

SEQ ID NO: 22340 - DNA, 685 bp, synthetic construct
  source 1..685: mol_type = other DNA
ggaccaccgttactccattcagcttcttcggaacctgttcggaggaattaaacgggcacccactttcctgtcctctccccttttctgtaactccaagtgtgtgctcgtaatcttgactcccgcggattgaccgctccgctggtgaacaaactgctaggtcatctcctccccacccttgggcgtccttccgggcgtccacaccctccccccagcctgacgtgtcacaggctgtacaaagaccccgcgaaagctgctaacgtggcaattgtgggtcccccctttgtaaaggaaccgagtctttctcccttaaggctagacccctgtgtgaattcacaggtggcaactagtggttccactgcatgctcccgacctcggccgcggagtgctgttccccaagtcgtaacactgaccttcacttatgtgcctggcaagcatatctgagaagatgttccgctgtggctgccaaacctggtaacaggtgccccagtgtgcgtagtcttcttccgtcttcggacggtaggtgttaggtaaagatgcggcgtaaggttcaagtgccaacgccctggaagggatgacccttctactgccctaggaatgccgcgcaggtaccccaggttcgcctgggatctgagcgcgggctaattgtctacgggtagtttcatttccctcttcttccactggcatc

SEQ ID NO: 22341 - DNA, 635 bp, synthetic construct
  source 1..635: mol_type = other DNA
aacgggcacccactttcctgtcctctccccttttctgtaactccaagtgtgtgctcgtaatcttgactcccgcggattgaccgctccgctggtgaacaaactgctaggtcatctcctccccacccttgggcgtccttccgggcgtccacaccctccccccagcctgacgtgtcacaggctgtacaaagaccccgcgaaagctgctaacgtggcaattgtgggtcccccctttgtaaaggaaccgagtctttctcccttaaggctagacccctgtgtgaattcacaggtggcaactagtggttccactgcatgctcccgacctcggccgcggagtgctgttccccaagtcgtaacactgaccttcacttatgtgcctggcaagcatatctgagaagatgttccgctgtggctgccaaacctggtaacaggtgccccagtgtgcgtagtcttcttccgtcttcggacggtaggtgttaggtaaagatgcggcgtaaggttcaagtgccaacgccctggaagggatgacccttctactgccctaggaatgccgcgcaggtaccccaggttcgcctgggatctgagcgcgggctaattgtctacgggtagtttcatttccctcttcttccactggcatc

SEQ ID NO: 22342 - DNA, 585 bp, synthetic construct
  source 1..585: mol_type = other DNA
gtgctcgtaatcttgactcccgcggattgaccgctccgctggtgaacaaactgctaggtcatctcctccccacccttgggcgtccttccgggcgtccacaccctccccccagcctgacgtgtcacaggctgtacaaagaccccgcgaaagctgctaacgtggcaattgtgggtcccccctttgtaaaggaaccgagtctttctcccttaaggctagacccctgtgtgaattcacaggtggcaactagtggttccactgcatgctcccgacctcggccgcggagtgctgttccccaagtcgtaacactgaccttcacttatgtgcctggcaagcatatctgagaagatgttccgctgtggctgccaaacctggtaacaggtgccccagtgtgcgtagtcttcttccgtcttcggacggtaggtgttaggtaaagatgcggcgtaaggttcaagtgccaacgccctggaagggatgacccttctactgccctaggaatgccgcgcaggtaccccaggttcgcctgggatctgagcgcgggctaattgtctacgggtagtttcatttccctcttcttccactggcatc

SEQ ID NO: 22343 - DNA, 535 bp, synthetic construct
  source 1..535: mol_type = other DNA
ctgctaggtcatctcctccccacccttgggcgtccttccgggcgtccacaccctccccccagcctgacgtgtcacaggctgtacaaagaccccgcgaaagctgctaacgtggcaattgtgggtcccccctttgtaaaggaaccgagtctttctcccttaaggctagacccctgtgtgaattcacaggtggcaactagtggttccactgcatgctcccgacctcggccgcggagtgctgttccccaagtcgtaacactgaccttcacttatgtgcctggcaagcatatctgagaagatgttccgctgtggctgccaaacctggtaacaggtgccccagtgtgcgtagtcttcttccgtcttcggacggtaggtgttaggtaaagatgcggcgtaaggttcaagtgccaacgccctggaagggatgacccttctactgccctaggaatgccgcgcaggtaccccaggttcgcctgggatctgagcgcgggctaattgtctacgggtagtttcatttccctcttcttccactggcatc

SEQ ID NO: 22344 - DNA, 685 bp, synthetic construct
  source 1..685: mol_type = other DNA
attacggtacccttgtgcgcctgttttattcaccccctccccctacgtaacttagaagcgatacctacatggtcaacaggtgccccagcataccagctgggtcatgaccaagcaattctgttaccccggactgagtatcaataagctgctcgcgcggctgaaggagaaaacgttcgttacccggccagttacttcgagaaacccagtaccaccatgaaggttgcgcagtgtttcgctccgcacaaccccagtgtagatcaggtcgatgagtcaccgcgttccccacgggtgaccgtggcggtggctgcgttggcggcctgcccatggggcaacccgtgggacgcttcaatactgacatggtgtgaagagtctattgagctaactggtagtcctccggcccctgaatgcggctaatcctaactgcggagcagatgcccacatgccagtgggtggtctgtcgtaacgggcaactctgcagcggaaccgactactttgggtgtccgtgtttccttttattcctaaactggctgcttatggtgacaattgagagattgttaccatatagctattggattggccatccggtgacgaacagagctatcatttatttatttgttggttttgtgccgttgaaccgcaaagttctacacaccatcaatttcatcctactgcttaactcgacaaa

SEQ ID NO: 22345 - DNA, 635 bp, synthetic construct
  source 1..635: mol_type = other DNA
cttagaagcgatacctacatggtcaacaggtgccccagcataccagctgggtcatgaccaagcaattctgttaccccggactgagtatcaataagctgctcgcgcggctgaaggagaaaacgttcgttacccggccagttacttcgagaaacccagtaccaccatgaaggttgcgcagtgtttcgctccgcacaaccccagtgtagatcaggtcgatgagtcaccgcgttccccacgggtgaccgtggcggtggctgcgttggcggcctgcccatggggcaacccgtgggacgcttcaatactgacatggtgtgaagagtctattgagctaactggtagtcctccggcccctgaatgcggctaatcctaactgcggagcagatgcccacatgccagtgggtggtctgtcgtaacgggcaactctgcagcggaaccgactactttgggtgtccgtgtttccttttattcctaaactggctgcttatggtgacaattgagagattgttaccatatagctattggattggccatccggtgacgaacagagctatcatttatttatttgttggttttgtgccgttgaaccgcaaagttctacacaccatcaatttcatcctactgcttaactcgacaaa

SEQ ID NO: 22346 - DNA, 585 bp, synthetic construct
  source 1..585: mol_type = other DNA
gtcatgaccaagcaattctgttaccccggactgagtatcaataagctgctcgcgcggctgaaggagaaaacgttcgttacccggccagttacttcgagaaacccagtaccaccatgaaggttgcgcagtgtttcgctccgcacaaccccagtgtagatcaggtcgatgagtcaccgcgttccccacgggtgaccgtggcggtggctgcgttggcggcctgcccatggggcaacccgtgggacgcttcaatactgacatggtgtgaagagtctattgagctaactggtagtcctccggcccctgaatgcggctaatcctaactgcggagcagatgcccacatgccagtgggtggtctgtcgtaacgggcaactctgcagcggaaccgactactttgggtgtccgtgtttccttttattcctaaactggctgcttatggtgacaattgagagattgttaccatatagctattggattggccatccggtgacgaacagagctatcatttatttatttgttggttttgtgccgttgaaccgcaaagttctacacaccatcaatttcatcctactgcttaactcgacaaa

SEQ ID NO: 22347 - DNA, 535 bp, synthetic construct
  source 1..535: mol_type = other DNA
cgcgcggctgaaggagaaaacgttcgttacccggccagttacttcgagaaacccagtaccaccatgaaggttgcgcagtgtttcgctccgcacaaccccagtgtagatcaggtcgatgagtcaccgcgttccccacgggtgaccgtggcggtggctgcgttggcggcctgcccatggggcaacccgtgggacgcttcaatactgacatggtgtgaagagtctattgagctaactggtagtcctccggcccctgaatgcggctaatcctaactgcggagcagatgcccacatgccagtgggtggtctgtcgtaacgggcaactctgcagcggaaccgactactttgggtgtccgtgtttccttttattcctaaactggctgcttatggtgacaattgagagattgttaccatatagctattggattggccatccggtgacgaacagagctatcatttatttatttgttggttttgtgccgttgaaccgcaaagttctacacaccatcaatttcatcctactgcttaactcgacaaa

SEQ ID NO: 22348 - DNA, 685 bp, synthetic construct
  source 1..685: mol_type = other DNA
gtactgcggtacctttgtgcgcctgttttatcaccccaccccatccggaacgtagaagctagacttaaatggtcaatagacggcccagtatgccaattgggtctcgaccaagcactcctgtttccccgggtttagtatcaataagctgctcacgtggctgaaggagaaaacacccgttatccggccaactacttcgagaaacttagtaccgctatgaacgttgcaaggcgtttcgctcagcacttcccccgtgtagatcaggccgatgagtcaccgcattcctcacgggcgaccgtggcggtggctgcgctggcggcctgcctatgggcttgcccataggacgccttaatactgacatggtgcgaagagtctattgagctagttggtagtcctccggcccctgaatgcggctaatcctaactgcggagcacatactcacaaaccagtgagcagtgtgtcgtaacgggcaactctgcagcggaaccgactactttgggtgtccgtgtttccttttattcctacactggctgcttatggtgacaattaaagaattgttaccatatagctattggattggccatccggtgtctaacagagctattatatacttgtttgttggattcataccacttgattccaatagctataacaccctactttacatcgttcatttgaacacgagaaa

SEQ ID NO: 22349 - DNA, 635 bp, synthetic construct
  source 1..635: mol_type = other DNA
cgtagaagctagacttaaatggtcaatagacggcccagtatgccaattgggtctcgaccaagcactcctgtttccccgggtttagtatcaataagctgctcacgtggctgaaggagaaaacacccgttatccggccaactacttcgagaaacttagtaccgctatgaacgttgcaaggcgtttcgctcagcacttcccccgtgtagatcaggccgatgagtcaccgcattcctcacgggcgaccgtggcggtggctgcgctggcggcctgcctatgggcttgcccataggacgccttaatactgacatggtgcgaagagtctattgagctagttggtagtcctccggcccctgaatgcggctaatcctaactgcggagcacatactcacaaaccagtgagcagtgtgtcgtaacgggcaactctgcagcggaaccgactactttgggtgtccgtgtttccttttattcctacactggctgcttatggtgacaattaaagaattgttaccatatagctattggattggccatccggtgtctaacagagctattatatacttgtttgttggattcataccacttgattccaatagctataacaccctactttacatcgttcatttgaacacgagaaa

SEQ ID NO: 22350 - DNA, 585 bp, synthetic construct
  source 1..585: mol_type = other DNA
gtctcgaccaagcactcctgtttccccgggtttagtatcaataagctgctcacgtggctgaaggagaaaacacccgttatccggccaactacttcgagaaacttagtaccgctatgaacgttgcaaggcgtttcgctcagcacttcccccgtgtagatcaggccgatgagtcaccgcattcctcacgggcgaccgtggcggtggctgcgctggcggcctgcctatgggcttgcccataggacgccttaatactgacatggtgcgaagagtctattgagctagttggtagtcctccggcccctgaatgcggctaatcctaactgcggagcacatactcacaaaccagtgagcagtgtgtcgtaacgggcaactctgcagcggaaccgactactttgggtgtccgtgtttccttttattcctacactggctgcttatggtgacaattaaagaattgttaccatatagctattggattggccatccggtgtctaacagagctattatatacttgtttgttggattcataccacttgattccaatagctataacaccctactttacatcgttcatttgaacacgagaaa

SEQ ID NO: 22351 - DNA, 535 bp, synthetic construct
  source 1..535: mol_type = other DNA
cacgtggctgaaggagaaaacacccgttatccggccaactacttcgagaaacttagtaccgctatgaacgttgcaaggcgtttcgctcagcacttcccccgtgtagatcaggccgatgagtcaccgcattcctcacgggcgaccgtggcggtggctgcgctggcggcctgcctatgggcttgcccataggacgccttaatactgacatggtgcgaagagtctattgagctagttggtagtcctccggcccctgaatgcggctaatcctaactgcggagcacatactcacaaaccagtgagcagtgtgtcgtaacgggcaactctgcagcggaaccgactactttgggtgtccgtgtttccttttattcctacactggctgcttatggtgacaattaaagaattgttaccatatagctattggattggccatccggtgtctaacagagctattatatacttgtttgttggattcataccacttgattccaatagctataacaccctactttacatcgttcatttgaacacgagaaa

SEQ ID NO: 22352 - DNA, 686 bp, synthetic construct
  source 1..686: mol_type = other DNA
ggaccaccgttactccattcagcttcttcggaacctgttcggaggaattaaacgggcacccactttcctgtcctctccccctttctgcaactcaagtgtgtgctcgtaatcctgactcccacgggttgaccgccccgttggtgaacaaacagctaggtcattccctccctacccctgggcgccatttcagtggcgttcatatcctccccccagcctgacgtgtcacaggctgtgcaaagtccccgcgaaagctgctcacgtggcaattgtgggtcccccctttgtgaaggaaccgagtctttctcccttaaggctagacccctgtgtgaactcacaggtggcaactagtggttccactgcatgctcccgacctcggccgcggagtgctgttccccaagtcgtgacactgacctccacttatgtgcctggcaagcatatctgagaagatgttccgctgtggctgccaaacctggtaacaggtgccccagtgcgtgtagtcttcttccgtctccggacggtaagtgtgtggtaaagatgcggcgtaaggttcaagtgccaacgccctggaagggatgacccttctactgccctaggaatgccgcgcaggtaccccaggttcgcctgggatctgagcgcgggctaattgtctacgggtagtttcatttccctctcttttcactggcatc

SEQ ID NO: 22353 - DNA, 636 bp, synthetic construct
  source 1..636: mol_type = other DNA
aacgggcacccactttcctgtcctctccccctttctgcaactcaagtgtgtgctcgtaatcctgactcccacgggttgaccgccccgttggtgaacaaacagctaggtcattccctccctacccctgggcgccatttcagtggcgttcatatcctccccccagcctgacgtgtcacaggctgtgcaaagtccccgcgaaagctgctcacgtggcaattgtgggtcccccctttgtgaaggaaccgagtctttctcccttaaggctagacccctgtgtgaactcacaggtggcaactagtggttccactgcatgctcccgacctcggccgcggagtgctgttccccaagtcgtgacactgacctccacttatgtgcctggcaagcatatctgagaagatgttccgctgtggctgccaaacctggtaacaggtgccccagtgcgtgtagtcttcttccgtctccggacggtaagtgtgtggtaaagatgcggcgtaaggttcaagtgccaacgccctggaagggatgacccttctactgccctaggaatgccgcgcaggtaccccaggttcgcctgggatctgagcgcgggctaattgtctacgggtagtttcatttccctctcttttcactggcatc

SEQ ID NO: 22354 - DNA, 586 bp, synthetic construct
  source 1..586: mol_type = other DNA
tgctcgtaatcctgactcccacgggttgaccgccccgttggtgaacaaacagctaggtcattccctccctacccctgggcgccatttcagtggcgttcatatcctccccccagcctgacgtgtcacaggctgtgcaaagtccccgcgaaagctgctcacgtggcaattgtgggtcccccctttgtgaaggaaccgagtctttctcccttaaggctagacccctgtgtgaactcacaggtggcaactagtggttccactgcatgctcccgacctcggccgcggagtgctgttccccaagtcgtgacactgacctccacttatgtgcctggcaagcatatctgagaagatgttccgctgtggctgccaaacctggtaacaggtgccccagtgcgtgtagtcttcttccgtctccggacggtaagtgtgtggtaaagatgcggcgtaaggttcaagtgccaacgccctggaagggatgacccttctactgccctaggaatgccgcgcaggtaccccaggttcgcctgggatctgagcgcgggctaattgtctacgggtagtttcatttccctctcttttcactggcatc

SEQ ID NO: 22355 - DNA, 536 bp, synthetic construct
  source 1..536: mol_type = other DNA
agctaggtcattccctccctacccctgggcgccatttcagtggcgttcatatcctccccccagcctgacgtgtcacaggctgtgcaaagtccccgcgaaagctgctcacgtggcaattgtgggtcccccctttgtgaaggaaccgagtctttctcccttaaggctagacccctgtgtgaactcacaggtggcaactagtggttccactgcatgctcccgacctcggccgcggagtgctgttccccaagtcgtgacactgacctccacttatgtgcctggcaagcatatctgagaagatgttccgctgtggctgccaaacctggtaacaggtgccccagtgcgtgtagtcttcttccgtctccggacggtaagtgtgtggtaaagatgcggcgtaaggttcaagtgccaacgccctggaagggatgacccttctactgccctaggaatgccgcgcaggtaccccaggttcgcctgggatctgagcgcgggctaattgtctacgggtagtttcatttccctctcttttcactggcatc

SEQ ID NO: 22356 - DNA, 686 bp, synthetic construct
  source 1..686: mol_type = other DNA
ccacggtacccttgtacgcctgttttatatcccctccccacgcaactttagaagaaattcaccaagttcaatagggggggtacgaaccagtaccaccacgaacaagcacttctgtttccccggtgattttacataggctgtacccacggctgaaagtgaatgatccgttacccgcttgagtacttcgagaagcctagtaccaccttggaatctccgatgcgttgcgttcagcactctaacccgagtgtagcttaggctgatgagtctgggcgatccccaccggcgacggtggcccaggctgcgttggcggcctacccgtggctaacgctacgggacgctagttttgaacaaggtgtgaagagcctattgagctacccaagaatcctccggcccctgaatgcggctaatcccaaccatggagcaagtgccctcaagccagggggtggcttgtcgtaacgcgtaagtctgtggcggaaccgactactttgggtgtccgtgtttccttttatttcatatttggctgcttatggtgacaatcacagattgttatcataaagcgaattggattggccatccagtgaaatataagctcattgtttatctccttgttggatttgttctgttaggaaattcctcaataaagttgactcgggtaatcttagtgattagaagtcatcatttcaaca

SEQ ID NO: 22357 - DNA, 636 bp, synthetic construct
  source 1..636: mol_type = other DNA
gaagaaattcaccaagttcaatagggggggtacgaaccagtaccaccacgaacaagcacttctgtttccccggtgattttacataggctgtacccacggctgaaagtgaatgatccgttacccgcttgagtacttcgagaagcctagtaccaccttggaatctccgatgcgttgcgttcagcactctaacccgagtgtagcttaggctgatgagtctgggcgatccccaccggcgacggtggcccaggctgcgttggcggcctacccgtggctaacgctacgggacgctagttttgaacaaggtgtgaagagcctattgagctacccaagaatcctccggcccctgaatgcggctaatcccaaccatggagcaagtgccctcaagccagggggtggcttgtcgtaacgcgtaagtctgtggcggaaccgactactttgggtgtccgtgtttccttttatttcatatttggctgcttatggtgacaatcacagattgttatcataaagcgaattggattggccatccagtgaaatataagctcattgtttatctccttgttggatttgttctgttaggaaattcctcaataaagttgactcgggtaatcttagtgattagaagtcatcatttcaaca

SEQ ID NO: 22358 - DNA, 586 bp, synthetic construct
  source 1..586: mol_type = other DNA
aacaagcacttctgtttccccggtgattttacataggctgtacccacggctgaaagtgaatgatccgttacccgcttgagtacttcgagaagcctagtaccaccttggaatctccgatgcgttgcgttcagcactctaacccgagtgtagcttaggctgatgagtctgggcgatccccaccggcgacggtggcccaggctgcgttggcggcctacccgtggctaacgctacgggacgctagttttgaacaaggtgtgaagagcctattgagctacccaagaatcctccggcccctgaatgcggctaatcccaaccatggagcaagtgccctcaagccagggggtggcttgtcgtaacgcgtaagtctgtggcggaaccgactactttgggtgtccgtgtttccttttatttcatatttggctgcttatggtgacaatcacagattgttatcataaagcgaattggattggccatccagtgaaatataagctcattgtttatctccttgttggatttgttctgttaggaaattcctcaataaagttgactcgggtaatcttagtgattagaagtcatcatttcaaca

SEQ ID NO: 22359 - DNA, 536 bp, synthetic construct
  source 1..536: mol_type = other DNA
tgaaagtgaatgatccgttacccgcttgagtacttcgagaagcctagtaccaccttggaatctccgatgcgttgcgttcagcactctaacccgagtgtagcttaggctgatgagtctgggcgatccccaccggcgacggtggcccaggctgcgttggcggcctacccgtggctaacgctacgggacgctagttttgaacaaggtgtgaagagcctattgagctacccaagaatcctccggcccctgaatgcggctaatcccaaccatggagcaagtgccctcaagccagggggtggcttgtcgtaacgcgtaagtctgtggcggaaccgactactttgggtgtccgtgtttccttttatttcatatttggctgcttatggtgacaatcacagattgttatcataaagcgaattggattggccatccagtgaaatataagctcattgtttatctccttgttggatttgttctgttaggaaattcctcaataaagttgactcgggtaatcttagtgattagaagtcatcatttcaaca

SEQ ID NO: 22360 - DNA, 686 bp, synthetic construct
  source 1..686: mol_type = other DNA
gtatcccggtacctttgtgcgcctgttttacacaccctcccccgatggcaacttagaagatttccacacacggtcaataggcggctcagtataccaactgggtcatgaccaagcacttctgttcccccggactgagtatcaataagctgctcacgtggctgaaggagaaaacgttcgttatccggccaattacttcgagaagcttagtaccaccatagaggttgcgcagtgtttcgctccgcacaaccccagtgtagatcaggtcgatgagtcaccgcactcctcacgggcgaccgtggcggtggctgcgctggcggcctgcccatggggcaacccatgggacgcttcaatactgacatggtgcgaagagcctattgagctaattggtattcctccggcccctgaatgcggctaatcctaactgcggagcagatacccacgagccagtgggcagtctgtcgtaatgggtaactctgcagcggaaccgactactttgggtgtccgtgtttccttttattcctatattggctgctaatggtgacaattgagagattgttgccatatagctattggattggccatccggtgacaaacagagcgattatctatctatttgttggcttcataccattaaaccttagagtcctaaagaccctcaacttaattatacaatttaactctgcgaa

SEQ ID NO: 22361 - DNA, 636 bp, synthetic construct
  source 1..636: mol_type = other DNA
acttagaagatttccacacacggtcaataggcggctcagtataccaactgggtcatgaccaagcacttctgttcccccggactgagtatcaataagctgctcacgtggctgaaggagaaaacgttcgttatccggccaattacttcgagaagcttagtaccaccatagaggttgcgcagtgtttcgctccgcacaaccccagtgtagatcaggtcgatgagtcaccgcactcctcacgggcgaccgtggcggtggctgcgctggcggcctgcccatggggcaacccatgggacgcttcaatactgacatggtgcgaagagcctattgagctaattggtattcctccggcccctgaatgcggctaatcctaactgcggagcagatacccacgagccagtgggcagtctgtcgtaatgggtaactctgcagcggaaccgactactttgggtgtccgtgtttccttttattcctatattggctgctaatggtgacaattgagagattgttgccatatagctattggattggccatccggtgacaaacagagcgattatctatctatttgttggcttcataccattaaaccttagagtcctaaagaccctcaacttaattatacaatttaactctgcgaa

SEQ ID NO: 22362 - DNA, 586 bp, synthetic construct
  source 1..586: mol_type = other DNA
ggtcatgaccaagcacttctgttcccccggactgagtatcaataagctgctcacgtggctgaaggagaaaacgttcgttatccggccaattacttcgagaagcttagtaccaccatagaggttgcgcagtgtttcgctccgcacaaccccagtgtagatcaggtcgatgagtcaccgcactcctcacgggcgaccgtggcggtggctgcgctggcggcctgcccatggggcaacccatgggacgcttcaatactgacatggtgcgaagagcctattgagctaattggtattcctccggcccctgaatgcggctaatcctaactgcggagcagatacccacgagccagtgggcagtctgtcgtaatgggtaactctgcagcggaaccgactactttgggtgtccgtgtttccttttattcctatattggctgctaatggtgacaattgagagattgttgccatatagctattggattggccatccggtgacaaacagagcgattatctatctatttgttggcttcataccattaaaccttagagtcctaaagaccctcaacttaattatacaatttaactctgcgaa

SEQ ID NO: 22363 - DNA, 536 bp, synthetic construct
  source 1..536: mol_type = other DNA
tcacgtggctgaaggagaaaacgttcgttatccggccaattacttcgagaagcttagtaccaccatagaggttgcgcagtgtttcgctccgcacaaccccagtgtagatcaggtcgatgagtcaccgcactcctcacgggcgaccgtggcggtggctgcgctggcggcctgcccatggggcaacccatgggacgcttcaatactgacatggtgcgaagagcctattgagctaattggtattcctccggcccctgaatgcggctaatcctaactgcggagcagatacccacgagccagtgggcagtctgtcgtaatgggtaactctgcagcggaaccgactactttgggtgtccgtgtttccttttattcctatattggctgctaatggtgacaattgagagattgttgccatatagctattggattggccatccggtgacaaacagagcgattatctatctatttgttggcttcataccattaaaccttagagtcctaaagaccctcaacttaattatacaatttaactctgcgaa

SEQ ID NO: 22364 - DNA, 687 bp, synthetic construct
  source 1..687: mol_type = other DNA
cgtcactccattcagcttcttcggaacctgttcggaggaattaaacgggcaccccacttcccccccccaccctcgcaacttcaagtgtgtgtgcccataaccttgacccctgccggtatgccgcccggttcagtggacaaactgctaggcaaattcccccctccccctgtggctggtccttcaaccagccactctcttccccccagccggacgtgctacaggctgtgcaaagcccccgcgaaagctgctcacgtggcaattgtgggtcccccctttgtcaaggcttcgagtctttctcccttaaggctagtcccgtactgtgaaatcagtgtgggcaactagtgaagccactgcacgctcccgaccacggacgcggagtgctgtcccccaagtcatgacactaacaccaagctgtgctgcctggcaagcatagcctgggaaggtgttccgctgtggctgccaaacctggtaacaggtgccccagtgtgtgtaaccttcctccagtcttcggactggcagctttgtgtgaagacgtgacgtaaggttcaagtgccaactccctggaagggatgacccctctactgccctaggaatgctacgcaggtacccctggttcgccagggatctgagcgtaggctaattgtctacgggtagtttcatttcccacctttttatttctttagcatc

SEQ ID NO: 22365 - DNA, 637 bp, synthetic construct
  source 1..637: mol_type = other DNA
accccacttcccccccccaccctcgcaacttcaagtgtgtgtgcccataaccttgacccctgccggtatgccgcccggttcagtggacaaactgctaggcaaattcccccctccccctgtggctggtccttcaaccagccactctcttccccccagccggacgtgctacaggctgtgcaaagcccccgcgaaagctgctcacgtggcaattgtgggtcccccctttgtcaaggcttcgagtctttctcccttaaggctagtcccgtactgtgaaatcagtgtgggcaactagtgaagccactgcacgctcccgaccacggacgcggagtgctgtcccccaagtcatgacactaacaccaagctgtgctgcctggcaagcatagcctgggaaggtgttccgctgtggctgccaaacctggtaacaggtgccccagtgtgtgtaaccttcctccagtcttcggactggcagctttgtgtgaagacgtgacgtaaggttcaagtgccaactccctggaagggatgacccctctactgccctaggaatgctacgcaggtacccctggttcgccagggatctgagcgtaggctaattgtctacgggtagtttcatttcccacctttttatttctttagcatc

SEQ ID NO: 22366 - DNA, 587 bp, synthetic construct
  source 1..587: mol_type = other DNA
ccttgacccctgccggtatgccgcccggttcagtggacaaactgctaggcaaattcccccctccccctgtggctggtccttcaaccagccactctcttccccccagccggacgtgctacaggctgtgcaaagcccccgcgaaagctgctcacgtggcaattgtgggtcccccctttgtcaaggcttcgagtctttctcccttaaggctagtcccgtactgtgaaatcagtgtgggcaactagtgaagccactgcacgctcccgaccacggacgcggagtgctgtcccccaagtcatgacactaacaccaagctgtgctgcctggcaagcatagcctgggaaggtgttccgctgtggctgccaaacctggtaacaggtgccccagtgtgtgtaaccttcctccagtcttcggactggcagctttgtgtgaagacgtgacgtaaggttcaagtgccaactccctggaagggatgacccctctactgccctaggaatgctacgcaggtacccctggttcgccagggatctgagcgtaggctaattgtctacgggtagtttcatttcccacctttttatttctttagcatc

SEQ ID NO: 22367 - DNA, 537 bp, synthetic construct
  source 1..537: mol_type = other DNA
aaattcccccctccccctgtggctggtccttcaaccagccactctcttccccccagccggacgtgctacaggctgtgcaaagcccccgcgaaagctgctcacgtggcaattgtgggtcccccctttgtcaaggcttcgagtctttctcccttaaggctagtcccgtactgtgaaatcagtgtgggcaactagtgaagccactgcacgctcccgaccacggacgcggagtgctgtcccccaagtcatgacactaacaccaagctgtgctgcctggcaagcatagcctgggaaggtgttccgctgtggctgccaaacctggtaacaggtgccccagtgtgtgtaaccttcctccagtcttcggactggcagctttgtgtgaagacgtgacgtaaggttcaagtgccaactccctggaagggatgacccctctactgccctaggaatgctacgcaggtacccctggttcgccagggatctgagcgtaggctaattgtctacgggtagtttcatttcccacctttttatttctttagcatc

SEQ ID NO: 22368 - DNA, 687 bp, synthetic construct
  source 1..687: mol_type = other DNA
tctgcggaatctttgtgcgcctgttttatgaccctcccccgaaacttgtaacttagaagttatgtacatcaccgatcaatagcaggcgtggcgcaccagccatgtcttgatcaagcacttctgtacccccggactgagtatcaatagactgctcacgcggttgaaggagaaaatgttcgttacccggctaactacttcgagaaacctagtaacaccattgaaactgcggagtgtttcgctcagcattccccccatgtagatcaggtcgatgagtcactgcttaccccacgggcgaccgtggcagtggctgcgttggcggcctgcctatggggcaacccataggacgctctaaagtggacatggtgcgaagagtctattgagctagttagtagtcctccggcccctgaatgcggctaatcctaactgcggagcgcatgtcctcaaaccagagggtggtgcgtcgtaatgggtaactctgcagcggaaccgactactttgggtgtccgtgtttcttttgttcttaaaatggctgcttatggtgacaatcgaggaattgttaccatatagctattggattggccatccggtgtgcaacagagctattatctacttgtttgtcggatacatccccttaacacctaaatcctttaatacattgcattatattttaacattgaacgcgagaaa

SEQ ID NO: 22369 - DNA, 637 bp, synthetic construct
  source 1..637: mol_type = other DNA
acttagaagttatgtacatcaccgatcaatagcaggcgtggcgcaccagccatgtcttgatcaagcacttctgtacccccggactgagtatcaatagactgctcacgcggttgaaggagaaaatgttcgttacccggctaactacttcgagaaacctagtaacaccattgaaactgcggagtgtttcgctcagcattccccccatgtagatcaggtcgatgagtcactgcttaccccacgggcgaccgtggcagtggctgcgttggcggcctgcctatggggcaacccataggacgctctaaagtggacatggtgcgaagagtctattgagctagttagtagtcctccggcccctgaatgcggctaatcctaactgcggagcgcatgtcctcaaaccagagggtggtgcgtcgtaatgggtaactctgcagcggaaccgactactttgggtgtccgtgtttcttttgttcttaaaatggctgcttatggtgacaatcgaggaattgttaccatatagctattggattggccatccggtgtgcaacagagctattatctacttgtttgtcggatacatccccttaacacctaaatcctttaatacattgcattatattttaacattgaacgcgagaaa

SEQ ID NO: 22370 - DNA, 587 bp, synthetic construct
  source 1..587: mol_type = other DNA
catgtcttgatcaagcacttctgtacccccggactgagtatcaatagactgctcacgcggttgaaggagaaaatgttcgttacccggctaactacttcgagaaacctagtaacaccattgaaactgcggagtgtttcgctcagcattccccccatgtagatcaggtcgatgagtcactgcttaccccacgggcgaccgtggcagtggctgcgttggcggcctgcctatggggcaacccataggacgctctaaagtggacatggtgcgaagagtctattgagctagttagtagtcctccggcccctgaatgcggctaatcctaactgcggagcgcatgtcctcaaaccagagggtggtgcgtcgtaatgggtaactctgcagcggaaccgactactttgggtgtccgtgtttcttttgttcttaaaatggctgcttatggtgacaatcgaggaattgttaccatatagctattggattggccatccggtgtgcaacagagctattatctacttgtttgtcggatacatccccttaacacctaaatcctttaatacattgcattatattttaacattgaacgcgagaaa

SEQ ID NO: 22371 - DNA, 537 bp, synthetic construct
  source 1..537: mol_type = other DNA
gctcacgcggttgaaggagaaaatgttcgttacccggctaactacttcgagaaacctagtaacaccattgaaactgcggagtgtttcgctcagcattccccccatgtagatcaggtcgatgagtcactgcttaccccacgggcgaccgtggcagtggctgcgttggcggcctgcctatggggcaacccataggacgctctaaagtggacatggtgcgaagagtctattgagctagttagtagtcctccggcccctgaatgcggctaatcctaactgcggagcgcatgtcctcaaaccagagggtggtgcgtcgtaatgggtaactctgcagcggaaccgactactttgggtgtccgtgtttcttttgttcttaaaatggctgcttatggtgacaatcgaggaattgttaccatatagctattggattggccatccggtgtgcaacagagctattatctacttgtttgtcggatacatccccttaacacctaaatcctttaatacattgcattatattttaacattgaacgcgagaaa

SEQ ID NO: 22372 - DNA, 687 bp, synthetic construct
  source 1..687: mol_type = other DNA
attacggtacccttgtacgcctgttttatactccctttccccgtaacttagaagcaacaatccaagttcaatagaagggggtacaaaccagtaccaccacgaacaagcacttctgtttccccggtgaagttgcatagactgtacccacggttgaaagcgactgatccgttatccgctcttgtacttcgagaagcctagtatcactttggaatcttcgatgcgttgcgctcagcacccaaccccggggtgtagcttaggtcgatgagtctggacgttcctcaccggcgacggtggtccaggctgcgttggcggcctacctgtggcccaaagccacaggacgctagttgtgaacaaggtgtgaagagcctattgagctacatgagattcctccggcccctgaatgcggctaatcccaaccacggagcaaatgcccacaacccagtgggtggtttgtcgtaacgagcaattctgtggcggaaccgactactttgggtgtccgtgtttccctttttattattatgtggctgcttatggtgacaatcattggttgttatcataaagcgaattggattggccatccggtaagagtaaaacatatcatttacctttttgttggatttactccattgagtgttttcaccccagacgtaattcgtgtggttctgctgattagaagtttctatcaca

SEQ ID NO: 22373 - DNA, 637 bp, synthetic construct
  source 1..637: mol_type = other DNA
gaagcaacaatccaagttcaatagaagggggtacaaaccagtaccaccacgaacaagcacttctgtttccccggtgaagttgcatagactgtacccacggttgaaagcgactgatccgttatccgctcttgtacttcgagaagcctagtatcactttggaatcttcgatgcgttgcgctcagcacccaaccccggggtgtagcttaggtcgatgagtctggacgttcctcaccggcgacggtggtccaggctgcgttggcggcctacctgtggcccaaagccacaggacgctagttgtgaacaaggtgtgaagagcctattgagctacatgagattcctccggcccctgaatgcggctaatcccaaccacggagcaaatgcccacaacccagtgggtggtttgtcgtaacgagcaattctgtggcggaaccgactactttgggtgtccgtgtttccctttttattattatgtggctgcttatggtgacaatcattggttgttatcataaagcgaattggattggccatccggtaagagtaaaacatatcatttacctttttgttggatttactccattgagtgttttcaccccagacgtaattcgtgtggttctgctgattagaagtttctatcaca

SEQ ID NO: 22374 - DNA, 587 bp, synthetic construct
  source 1..587: mol_type = other DNA
gaacaagcacttctgtttccccggtgaagttgcatagactgtacccacggttgaaagcgactgatccgttatccgctcttgtacttcgagaagcctagtatcactttggaatcttcgatgcgttgcgctcagcacccaaccccggggtgtagcttaggtcgatgagtctggacgttcctcaccggcgacggtggtccaggctgcgttggcggcctacctgtggcccaaagccacaggacgctagttgtgaacaaggtgtgaagagcctattgagctacatgagattcctccggcccctgaatgcggctaatcccaaccacggagcaaatgcccacaacccagtgggtggtttgtcgtaacgagcaattctgtggcggaaccgactactttgggtgtccgtgtttccctttttattattatgtggctgcttatggtgacaatcattggttgttatcataaagcgaattggattggccatccggtaagagtaaaacatatcatttacctttttgttggatttactccattgagtgttttcaccccagacgtaattcgtgtggttctgctgattagaagtttctatcaca

SEQ ID NO: 22375 - DNA, 537 bp, synthetic construct
  source 1..537: mol_type = other DNA
ttgaaagcgactgatccgttatccgctcttgtacttcgagaagcctagtatcactttggaatcttcgatgcgttgcgctcagcacccaaccccggggtgtagcttaggtcgatgagtctggacgttcctcaccggcgacggtggtccaggctgcgttggcggcctacctgtggcccaaagccacaggacgctagttgtgaacaaggtgtgaagagcctattgagctacatgagattcctccggcccctgaatgcggctaatcccaaccacggagcaaatgcccacaacccagtgggtggtttgtcgtaacgagcaattctgtggcggaaccgactactttgggtgtccgtgtttccctttttattattatgtggctgcttatggtgacaatcattggttgttatcataaagcgaattggattggccatccggtaagagtaaaacatatcatttacctttttgttggatttactccattgagtgttttcaccccagacgtaattcgtgtggttctgctgattagaagtttctatcaca

SEQ ID NO: 22376 - DNA, 687 bp, synthetic construct
  source 1..687: mol_type = other DNA
actctggtattacggtacctttgtacgcctattttacccccttccccttgtaacttagaagcaaagcaaaccagttcaatagtaagcaacacaacccagtgttgtgacgaacaagtacttctgtttccccgggagggtctgacggtaagctgtacccacggctgaagtatgacctaccgttaaccggctacctacttcgagaagtctagtaataccattgaagttttgttggcgttacgctcaacacactaccccgtgtgtagttttggctgatgagtcacggcattccccacgggcgaccgtggccgtggctgcgttgcggccaaccaaggggcgcaagctccttggacgtcacttaacagacatggtgtgaagaacctattgagctaggtagtagtcctccggcccctgaatgcggctaatcctaactccggagcacatcagtgcaacccagcatttggtgtgttgtaatacgcaagtctggagcggaaccgactactttgggtgtccgtgtttcctgttttaccttatttggctgcttatggtgacaatttgatattgttaccatatagctgttggattggccatccggatttttgaaagagacccaaaactttcttctctacttcagattcaagtgcgaagttttccttttcatatattacttactaatttgaagtaccaaag

SEQ ID NO: 22377 - DNA, 637 bp, synthetic construct
  source 1..637: mol_type = other DNA
taacttagaagcaaagcaaaccagttcaatagtaagcaacacaacccagtgttgtgacgaacaagtacttctgtttccccgggagggtctgacggtaagctgtacccacggctgaagtatgacctaccgttaaccggctacctacttcgagaagtctagtaataccattgaagttttgttggcgttacgctcaacacactaccccgtgtgtagttttggctgatgagtcacggcattccccacgggcgaccgtggccgtggctgcgttgcggccaaccaaggggcgcaagctccttggacgtcacttaacagacatggtgtgaagaacctattgagctaggtagtagtcctccggcccctgaatgcggctaatcctaactccggagcacatcagtgcaacccagcatttggtgtgttgtaatacgcaagtctggagcggaaccgactactttgggtgtccgtgtttcctgttttaccttatttggctgcttatggtgacaatttgatattgttaccatatagctgttggattggccatccggatttttgaaagagacccaaaactttcttctctacttcagattcaagtgcgaagttttccttttcatatattacttactaatttgaagtaccaaag

SEQ ID NO: 22378 - DNA, 587 bp, synthetic construct
  source 1..587: mol_type = other DNA
gttgtgacgaacaagtacttctgtttccccgggagggtctgacggtaagctgtacccacggctgaagtatgacctaccgttaaccggctacctacttcgagaagtctagtaataccattgaagttttgttggcgttacgctcaacacactaccccgtgtgtagttttggctgatgagtcacggcattccccacgggcgaccgtggccgtggctgcgttgcggccaaccaaggggcgcaagctccttggacgtcacttaacagacatggtgtgaagaacctattgagctaggtagtagtcctccggcccctgaatgcggctaatcctaactccggagcacatcagtgcaacccagcatttggtgtgttgtaatacgcaagtctggagcggaaccgactactttgggtgtccgtgtttcctgttttaccttatttggctgcttatggtgacaatttgatattgttaccatatagctgttggattggccatccggatttttgaaagagacccaaaactttcttctctacttcagattcaagtgcgaagttttccttttcatatattacttactaatttgaagtaccaaag

SEQ ID NO: 22379 - DNA, 537 bp, synthetic construct
  source 1..537: mol_type = other DNA
tgtacccacggctgaagtatgacctaccgttaaccggctacctacttcgagaagtctagtaataccattgaagttttgttggcgttacgctcaacacactaccccgtgtgtagttttggctgatgagtcacggcattccccacgggcgaccgtggccgtggctgcgttgcggccaaccaaggggcgcaagctccttggacgtcacttaacagacatggtgtgaagaacctattgagctaggtagtagtcctccggcccctgaatgcggctaatcctaactccggagcacatcagtgcaacccagcatttggtgtgttgtaatacgcaagtctggagcggaaccgactactttgggtgtccgtgtttcctgttttaccttatttggctgcttatggtgacaatttgatattgttaccatatagctgttggattggccatccggatttttgaaagagacccaaaactttcttctctacttcagattcaagtgcgaagttttccttttcatatattacttactaatttgaagtaccaaag

SEQ ID NO: 22380 - DNA, 687 bp, synthetic construct
  source 1..687: mol_type = other DNA
actctggtattacggtacctttgtacgcctattttatacccccttccccaagtaatttagaagcaagcacaaaccagttcagtagtaagcagtacaatccagtactgtaatgaacaagtacttctgttaccccggaagggtctatcggtaagctgtacccacggctgaagaatgacctaccgttaaccggctacctacttcgagaagcctagtaatgccgttgaagttttattgacgttacgctcagcacactaccccgtgtgtagttttggctgatgagtcacggcactccccacgggcgaccgtggccgtggctgcgttggcggccaaccaaggagtgcaagctccttggacgtcatattacagacatggtgtgaagagcctattgagctaggtggtagtcctccggcccctgaatgcggctaatcctaactccggagcatatcggtgcgaaccagcacttggtgtgttgtaatacgtaagtctggagcggaaccgactactttgggtgtccgtgtttcctgttttaacttttatggctgcttatggtgacaatttaacattgttaccatatagctgttgggttggccatccggattttgttataaaaccatttcctcgtgccttgacctttaacacatttgtgaacttctttaaatcccttttattagtccttaaatactaaga

SEQ ID NO: 22381 - DNA, 637 bp, synthetic construct
  source 1..637: mol_type = other DNA
agtaatttagaagcaagcacaaaccagttcagtagtaagcagtacaatccagtactgtaatgaacaagtacttctgttaccccggaagggtctatcggtaagctgtacccacggctgaagaatgacctaccgttaaccggctacctacttcgagaagcctagtaatgccgttgaagttttattgacgttacgctcagcacactaccccgtgtgtagttttggctgatgagtcacggcactccccacgggcgaccgtggccgtggctgcgttggcggccaaccaaggagtgcaagctccttggacgtcatattacagacatggtgtgaagagcctattgagctaggtggtagtcctccggcccctgaatgcggctaatcctaactccggagcatatcggtgcgaaccagcacttggtgtgttgtaatacgtaagtctggagcggaaccgactactttgggtgtccgtgtttcctgttttaacttttatggctgcttatggtgacaatttaacattgttaccatatagctgttgggttggccatccggattttgttataaaaccatttcctcgtgccttgacctttaacacatttgtgaacttctttaaatcccttttattagtccttaaatactaaga

SEQ ID NO: 22382 - DNA, 587 bp, synthetic construct
  source 1..587: mol_type = other DNA
agtactgtaatgaacaagtacttctgttaccccggaagggtctatcggtaagctgtacccacggctgaagaatgacctaccgttaaccggctacctacttcgagaagcctagtaatgccgttgaagttttattgacgttacgctcagcacactaccccgtgtgtagttttggctgatgagtcacggcactccccacgggcgaccgtggccgtggctgcgttggcggccaaccaaggagtgcaagctccttggacgtcatattacagacatggtgtgaagagcctattgagctaggtggtagtcctccggcccctgaatgcggctaatcctaactccggagcatatcggtgcgaaccagcacttggtgtgttgtaatacgtaagtctggagcggaaccgactactttgggtgtccgtgtttcctgttttaacttttatggctgcttatggtgacaatttaacattgttaccatatagctgttgggttggccatccggattttgttataaaaccatttcctcgtgccttgacctttaacacatttgtgaacttctttaaatcccttttattagtccttaaatactaaga

SEQ ID NO: 22383 - DNA, 537 bp, synthetic construct
  source 1..537: mol_type = other DNA
agctgtacccacggctgaagaatgacctaccgttaaccggctacctacttcgagaagcctagtaatgccgttgaagttttattgacgttacgctcagcacactaccccgtgtgtagttttggctgatgagtcacggcactccccacgggcgaccgtggccgtggctgcgttggcggccaaccaaggagtgcaagctccttggacgtcatattacagacatggtgtgaagagcctattgagctaggtggtagtcctccggcccctgaatgcggctaatcctaactccggagcatatcggtgcgaaccagcacttggtgtgttgtaatacgtaagtctggagcggaaccgactactttgggtgtccgtgtttcctgttttaacttttatggctgcttatggtgacaatttaacattgttaccatatagctgttgggttggccatccggattttgttataaaaccatttcctcgtgccttgacctttaacacatttgtgaacttctttaaatcccttttattagtccttaaatactaaga

SEQ ID NO: 22384 - DNA, 688 bp, synthetic construct
  source 1..688: mol_type = other DNA
gtactctggtatcacggtacccttgtacgcctgttttatactcccctccccgtaatttagaagttcaaaacttaagttcaatagaagggggtacaaaccagtaccaccacgaacaagcacttctgtttccccggtgaggttgcatagactgtacccacggttgaaggcgactgatccgttatccgctcttgtacttcgggaagcccagtatcatcttcggatcttcgatgcgttgcgctcagcactcaaccccagagtgtagcttaggctgatgagtctggacaatcctcactggtgacagtggtccaggctgcgttggcggcctacctgtggcccaaagccacaggacgctagatgtgaacaaggtgtgaagagcccactgagctacaagagagtcctccggcccctgaatgcggctaatcccaaccacggagcaggtagttgcaaaccagcagccggcctgtcgtaacgcgcaagtctgtggcggaaccgactactttgggtgaccgtgtttccttttatcttttcaatggctgcttatggtgacaatcattgattgttatcataaagcgacttggattggccatccggtgaaatttaagtgcgtcagctatccatttattggatttaccccactaaaaccacatacgcctggccttagtgttgttggtgagacgctaccatcaaa

SEQ ID NO: 22385 - DNA, 638 bp, synthetic construct
  source 1..638: mol_type = other DNA
cgtaatttagaagttcaaaacttaagttcaatagaagggggtacaaaccagtaccaccacgaacaagcacttctgtttccccggtgaggttgcatagactgtacccacggttgaaggcgactgatccgttatccgctcttgtacttcgggaagcccagtatcatcttcggatcttcgatgcgttgcgctcagcactcaaccccagagtgtagcttaggctgatgagtctggacaatcctcactggtgacagtggtccaggctgcgttggcggcctacctgtggcccaaagccacaggacgctagatgtgaacaaggtgtgaagagcccactgagctacaagagagtcctccggcccctgaatgcggctaatcccaaccacggagcaggtagttgcaaaccagcagccggcctgtcgtaacgcgcaagtctgtggcggaaccgactactttgggtgaccgtgtttccttttatcttttcaatggctgcttatggtgacaatcattgattgttatcataaagcgacttggattggccatccggtgaaatttaagtgcgtcagctatccatttattggatttaccccactaaaaccacatacgcctggccttagtgttgttggtgagacgctaccatcaaa

SEQ ID NO: 22386 - DNA, 588 bp, synthetic construct
  source 1..588: mol_type = other DNA
gtaccaccacgaacaagcacttctgtttccccggtgaggttgcatagactgtacccacggttgaaggcgactgatccgttatccgctcttgtacttcgggaagcccagtatcatcttcggatcttcgatgcgttgcgctcagcactcaaccccagagtgtagcttaggctgatgagtctggacaatcctcactggtgacagtggtccaggctgcgttggcggcctacctgtggcccaaagccacaggacgctagatgtgaacaaggtgtgaagagcccactgagctacaagagagtcctccggcccctgaatgcggctaatcccaaccacggagcaggtagttgcaaaccagcagccggcctgtcgtaacgcgcaagtctgtggcggaaccgactactttgggtgaccgtgtttccttttatcttttcaatggctgcttatggtgacaatcattgattgttatcataaagcgacttggattggccatccggtgaaatttaagtgcgtcagctatccatttattggatttaccccactaaaaccacatacgcctggccttagtgttgttggtgagacgctaccatcaaa

SEQ ID NO: 22387 - DNA, 538 bp, synthetic construct
  source 1..538: mol_type = other DNA
gtacccacggttgaaggcgactgatccgttatccgctcttgtacttcgggaagcccagtatcatcttcggatcttcgatgcgttgcgctcagcactcaaccccagagtgtagcttaggctgatgagtctggacaatcctcactggtgacagtggtccaggctgcgttggcggcctacctgtggcccaaagccacaggacgctagatgtgaacaaggtgtgaagagcccactgagctacaagagagtcctccggcccctgaatgcggctaatcccaaccacggagcaggtagttgcaaaccagcagccggcctgtcgtaacgcgcaagtctgtggcggaaccgactactttgggtgaccgtgtttccttttatcttttcaatggctgcttatggtgacaatcattgattgttatcataaagcgacttggattggccatccggtgaaatttaagtgcgtcagctatccatttattggatttaccccactaaaaccacatacgcctggccttagtgttgttggtgagacgctaccatcaaa

SEQ ID NO: 22388 - DNA, 688 bp, synthetic construct
  source 1..688: mol_type = other DNA
ggtattccggtacctttgtgcgcctgttttatccaccccgtcccccactgtaacttagaagatatgcaaccctgatcaacagcaggtgtgacactccagtcacatcacgatcaagcacttctgttgccccggaccgagtatcaataagccactcgcgtggctgaaggagaaaacgttcgttatccgaccaactacttcgagaaacctagtaccaccctggaagttgcgtagcgtttcgctccacacaaccccagtgtagatcgggtcgatgagtcaccgcgttcctcacgggcgaccgtggcggtggctgcgttggcggcctgcccatggggcaacccatgggacgcttcaatactgacatggtgcgaagagtctattgagctagttggtggtcctccggcccctgaatgcggctaatcctaactgcggagcagatacccacatgccagtgggcgatctgtcgtaatgggtaactctgcagcggaaccgactactttgggtgtccgtgtttccttttattcttatattggctgcttatggtgacaattgagaagttgttaccatatagctattggattggccatccggtgacaaatagagcgattgtttatttgtttgttggatttataccactgaacttcaaggttttaaacaccctcaattttgtactagttcttaatacatcaaa

SEQ ID NO: 22389 - DNA, 638 bp, synthetic construct
  source 1..638: mol_type = other DNA
taacttagaagatatgcaaccctgatcaacagcaggtgtgacactccagtcacatcacgatcaagcacttctgttgccccggaccgagtatcaataagccactcgcgtggctgaaggagaaaacgttcgttatccgaccaactacttcgagaaacctagtaccaccctggaagttgcgtagcgtttcgctccacacaaccccagtgtagatcgggtcgatgagtcaccgcgttcctcacgggcgaccgtggcggtggctgcgttggcggcctgcccatggggcaacccatgggacgcttcaatactgacatggtgcgaagagtctattgagctagttggtggtcctccggcccctgaatgcggctaatcctaactgcggagcagatacccacatgccagtgggcgatctgtcgtaatgggtaactctgcagcggaaccgactactttgggtgtccgtgtttccttttattcttatattggctgcttatggtgacaattgagaagttgttaccatatagctattggattggccatccggtgacaaatagagcgattgtttatttgtttgttggatttataccactgaacttcaaggttttaaacaccctcaattttgtactagttcttaatacatcaaa

SEQ ID NO: 22390 - DNA, 588 bp, synthetic construct
  source 1..588: mol_type = other DNA
cacatcacgatcaagcacttctgttgccccggaccgagtatcaataagccactcgcgtggctgaaggagaaaacgttcgttatccgaccaactacttcgagaaacctagtaccaccctggaagttgcgtagcgtttcgctccacacaaccccagtgtagatcgggtcgatgagtcaccgcgttcctcacgggcgaccgtggcggtggctgcgttggcggcctgcccatggggcaacccatgggacgcttcaatactgacatggtgcgaagagtctattgagctagttggtggtcctccggcccctgaatgcggctaatcctaactgcggagcagatacccacatgccagtgggcgatctgtcgtaatgggtaactctgcagcggaaccgactactttgggtgtccgtgtttccttttattcttatattggctgcttatggtgacaattgagaagttgttaccatatagctattggattggccatccggtgacaaatagagcgattgtttatttgtttgttggatttataccactgaacttcaaggttttaaacaccctcaattttgtactagttcttaatacatcaaa

SEQ ID NO: 22391 - DNA, 538 bp, synthetic construct
  source 1..538: mol_type = other DNA
actcgcgtggctgaaggagaaaacgttcgttatccgaccaactacttcgagaaacctagtaccaccctggaagttgcgtagcgtttcgctccacacaaccccagtgtagatcgggtcgatgagtcaccgcgttcctcacgggcgaccgtggcggtggctgcgttggcggcctgcccatggggcaacccatgggacgcttcaatactgacatggtgcgaagagtctattgagctagttggtggtcctccggcccctgaatgcggctaatcctaactgcggagcagatacccacatgccagtgggcgatctgtcgtaatgggtaactctgcagcggaaccgactactttgggtgtccgtgtttccttttattcttatattggctgcttatggtgacaattgagaagttgttaccatatagctattggattggccatccggtgacaaatagagcgattgtttatttgtttgttggatttataccactgaacttcaaggttttaaacaccctcaattttgtactagttcttaatacatcaaa

SEQ ID NO: 22392 - DNA, 689 bp, synthetic construct
  source 1..689: mol_type = other DNA
ctggtgtcacggtacctttgtacgcctgttttataccccctcccccgtaacttagaagctataaaccaagttcaatagaagggggtacaagccagtaccaccacgaacaagtacttctgttaccccggtgacgttgtatagactgctcgcgcggtcgaaagcgacagatccgttacccgcttgtgtacttcgagaagtctagtaccaccttggaatcttcgatgcgttgcgctcagcactttaccccagagtgtagcttaggctgatgagtctgggcgctccccatcggcgacgatggcccaggctgcgttggcggcctacctatggctaacgccataggacgctagtagtgaacaaggtgtgaagaacctattgagctacacaagagtcctccggcccctgaatgcggctaatcctaaccatggagcaagtgatcacaatccagtgatattcttgtcgtaacgcgcaagtccgtggcggaaccgactactttgggtgtccgtgtttccctttatttttattatggctgcttatggtgacaatcattgattgttatcatagagcgaattggattggccatccggtgaaagtgaaactcattatctacttatttgttggattcactccatcaaacacattcacttatagtatcatcttgacagtgattagaattagacagtcgtatcaca

SEQ ID NO: 22393 - DNA, 639 bp, synthetic construct
  source 1..639: mol_type = other DNA
cttagaagctataaaccaagttcaatagaagggggtacaagccagtaccaccacgaacaagtacttctgttaccccggtgacgttgtatagactgctcgcgcggtcgaaagcgacagatccgttacccgcttgtgtacttcgagaagtctagtaccaccttggaatcttcgatgcgttgcgctcagcactttaccccagagtgtagcttaggctgatgagtctgggcgctccccatcggcgacgatggcccaggctgcgttggcggcctacctatggctaacgccataggacgctagtagtgaacaaggtgtgaagaacctattgagctacacaagagtcctccggcccctgaatgcggctaatcctaaccatggagcaagtgatcacaatccagtgatattcttgtcgtaacgcgcaagtccgtggcggaaccgactactttgggtgtccgtgtttccctttatttttattatggctgcttatggtgacaatcattgattgttatcatagagcgaattggattggccatccggtgaaagtgaaactcattatctacttatttgttggattcactccatcaaacacattcacttatagtatcatcttgacagtgattagaattagacagtcgtatcaca

SEQ ID NO: 22394 - DNA, 589 bp, synthetic construct
  source 1..589: mol_type = other DNA
ccacgaacaagtacttctgttaccccggtgacgttgtatagactgctcgcgcggtcgaaagcgacagatccgttacccgcttgtgtacttcgagaagtctagtaccaccttggaatcttcgatgcgttgcgctcagcactttaccccagagtgtagcttaggctgatgagtctgggcgctccccatcggcgacgatggcccaggctgcgttggcggcctacctatggctaacgccataggacgctagtagtgaacaaggtgtgaagaacctattgagctacacaagagtcctccggcccctgaatgcggctaatcctaaccatggagcaagtgatcacaatccagtgatattcttgtcgtaacgcgcaagtccgtggcggaaccgactactttgggtgtccgtgtttccctttatttttattatggctgcttatggtgacaatcattgattgttatcatagagcgaattggattggccatccggtgaaagtgaaactcattatctacttatttgttggattcactccatcaaacacattcacttatagtatcatcttgacagtgattagaattagacagtcgtatcaca

SEQ ID NO: 22395 - DNA, 539 bp, synthetic construct
  source 1..539: mol_type = other DNA
gcggtcgaaagcgacagatccgttacccgcttgtgtacttcgagaagtctagtaccaccttggaatcttcgatgcgttgcgctcagcactttaccccagagtgtagcttaggctgatgagtctgggcgctccccatcggcgacgatggcccaggctgcgttggcggcctacctatggctaacgccataggacgctagtagtgaacaaggtgtgaagaacctattgagctacacaagagtcctccggcccctgaatgcggctaatcctaaccatggagcaagtgatcacaatccagtgatattcttgtcgtaacgcgcaagtccgtggcggaaccgactactttgggtgtccgtgtttccctttatttttattatggctgcttatggtgacaatcattgattgttatcatagagcgaattggattggccatccggtgaaagtgaaactcattatctacttatttgttggattcactccatcaaacacattcacttatagtatcatcttgacagtgattagaattagacagtcgtatcaca

SEQ ID NO: 22396 - DNA, 689 bp, synthetic construct
  source 1..689: mol_type = other DNA
cacactggtattccggtacctttgtgcgcctgttttatacatcctacccccgtaacttagaagcaagatcacccgatcaccaggaaatgtggcaaaccagtcacattctgatcaagcacttctgtttccccggactgagtatcaataggctgttcacacggctgaaggagaaaacgttcgttacccggccaactacttcgaaaaacctagtatcaccgtgaacgttgcagagtgtttcgctcagcactttccccgtgtagatcaggtcgatgagtcaccgcattccccacgggcgaccgtggcggtggctgcgttggcggcctgcctgcggggcaacccgtaggacgctctaatacagacacggtgtgaagagtctattgagctagttggtagtcctccggcccctgaatgcggctaatcctaactgcggagcgagcgcttgtaatccaacaggtagctcgtcgtaacgggtaactctgcagcggaaccgactactttgggtgaccgtgtttccttttatttcattactggctgcttatggtgacaatcacagagttgttaccatatagctattggattggccatccggtgtcaaatagagcaattgtgtttctttttgttgggtttgtaccacttgacttgaccagctacaacactctgtgctacattgttagattgaacacagcaaa

SEQ ID NO: 22397 - DNA, 639 bp, synthetic construct
  source 1..639: mol_type = other DNA
cgtaacttagaagcaagatcacccgatcaccaggaaatgtggcaaaccagtcacattctgatcaagcacttctgtttccccggactgagtatcaataggctgttcacacggctgaaggagaaaacgttcgttacccggccaactacttcgaaaaacctagtatcaccgtgaacgttgcagagtgtttcgctcagcactttccccgtgtagatcaggtcgatgagtcaccgcattccccacgggcgaccgtggcggtggctgcgttggcggcctgcctgcggggcaacccgtaggacgctctaatacagacacggtgtgaagagtctattgagctagttggtagtcctccggcccctgaatgcggctaatcctaactgcggagcgagcgcttgtaatccaacaggtagctcgtcgtaacgggtaactctgcagcggaaccgactactttgggtgaccgtgtttccttttatttcattactggctgcttatggtgacaatcacagagttgttaccatatagctattggattggccatccggtgtcaaatagagcaattgtgtttctttttgttgggtttgtaccacttgacttgaccagctacaacactctgtgctacattgttagattgaacacagcaaa

SEQ ID NO: 22398 - DNA, 589 bp, synthetic construct
  source 1..589: mol_type = other DNA
tcacattctgatcaagcacttctgtttccccggactgagtatcaataggctgttcacacggctgaaggagaaaacgttcgttacccggccaactacttcgaaaaacctagtatcaccgtgaacgttgcagagtgtttcgctcagcactttccccgtgtagatcaggtcgatgagtcaccgcattccccacgggcgaccgtggcggtggctgcgttggcggcctgcctgcggggcaacccgtaggacgctctaatacagacacggtgtgaagagtctattgagctagttggtagtcctccggcccctgaatgcggctaatcctaactgcggagcgagcgcttgtaatccaacaggtagctcgtcgtaacgggtaactctgcagcggaaccgactactttgggtgaccgtgtttccttttatttcattactggctgcttatggtgacaatcacagagttgttaccatatagctattggattggccatccggtgtcaaatagagcaattgtgtttctttttgttgggtttgtaccacttgacttgaccagctacaacactctgtgctacattgttagattgaacacagcaaa

SEQ ID NO: 22399 - DNA, 539 bp, synthetic construct
  source 1..539: mol_type = other DNA
tgttcacacggctgaaggagaaaacgttcgttacccggccaactacttcgaaaaacctagtatcaccgtgaacgttgcagagtgtttcgctcagcactttccccgtgtagatcaggtcgatgagtcaccgcattccccacgggcgaccgtggcggtggctgcgttggcggcctgcctgcggggcaacccgtaggacgctctaatacagacacggtgtgaagagtctattgagctagttggtagtcctccggcccctgaatgcggctaatcctaactgcggagcgagcgcttgtaatccaacaggtagctcgtcgtaacgggtaactctgcagcggaaccgactactttgggtgaccgtgtttccttttatttcattactggctgcttatggtgacaatcacagagttgttaccatatagctattggattggccatccggtgtcaaatagagcaattgtgtttctttttgttgggtttgtaccacttgacttgaccagctacaacactctgtgctacattgttagattgaacacagcaaa

SEQ ID NO: 22400 - DNA, 690 bp, synthetic construct
  source 1..690: mol_type = other DNA
cactctggtacctcggtacctttgtgcgcctgttttatatcccccccccattgaaacttagaagcaatgcacttcgatcaatagcgggcgcggcgcaccagccacgtcatgatcaagcacttctgtttccccggaccgagtatcaatagactgctaacgcggttgagggagaaaacgtccgttacccggccaactgcttcgagaaatccagtaacatcatgaaaattgcagagtgtttcgctcagcacttccccagtgtagatcaggtcgatgagtcaccgcgttcctcacgggcgaccgtggcggtggctgcgttggcggcctgcctgtggggcaacccgcaggacgctctaatatggacatggtgtgaagaatctattgagccagttggtagtcctccggcccctgaatgcggctaatcctaactgcggagcacgcgccctcaatccagtgggtagcgtgtcgtaatgggtaactctgcagcggaaccgactactttgggtgtccgtgtttccttttattcttacattggctgcttatggtgacaattgagagattgttaccatatagctattggattggccatccggtatcgaatagagcggttatctatcaatttattggatttactccgttgagtgtgcagcagtatcgcactttgcttttaatagtgagactgaatagtgcaaa

SEQ ID NO: 22401 - DNA, 640 bp, synthetic construct
  source 1..640: mol_type = other DNA
ttgaaacttagaagcaatgcacttcgatcaatagcgggcgcggcgcaccagccacgtcatgatcaagcacttctgtttccccggaccgagtatcaatagactgctaacgcggttgagggagaaaacgtccgttacccggccaactgcttcgagaaatccagtaacatcatgaaaattgcagagtgtttcgctcagcacttccccagtgtagatcaggtcgatgagtcaccgcgttcctcacgggcgaccgtggcggtggctgcgttggcggcctgcctgtggggcaacccgcaggacgctctaatatggacatggtgtgaagaatctattgagccagttggtagtcctccggcccctgaatgcggctaatcctaactgcggagcacgcgccctcaatccagtgggtagcgtgtcgtaatgggtaactctgcagcggaaccgactactttgggtgtccgtgtttccttttattcttacattggctgcttatggtgacaattgagagattgttaccatatagctattggattggccatccggtatcgaatagagcggttatctatcaatttattggatttactccgttgagtgtgcagcagtatcgcactttgcttttaatagtgagactgaatagtgcaaa

SEQ ID NO: 22402 - DNA, 590 bp, synthetic construct
  source 1..590: mol_type = other DNA
gccacgtcatgatcaagcacttctgtttccccggaccgagtatcaatagactgctaacgcggttgagggagaaaacgtccgttacccggccaactgcttcgagaaatccagtaacatcatgaaaattgcagagtgtttcgctcagcacttccccagtgtagatcaggtcgatgagtcaccgcgttcctcacgggcgaccgtggcggtggctgcgttggcggcctgcctgtggggcaacccgcaggacgctctaatatggacatggtgtgaagaatctattgagccagttggtagtcctccggcccctgaatgcggctaatcctaactgcggagcacgcgccctcaatccagtgggtagcgtgtcgtaatgggtaactctgcagcggaaccgactactttgggtgtccgtgtttccttttattcttacattggctgcttatggtgacaattgagagattgttaccatatagctattggattggccatccggtatcgaatagagcggttatctatcaatttattggatttactccgttgagtgtgcagcagtatcgcactttgcttttaatagtgagactgaatagtgcaaa

SEQ ID NO: 22403 - DNA, 540 bp, synthetic construct
  source 1..540: mol_type = other DNA
ctgctaacgcggttgagggagaaaacgtccgttacccggccaactgcttcgagaaatccagtaacatcatgaaaattgcagagtgtttcgctcagcacttccccagtgtagatcaggtcgatgagtcaccgcgttcctcacgggcgaccgtggcggtggctgcgttggcggcctgcctgtggggcaacccgcaggacgctctaatatggacatggtgtgaagaatctattgagccagttggtagtcctccggcccctgaatgcggctaatcctaactgcggagcacgcgccctcaatccagtgggtagcgtgtcgtaatgggtaactctgcagcggaaccgactactttgggtgtccgtgtttccttttattcttacattggctgcttatggtgacaattgagagattgttaccatatagctattggattggccatccggtatcgaatagagcggttatctatcaatttattggatttactccgttgagtgtgcagcagtatcgcactttgcttttaatagtgagactgaatagtgcaaa

SEQ ID NO: 22404 - DNA, 690 bp, synthetic construct
  source 1..690: mol_type = other DNA
catggaatctttgtgcgcctgttttataacccttccccaatttgcaacttagaagtaatacacactacagatcaatagtaggcatggcgcgccagtcatgtctcgatcaagcacttctgtttccccggactgagtatcaatagactgcccacgcggttgaaggagaaaacgtccgttacccggctaactacttcgagaaacctagtagcaccaaataagctgcagagcgtttcgctcagcacctcccccgtgtagatcaggctgatgagtcactgcaatccccacgggcgaccgtggcagtggctgcgctggcggcctgcctatggggcaacccataggacgctctaatgtggacatggtgcgaagagtctattgagctagttagtagtcctccggcccctgaatgcggctaatcctaactgcggagcacataccttcaatccaggaggtggtgtgtcgtaacgggtaactctgcagcggaaccgactactttgggtgtccgtgtttccttttatccttatattggctgcttatggtgacaatcacggaattgttgccatatagctattggattggccatccggtgtctaatagagctattgtatacctatttgttggatttaccaagttaaatatcaccaactacaccacccttctttatattatattactgaatattagaaagagaaa

SEQ ID NO: 22405 - DNA, 640 bp, synthetic construct
  source 1..640: mol_type = other DNA
agaagtaatacacactacagatcaatagtaggcatggcgcgccagtcatgtctcgatcaagcacttctgtttccccggactgagtatcaatagactgcccacgcggttgaaggagaaaacgtccgttacccggctaactacttcgagaaacctagtagcaccaaataagctgcagagcgtttcgctcagcacctcccccgtgtagatcaggctgatgagtcactgcaatccccacgggcgaccgtggcagtggctgcgctggcggcctgcctatggggcaacccataggacgctctaatgtggacatggtgcgaagagtctattgagctagttagtagtcctccggcccctgaatgcggctaatcctaactgcggagcacataccttcaatccaggaggtggtgtgtcgtaacgggtaactctgcagcggaaccgactactttgggtgtccgtgtttccttttatccttatattggctgcttatggtgacaatcacggaattgttgccatatagctattggattggccatccggtgtctaatagagctattgtatacctatttgttggatttaccaagttaaatatcaccaactacaccacccttctttatattatattactgaatattagaaagagaaa

SEQ ID NO: 22406 - DNA, 590 bp, synthetic construct
  source 1..590: mol_type = other DNA
tctcgatcaagcacttctgtttccccggactgagtatcaatagactgcccacgcggttgaaggagaaaacgtccgttacccggctaactacttcgagaaacctagtagcaccaaataagctgcagagcgtttcgctcagcacctcccccgtgtagatcaggctgatgagtcactgcaatccccacgggcgaccgtggcagtggctgcgctggcggcctgcctatggggcaacccataggacgctctaatgtggacatggtgcgaagagtctattgagctagttagtagtcctccggcccctgaatgcggctaatcctaactgcggagcacataccttcaatccaggaggtggtgtgtcgtaacgggtaactctgcagcggaaccgactactttgggtgtccgtgtttccttttatccttatattggctgcttatggtgacaatcacggaattgttgccatatagctattggattggccatccggtgtctaatagagctattgtatacctatttgttggatttaccaagttaaatatcaccaactacaccacccttctttatattatattactgaatattagaaagagaaa

SEQ ID NO: 22407 - DNA, 540 bp, synthetic construct
  source 1..540: mol_type = other DNA
acgcggttgaaggagaaaacgtccgttacccggctaactacttcgagaaacctagtagcaccaaataagctgcagagcgtttcgctcagcacctcccccgtgtagatcaggctgatgagtcactgcaatccccacgggcgaccgtggcagtggctgcgctggcggcctgcctatggggcaacccataggacgctctaatgtggacatggtgcgaagagtctattgagctagttagtagtcctccggcccctgaatgcggctaatcctaactgcggagcacataccttcaatccaggaggtggtgtgtcgtaacgggtaactctgcagcggaaccgactactttgggtgtccgtgtttccttttatccttatattggctgcttatggtgacaatcacggaattgttgccatatagctattggattggccatccggtgtctaatagagctattgtatacctatttgttggatttaccaagttaaatatcaccaactacaccacccttctttatattatattactgaatattagaaagagaaa

SEQ ID NO: 22408 - DNA, 690 bp, synthetic construct
  source 1..690: mol_type = other DNA
cactctggtattacggtacctttgtgcgcctgttttacatcccttcccaatcgtaatttagaagccaaacactacgatcaatagtgggcgtggcacgccagccatgtctcgatcaagcactcctgtttccccgggccgagtatcaatagactgctcacgtggttgaaggagaaaacgctcgttatccggctaactacttcgagaaacctagtaacaccatggaagttgcagagtgtttcgttcagcacttccccagtgtagatcaggccgatgagtcaccgcgttccccacgggtgaccgtggcggtggctgcgttggcggcctgcccatggggtaacccatgggacgctctaatatggacatggtgtgaagagtctattgagctagttggtagtcctccggcccctgaatgcggctaatcctaactgcggagcatgtacctccaatccaggaggtggcgtgtcgtaatgggcaactctgcagcggaaccgactactttgggagtccgtgtttccttttattcttacactggctgcttatggtgacaattgagagattgttaccatatagctattggattggccatccggtgactaacagagcagttatctaccagttcgttggtttcattccattgtgtactcgcgaatacaacactcttcttttaatactagatttaaacaaagcaaa

SEQ ID NO: 22409 - DNA, 640 bp, synthetic construct
  source 1..640: mol_type = other DNA
tcgtaatttagaagccaaacactacgatcaatagtgggcgtggcacgccagccatgtctcgatcaagcactcctgtttccccgggccgagtatcaatagactgctcacgtggttgaaggagaaaacgctcgttatccggctaactacttcgagaaacctagtaacaccatggaagttgcagagtgtttcgttcagcacttccccagtgtagatcaggccgatgagtcaccgcgttccccacgggtgaccgtggcggtggctgcgttggcggcctgcccatggggtaacccatgggacgctctaatatggacatggtgtgaagagtctattgagctagttggtagtcctccggcccctgaatgcggctaatcctaactgcggagcatgtacctccaatccaggaggtggcgtgtcgtaatgggcaactctgcagcggaaccgactactttgggagtccgtgtttccttttattcttacactggctgcttatggtgacaattgagagattgttaccatatagctattggattggccatccggtgactaacagagcagttatctaccagttcgttggtttcattccattgtgtactcgcgaatacaacactcttcttttaatactagatttaaacaaagcaaa

SEQ ID NO: 22410 - DNA, 590 bp, synthetic construct
  source 1..590: mol_type = other DNA
gccatgtctcgatcaagcactcctgtttccccgggccgagtatcaatagactgctcacgtggttgaaggagaaaacgctcgttatccggctaactacttcgagaaacctagtaacaccatggaagttgcagagtgtttcgttcagcacttccccagtgtagatcaggccgatgagtcaccgcgttccccacgggtgaccgtggcggtggctgcgttggcggcctgcccatggggtaacccatgggacgctctaatatggacatggtgtgaagagtctattgagctagttggtagtcctccggcccctgaatgcggctaatcctaactgcggagcatgtacctccaatccaggaggtggcgtgtcgtaatgggcaactctgcagcggaaccgactactttgggagtccgtgtttccttttattcttacactggctgcttatggtgacaattgagagattgttaccatatagctattggattggccatccggtgactaacagagcagttatctaccagttcgttggtttcattccattgtgtactcgcgaatacaacactcttcttttaatactagatttaaacaaagcaaa

SEQ ID NO: 22411 - DNA, 540 bp, synthetic construct
  source 1..540: mol_type = other DNA
ctgctcacgtggttgaaggagaaaacgctcgttatccggctaactacttcgagaaacctagtaacaccatggaagttgcagagtgtttcgttcagcacttccccagtgtagatcaggccgatgagtcaccgcgttccccacgggtgaccgtggcggtggctgcgttggcggcctgcccatggggtaacccatgggacgctctaatatggacatggtgtgaagagtctattgagctagttggtagtcctccggcccctgaatgcggctaatcctaactgcggagcatgtacctccaatccaggaggtggcgtgtcgtaatgggcaactctgcagcggaaccgactactttgggagtccgtgtttccttttattcttacactggctgcttatggtgacaattgagagattgttaccatatagctattggattggccatccggtgactaacagagcagttatctaccagttcgttggtttcattccattgtgtactcgcgaatacaacactcttcttttaatactagatttaaacaaagcaaa

SEQ ID NO: 22412 - DNA, 691 bp, synthetic construct
  source 1..691: mol_type = other DNA
taatcctacgggattcttgtgcgcctgttttataaccccttccccgatttgtaacttagaagcaatttacattagcgatcaatagacgacatggcacgccagccatgtcttgatcaagcacttctgtttccccgggctgagtatcaatagactgcttacgcggttgaaggagaaaacgctcgttacccggctaactacttcgagaaacctagtagcatcatgaaaactgcagagcgtttcgttcagcactccccccgtgtagatcaggtcgatgagtcactgcaatccccacgggtgaccgtggcagtggctgcgttggcggcctgcctatggggcaacccataggacgctctaatgtggacatggtgcgaagagtctattgagctagttagtagtcctccggcccctgaatgcggctaatcctaactgcggagcgcatactcccaacccagggggtggtgcgtcgtaatgggcaactctgcagcggaaccgactactttgggtgtccgtgtttccttttatccttttattggctgcttatggtgacaattagagaattgttaccatatagctattggattggccatccggtgagcaacagagcaattgtgtatctttttgttggatacgtccccttgacacttagaacctacaacacgctacactatattctaatcttgaactcgagacg

SEQ ID NO: 22413 - DNA, 641 bp, synthetic construct
  source 1..641: mol_type = other DNA
gtaacttagaagcaatttacattagcgatcaatagacgacatggcacgccagccatgtcttgatcaagcacttctgtttccccgggctgagtatcaatagactgcttacgcggttgaaggagaaaacgctcgttacccggctaactacttcgagaaacctagtagcatcatgaaaactgcagagcgtttcgttcagcactccccccgtgtagatcaggtcgatgagtcactgcaatccccacgggtgaccgtggcagtggctgcgttggcggcctgcctatggggcaacccataggacgctctaatgtggacatggtgcgaagagtctattgagctagttagtagtcctccggcccctgaatgcggctaatcctaactgcggagcgcatactcccaacccagggggtggtgcgtcgtaatgggcaactctgcagcggaaccgactactttgggtgtccgtgtttccttttatccttttattggctgcttatggtgacaattagagaattgttaccatatagctattggattggccatccggtgagcaacagagcaattgtgtatctttttgttggatacgtccccttgacacttagaacctacaacacgctacactatattctaatcttgaactcgagacg

SEQ ID NO: 22414 - DNA, 591 bp, synthetic construct
  source 1..591: mol_type = other DNA
agccatgtcttgatcaagcacttctgtttccccgggctgagtatcaatagactgcttacgcggttgaaggagaaaacgctcgttacccggctaactacttcgagaaacctagtagcatcatgaaaactgcagagcgtttcgttcagcactccccccgtgtagatcaggtcgatgagtcactgcaatccccacgggtgaccgtggcagtggctgcgttggcggcctgcctatggggcaacccataggacgctctaatgtggacatggtgcgaagagtctattgagctagttagtagtcctccggcccctgaatgcggctaatcctaactgcggagcgcatactcccaacccagggggtggtgcgtcgtaatgggcaactctgcagcggaaccgactactttgggtgtccgtgtttccttttatccttttattggctgcttatggtgacaattagagaattgttaccatatagctattggattggccatccggtgagcaacagagcaattgtgtatctttttgttggatacgtccccttgacacttagaacctacaacacgctacactatattctaatcttgaactcgagacg

SEQ ID NO: 22415 - DNA, 541 bp, synthetic construct
  source 1..541: mol_type = other DNA
actgcttacgcggttgaaggagaaaacgctcgttacccggctaactacttcgagaaacctagtagcatcatgaaaactgcagagcgtttcgttcagcactccccccgtgtagatcaggtcgatgagtcactgcaatccccacgggtgaccgtggcagtggctgcgttggcggcctgcctatggggcaacccataggacgctctaatgtggacatggtgcgaagagtctattgagctagttagtagtcctccggcccctgaatgcggctaatcctaactgcggagcgcatactcccaacccagggggtggtgcgtcgtaatgggcaactctgcagcggaaccgactactttgggtgtccgtgtttccttttatccttttattggctgcttatggtgacaattagagaattgttaccatatagctattggattggccatccggtgagcaacagagcaattgtgtatctttttgttggatacgtccccttgacacttagaacctacaacacgctacactatattctaatcttgaactcgagacg

SEQ ID NO: 22416 - DNA, 691 bp, synthetic construct
  source 1..691: mol_type = other DNA
cactctggtatcgcggtacctttgtgcgcctgttttatgacccctccccaaccgaaacttagaagttacacataccgatcaatagtgggcatagcacgccagctgtgtcttgatcaagcacttctgtttccccggaccgagtatcaatagactgctcacgcggttgaaggagaaagcgttcgttatccggctaactacttcgagaaacctagtaacaccatgaaagttgcggagtgtttcgctcagcacttccccagtgtagatcaggtcgatgagtcaccgcgttccccacgggcgaccgtggcggtggctgcgctggcggcctgcctatgggatgacccataggacgcttcaacacagacatggtgtgaagagtctattgagctagttagtagtcctccggcccctgaatgcggctaatcctaactgcggagcacgtgccctcaagccagagggtggcgtgtcgtaacgggcaactctgcagcggaaccgactactttgggagtccgtgtttccttttattcttacactggctgcttatggtgacaattgagagattgttaccatatagctattggattggccatccggtgagcaacagagcgattgtatactcttttgtgggttttgtgccattaaatcttactgtgattaccacactgaaactcatcttgcagtttaatacagcaaa

SEQ ID NO: 22417 - DNA, 641 bp, synthetic construct
  source 1..641: mol_type = other DNA
accgaaacttagaagttacacataccgatcaatagtgggcatagcacgccagctgtgtcttgatcaagcacttctgtttccccggaccgagtatcaatagactgctcacgcggttgaaggagaaagcgttcgttatccggctaactacttcgagaaacctagtaacaccatgaaagttgcggagtgtttcgctcagcacttccccagtgtagatcaggtcgatgagtcaccgcgttccccacgggcgaccgtggcggtggctgcgctggcggcctgcctatgggatgacccataggacgcttcaacacagacatggtgtgaagagtctattgagctagttagtagtcctccggcccctgaatgcggctaatcctaactgcggagcacgtgccctcaagccagagggtggcgtgtcgtaacgggcaactctgcagcggaaccgactactttgggagtccgtgtttccttttattcttacactggctgcttatggtgacaattgagagattgttaccatatagctattggattggccatccggtgagcaacagagcgattgtatactcttttgtgggttttgtgccattaaatcttactgtgattaccacactgaaactcatcttgcagtttaatacagcaaa

SEQ ID NO: 22418 - DNA, 591 bp, synthetic construct
  source 1..591: mol_type = other DNA
agctgtgtcttgatcaagcacttctgtttccccggaccgagtatcaatagactgctcacgcggttgaaggagaaagcgttcgttatccggctaactacttcgagaaacctagtaacaccatgaaagttgcggagtgtttcgctcagcacttccccagtgtagatcaggtcgatgagtcaccgcgttccccacgggcgaccgtggcggtggctgcgctggcggcctgcctatgggatgacccataggacgcttcaacacagacatggtgtgaagagtctattgagctagttagtagtcctccggcccctgaatgcggctaatcctaactgcggagcacgtgccctcaagccagagggtggcgtgtcgtaacgggcaactctgcagcggaaccgactactttgggagtccgtgtttccttttattcttacactggctgcttatggtgacaattgagagattgttaccatatagctattggattggccatccggtgagcaacagagcgattgtatactcttttgtgggttttgtgccattaaatcttactgtgattaccacactgaaactcatcttgcagtttaatacagcaaa

SEQ ID NO: 22419 - DNA, 541 bp, synthetic construct
  source 1..541: mol_type = other DNA
actgctcacgcggttgaaggagaaagcgttcgttatccggctaactacttcgagaaacctagtaacaccatgaaagttgcggagtgtttcgctcagcacttccccagtgtagatcaggtcgatgagtcaccgcgttccccacgggcgaccgtggcggtggctgcgctggcggcctgcctatgggatgacccataggacgcttcaacacagacatggtgtgaagagtctattgagctagttagtagtcctccggcccctgaatgcggctaatcctaactgcggagcacgtgccctcaagccagagggtggcgtgtcgtaacgggcaactctgcagcggaaccgactactttgggagtccgtgtttccttttattcttacactggctgcttatggtgacaattgagagattgttaccatatagctattggattggccatccggtgagcaacagagcgattgtatactcttttgtgggttttgtgccattaaatcttactgtgattaccacactgaaactcatcttgcagtttaatacagcaaa

SEQ ID NO: 22420 - DNA, 691 bp, synthetic construct
  source 1..691: mol_type = other DNA
cactccgattctgcggaatctttgtgcgcctgttttataaccctcccccaacttgcaacttagaagttatgtacgttgatcaatagcaggcgtggcacaccagccatgtcttgatcaagcacttctgtaaccccggactgagtatcaatagactgctcacgtggtcgaaagagaaaatgttcgttatccggctaactacttcgagaaacctagtagcaccactgaaactgcggagtgtttcgctcagcacttcccccgtgtagatcaggtcgatgagtcactgcttaccccacgggtgaccgtggcagtggctgcgttggcggcctgcctatggggcaacccataggacgctctaaagtggacatggtgtgaagagtctattgagctagttagtagtcctccggcccctgaatgcggctaatcctaactgcggagcgcatgcccccaaaccagagggtggtgcgtcgtaacgggtaactctgcagcggaaccgactactttgggtgtccgtgtttcttttattctcataatggctgcttatggtgacaattgaggaattgttaccatatagctattggattggccatccggtgtgcaacagagctattatctacttgtttgttggatacattccattgacacctaaatccttcaatacattgcactatattctaacgttgaacgcaagaaa

SEQ ID NO: 22421 - DNA, 641 bp, synthetic construct
  source 1..641: mol_type = other DNA
acttgcaacttagaagttatgtacgttgatcaatagcaggcgtggcacaccagccatgtcttgatcaagcacttctgtaaccccggactgagtatcaatagactgctcacgtggtcgaaagagaaaatgttcgttatccggctaactacttcgagaaacctagtagcaccactgaaactgcggagtgtttcgctcagcacttcccccgtgtagatcaggtcgatgagtcactgcttaccccacgggtgaccgtggcagtggctgcgttggcggcctgcctatggggcaacccataggacgctctaaagtggacatggtgtgaagagtctattgagctagttagtagtcctccggcccctgaatgcggctaatcctaactgcggagcgcatgcccccaaaccagagggtggtgcgtcgtaacgggtaactctgcagcggaaccgactactttgggtgtccgtgtttcttttattctcataatggctgcttatggtgacaattgaggaattgttaccatatagctattggattggccatccggtgtgcaacagagctattatctacttgtttgttggatacattccattgacacctaaatccttcaatacattgcactatattctaacgttgaacgcaagaaa

SEQ ID NO: 22422 - DNA, 591 bp, synthetic construct
  source 1..591: mol_type = other DNA
cagccatgtcttgatcaagcacttctgtaaccccggactgagtatcaatagactgctcacgtggtcgaaagagaaaatgttcgttatccggctaactacttcgagaaacctagtagcaccactgaaactgcggagtgtttcgctcagcacttcccccgtgtagatcaggtcgatgagtcactgcttaccccacgggtgaccgtggcagtggctgcgttggcggcctgcctatggggcaacccataggacgctctaaagtggacatggtgtgaagagtctattgagctagttagtagtcctccggcccctgaatgcggctaatcctaactgcggagcgcatgcccccaaaccagagggtggtgcgtcgtaacgggtaactctgcagcggaaccgactactttgggtgtccgtgtttcttttattctcataatggctgcttatggtgacaattgaggaattgttaccatatagctattggattggccatccggtgtgcaacagagctattatctacttgtttgttggatacattccattgacacctaaatccttcaatacattgcactatattctaacgttgaacgcaagaaa

SEQ ID NO: 22423 - DNA, 541 bp, synthetic construct
  source 1..541: mol_type = other DNA
gactgctcacgtggtcgaaagagaaaatgttcgttatccggctaactacttcgagaaacctagtagcaccactgaaactgcggagtgtttcgctcagcacttcccccgtgtagatcaggtcgatgagtcactgcttaccccacgggtgaccgtggcagtggctgcgttggcggcctgcctatggggcaacccataggacgctctaaagtggacatggtgtgaagagtctattgagctagttagtagtcctccggcccctgaatgcggctaatcctaactgcggagcgcatgcccccaaaccagagggtggtgcgtcgtaacgggtaactctgcagcggaaccgactactttgggtgtccgtgtttcttttattctcataatggctgcttatggtgacaattgaggaattgttaccatatagctattggattggccatccggtgtgcaacagagctattatctacttgtttgttggatacattccattgacacctaaatccttcaatacattgcactatattctaacgttgaacgcaagaaa

SEQ ID NO: 22424 - DNA, 691 bp, synthetic construct
  source 1..691: mol_type = other DNA
acactggtatcacggtacccttgtgcgcctgttttatccacccgccccctatgtaacttagaagcacatcacaaacggtcaacaggcagctcagtaaaccaactgagccacgaccaggtacttctgttaccccggaccgagtatcaatagactgctgacgcggtcgaaggagaaaacgttcgttacccggccaactacttcgagaaacccagtaccaccatggaggttgcgtggcgtttcgctccacacaaccccagtgtagatcaggtcgatgagtcaccgcattccccacgggcgaccgtggcggtggctgcgttggcggcctgcccatgaggtaactcatgggacgctacaataccgacatggtgcgaagagtctattgagctagttggtagtcctccggcccctgaatgcggctaatcctaactgcagagcggacacctacaaaccagtgggcagtccgtcgtaacgggcaactctgcagcggaaccgactactttgggtgtccgtgtttccttttattctcatattggctgcttatggtgacaattgagagattgttgccatatagctattggattggccatccggtgactaacagagctattgtctacttatttgttggttacgcaccgctcaatttcaaagtcttaaacacgattaatttcatattatcactcaacacaacaaa

SEQ ID NO: 22425 - DNA, 641 bp, synthetic construct
  source 1..641: mol_type = other DNA
atgtaacttagaagcacatcacaaacggtcaacaggcagctcagtaaaccaactgagccacgaccaggtacttctgttaccccggaccgagtatcaatagactgctgacgcggtcgaaggagaaaacgttcgttacccggccaactacttcgagaaacccagtaccaccatggaggttgcgtggcgtttcgctccacacaaccccagtgtagatcaggtcgatgagtcaccgcattccccacgggcgaccgtggcggtggctgcgttggcggcctgcccatgaggtaactcatgggacgctacaataccgacatggtgcgaagagtctattgagctagttggtagtcctccggcccctgaatgcggctaatcctaactgcagagcggacacctacaaaccagtgggcagtccgtcgtaacgggcaactctgcagcggaaccgactactttgggtgtccgtgtttccttttattctcatattggctgcttatggtgacaattgagagattgttgccatatagctattggattggccatccggtgactaacagagctattgtctacttatttgttggttacgcaccgctcaatttcaaagtcttaaacacgattaatttcatattatcactcaacacaacaaa

SEQ ID NO: 22426 - DNA, 591 bp, synthetic construct
  source 1..591: mol_type = other DNA
aactgagccacgaccaggtacttctgttaccccggaccgagtatcaatagactgctgacgcggtcgaaggagaaaacgttcgttacccggccaactacttcgagaaacccagtaccaccatggaggttgcgtggcgtttcgctccacacaaccccagtgtagatcaggtcgatgagtcaccgcattccccacgggcgaccgtggcggtggctgcgttggcggcctgcccatgaggtaactcatgggacgctacaataccgacatggtgcgaagagtctattgagctagttggtagtcctccggcccctgaatgcggctaatcctaactgcagagcggacacctacaaaccagtgggcagtccgtcgtaacgggcaactctgcagcggaaccgactactttgggtgtccgtgtttccttttattctcatattggctgcttatggtgacaattgagagattgttgccatatagctattggattggccatccggtgactaacagagctattgtctacttatttgttggttacgcaccgctcaatttcaaagtcttaaacacgattaatttcatattatcactcaacacaacaaa

SEQ ID NO: 22427 - DNA, 541 bp, synthetic construct
  source 1..541: mol_type = other DNA
actgctgacgcggtcgaaggagaaaacgttcgttacccggccaactacttcgagaaacccagtaccaccatggaggttgcgtggcgtttcgctccacacaaccccagtgtagatcaggtcgatgagtcaccgcattccccacgggcgaccgtggcggtggctgcgttggcggcctgcccatgaggtaactcatgggacgctacaataccgacatggtgcgaagagtctattgagctagttggtagtcctccggcccctgaatgcggctaatcctaactgcagagcggacacctacaaaccagtgggcagtccgtcgtaacgggcaactctgcagcggaaccgactactttgggtgtccgtgtttccttttattctcatattggctgcttatggtgacaattgagagattgttgccatatagctattggattggccatccggtgactaacagagctattgtctacttatttgttggttacgcaccgctcaatttcaaagtcttaaacacgattaatttcatattatcactcaacacaacaaa

SEQ ID NO: 22428 - DNA, 691 bp, synthetic construct
  source 1..691: mol_type = other DNA
cactctggtatcacggtacctttgtgcgcctgttttacacacccccctccctaggaatttagaagcaatacacaatgatcaatagtaggcgtggtacgccaaccatgtcttgatcaagcacttctgttcccccggactgagtatcaatagactgctcacgcggttgaaggagaaaacgttcgttacccggccagctacttcgagaaacccagtaacaccatggaaatagcggggcgtttcgctcggcacatccccagtgtagatcaggtcgatgagtcaccgcattccccacgggtgaccgtggcggtggctgcgttggcggcctgcctacagggcgacctgtaggacgcttcaatatggacatggtgcgaagagtctattgagctagctggtagtcctccggcccctgaatgcggctaatcctaactgcggagcgcgcgcctccaatccagggggtggtgcgtcgtaatgggtaactctgcagcggaaccgactactttgggtgtccgtgtttccatttatccttatattggctgcttatggtgacaattgaaaggttgttaccatatagctattggattggccatccagtgtctaacagagcgattgtattcctcttcgttggatttgttccacttaacaaaacaaattaccaaactttgtgttatattgtcaaactaaacacagcaaa

SEQ ID NO: 22429 - DNA, 641 bp, synthetic construct
  source 1..641: mol_type = other DNA
ctaggaatttagaagcaatacacaatgatcaatagtaggcgtggtacgccaaccatgtcttgatcaagcacttctgttcccccggactgagtatcaatagactgctcacgcggttgaaggagaaaacgttcgttacccggccagctacttcgagaaacccagtaacaccatggaaatagcggggcgtttcgctcggcacatccccagtgtagatcaggtcgatgagtcaccgcattccccacgggtgaccgtggcggtggctgcgttggcggcctgcctacagggcgacctgtaggacgcttcaatatggacatggtgcgaagagtctattgagctagctggtagtcctccggcccctgaatgcggctaatcctaactgcggagcgcgcgcctccaatccagggggtggtgcgtcgtaatgggtaactctgcagcggaaccgactactttgggtgtccgtgtttccatttatccttatattggctgcttatggtgacaattgaaaggttgttaccatatagctattggattggccatccagtgtctaacagagcgattgtattcctcttcgttggatttgttccacttaacaaaacaaattaccaaactttgtgttatattgtcaaactaaacacagcaaa

SEQ ID NO: 22430 - DNA, 591 bp, synthetic construct
  source 1..591: mol_type = other DNA
aaccatgtcttgatcaagcacttctgttcccccggactgagtatcaatagactgctcacgcggttgaaggagaaaacgttcgttacccggccagctacttcgagaaacccagtaacaccatggaaatagcggggcgtttcgctcggcacatccccagtgtagatcaggtcgatgagtcaccgcattccccacgggtgaccgtggcggtggctgcgttggcggcctgcctacagggcgacctgtaggacgcttcaatatggacatggtgcgaagagtctattgagctagctggtagtcctccggcccctgaatgcggctaatcctaactgcggagcgcgcgcctccaatccagggggtggtgcgtcgtaatgggtaactctgcagcggaaccgactactttgggtgtccgtgtttccatttatccttatattggctgcttatggtgacaattgaaaggttgttaccatatagctattggattggccatccagtgtctaacagagcgattgtattcctcttcgttggatttgttccacttaacaaaacaaattaccaaactttgtgttatattgtcaaactaaacacagcaaa

SEQ ID NO: 22431 - DNA, 541 bp, synthetic construct
  source 1..541: mol_type = other DNA
actgctcacgcggttgaaggagaaaacgttcgttacccggccagctacttcgagaaacccagtaacaccatggaaatagcggggcgtttcgctcggcacatccccagtgtagatcaggtcgatgagtcaccgcattccccacgggtgaccgtggcggtggctgcgttggcggcctgcctacagggcgacctgtaggacgcttcaatatggacatggtgcgaagagtctattgagctagctggtagtcctccggcccctgaatgcggctaatcctaactgcggagcgcgcgcctccaatccagggggtggtgcgtcgtaatgggtaactctgcagcggaaccgactactttgggtgtccgtgtttccatttatccttatattggctgcttatggtgacaattgaaaggttgttaccatatagctattggattggccatccagtgtctaacagagcgattgtattcctcttcgttggatttgttccacttaacaaaacaaattaccaaactttgtgttatattgtcaaactaaacacagcaaa

SEQ ID NO: 22432 - DNA, 691 bp, synthetic construct
  source 1..691: mol_type = other DNA
cacactggtatcgcggtacctttgtgcgcctgttttatttaccctgccctgatgtaacttagaagcatgacaccaacgatcaatagcaggctcaatgcaccaattgggtcaagatcaagcacttctgttaccccggactgagtatcaataagctgctagcgcggctgaaggagaaaaagttcgttacccggccagctacttcgagaaacctagtatcaccatgaaagttgcgtggcgtttcgctccgcacaaccccagtgtagatcaggtcgatgagtcaccgcattccccacgggcgaccgtggcggtggctgcgttggcggcctgcccgtggagcaatccatgggacgctataatacagacatggtgtgaagagtctattgagctagctggtagtcctccggcccctgaatgcggctaatcctaactgcggagcaggtacccacgaaccagtgggcagtctgtcgtaatgggcaactccgcagcggaaccgactactttgggtgtccgtgtttccttttatttcaacttggctgcttatggtgacaattgagagattgttaccatatagctattggattggccatccggtgactaacagagctatcatatacctttttattggctttgtgccacttactctgaaagaggtcaagactctgcattatatcatactattgaatgctataaa

SEQ ID NO: 22433 - DNA, 641 bp, synthetic construct
  source 1..641: mol_type = other DNA
gatgtaacttagaagcatgacaccaacgatcaatagcaggctcaatgcaccaattgggtcaagatcaagcacttctgttaccccggactgagtatcaataagctgctagcgcggctgaaggagaaaaagttcgttacccggccagctacttcgagaaacctagtatcaccatgaaagttgcgtggcgtttcgctccgcacaaccccagtgtagatcaggtcgatgagtcaccgcattccccacgggcgaccgtggcggtggctgcgttggcggcctgcccgtggagcaatccatgggacgctataatacagacatggtgtgaagagtctattgagctagctggtagtcctccggcccctgaatgcggctaatcctaactgcggagcaggtacccacgaaccagtgggcagtctgtcgtaatgggcaactccgcagcggaaccgactactttgggtgtccgtgtttccttttatttcaacttggctgcttatggtgacaattgagagattgttaccatatagctattggattggccatccggtgactaacagagctatcatatacctttttattggctttgtgccacttactctgaaagaggtcaagactctgcattatatcatactattgaatgctataaa

SEQ ID NO: 22434 - DNA, 591 bp, synthetic construct
  source 1..591: mol_type = other DNA
caattgggtcaagatcaagcacttctgttaccccggactgagtatcaataagctgctagcgcggctgaaggagaaaaagttcgttacccggccagctacttcgagaaacctagtatcaccatgaaagttgcgtggcgtttcgctccgcacaaccccagtgtagatcaggtcgatgagtcaccgcattccccacgggcgaccgtggcggtggctgcgttggcggcctgcccgtggagcaatccatgggacgctataatacagacatggtgtgaagagtctattgagctagctggtagtcctccggcccctgaatgcggctaatcctaactgcggagcaggtacccacgaaccagtgggcagtctgtcgtaatgggcaactccgcagcggaaccgactactttgggtgtccgtgtttccttttatttcaacttggctgcttatggtgacaattgagagattgttaccatatagctattggattggccatccggtgactaacagagctatcatatacctttttattggctttgtgccacttactctgaaagaggtcaagactctgcattatatcatactattgaatgctataaa

SEQ ID NO: 22435 - DNA, 541 bp, synthetic construct
  source 1..541: mol_type = other DNA
agctgctagcgcggctgaaggagaaaaagttcgttacccggccagctacttcgagaaacctagtatcaccatgaaagttgcgtggcgtttcgctccgcacaaccccagtgtagatcaggtcgatgagtcaccgcattccccacgggcgaccgtggcggtggctgcgttggcggcctgcccgtggagcaatccatgggacgctataatacagacatggtgtgaagagtctattgagctagctggtagtcctccggcccctgaatgcggctaatcctaactgcggagcaggtacccacgaaccagtgggcagtctgtcgtaatgggcaactccgcagcggaaccgactactttgggtgtccgtgtttccttttatttcaacttggctgcttatggtgacaattgagagattgttaccatatagctattggattggccatccggtgactaacagagctatcatatacctttttattggctttgtgccacttactctgaaagaggtcaagactctgcattatatcatactattgaatgctataaa

SEQ ID NO: 22436 - DNA, 691 bp, synthetic construct
  source 1..691: mol_type = other DNA
cacaccggtatcacggtacccttgtgcgcctgttttatccacctcccccgttgtaacttagaagctcaatacaaatggtcgatagccagcccgatacgccaattgggttttgaccaagcacttctgttaccccggactgagtaccaataggctgccaaagcggctgaaggggaaaacgttcgttaccccaccaactacttcgagaaacctagtaccaccatgaagattgcgcagcgtttcgctcagcacaaccccagtgtagatcaggtcgatgagtcaccgcattccccacaggcgactgtggcggtggctgcgttggcggcctgcccatggggctacccatgggacacttcaatatcgacatggtgcgaagagtctattgagctagttggtagtcctccggcccctgaatgcggataatcctaactgcggagcaggcacccacaagccagtgggcagcctgtcgtaacgggcaactctgcagcggaaccgactactttgggtgtccgtgtttctttttattcttacactggctgcttatggtgacaattgaagaattgttaccatatagctattggattggccatccagcgactaacagagctattatcttcttgtttgtggggtacgtaccactcaatttcacagtagtaaggactctcaatttcattttgtgcttgaataaggcgaa

SEQ ID NO: 22437 - DNA, 641 bp, synthetic construct
  source 1..641: mol_type = other DNA
ttgtaacttagaagctcaatacaaatggtcgatagccagcccgatacgccaattgggttttgaccaagcacttctgttaccccggactgagtaccaataggctgccaaagcggctgaaggggaaaacgttcgttaccccaccaactacttcgagaaacctagtaccaccatgaagattgcgcagcgtttcgctcagcacaaccccagtgtagatcaggtcgatgagtcaccgcattccccacaggcgactgtggcggtggctgcgttggcggcctgcccatggggctacccatgggacacttcaatatcgacatggtgcgaagagtctattgagctagttggtagtcctccggcccctgaatgcggataatcctaactgcggagcaggcacccacaagccagtgggcagcctgtcgtaacgggcaactctgcagcggaaccgactactttgggtgtccgtgtttctttttattcttacactggctgcttatggtgacaattgaagaattgttaccatatagctattggattggccatccagcgactaacagagctattatcttcttgtttgtggggtacgtaccactcaatttcacagtagtaaggactctcaatttcattttgtgcttgaataaggcgaa

SEQ ID NO: 22438 - DNA, 591 bp, synthetic construct
  source 1..591: mol_type = other DNA
aattgggttttgaccaagcacttctgttaccccggactgagtaccaataggctgccaaagcggctgaaggggaaaacgttcgttaccccaccaactacttcgagaaacctagtaccaccatgaagattgcgcagcgtttcgctcagcacaaccccagtgtagatcaggtcgatgagtcaccgcattccccacaggcgactgtggcggtggctgcgttggcggcctgcccatggggctacccatgggacacttcaatatcgacatggtgcgaagagtctattgagctagttggtagtcctccggcccctgaatgcggataatcctaactgcggagcaggcacccacaagccagtgggcagcctgtcgtaacgggcaactctgcagcggaaccgactactttgggtgtccgtgtttctttttattcttacactggctgcttatggtgacaattgaagaattgttaccatatagctattggattggccatccagcgactaacagagctattatcttcttgtttgtggggtacgtaccactcaatttcacagtagtaaggactctcaatttcattttgtgcttgaataaggcgaa

SEQ ID NO: 22439 - DNA, 541 bp, synthetic construct
  source 1..541: mol_type = other DNA
gctgccaaagcggctgaaggggaaaacgttcgttaccccaccaactacttcgagaaacctagtaccaccatgaagattgcgcagcgtttcgctcagcacaaccccagtgtagatcaggtcgatgagtcaccgcattccccacaggcgactgtggcggtggctgcgttggcggcctgcccatggggctacccatgggacacttcaatatcgacatggtgcgaagagtctattgagctagttggtagtcctccggcccctgaatgcggataatcctaactgcggagcaggcacccacaagccagtgggcagcctgtcgtaacgggcaactctgcagcggaaccgactactttgggtgtccgtgtttctttttattcttacactggctgcttatggtgacaattgaagaattgttaccatatagctattggattggccatccagcgactaacagagctattatcttcttgtttgtggggtacgtaccactcaatttcacagtagtaaggactctcaatttcattttgtgcttgaataaggcgaa

SEQ ID NO: 22440 - DNA, 691 bp, synthetic construct
  source 1..691: mol_type = other DNA
cacactggtatcacggtacctttgtgcgcctgttttataatcccttccccaccgtaacatagaagctacacacactgatcaacagcaggcacagcacaccagttgtgtctcgatcaagcacttctgtctccccggaccgagtatcaatagactgcttacgcggttgaaggagaaaacgttcgtcacccggctgactacttcgaaaagcctagtagtaccatgaatgttgcggagtgtttcgctcagcacttcccccgtgtagatcaggctgatgagtcactgcattccccacgggtgaccgtggcagtggctgcgttggcggcctgcccatggggcaacccatgggacgcttcaatacagacatggtgcgaagagtctattgagctagtcagtagtcctccggcccctgaatgcggctaatcctaactgcggagcatgcgcctccgacccagggggtagcatgtcgtaatgggcaactctgcagcggaaccgactactttgggtgtccgtgtttccttttattcttatattggctgcttatggtgacaattgagagattgttgccatatagctattggattggccatccggtgagtaatagagctattatatactcctttgtgggttttgtgccactggatcacaaggtcttgaaaactctcacttttgtcataatactaaacactgcaaa

SEQ ID NO: 22441 - DNA, 641 bp, synthetic construct
  source 1..641: mol_type = other DNA
accgtaacatagaagctacacacactgatcaacagcaggcacagcacaccagttgtgtctcgatcaagcacttctgtctccccggaccgagtatcaatagactgcttacgcggttgaaggagaaaacgttcgtcacccggctgactacttcgaaaagcctagtagtaccatgaatgttgcggagtgtttcgctcagcacttcccccgtgtagatcaggctgatgagtcactgcattccccacgggtgaccgtggcagtggctgcgttggcggcctgcccatggggcaacccatgggacgcttcaatacagacatggtgcgaagagtctattgagctagtcagtagtcctccggcccctgaatgcggctaatcctaactgcggagcatgcgcctccgacccagggggtagcatgtcgtaatgggcaactctgcagcggaaccgactactttgggtgtccgtgtttccttttattcttatattggctgcttatggtgacaattgagagattgttgccatatagctattggattggccatccggtgagtaatagagctattatatactcctttgtgggttttgtgccactggatcacaaggtcttgaaaactctcacttttgtcataatactaaacactgcaaa

SEQ ID NO: 22442 - DNA, 591 bp, synthetic construct
  source 1..591: mol_type = other DNA
agttgtgtctcgatcaagcacttctgtctccccggaccgagtatcaatagactgcttacgcggttgaaggagaaaacgttcgtcacccggctgactacttcgaaaagcctagtagtaccatgaatgttgcggagtgtttcgctcagcacttcccccgtgtagatcaggctgatgagtcactgcattccccacgggtgaccgtggcagtggctgcgttggcggcctgcccatggggcaacccatgggacgcttcaatacagacatggtgcgaagagtctattgagctagtcagtagtcctccggcccctgaatgcggctaatcctaactgcggagcatgcgcctccgacccagggggtagcatgtcgtaatgggcaactctgcagcggaaccgactactttgggtgtccgtgtttccttttattcttatattggctgcttatggtgacaattgagagattgttgccatatagctattggattggccatccggtgagtaatagagctattatatactcctttgtgggttttgtgccactggatcacaaggtcttgaaaactctcacttttgtcataatactaaacactgcaaa

SEQ ID NO: 22443 - DNA, 541 bp, synthetic construct
  source 1..541: mol_type = other DNA
actgcttacgcggttgaaggagaaaacgttcgtcacccggctgactacttcgaaaagcctagtagtaccatgaatgttgcggagtgtttcgctcagcacttcccccgtgtagatcaggctgatgagtcactgcattccccacgggtgaccgtggcagtggctgcgttggcggcctgcccatggggcaacccatgggacgcttcaatacagacatggtgcgaagagtctattgagctagtcagtagtcctccggcccctgaatgcggctaatcctaactgcggagcatgcgcctccgacccagggggtagcatgtcgtaatgggcaactctgcagcggaaccgactactttgggtgtccgtgtttccttttattcttatattggctgcttatggtgacaattgagagattgttgccatatagctattggattggccatccggtgagtaatagagctattatatactcctttgtgggttttgtgccactggatcacaaggtcttgaaaactctcacttttgtcataatactaaacactgcaaa

SEQ ID NO: 22444 - DNA, 691 bp, synthetic construct
  source 1..691: mol_type = other DNA
acactgatatcacggtacctttgtgcgcctgttttatctacccctccccgatgcaacttagaagcatgttacaaacggtcaataggtggttcagttaaccaactgagcctcgaccaagcacttctgttaccccggactgagtatcaataggctgctcgcgtggctgatggagaaaacgtccgttacccggccaattacttcgagaaacctagtaccaccatggaagttgcgcagcgtttcgctccgcacaaccccagtgtagatcaggtcgatgagtcactgcgttccccacgggtgaccgtggcagtggctgcgttggcggcctgcccatggggtatcccatgggacgcttcaatactgacatggtgtgaagagtctattgagctaattggtagtcctccggcccctgaatgcggctaatcctaactgcggagcagatacccacgcaccagtgggcagtctgtcgtaacgggcaactctgcagcggaaccgactactttgggtgaccgtgtttccttttattttaatattggctgcttatggtgacaattgaaagattgttgccatatagctattggattggccatccggtaacaaacagagcaattatttacctgtttattggttttatacctctcaaccacaaggttataagtactctcaaccttgttttagcatttaacacagcaaa

SEQ ID NO: 22445 - DNA, 641 bp, synthetic construct
  source 1..641: mol_type = other DNA
atgcaacttagaagcatgttacaaacggtcaataggtggttcagttaaccaactgagcctcgaccaagcacttctgttaccccggactgagtatcaataggctgctcgcgtggctgatggagaaaacgtccgttacccggccaattacttcgagaaacctagtaccaccatggaagttgcgcagcgtttcgctccgcacaaccccagtgtagatcaggtcgatgagtcactgcgttccccacgggtgaccgtggcagtggctgcgttggcggcctgcccatggggtatcccatgggacgcttcaatactgacatggtgtgaagagtctattgagctaattggtagtcctccggcccctgaatgcggctaatcctaactgcggagcagatacccacgcaccagtgggcagtctgtcgtaacgggcaactctgcagcggaaccgactactttgggtgaccgtgtttccttttattttaatattggctgcttatggtgacaattgaaagattgttgccatatagctattggattggccatccggtaacaaacagagcaattatttacctgtttattggttttatacctctcaaccacaaggttataagtactctcaaccttgttttagcatttaacacagcaaa

SEQ ID NO: 22446 - DNA, 591 bp, synthetic construct
  source 1..591: mol_type = other DNA
aactgagcctcgaccaagcacttctgttaccccggactgagtatcaataggctgctcgcgtggctgatggagaaaacgtccgttacccggccaattacttcgagaaacctagtaccaccatggaagttgcgcagcgtttcgctccgcacaaccccagtgtagatcaggtcgatgagtcactgcgttccccacgggtgaccgtggcagtggctgcgttggcggcctgcccatggggtatcccatgggacgcttcaatactgacatggtgtgaagagtctattgagctaattggtagtcctccggcccctgaatgcggctaatcctaactgcggagcagatacccacgcaccagtgggcagtctgtcgtaacgggcaactctgcagcggaaccgactactttgggtgaccgtgtttccttttattttaatattggctgcttatggtgacaattgaaagattgttgccatatagctattggattggccatccggtaacaaacagagcaattatttacctgtttattggttttatacctctcaaccacaaggttataagtactctcaaccttgttttagcatttaacacagcaaa

SEQ ID NO: 22447 - DNA, 541 bp, synthetic construct
  source 1..541: mol_type = other DNA
gctgctcgcgtggctgatggagaaaacgtccgttacccggccaattacttcgagaaacctagtaccaccatggaagttgcgcagcgtttcgctccgcacaaccccagtgtagatcaggtcgatgagtcactgcgttccccacgggtgaccgtggcagtggctgcgttggcggcctgcccatggggtatcccatgggacgcttcaatactgacatggtgtgaagagtctattgagctaattggtagtcctccggcccctgaatgcggctaatcctaactgcggagcagatacccacgcaccagtgggcagtctgtcgtaacgggcaactctgcagcggaaccgactactttgggtgaccgtgtttccttttattttaatattggctgcttatggtgacaattgaaagattgttgccatatagctattggattggccatccggtaacaaacagagcaattatttacctgtttattggttttatacctctcaaccacaaggttataagtactctcaaccttgttttagcatttaacacagcaaa

SEQ ID NO: 22448 - DNA, 691 bp, synthetic construct
  source 1..691: mol_type = other DNA
catactggtatcacggtacctttatgcgcctgttttatccacccctccccaacgtaacctagaagacactcatggatgatcaataggaggctcggcatgccagctgagtctggatcaagcacttctgttgccccggaccgagtatcaataggctgctcacgcggctgaaggagaaaaagttcgttatccggccaattacttcgagaaacccagtaccaccatgaaggttgcgtggcgtttcgctccgcacagccccagtgtagatcaggtcgatgagtcaccgcgttccccacgggcgaccgtggcggtggctgcgttggcggcctgcccatggggtaacccatgggacgcttcaatactgacatggtgcgaagagtctattgagctaattggtagtcctccggcccctgaatgcggctaatcctaactgcggagcagacgtccacaaaccagtgggtggtctgtcgtaacgggcaactctgcagcggaaccgactactttgggtgtccgtgtttcctttattcttatattggctgcttatggtgacaattgagagattgttgccatatagctattggattggccatccggtttgcaatagagcgattatactcctctttgttgggtttgtacctctcaacctcaatagttacaggacattattatacattatccagctgaacacgaaaag

SEQ ID NO: 22449 - DNA, 641 bp, synthetic construct
  source 1..641: mol_type = other DNA
aacgtaacctagaagacactcatggatgatcaataggaggctcggcatgccagctgagtctggatcaagcacttctgttgccccggaccgagtatcaataggctgctcacgcggctgaaggagaaaaagttcgttatccggccaattacttcgagaaacccagtaccaccatgaaggttgcgtggcgtttcgctccgcacagccccagtgtagatcaggtcgatgagtcaccgcgttccccacgggcgaccgtggcggtggctgcgttggcggcctgcccatggggtaacccatgggacgcttcaatactgacatggtgcgaagagtctattgagctaattggtagtcctccggcccctgaatgcggctaatcctaactgcggagcagacgtccacaaaccagtgggtggtctgtcgtaacgggcaactctgcagcggaaccgactactttgggtgtccgtgtttcctttattcttatattggctgcttatggtgacaattgagagattgttgccatatagctattggattggccatccggtttgcaatagagcgattatactcctctttgttgggtttgtacctctcaacctcaatagttacaggacattattatacattatccagctgaacacgaaaag

SEQ ID NO: 22450 - DNA, 591 bp, synthetic construct
  source 1..591: mol_type = other DNA
cagctgagtctggatcaagcacttctgttgccccggaccgagtatcaataggctgctcacgcggctgaaggagaaaaagttcgttatccggccaattacttcgagaaacccagtaccaccatgaaggttgcgtggcgtttcgctccgcacagccccagtgtagatcaggtcgatgagtcaccgcgttccccacgggcgaccgtggcggtggctgcgttggcggcctgcccatggggtaacccatgggacgcttcaatactgacatggtgcgaagagtctattgagctaattggtagtcctccggcccctgaatgcggctaatcctaactgcggagcagacgtccacaaaccagtgggtggtctgtcgtaacgggcaactctgcagcggaaccgactactttgggtgtccgtgtttcctttattcttatattggctgcttatggtgacaattgagagattgttgccatatagctattggattggccatccggtttgcaatagagcgattatactcctctttgttgggtttgtacctctcaacctcaatagttacaggacattattatacattatccagctgaacacgaaaag

SEQ ID NO: 22451 - DNA, 541 bp, synthetic construct
  source 1..541: mol_type = other DNA
ggctgctcacgcggctgaaggagaaaaagttcgttatccggccaattacttcgagaaacccagtaccaccatgaaggttgcgtggcgtttcgctccgcacagccccagtgtagatcaggtcgatgagtcaccgcgttccccacgggcgaccgtggcggtggctgcgttggcggcctgcccatggggtaacccatgggacgcttcaatactgacatggtgcgaagagtctattgagctaattggtagtcctccggcccctgaatgcggctaatcctaactgcggagcagacgtccacaaaccagtgggtggtctgtcgtaacgggcaactctgcagcggaaccgactactttgggtgtccgtgtttcctttattcttatattggctgcttatggtgacaattgagagattgttgccatatagctattggattggccatccggtttgcaatagagcgattatactcctctttgttgggtttgtacctctcaacctcaatagttacaggacattattatacattatccagctgaacacgaaaag

SEQ ID NO: 22452 - DNA, 691 bp, synthetic construct
  source 1..691: mol_type = other DNA
acactggtatcacggtacctttgtgcgcctgttttatttaccctcccccaacgtaacttagaagcatgactcaaatggtcaacagacaactcagcatgccagctgagcctcgaccaagcacttctgttaccccggactgagtaccagtaagctgctcacgcggctgagagggaaaccgttcgttacccggccaattacttcgagaaacctagtaccaccatgaaagttgcgcagtgtttcgctccgcacaaccccagtgtagatcaggtcgatgagtcaccgcaaaccccacgggtgaccgtggcggtggctgcgctggcggcctgcccatggggcagcccatgggacgcttcaatactgacatggtgcgaagagtctattgagctaattggtgatcctccggcccctgaatgcggctaatcctaactgcggagcagatacccacgcaccagtgggcagtctgtcgtaatgggcaactctgcagcggaaccgactactttgggtgtccgtgtttccttttattcttatactggctgcttatggtgacaattgagagattgttgccatatagctattggattggccatccggttacaaacagagcaattacttacctatttgttggttttgtaccactgaactacaaagtcttgaacaccctcaatttcattacaacacctaacacgttaaa

SEQ ID NO: 22453 - DNA, 641 bp, synthetic construct
  source 1..641: mol_type = other DNA
acgtaacttagaagcatgactcaaatggtcaacagacaactcagcatgccagctgagcctcgaccaagcacttctgttaccccggactgagtaccagtaagctgctcacgcggctgagagggaaaccgttcgttacccggccaattacttcgagaaacctagtaccaccatgaaagttgcgcagtgtttcgctccgcacaaccccagtgtagatcaggtcgatgagtcaccgcaaaccccacgggtgaccgtggcggtggctgcgctggcggcctgcccatggggcagcccatgggacgcttcaatactgacatggtgcgaagagtctattgagctaattggtgatcctccggcccctgaatgcggctaatcctaactgcggagcagatacccacgcaccagtgggcagtctgtcgtaatgggcaactctgcagcggaaccgactactttgggtgtccgtgtttccttttattcttatactggctgcttatggtgacaattgagagattgttgccatatagctattggattggccatccggttacaaacagagcaattacttacctatttgttggttttgtaccactgaactacaaagtcttgaacaccctcaatttcattacaacacctaacacgttaaa

SEQ ID NO: 22454 - DNA, 591 bp, synthetic construct
  source 1..591: mol_type = other DNA
agctgagcctcgaccaagcacttctgttaccccggactgagtaccagtaagctgctcacgcggctgagagggaaaccgttcgttacccggccaattacttcgagaaacctagtaccaccatgaaagttgcgcagtgtttcgctccgcacaaccccagtgtagatcaggtcgatgagtcaccgcaaaccccacgggtgaccgtggcggtggctgcgctggcggcctgcccatggggcagcccatgggacgcttcaatactgacatggtgcgaagagtctattgagctaattggtgatcctccggcccctgaatgcggctaatcctaactgcggagcagatacccacgcaccagtgggcagtctgtcgtaatgggcaactctgcagcggaaccgactactttgggtgtccgtgtttccttttattcttatactggctgcttatggtgacaattgagagattgttgccatatagctattggattggccatccggttacaaacagagcaattacttacctatttgttggttttgtaccactgaactacaaagtcttgaacaccctcaatttcattacaacacctaacacgttaaa

SEQ ID NO: 22455 - DNA, 541 bp, synthetic construct
  source 1..541: mol_type = other DNA
gctgctcacgcggctgagagggaaaccgttcgttacccggccaattacttcgagaaacctagtaccaccatgaaagttgcgcagtgtttcgctccgcacaaccccagtgtagatcaggtcgatgagtcaccgcaaaccccacgggtgaccgtggcggtggctgcgctggcggcctgcccatggggcagcccatgggacgcttcaatactgacatggtgcgaagagtctattgagctaattggtgatcctccggcccctgaatgcggctaatcctaactgcggagcagatacccacgcaccagtgggcagtctgtcgtaatgggcaactctgcagcggaaccgactactttgggtgtccgtgtttccttttattcttatactggctgcttatggtgacaattgagagattgttgccatatagctattggattggccatccggttacaaacagagcaattacttacctatttgttggttttgtaccactgaactacaaagtcttgaacaccctcaatttcattacaacacctaacacgttaaa

SEQ ID NO: 22456 - DNA, 691 bp, synthetic construct
  source 1..691: mol_type = other DNA
cacactggtatcatggtacctttgtgtgcctgttttatttcccttccccagatgcaacttagaagcaacactccacgaccactagcaggcgtggcacaccagccatgtcttggtcaagcacttctgtaaccccggactgagtatcaataaactgctcacgcggtcgaaggagaaaacgtccgttacccggccaactacttcgagaaacctagtaacgccatgaaaattgcgaggtgtttcgctcagcacatccccagtgtagatcaggtcgatgagtcaccgcattccccacaggtaactgtggcggtggctgcgttggcggcctgcccatggggtgacccatgggacgcttcaatacggacatggtgtgaagagtctattgagctagttggtagtcctccggcccctgaatgcggctaatcctaactgtggagcatgcgcccccactccagagggtagcgtgtcgtaacgggtaactccgcagcggaaccgactactttgggtgtccgtgtttctttttattcttatattggctgcttatggtgacaattgaaagattgttaccatatagctattggattggccacccagtgacaaacagagcaataatttaccaatttgtgggatttattccaataagtttgaaagtcttgaagacacttaatctagtattacaactcaatagcgcaaa

SEQ ID NO: 22457 - DNA, 641 bp, synthetic construct
  source 1..641: mol_type = other DNA
gatgcaacttagaagcaacactccacgaccactagcaggcgtggcacaccagccatgtcttggtcaagcacttctgtaaccccggactgagtatcaataaactgctcacgcggtcgaaggagaaaacgtccgttacccggccaactacttcgagaaacctagtaacgccatgaaaattgcgaggtgtttcgctcagcacatccccagtgtagatcaggtcgatgagtcaccgcattccccacaggtaactgtggcggtggctgcgttggcggcctgcccatggggtgacccatgggacgcttcaatacggacatggtgtgaagagtctattgagctagttggtagtcctccggcccctgaatgcggctaatcctaactgtggagcatgcgcccccactccagagggtagcgtgtcgtaacgggtaactccgcagcggaaccgactactttgggtgtccgtgtttctttttattcttatattggctgcttatggtgacaattgaaagattgttaccatatagctattggattggccacccagtgacaaacagagcaataatttaccaatttgtgggatttattccaataagtttgaaagtcttgaagacacttaatctagtattacaactcaatagcgcaaa

SEQ ID NO: 22458 - DNA, 591 bp, synthetic construct
  source 1..591: mol_type = other DNA
agccatgtcttggtcaagcacttctgtaaccccggactgagtatcaataaactgctcacgcggtcgaaggagaaaacgtccgttacccggccaactacttcgagaaacctagtaacgccatgaaaattgcgaggtgtttcgctcagcacatccccagtgtagatcaggtcgatgagtcaccgcattccccacaggtaactgtggcggtggctgcgttggcggcctgcccatggggtgacccatgggacgcttcaatacggacatggtgtgaagagtctattgagctagttggtagtcctccggcccctgaatgcggctaatcctaactgtggagcatgcgcccccactccagagggtagcgtgtcgtaacgggtaactccgcagcggaaccgactactttgggtgtccgtgtttctttttattcttatattggctgcttatggtgacaattgaaagattgttaccatatagctattggattggccacccagtgacaaacagagcaataatttaccaatttgtgggatttattccaataagtttgaaagtcttgaagacacttaatctagtattacaactcaatagcgcaaa

SEQ ID NO: 22459 - DNA, 541 bp, synthetic construct
  source 1..541: mol_type = other DNA
actgctcacgcggtcgaaggagaaaacgtccgttacccggccaactacttcgagaaacctagtaacgccatgaaaattgcgaggtgtttcgctcagcacatccccagtgtagatcaggtcgatgagtcaccgcattccccacaggtaactgtggcggtggctgcgttggcggcctgcccatggggtgacccatgggacgcttcaatacggacatggtgtgaagagtctattgagctagttggtagtcctccggcccctgaatgcggctaatcctaactgtggagcatgcgcccccactccagagggtagcgtgtcgtaacgggtaactccgcagcggaaccgactactttgggtgtccgtgtttctttttattcttatattggctgcttatggtgacaattgaaagattgttaccatatagctattggattggccacccagtgacaaacagagcaataatttaccaatttgtgggatttattccaataagtttgaaagtcttgaagacacttaatctagtattacaactcaatagcgcaaa

SEQ ID NO: 22460 - DNA, 691 bp, synthetic construct
  source 1..691: mol_type = other DNA
cacactggtattacggtacctttgtgcgcctgttttatacacccttaccctatgcaatatagaagcaaaacgacaaggtcaatagagagcccagtgagccaactgggtcgagaccaagcacttctgtttccccggaccgagtatcaataggctgcttacgcggctgaaggagaaaacgttcgttacccggctaactacttcgaaaaacctagtaacgccatggaagttgcgaaccgtttcgctcggcacttccccagtgtagatcaggtcgatgagtcaccgcattccccacgggcgaccgtggcggtggctgcgttggcggcctgcctatggggcaacccataggacgcttcaatatggacatggcgtgaagagtctattgagctagttagtagtcctccggcccctgaatgcggctaatcctaactgcggagcacatgcccccaacccaggaggtggtgtgtcgtaatgggtaactctgcagcggaaccgactactttgggtgtccgtgtttccttttatcccaatgttggctgcttatggtgacaattgaaagattgttaccatatagctattggattggccatccggtgactaacagagcaatcgtttacctattcattggttacgttccattaaatctcaaggaactaacgactctcaattacattttgctcttgaactctgcaaa

SEQ ID NO: 22461 - DNA, 641 bp, synthetic construct
  source 1..641: mol_type = other DNA
tatgcaatatagaagcaaaacgacaaggtcaatagagagcccagtgagccaactgggtcgagaccaagcacttctgtttccccggaccgagtatcaataggctgcttacgcggctgaaggagaaaacgttcgttacccggctaactacttcgaaaaacctagtaacgccatggaagttgcgaaccgtttcgctcggcacttccccagtgtagatcaggtcgatgagtcaccgcattccccacgggcgaccgtggcggtggctgcgttggcggcctgcctatggggcaacccataggacgcttcaatatggacatggcgtgaagagtctattgagctagttagtagtcctccggcccctgaatgcggctaatcctaactgcggagcacatgcccccaacccaggaggtggtgtgtcgtaatgggtaactctgcagcggaaccgactactttgggtgtccgtgtttccttttatcccaatgttggctgcttatggtgacaattgaaagattgttaccatatagctattggattggccatccggtgactaacagagcaatcgtttacctattcattggttacgttccattaaatctcaaggaactaacgactctcaattacattttgctcttgaactctgcaaa

SEQ ID NO: 22462 - DNA, 591 bp, synthetic construct
  source 1..591: mol_type = other DNA
aactgggtcgagaccaagcacttctgtttccccggaccgagtatcaataggctgcttacgcggctgaaggagaaaacgttcgttacccggctaactacttcgaaaaacctagtaacgccatggaagttgcgaaccgtttcgctcggcacttccccagtgtagatcaggtcgatgagtcaccgcattccccacgggcgaccgtggcggtggctgcgttggcggcctgcctatggggcaacccataggacgcttcaatatggacatggcgtgaagagtctattgagctagttagtagtcctccggcccctgaatgcggctaatcctaactgcggagcacatgcccccaacccaggaggtggtgtgtcgtaatgggtaactctgcagcggaaccgactactttgggtgtccgtgtttccttttatcccaatgttggctgcttatggtgacaattgaaagattgttaccatatagctattggattggccatccggtgactaacagagcaatcgtttacctattcattggttacgttccattaaatctcaaggaactaacgactctcaattacattttgctcttgaactctgcaaa

SEQ ID NO: 22463 - DNA, 541 bp, synthetic construct
  source 1..541: mol_type = other DNA
gctgcttacgcggctgaaggagaaaacgttcgttacccggctaactacttcgaaaaacctagtaacgccatggaagttgcgaaccgtttcgctcggcacttccccagtgtagatcaggtcgatgagtcaccgcattccccacgggcgaccgtggcggtggctgcgttggcggcctgcctatggggcaacccataggacgcttcaatatggacatggcgtgaagagtctattgagctagttagtagtcctccggcccctgaatgcggctaatcctaactgcggagcacatgcccccaacccaggaggtggtgtgtcgtaatgggtaactctgcagcggaaccgactactttgggtgtccgtgtttccttttatcccaatgttggctgcttatggtgacaattgaaagattgttaccatatagctattggattggccatccggtgactaacagagcaatcgtttacctattcattggttacgttccattaaatctcaaggaactaacgactctcaattacattttgctcttgaactctgcaaa

SEQ ID NO: 22464 - DNA, 691 bp, synthetic construct
  source 1..691: mol_type = other DNA
cactctggtatcacggtacctttgtgcgcctgttttacatcccctccccaaattgtaatttagaagtctcacacaccgatcaatagcaagcgtggcacaccagccatgttttgatcaagcacttctgttacccggactgagtatcaatagaccgctaacgcggttgaaggagaaaacgttcgttacccggccaactacttcgaaaaacctagtaacaccatggaagttgcggagtgtttcgctcagcactaccccagtgtagatcaggtcgatgagtcaccgcgttccccacgggcgaccgtggcggtggctgcgttggcggcctgcctacggggaaacccgtaggacgctctaatacagacatggtgcgaagagtctattgagctagttggtaatcctccggcccctgaatgcggctaatcctaactgcggagcacataccctcaaaccagggggcagtgtgtcgtaacgggcaactctgcagcggaaccgactactttgggtgtccgtgtttcattttattcctatactggctgcttatggtgacaattgacgggttgttaccatatagttattggattggccatccggtgactaacagagcaattatatatctctttgttgggtttataccacttagcttgaaagaggttaaaacactacatctcatcattaaactaaatacaacaaa

SEQ ID NO: 22465 - DNA, 641 bp, synthetic construct
  source 1..641: mol_type = other DNA
aattgtaatttagaagtctcacacaccgatcaatagcaagcgtggcacaccagccatgttttgatcaagcacttctgttacccggactgagtatcaatagaccgctaacgcggttgaaggagaaaacgttcgttacccggccaactacttcgaaaaacctagtaacaccatggaagttgcggagtgtttcgctcagcactaccccagtgtagatcaggtcgatgagtcaccgcgttccccacgggcgaccgtggcggtggctgcgttggcggcctgcctacggggaaacccgtaggacgctctaatacagacatggtgcgaagagtctattgagctagttggtaatcctccggcccctgaatgcggctaatcctaactgcggagcacataccctcaaaccagggggcagtgtgtcgtaacgggcaactctgcagcggaaccgactactttgggtgtccgtgtttcattttattcctatactggctgcttatggtgacaattgacgggttgttaccatatagttattggattggccatccggtgactaacagagcaattatatatctctttgttgggtttataccacttagcttgaaagaggttaaaacactacatctcatcattaaactaaatacaacaaa

SEQ ID NO: 22466 - DNA, 591 bp, synthetic construct
  source 1..591: mol_type = other DNA
cagccatgttttgatcaagcacttctgttacccggactgagtatcaatagaccgctaacgcggttgaaggagaaaacgttcgttacccggccaactacttcgaaaaacctagtaacaccatggaagttgcggagtgtttcgctcagcactaccccagtgtagatcaggtcgatgagtcaccgcgttccccacgggcgaccgtggcggtggctgcgttggcggcctgcctacggggaaacccgtaggacgctctaatacagacatggtgcgaagagtctattgagctagttggtaatcctccggcccctgaatgcggctaatcctaactgcggagcacataccctcaaaccagggggcagtgtgtcgtaacgggcaactctgcagcggaaccgactactttgggtgtccgtgtttcattttattcctatactggctgcttatggtgacaattgacgggttgttaccatatagttattggattggccatccggtgactaacagagcaattatatatctctttgttgggtttataccacttagcttgaaagaggttaaaacactacatctcatcattaaactaaatacaacaaa

SEQ ID NO: 22467 - DNA, 541 bp, synthetic construct
  source 1..541: mol_type = other DNA
accgctaacgcggttgaaggagaaaacgttcgttacccggccaactacttcgaaaaacctagtaacaccatggaagttgcggagtgtttcgctcagcactaccccagtgtagatcaggtcgatgagtcaccgcgttccccacgggcgaccgtggcggtggctgcgttggcggcctgcctacggggaaacccgtaggacgctctaatacagacatggtgcgaagagtctattgagctagttggtaatcctccggcccctgaatgcggctaatcctaactgcggagcacataccctcaaaccagggggcagtgtgtcgtaacgggcaactctgcagcggaaccgactactttgggtgtccgtgtttcattttattcctatactggctgcttatggtgacaattgacgggttgttaccatatagttattggattggccatccggtgactaacagagcaattatatatctctttgttgggtttataccacttagcttgaaagaggttaaaacactacatctcatcattaaactaaatacaacaaa

SEQ ID NO: 22468 - DNA, 691 bp, synthetic construct
  source 1..691: mol_type = other DNA
actctggtatcacggtacctttgtgcgcctgttttatacacccttcccaagtgtaacttagaagcttaccacacacggtcaataggcgactcagtaagccaactgggtcttgatcaagcacttctgtttccccggactgagtatcaataagctgctcacgcggctgaaggagaaaacgttcgttaaccggccaattacttcgagaaacctagtaacaccatggaggttgcgcagcgtttcgctccgcacaaccccagtgtagatcaggccgatgagtcaccgcactcctcacgggcgaccgtggcggtggctgcgctggcggcctgcccatggggtaacccatgggacgcttcaatactgacatggtgcgaagagtctattgagctaattggtagtcctccggcccctgaatgcggctaatcctaactgcggagcagatacccacatgccagtgggcagtctgtcgtaatgggcaactctgcagcggaaccgactactttgggtgtccgtgtttccttttattcttatactggctgcttatggtgacaattgagagattgttaccatatagctattggattggccatccagtgacaaacagagcgattatttatttgtttgttggttatatcccattaagccaaaaagtcttagccactctcaatttcatactattgcttaatacaacgaa

SEQ ID NO: 22469 - DNA, 641 bp, synthetic construct
  source 1..641: mol_type = other DNA
gtgtaacttagaagcttaccacacacggtcaataggcgactcagtaagccaactgggtcttgatcaagcacttctgtttccccggactgagtatcaataagctgctcacgcggctgaaggagaaaacgttcgttaaccggccaattacttcgagaaacctagtaacaccatggaggttgcgcagcgtttcgctccgcacaaccccagtgtagatcaggccgatgagtcaccgcactcctcacgggcgaccgtggcggtggctgcgctggcggcctgcccatggggtaacccatgggacgcttcaatactgacatggtgcgaagagtctattgagctaattggtagtcctccggcccctgaatgcggctaatcctaactgcggagcagatacccacatgccagtgggcagtctgtcgtaatgggcaactctgcagcggaaccgactactttgggtgtccgtgtttccttttattcttatactggctgcttatggtgacaattgagagattgttaccatatagctattggattggccatccagtgacaaacagagcgattatttatttgtttgttggttatatcccattaagccaaaaagtcttagccactctcaatttcatactattgcttaatacaacgaa

SEQ ID NO: 22470 - DNA, 591 bp, synthetic construct
  source 1..591: mol_type = other DNA
aactgggtcttgatcaagcacttctgtttccccggactgagtatcaataagctgctcacgcggctgaaggagaaaacgttcgttaaccggccaattacttcgagaaacctagtaacaccatggaggttgcgcagcgtttcgctccgcacaaccccagtgtagatcaggccgatgagtcaccgcactcctcacgggcgaccgtggcggtggctgcgctggcggcctgcccatggggtaacccatgggacgcttcaatactgacatggtgcgaagagtctattgagctaattggtagtcctccggcccctgaatgcggctaatcctaactgcggagcagatacccacatgccagtgggcagtctgtcgtaatgggcaactctgcagcggaaccgactactttgggtgtccgtgtttccttttattcttatactggctgcttatggtgacaattgagagattgttaccatatagctattggattggccatccagtgacaaacagagcgattatttatttgtttgttggttatatcccattaagccaaaaagtcttagccactctcaatttcatactattgcttaatacaacgaa

SEQ ID NO: 22471 - DNA, 541 bp, synthetic construct
  source 1..541: mol_type = other DNA
gctgctcacgcggctgaaggagaaaacgttcgttaaccggccaattacttcgagaaacctagtaacaccatggaggttgcgcagcgtttcgctccgcacaaccccagtgtagatcaggccgatgagtcaccgcactcctcacgggcgaccgtggcggtggctgcgctggcggcctgcccatggggtaacccatgggacgcttcaatactgacatggtgcgaagagtctattgagctaattggtagtcctccggcccctgaatgcggctaatcctaactgcggagcagatacccacatgccagtgggcagtctgtcgtaatgggcaactctgcagcggaaccgactactttgggtgtccgtgtttccttttattcttatactggctgcttatggtgacaattgagagattgttaccatatagctattggattggccatccagtgacaaacagagcgattatttatttgtttgttggttatatcccattaagccaaaaagtcttagccactctcaatttcatactattgcttaatacaacgaa

SEQ ID NO: 22472 - DNA, 692 bp, synthetic construct
  source 1..692: mol_type = other DNA
cacactggtatcccggtacctttgtgcgcctgttttatctacccctccccaagtgaaacttagaagatcatcacatatggtcaataggcggctcagtacaccaactgcgtctcgaccaagcacttctgtatccccggactgagtatcaatagactgctcacgcggttgaaggagaaaacgttcgttatccggctaactacttcgggaagcctagtagcaccttgaaagttgcggagtgtttcgctcagcacttcccccgtgtagatcaggccgatgagccactgtaaaccccacgggcgaccgtgacagtggctgcgctggcggcctgcccatgggggaacccatgggacgctctaatactgacatggtgtgaagagtctactgagctagttagtagtcctccggcccctgaatgcggctaatcctaactgcggagcacacaccctcaacccagggggcagtgtgtcgtaatgggtaactctgcagcggaaccgactactttgggtgaccgtgtttccttttattccttattggctgcttatggtgacaattgaaaagttgttaccatatagctattggattggccatccggtatctaatagagctattgtttacttatttattggatacgtccctcttaatttcaaggctatccaaactcttgattatatattgctccttaattataagaa

SEQ ID NO: 22473 - DNA, 642 bp, synthetic construct
  source 1..642: mol_type = other DNA
aagtgaaacttagaagatcatcacatatggtcaataggcggctcagtacaccaactgcgtctcgaccaagcacttctgtatccccggactgagtatcaatagactgctcacgcggttgaaggagaaaacgttcgttatccggctaactacttcgggaagcctagtagcaccttgaaagttgcggagtgtttcgctcagcacttcccccgtgtagatcaggccgatgagccactgtaaaccccacgggcgaccgtgacagtggctgcgctggcggcctgcccatgggggaacccatgggacgctctaatactgacatggtgtgaagagtctactgagctagttagtagtcctccggcccctgaatgcggctaatcctaactgcggagcacacaccctcaacccagggggcagtgtgtcgtaatgggtaactctgcagcggaaccgactactttgggtgaccgtgtttccttttattccttattggctgcttatggtgacaattgaaaagttgttaccatatagctattggattggccatccggtatctaatagagctattgtttacttatttattggatacgtccctcttaatttcaaggctatccaaactcttgattatatattgctccttaattataagaa

SEQ ID NO: 22474 - DNA, 592 bp, synthetic construct
  source 1..592: mol_type = other DNA
ccaactgcgtctcgaccaagcacttctgtatccccggactgagtatcaatagactgctcacgcggttgaaggagaaaacgttcgttatccggctaactacttcgggaagcctagtagcaccttgaaagttgcggagtgtttcgctcagcacttcccccgtgtagatcaggccgatgagccactgtaaaccccacgggcgaccgtgacagtggctgcgctggcggcctgcccatgggggaacccatgggacgctctaatactgacatggtgtgaagagtctactgagctagttagtagtcctccggcccctgaatgcggctaatcctaactgcggagcacacaccctcaacccagggggcagtgtgtcgtaatgggtaactctgcagcggaaccgactactttgggtgaccgtgtttccttttattccttattggctgcttatggtgacaattgaaaagttgttaccatatagctattggattggccatccggtatctaatagagctattgtttacttatttattggatacgtccctcttaatttcaaggctatccaaactcttgattatatattgctccttaattataagaa

SEQ ID NO: 22475 - DNA, 542 bp, synthetic construct
  source 1..542: mol_type = other DNA
agactgctcacgcggttgaaggagaaaacgttcgttatccggctaactacttcgggaagcctagtagcaccttgaaagttgcggagtgtttcgctcagcacttcccccgtgtagatcaggccgatgagccactgtaaaccccacgggcgaccgtgacagtggctgcgctggcggcctgcccatgggggaacccatgggacgctctaatactgacatggtgtgaagagtctactgagctagttagtagtcctccggcccctgaatgcggctaatcctaactgcggagcacacaccctcaacccagggggcagtgtgtcgtaatgggtaactctgcagcggaaccgactactttgggtgaccgtgtttccttttattccttattggctgcttatggtgacaattgaaaagttgttaccatatagctattggattggccatccggtatctaatagagctattgtttacttatttattggatacgtccctcttaatttcaaggctatccaaactcttgattatatattgctccttaattataagaa

SEQ ID NO: 22476 - DNA, 692 bp, synthetic construct
  source 1..692: mol_type = other DNA
tacactggtatctcggtacctttgtacgcctgttttataccccctccctgatttgcaacttagaagcaacgcaaaccagatcaatagtaggtgtgacataccagtcgcatcttgatcaagcacttctgtatccccggaccgagtatcaatagactgtgcacacggttgaaggagaaaacgtccgttacccggctaactacttcgagaaacctagtaacgccattgaagttgcagagtgtttcgctcagcactccccccgtgtagatcaggtcgatgagtcaccgcattccccacgggcgaccgtggcggtggctgcgttggcggcctgcccatggggtaacccatgggacgctctaatatagacatggtgcgaagagtctattgagctagttagcagacctccggcccctgaatgcggctaatcctaactgcggagcgcgcaccctcaacccagggggcggcgtgtcgtaatgggtaactctgcagcggaaccgactactttgggtgtccgtgtttccttttattctttattggctgcttatggtgacaattgaaaagttgttaccatatagctattggattggccatccggtgtctaacagagctattgtctacctatttattggatacgtccctcttaatctcaaggccattcaaactcttgattatatattgctcctcaactgtaggaa

SEQ ID NO: 22477 - DNA, 642 bp, synthetic construct
  source 1..642: mol_type = other DNA
atttgcaacttagaagcaacgcaaaccagatcaatagtaggtgtgacataccagtcgcatcttgatcaagcacttctgtatccccggaccgagtatcaatagactgtgcacacggttgaaggagaaaacgtccgttacccggctaactacttcgagaaacctagtaacgccattgaagttgcagagtgtttcgctcagcactccccccgtgtagatcaggtcgatgagtcaccgcattccccacgggcgaccgtggcggtggctgcgttggcggcctgcccatggggtaacccatgggacgctctaatatagacatggtgcgaagagtctattgagctagttagcagacctccggcccctgaatgcggctaatcctaactgcggagcgcgcaccctcaacccagggggcggcgtgtcgtaatgggtaactctgcagcggaaccgactactttgggtgtccgtgtttccttttattctttattggctgcttatggtgacaattgaaaagttgttaccatatagctattggattggccatccggtgtctaacagagctattgtctacctatttattggatacgtccctcttaatctcaaggccattcaaactcttgattatatattgctcctcaactgtaggaa

SEQ ID NO: 22478 - DNA, 592 bp, synthetic construct
  source 1..592: mol_type = other DNA
ccagtcgcatcttgatcaagcacttctgtatccccggaccgagtatcaatagactgtgcacacggttgaaggagaaaacgtccgttacccggctaactacttcgagaaacctagtaacgccattgaagttgcagagtgtttcgctcagcactccccccgtgtagatcaggtcgatgagtcaccgcattccccacgggcgaccgtggcggtggctgcgttggcggcctgcccatggggtaacccatgggacgctctaatatagacatggtgcgaagagtctattgagctagttagcagacctccggcccctgaatgcggctaatcctaactgcggagcgcgcaccctcaacccagggggcggcgtgtcgtaatgggtaactctgcagcggaaccgactactttgggtgtccgtgtttccttttattctttattggctgcttatggtgacaattgaaaagttgttaccatatagctattggattggccatccggtgtctaacagagctattgtctacctatttattggatacgtccctcttaatctcaaggccattcaaactcttgattatatattgctcctcaactgtaggaa

SEQ ID NO: 22479 - DNA, 542 bp, synthetic construct
  source 1..542: mol_type = other DNA
agactgtgcacacggttgaaggagaaaacgtccgttacccggctaactacttcgagaaacctagtaacgccattgaagttgcagagtgtttcgctcagcactccccccgtgtagatcaggtcgatgagtcaccgcattccccacgggcgaccgtggcggtggctgcgttggcggcctgcccatggggtaacccatgggacgctctaatatagacatggtgcgaagagtctattgagctagttagcagacctccggcccctgaatgcggctaatcctaactgcggagcgcgcaccctcaacccagggggcggcgtgtcgtaatgggtaactctgcagcggaaccgactactttgggtgtccgtgtttccttttattctttattggctgcttatggtgacaattgaaaagttgttaccatatagctattggattggccatccggtgtctaacagagctattgtctacctatttattggatacgtccctcttaatctcaaggccattcaaactcttgattatatattgctcctcaactgtaggaa

SEQ ID NO: 22480 - DNA, 692 bp, synthetic construct
  source 1..692: mol_type = other DNA
gcactctggtattacggtacctttgtgcgcctgttttataacccctccccaactgtaaattagaagcaacacacgtcgatcaatagtaggcgtgacgcaccagtcacgtcttgatcaagcacttctgtttccccggaccgagtatcaatagactgctcacgcggttgaaggagaaaacgttcgttacccgaccaactacttcgaaaaacctagtagcaccatgaaggttgcggagtgtttcgctcggcacttccccagtgtagatcaggtcgatgagtcaccgcattccccacgggcgaccgtggcggtggctgcgctggcggcctgcctatggggtaacccataggacgctctaatacggacatggtgcgaagagtctattgagctagttggtagtcctccggcccctgaatgcggctaatcctaactgcggagcgcgcgcccccattccaggaggtagcgcgtcgtaacgggcaactctgcagcggaaccgactactttgggtgtccgtgtttccttttatctttattctggctgcttatggtgacaattgacagattgttaccatatagctattggattggccatccggtcacaagcagagcgattatctaccaatttattggatttatcccactgcacactcgtgaatataacacattactgctgatactgagtttggacaaagcaaa

SEQ ID NO: 22481 - DNA, 642 bp, synthetic construct
  source 1..642: mol_type = other DNA
aactgtaaattagaagcaacacacgtcgatcaatagtaggcgtgacgcaccagtcacgtcttgatcaagcacttctgtttccccggaccgagtatcaatagactgctcacgcggttgaaggagaaaacgttcgttacccgaccaactacttcgaaaaacctagtagcaccatgaaggttgcggagtgtttcgctcggcacttccccagtgtagatcaggtcgatgagtcaccgcattccccacgggcgaccgtggcggtggctgcgctggcggcctgcctatggggtaacccataggacgctctaatacggacatggtgcgaagagtctattgagctagttggtagtcctccggcccctgaatgcggctaatcctaactgcggagcgcgcgcccccattccaggaggtagcgcgtcgtaacgggcaactctgcagcggaaccgactactttgggtgtccgtgtttccttttatctttattctggctgcttatggtgacaattgacagattgttaccatatagctattggattggccatccggtcacaagcagagcgattatctaccaatttattggatttatcccactgcacactcgtgaatataacacattactgctgatactgagtttggacaaagcaaa

SEQ ID NO: 22482 - DNA, 592 bp, synthetic construct
  source 1..592: mol_type = other DNA
cagtcacgtcttgatcaagcacttctgtttccccggaccgagtatcaatagactgctcacgcggttgaaggagaaaacgttcgttacccgaccaactacttcgaaaaacctagtagcaccatgaaggttgcggagtgtttcgctcggcacttccccagtgtagatcaggtcgatgagtcaccgcattccccacgggcgaccgtggcggtggctgcgctggcggcctgcctatggggtaacccataggacgctctaatacggacatggtgcgaagagtctattgagctagttggtagtcctccggcccctgaatgcggctaatcctaactgcggagcgcgcgcccccattccaggaggtagcgcgtcgtaacgggcaactctgcagcggaaccgactactttgggtgtccgtgtttccttttatctttattctggctgcttatggtgacaattgacagattgttaccatatagctattggattggccatccggtcacaagcagagcgattatctaccaatttattggatttatcccactgcacactcgtgaatataacacattactgctgatactgagtttggacaaagcaaa

SEQ ID NO: 22483 - DNA, 542 bp, synthetic construct
  source 1..542: mol_type = other DNA
gactgctcacgcggttgaaggagaaaacgttcgttacccgaccaactacttcgaaaaacctagtagcaccatgaaggttgcggagtgtttcgctcggcacttccccagtgtagatcaggtcgatgagtcaccgcattccccacgggcgaccgtggcggtggctgcgctggcggcctgcctatggggtaacccataggacgctctaatacggacatggtgcgaagagtctattgagctagttggtagtcctccggcccctgaatgcggctaatcctaactgcggagcgcgcgcccccattccaggaggtagcgcgtcgtaacgggcaactctgcagcggaaccgactactttgggtgtccgtgtttccttttatctttattctggctgcttatggtgacaattgacagattgttaccatatagctattggattggccatccggtcacaagcagagcgattatctaccaatttattggatttatcccactgcacactcgtgaatataacacattactgctgatactgagtttggacaaagcaaa

SEQ ID NO: 22484 - DNA, 692 bp, synthetic construct
  source 1..692: mol_type = other DNA
cactctggtatcacgatacctttgtgcgcctgttttatatccccaccccgagtaaacgttagaagttacgcaaccccgatcaatagtaggtgtagcactccagctgcatcgagatcaagcacttctgtctccccggaccgagtatcaatagactgctaacgcggttgaaggagaaaacgttcgttacccggccaattacttcgagaagcccagtagtgccgtgaaagttgcggagtgtttcgctcagcacttcccccgtgtagatcaggctgatgagtcaccgcgatccccacaggtgactgtggcggtggctgcgttggcggcctgcctatggggcaacccataggacgctctaatacagacatggtgcgaagagcctattgagctaattggtagtcctccggcccctgaatgcggctaatcctaactgcggagcacatgccctcaaaccagggggtggtgtgtcgtaacgggtaactctgcagcggaaccgactactttgggtgtccgtgtttctttttattcttataatggctgcttatggtgacaattaaagaattgttaccatatagctattggattggccatccggtgactaacaaatcgctcatataccagtttgttggttttgttcccttatcacatacagctcataacaccctcttatatttactacaattgaatagcaagaa

SEQ ID NO: 22485 - DNA, 642 bp, synthetic construct
  source 1..642: mol_type = other DNA
agtaaacgttagaagttacgcaaccccgatcaatagtaggtgtagcactccagctgcatcgagatcaagcacttctgtctccccggaccgagtatcaatagactgctaacgcggttgaaggagaaaacgttcgttacccggccaattacttcgagaagcccagtagtgccgtgaaagttgcggagtgtttcgctcagcacttcccccgtgtagatcaggctgatgagtcaccgcgatccccacaggtgactgtggcggtggctgcgttggcggcctgcctatggggcaacccataggacgctctaatacagacatggtgcgaagagcctattgagctaattggtagtcctccggcccctgaatgcggctaatcctaactgcggagcacatgccctcaaaccagggggtggtgtgtcgtaacgggtaactctgcagcggaaccgactactttgggtgtccgtgtttctttttattcttataatggctgcttatggtgacaattaaagaattgttaccatatagctattggattggccatccggtgactaacaaatcgctcatataccagtttgttggttttgttcccttatcacatacagctcataacaccctcttatatttactacaattgaatagcaagaa

SEQ ID NO: 22486 - DNA, 592 bp, synthetic construct
  source 1..592: mol_type = other DNA
cagctgcatcgagatcaagcacttctgtctccccggaccgagtatcaatagactgctaacgcggttgaaggagaaaacgttcgttacccggccaattacttcgagaagcccagtagtgccgtgaaagttgcggagtgtttcgctcagcacttcccccgtgtagatcaggctgatgagtcaccgcgatccccacaggtgactgtggcggtggctgcgttggcggcctgcctatggggcaacccataggacgctctaatacagacatggtgcgaagagcctattgagctaattggtagtcctccggcccctgaatgcggctaatcctaactgcggagcacatgccctcaaaccagggggtggtgtgtcgtaacgggtaactctgcagcggaaccgactactttgggtgtccgtgtttctttttattcttataatggctgcttatggtgacaattaaagaattgttaccatatagctattggattggccatccggtgactaacaaatcgctcatataccagtttgttggttttgttcccttatcacatacagctcataacaccctcttatatttactacaattgaatagcaagaa

SEQ ID NO: 22487 - DNA, 542 bp, synthetic construct
  source 1..542: mol_type = other DNA
gactgctaacgcggttgaaggagaaaacgttcgttacccggccaattacttcgagaagcccagtagtgccgtgaaagttgcggagtgtttcgctcagcacttcccccgtgtagatcaggctgatgagtcaccgcgatccccacaggtgactgtggcggtggctgcgttggcggcctgcctatggggcaacccataggacgctctaatacagacatggtgcgaagagcctattgagctaattggtagtcctccggcccctgaatgcggctaatcctaactgcggagcacatgccctcaaaccagggggtggtgtgtcgtaacgggtaactctgcagcggaaccgactactttgggtgtccgtgtttctttttattcttataatggctgcttatggtgacaattaaagaattgttaccatatagctattggattggccatccggtgactaacaaatcgctcatataccagtttgttggttttgttcccttatcacatacagctcataacaccctcttatatttactacaattgaatagcaagaa

SEQ ID NO: 22488 - DNA, 692 bp, synthetic construct
  source 1..692: mol_type = other DNA
cacactggtattacggtacctttgtgcgcctgttttataccccccccaacctcgaaacttagaagtaaagcaaacccgatcaatagcaggtgcggcgcaccagtcgcatcttgatcaagcacttctgtaaccccggaccgagtatcaatagactgctcacgcggttgaaggagaaaacgttcgttacccggctaactacttcgagaaacccagtagcatcatgaaagttgcagagtgtttcgctcagcactacccccgtgtagatcaggccgatgagtcaccgcacttccccacgggcgaccgtggcggtggctgcgttggcggcctgcctatggggcaacccataggacgctctaatacggacatggtgcgaagagtctattgagctagttagtagtcctccggcccctgaatgcggctaatcctaactgcggagcacatacccttaatccaaagggcagtgtgtcgtaacgggtaactctgcagcggaaccgactactttgggtgtccgtgtttccttttaatttttactggctgcttatggtgacaattgaggaattgttgccatatagctattggattggccatccggtgactaacagagctattgtgttccaatttgttggatttaccccgctcacactcacagtcgtaagaacccttcattacgtgttatttctcaactcaagaaa

SEQ ID NO: 22489 - DNA, 642 bp, synthetic construct
  source 1..642: mol_type = other DNA
ctcgaaacttagaagtaaagcaaacccgatcaatagcaggtgcggcgcaccagtcgcatcttgatcaagcacttctgtaaccccggaccgagtatcaatagactgctcacgcggttgaaggagaaaacgttcgttacccggctaactacttcgagaaacccagtagcatcatgaaagttgcagagtgtttcgctcagcactacccccgtgtagatcaggccgatgagtcaccgcacttccccacgggcgaccgtggcggtggctgcgttggcggcctgcctatggggcaacccataggacgctctaatacggacatggtgcgaagagtctattgagctagttagtagtcctccggcccctgaatgcggctaatcctaactgcggagcacatacccttaatccaaagggcagtgtgtcgtaacgggtaactctgcagcggaaccgactactttgggtgtccgtgtttccttttaatttttactggctgcttatggtgacaattgaggaattgttgccatatagctattggattggccatccggtgactaacagagctattgtgttccaatttgttggatttaccccgctcacactcacagtcgtaagaacccttcattacgtgttatttctcaactcaagaaa

SEQ ID NO: 22490 - DNA, 592 bp, synthetic construct
  source 1..592: mol_type = other DNA
cagtcgcatcttgatcaagcacttctgtaaccccggaccgagtatcaatagactgctcacgcggttgaaggagaaaacgttcgttacccggctaactacttcgagaaacccagtagcatcatgaaagttgcagagtgtttcgctcagcactacccccgtgtagatcaggccgatgagtcaccgcacttccccacgggcgaccgtggcggtggctgcgttggcggcctgcctatggggcaacccataggacgctctaatacggacatggtgcgaagagtctattgagctagttagtagtcctccggcccctgaatgcggctaatcctaactgcggagcacatacccttaatccaaagggcagtgtgtcgtaacgggtaactctgcagcggaaccgactactttgggtgtccgtgtttccttttaatttttactggctgcttatggtgacaattgaggaattgttgccatatagctattggattggccatccggtgactaacagagctattgtgttccaatttgttggatttaccccgctcacactcacagtcgtaagaacccttcattacgtgttatttctcaactcaagaaa

SEQ ID NO: 22491 - DNA, 542 bp, synthetic construct
  source 1..542: mol_type = other DNA
gactgctcacgcggttgaaggagaaaacgttcgttacccggctaactacttcgagaaacccagtagcatcatgaaagttgcagagtgtttcgctcagcactacccccgtgtagatcaggccgatgagtcaccgcacttccccacgggcgaccgtggcggtggctgcgttggcggcctgcctatggggcaacccataggacgctctaatacggacatggtgcgaagagtctattgagctagttagtagtcctccggcccctgaatgcggctaatcctaactgcggagcacatacccttaatccaaagggcagtgtgtcgtaacgggtaactctgcagcggaaccgactactttgggtgtccgtgtttccttttaatttttactggctgcttatggtgacaattgaggaattgttgccatatagctattggattggccatccggtgactaacagagctattgtgttccaatttgttggatttaccccgctcacactcacagtcgtaagaacccttcattacgtgttatttctcaactcaagaaa

SEQ ID NO: 22492 - DNA, 692 bp, synthetic construct
  source 1..692: mol_type = other DNA
cacactggtatcccggtacctttgtgcgcctgttttatttacccttccccaatgtaatttagaagtttatcccaaatggtcaatagacaacccagcacgccagctgggcttcgaccaagcacttctgttaccccggaccgagtatcaataggctgctcacgcggctgaaagagaaaatgttcgttacccggccaaccacttcgagaaacttagtatcaccatgaaagttgcgcagtgtttcgctccgcacagccccagtgtagatcaggtcgatgagtcaccgcgttccccacgggcgaccgtggcggtggctgcgttggcggcctgcccatggggcaacccatgggacgcttcaatactgacatggtgcgaagagtctattgagctggttggtagtcctccggcccctgaatgcggctaatcctaactgcggagcagatacctacacaccagtgggcagtctgtcgtaacgggcaactctgcggcggaaccgactactttgggtgtccgtgtttccttttattcttatattggctgcttatggtgacaattgaaagattgttaccatatagctattggattggccatccagtgacaaacagagctatcgtgtacctatttgttggttttgtaccactgaaccgtaaggtgttagacactctaaacctcataattctgttcaattcagcaaa

SEQ ID NO: 22493 - DNA, 642 bp, synthetic construct
  source 1..642: mol_type = other DNA
aatgtaatttagaagtttatcccaaatggtcaatagacaacccagcacgccagctgggcttcgaccaagcacttctgttaccccggaccgagtatcaataggctgctcacgcggctgaaagagaaaatgttcgttacccggccaaccacttcgagaaacttagtatcaccatgaaagttgcgcagtgtttcgctccgcacagccccagtgtagatcaggtcgatgagtcaccgcgttccccacgggcgaccgtggcggtggctgcgttggcggcctgcccatggggcaacccatgggacgcttcaatactgacatggtgcgaagagtctattgagctggttggtagtcctccggcccctgaatgcggctaatcctaactgcggagcagatacctacacaccagtgggcagtctgtcgtaacgggcaactctgcggcggaaccgactactttgggtgtccgtgtttccttttattcttatattggctgcttatggtgacaattgaaagattgttaccatatagctattggattggccatccagtgacaaacagagctatcgtgtacctatttgttggttttgtaccactgaaccgtaaggtgttagacactctaaacctcataattctgttcaattcagcaaa

SEQ ID NO: 22494 - DNA, 592 bp, synthetic construct
  source 1..592: mol_type = other DNA
cagctgggcttcgaccaagcacttctgttaccccggaccgagtatcaataggctgctcacgcggctgaaagagaaaatgttcgttacccggccaaccacttcgagaaacttagtatcaccatgaaagttgcgcagtgtttcgctccgcacagccccagtgtagatcaggtcgatgagtcaccgcgttccccacgggcgaccgtggcggtggctgcgttggcggcctgcccatggggcaacccatgggacgcttcaatactgacatggtgcgaagagtctattgagctggttggtagtcctccggcccctgaatgcggctaatcctaactgcggagcagatacctacacaccagtgggcagtctgtcgtaacgggcaactctgcggcggaaccgactactttgggtgtccgtgtttccttttattcttatattggctgcttatggtgacaattgaaagattgttaccatatagctattggattggccatccagtgacaaacagagctatcgtgtacctatttgttggttttgtaccactgaaccgtaaggtgttagacactctaaacctcataattctgttcaattcagcaaa

SEQ ID NO: 22495 - DNA, 542 bp, synthetic construct
  source 1..542: mol_type = other DNA
ggctgctcacgcggctgaaagagaaaatgttcgttacccggccaaccacttcgagaaacttagtatcaccatgaaagttgcgcagtgtttcgctccgcacagccccagtgtagatcaggtcgatgagtcaccgcgttccccacgggcgaccgtggcggtggctgcgttggcggcctgcccatggggcaacccatgggacgcttcaatactgacatggtgcgaagagtctattgagctggttggtagtcctccggcccctgaatgcggctaatcctaactgcggagcagatacctacacaccagtgggcagtctgtcgtaacgggcaactctgcggcggaaccgactactttgggtgtccgtgtttccttttattcttatattggctgcttatggtgacaattgaaagattgttaccatatagctattggattggccatccagtgacaaacagagctatcgtgtacctatttgttggttttgtaccactgaaccgtaaggtgttagacactctaaacctcataattctgttcaattcagcaaa

SEQ ID NO: 22496 - DNA, 692 bp, synthetic construct
  source 1..692: mol_type = other DNA
cactctggtatcacggtacctttgtgcgcctgttttatacccccgtccccggttgtaacttagaagtaacactccacgaccgatagtaggtgtggcacgccagccatgtcttggtcaagcacttctgtttccccggattgagtatcaataggctgttcacacggccgaaggagaaaacatccgttatccggccaactacttcgagaaacctagtaccaccatgaaggttgcgcagtgtttcgctccgcacaaccccagtgtagatcaggccgatgagtcaccgctttccccacgggcgaccgtggcggtggctgcgttggcggcctgcccatggggaaatccatgggacgcttcaatactgacatggtgcgaagagtctattgagctagttggtattcctccggcccctgaatgcggctaatcctaactgcggagcagacacccacatgccagtgggcagtctgtcgtaacgggcaactctgcagcggaaccgactactttgggtgtccgtgtttccttttattcttatactggctgcttatggtgacaattgaaagattgttaccatatagctattggattggccatcctgtgactaacagagctattgtatacctatttgttggttttgtgccactgaattacaaggctttaaacaccctcaactttataatactactcaactcattaaa

SEQ ID NO: 22497 - DNA, 642 bp, synthetic construct
  source 1..642: mol_type = other DNA
ggttgtaacttagaagtaacactccacgaccgatagtaggtgtggcacgccagccatgtcttggtcaagcacttctgtttccccggattgagtatcaataggctgttcacacggccgaaggagaaaacatccgttatccggccaactacttcgagaaacctagtaccaccatgaaggttgcgcagtgtttcgctccgcacaaccccagtgtagatcaggccgatgagtcaccgctttccccacgggcgaccgtggcggtggctgcgttggcggcctgcccatggggaaatccatgggacgcttcaatactgacatggtgcgaagagtctattgagctagttggtattcctccggcccctgaatgcggctaatcctaactgcggagcagacacccacatgccagtgggcagtctgtcgtaacgggcaactctgcagcggaaccgactactttgggtgtccgtgtttccttttattcttatactggctgcttatggtgacaattgaaagattgttaccatatagctattggattggccatcctgtgactaacagagctattgtatacctatttgttggttttgtgccactgaattacaaggctttaaacaccctcaactttataatactactcaactcattaaa

SEQ ID NO: 22498 - DNA, 592 bp, synthetic construct
  source 1..592: mol_type = other DNA
cagccatgtcttggtcaagcacttctgtttccccggattgagtatcaataggctgttcacacggccgaaggagaaaacatccgttatccggccaactacttcgagaaacctagtaccaccatgaaggttgcgcagtgtttcgctccgcacaaccccagtgtagatcaggccgatgagtcaccgctttccccacgggcgaccgtggcggtggctgcgttggcggcctgcccatggggaaatccatgggacgcttcaatactgacatggtgcgaagagtctattgagctagttggtattcctccggcccctgaatgcggctaatcctaactgcggagcagacacccacatgccagtgggcagtctgtcgtaacgggcaactctgcagcggaaccgactactttgggtgtccgtgtttccttttattcttatactggctgcttatggtgacaattgaaagattgttaccatatagctattggattggccatcctgtgactaacagagctattgtatacctatttgttggttttgtgccactgaattacaaggctttaaacaccctcaactttataatactactcaactcattaaa

SEQ ID NO: 22499 - DNA, 542 bp, synthetic construct
  source 1..542: mol_type = other DNA
ggctgttcacacggccgaaggagaaaacatccgttatccggccaactacttcgagaaacctagtaccaccatgaaggttgcgcagtgtttcgctccgcacaaccccagtgtagatcaggccgatgagtcaccgctttccccacgggcgaccgtggcggtggctgcgttggcggcctgcccatggggaaatccatgggacgcttcaatactgacatggtgcgaagagtctattgagctagttggtattcctccggcccctgaatgcggctaatcctaactgcggagcagacacccacatgccagtgggcagtctgtcgtaacgggcaactctgcagcggaaccgactactttgggtgtccgtgtttccttttattcttatactggctgcttatggtgacaattgaaagattgttaccatatagctattggattggccatcctgtgactaacagagctattgtatacctatttgttggttttgtgccactgaattacaaggctttaaacaccctcaactttataatactactcaactcattaaa

SEQ ID NO: 22500 - DNA, 692 bp, synthetic construct
  source 1..692: mol_type = other DNA
cactctggtattccggtaccctagtgcgcctgttttatcctcccctccccgttgaaacttagaagcaagtcacatgcggtcaatagggggcctagtatgccaactaggtcacgaccaagcactcctgttaccccggactgagtatcaataagctgctcgcgcggctgaaggagaaaacgttcgttacccggctaattacttcgagaaacccagtaccaccgtgaaggttgcgcagcgtttcgctccgcacaaccccagtgtagatcaggtcgatgagtcaccgcaatccccacaggcgactgtggcggtggctgcgttggcggcctgcccatgggacaacccatgggacgcttcaatactgacatggtgcgaagagtctattgagctaattagtaatcctccggcccctgaatgcggctaatcctaactgcggagcagatacccacacaccagtgggcagtctgtcgtaacgggcaactctgcagcggaaccgactactttgggtgtccgtgtttccttttattcttatactggctgcttatggtgacaattgacagattgttaccatatagctattggattggccatccggtgacgaacagagcgattatttacctgtttgttggttttataccacttaattacaaggttctaaacactctcaacttcattctaacactcaactcaacaaa

SEQ ID NO: 22501 - DNA, 642 bp, synthetic construct
  source 1..642: mol_type = other DNA
gttgaaacttagaagcaagtcacatgcggtcaatagggggcctagtatgccaactaggtcacgaccaagcactcctgttaccccggactgagtatcaataagctgctcgcgcggctgaaggagaaaacgttcgttacccggctaattacttcgagaaacccagtaccaccgtgaaggttgcgcagcgtttcgctccgcacaaccccagtgtagatcaggtcgatgagtcaccgcaatccccacaggcgactgtggcggtggctgcgttggcggcctgcccatgggacaacccatgggacgcttcaatactgacatggtgcgaagagtctattgagctaattagtaatcctccggcccctgaatgcggctaatcctaactgcggagcagatacccacacaccagtgggcagtctgtcgtaacgggcaactctgcagcggaaccgactactttgggtgtccgtgtttccttttattcttatactggctgcttatggtgacaattgacagattgttaccatatagctattggattggccatccggtgacgaacagagcgattatttacctgtttgttggttttataccacttaattacaaggttctaaacactctcaacttcattctaacactcaactcaacaaa

SEQ ID NO: 22502 - DNA, 592 bp, synthetic construct
  source 1..592: mol_type = other DNA
caactaggtcacgaccaagcactcctgttaccccggactgagtatcaataagctgctcgcgcggctgaaggagaaaacgttcgttacccggctaattacttcgagaaacccagtaccaccgtgaaggttgcgcagcgtttcgctccgcacaaccccagtgtagatcaggtcgatgagtcaccgcaatccccacaggcgactgtggcggtggctgcgttggcggcctgcccatgggacaacccatgggacgcttcaatactgacatggtgcgaagagtctattgagctaattagtaatcctccggcccctgaatgcggctaatcctaactgcggagcagatacccacacaccagtgggcagtctgtcgtaacgggcaactctgcagcggaaccgactactttgggtgtccgtgtttccttttattcttatactggctgcttatggtgacaattgacagattgttaccatatagctattggattggccatccggtgacgaacagagcgattatttacctgtttgttggttttataccacttaattacaaggttctaaacactctcaacttcattctaacactcaactcaacaaa

SEQ ID NO: 22503 - DNA, 542 bp, synthetic construct
  source 1..542: mol_type = other DNA
agctgctcgcgcggctgaaggagaaaacgttcgttacccggctaattacttcgagaaacccagtaccaccgtgaaggttgcgcagcgtttcgctccgcacaaccccagtgtagatcaggtcgatgagtcaccgcaatccccacaggcgactgtggcggtggctgcgttggcggcctgcccatgggacaacccatgggacgcttcaatactgacatggtgcgaagagtctattgagctaattagtaatcctccggcccctgaatgcggctaatcctaactgcggagcagatacccacacaccagtgggcagtctgtcgtaacgggcaactctgcagcggaaccgactactttgggtgtccgtgtttccttttattcttatactggctgcttatggtgacaattgacagattgttaccatatagctattggattggccatccggtgacgaacagagcgattatttacctgtttgttggttttataccacttaattacaaggttctaaacactctcaacttcattctaacactcaactcaacaaa

SEQ ID NO: 22504 - DNA, 692 bp, synthetic construct
  source 1..692: mol_type = other DNA
gtactccggtatcacggtacccttgtacgcctgttttatactccctgccccgtaacttagaagcaaaccaaacaagttcaataggagggggtgcaagcccgcaccaccacgaacaagtactcctgtctccccggtgaggttgtatagactgtacccacggttgaaaacgactgatccgttatccgctctagtacttcgggaagcctagtagcattttggaatcttcgatgcgttgcgctcagcactcaaccccggagtgtagcttaggtcgatgagtctggacatcccccaccggtgacggtggtccaggctgcgttggcggcctacctgtggtccaaagccacaggacgctagttgtgaacaaggtgtgaagagcctactgagctactagagagtcctccggcccctgaatgcggctaatcctaaccacggagcaggtagttgcaacccagcaaccagtctgtcgtaatgcgcaagtctgtggcggaaccgactactttgggtgaccgtgtttccttttattttcatatatggctgcttatggtgacaatcattgattgttatcatatagcgacttggattggccatccggtgagaattagaactactgtttacccgtttgctgatttttgataacactccacacacttaccatttgagaattgtactgttggcaagacagcaccattata

SEQ ID NO: 22505 - DNA, 642 bp, synthetic construct
  source 1..642: mol_type = other DNA
cgtaacttagaagcaaaccaaacaagttcaataggagggggtgcaagcccgcaccaccacgaacaagtactcctgtctccccggtgaggttgtatagactgtacccacggttgaaaacgactgatccgttatccgctctagtacttcgggaagcctagtagcattttggaatcttcgatgcgttgcgctcagcactcaaccccggagtgtagcttaggtcgatgagtctggacatcccccaccggtgacggtggtccaggctgcgttggcggcctacctgtggtccaaagccacaggacgctagttgtgaacaaggtgtgaagagcctactgagctactagagagtcctccggcccctgaatgcggctaatcctaaccacggagcaggtagttgcaacccagcaaccagtctgtcgtaatgcgcaagtctgtggcggaaccgactactttgggtgaccgtgtttccttttattttcatatatggctgcttatggtgacaatcattgattgttatcatatagcgacttggattggccatccggtgagaattagaactactgtttacccgtttgctgatttttgataacactccacacacttaccatttgagaattgtactgttggcaagacagcaccattata

SEQ ID NO: 22506 - DNA, 592 bp, synthetic construct
  source 1..592: mol_type = other DNA
gcaccaccacgaacaagtactcctgtctccccggtgaggttgtatagactgtacccacggttgaaaacgactgatccgttatccgctctagtacttcgggaagcctagtagcattttggaatcttcgatgcgttgcgctcagcactcaaccccggagtgtagcttaggtcgatgagtctggacatcccccaccggtgacggtggtccaggctgcgttggcggcctacctgtggtccaaagccacaggacgctagttgtgaacaaggtgtgaagagcctactgagctactagagagtcctccggcccctgaatgcggctaatcctaaccacggagcaggtagttgcaacccagcaaccagtctgtcgtaatgcgcaagtctgtggcggaaccgactactttgggtgaccgtgtttccttttattttcatatatggctgcttatggtgacaatcattgattgttatcatatagcgacttggattggccatccggtgagaattagaactactgtttacccgtttgctgatttttgataacactccacacacttaccatttgagaattgtactgttggcaagacagcaccattata

SEQ ID NO: 22507 - DNA, 542 bp, synthetic construct
  source 1..542: mol_type = other DNA
gtacccacggttgaaaacgactgatccgttatccgctctagtacttcgggaagcctagtagcattttggaatcttcgatgcgttgcgctcagcactcaaccccggagtgtagcttaggtcgatgagtctggacatcccccaccggtgacggtggtccaggctgcgttggcggcctacctgtggtccaaagccacaggacgctagttgtgaacaaggtgtgaagagcctactgagctactagagagtcctccggcccctgaatgcggctaatcctaaccacggagcaggtagttgcaacccagcaaccagtctgtcgtaatgcgcaagtctgtggcggaaccgactactttgggtgaccgtgtttccttttattttcatatatggctgcttatggtgacaatcattgattgttatcatatagcgacttggattggccatccggtgagaattagaactactgtttacccgtttgctgatttttgataacactccacacacttaccatttgagaattgtactgttggcaagacagcaccattata

SEQ ID NO: 22508 - DNA, 692 bp, synthetic construct
  source 1..692: mol_type = other DNA
cacactggtatcacggtacccttgtgcgcctgttttatccacccctccccatcgtaacctagaagcatgactccaacggtcaatagacagctcagtaaaccaattgagccttgaccaagcacttctgttaccccggactgagtatcaataggctgctcacgcggccgaaggagaaaatgttcgttacccggccaattacttcgagaaacctagtaccaccatgaaggttgcgcggtgtttcgctcagcacaaccccagtgtagatcaggccgatgagtcaccgcattccccacgggtgaccgtggcggtggctgcgctggcggcctgcccatggggcaacccatgggacgcttcaatactgacatggtgtgaagagtctattgagctaattggtagtcctccggcccctgaatgcggctaatcctaactgcggagcagatacccacgcaccagtgggcagtctgtcgtaacgggcaactctgcagcggaaccgactactttgggtgtccgtgtttccttttattcttgtactggctgcttatggtgacaattgagagattgttaccatatagctattggattggccatccagtgtcaaacagagcgattgtctacttgttcattggttttataccattgagttacaaggttctagccactcttaacttcattttaacactcaatacatcaaa

SEQ ID NO: 22509 - DNA, 642 bp, synthetic construct
  source 1..642: mol_type = other DNA
atcgtaacctagaagcatgactccaacggtcaatagacagctcagtaaaccaattgagccttgaccaagcacttctgttaccccggactgagtatcaataggctgctcacgcggccgaaggagaaaatgttcgttacccggccaattacttcgagaaacctagtaccaccatgaaggttgcgcggtgtttcgctcagcacaaccccagtgtagatcaggccgatgagtcaccgcattccccacgggtgaccgtggcggtggctgcgctggcggcctgcccatggggcaacccatgggacgcttcaatactgacatggtgtgaagagtctattgagctaattggtagtcctccggcccctgaatgcggctaatcctaactgcggagcagatacccacgcaccagtgggcagtctgtcgtaacgggcaactctgcagcggaaccgactactttgggtgtccgtgtttccttttattcttgtactggctgcttatggtgacaattgagagattgttaccatatagctattggattggccatccagtgtcaaacagagcgattgtctacttgttcattggttttataccattgagttacaaggttctagccactcttaacttcattttaacactcaatacatcaaa

SEQ ID NO: 22510 - DNA, 592 bp, synthetic construct
  source 1..592: mol_type = other DNA
caattgagccttgaccaagcacttctgttaccccggactgagtatcaataggctgctcacgcggccgaaggagaaaatgttcgttacccggccaattacttcgagaaacctagtaccaccatgaaggttgcgcggtgtttcgctcagcacaaccccagtgtagatcaggccgatgagtcaccgcattccccacgggtgaccgtggcggtggctgcgctggcggcctgcccatggggcaacccatgggacgcttcaatactgacatggtgtgaagagtctattgagctaattggtagtcctccggcccctgaatgcggctaatcctaactgcggagcagatacccacgcaccagtgggcagtctgtcgtaacgggcaactctgcagcggaaccgactactttgggtgtccgtgtttccttttattcttgtactggctgcttatggtgacaattgagagattgttaccatatagctattggattggccatccagtgtcaaacagagcgattgtctacttgttcattggttttataccattgagttacaaggttctagccactcttaacttcattttaacactcaatacatcaaa

SEQ ID NO: 22511 - DNA, 542 bp, synthetic construct
  source 1..542: mol_type = other DNA
ggctgctcacgcggccgaaggagaaaatgttcgttacccggccaattacttcgagaaacctagtaccaccatgaaggttgcgcggtgtttcgctcagcacaaccccagtgtagatcaggccgatgagtcaccgcattccccacgggtgaccgtggcggtggctgcgctggcggcctgcccatggggcaacccatgggacgcttcaatactgacatggtgtgaagagtctattgagctaattggtagtcctccggcccctgaatgcggctaatcctaactgcggagcagatacccacgcaccagtgggcagtctgtcgtaacgggcaactctgcagcggaaccgactactttgggtgtccgtgtttccttttattcttgtactggctgcttatggtgacaattgagagattgttaccatatagctattggattggccatccagtgtcaaacagagcgattgtctacttgttcattggttttataccattgagttacaaggttctagccactcttaacttcattttaacactcaatacatcaaa

SEQ ID NO: 22512 - DNA, 692 bp, synthetic construct
  source 1..692: mol_type = other DNA
cacactggtattgcggtacctttgtgcgcctgttttatccacccttccccaatgaaacttagaagcttgactcaaacggtcaatagacagcccagtgcaccaactgggtctcgaccaggcactcctgtttccccggactgagtatcaataggctgcttgcgcggctgaaggagaaaacgttcgttacccggccaattacttcgagaaacctagtaccaccatggacgttgcgcagtgtttcgctccacacaaccccggtgtagatcaggtcgatgagtcaccgcaatccccacgggcgaccgtggcggtggctgcgctggcggcctgcccatggggcaacccatgggacgcttcaatactgacatggtgcgaagagtctattgagctaattggtagtcctccggcccctgaatgcggctaatcctaactgcggagcagatacccacataccagtgggcagtctgtcgtaacgggcaactctgcagcggaaccgactactttgggtgtccgtgtttccttttattcttatattggctgcttatggtgacaattgaaaggttgttaccatatagcttttggattggccatccagtgagcaacagagcgatcatactcctttttgttgggtttgtaccacttgattatagtagttacaacaccttgctatacgtcattcatttaaacacgagaaa

SEQ ID NO: 22513 - DNA, 642 bp, synthetic construct
  source 1..642: mol_type = other DNA
aatgaaacttagaagcttgactcaaacggtcaatagacagcccagtgcaccaactgggtctcgaccaggcactcctgtttccccggactgagtatcaataggctgcttgcgcggctgaaggagaaaacgttcgttacccggccaattacttcgagaaacctagtaccaccatggacgttgcgcagtgtttcgctccacacaaccccggtgtagatcaggtcgatgagtcaccgcaatccccacgggcgaccgtggcggtggctgcgctggcggcctgcccatggggcaacccatgggacgcttcaatactgacatggtgcgaagagtctattgagctaattggtagtcctccggcccctgaatgcggctaatcctaactgcggagcagatacccacataccagtgggcagtctgtcgtaacgggcaactctgcagcggaaccgactactttgggtgtccgtgtttccttttattcttatattggctgcttatggtgacaattgaaaggttgttaccatatagcttttggattggccatccagtgagcaacagagcgatcatactcctttttgttgggtttgtaccacttgattatagtagttacaacaccttgctatacgtcattcatttaaacacgagaaa

SEQ ID NO: 22514 - DNA, 592 bp, synthetic construct
  source 1..592: mol_type = other DNA
caactgggtctcgaccaggcactcctgtttccccggactgagtatcaataggctgcttgcgcggctgaaggagaaaacgttcgttacccggccaattacttcgagaaacctagtaccaccatggacgttgcgcagtgtttcgctccacacaaccccggtgtagatcaggtcgatgagtcaccgcaatccccacgggcgaccgtggcggtggctgcgctggcggcctgcccatggggcaacccatgggacgcttcaatactgacatggtgcgaagagtctattgagctaattggtagtcctccggcccctgaatgcggctaatcctaactgcggagcagatacccacataccagtgggcagtctgtcgtaacgggcaactctgcagcggaaccgactactttgggtgtccgtgtttccttttattcttatattggctgcttatggtgacaattgaaaggttgttaccatatagcttttggattggccatccagtgagcaacagagcgatcatactcctttttgttgggtttgtaccacttgattatagtagttacaacaccttgctatacgtcattcatttaaacacgagaaa

SEQ ID NO: 22515 - DNA, 542 bp, synthetic construct
  source 1..542: mol_type = other DNA
ggctgcttgcgcggctgaaggagaaaacgttcgttacccggccaattacttcgagaaacctagtaccaccatggacgttgcgcagtgtttcgctccacacaaccccggtgtagatcaggtcgatgagtcaccgcaatccccacgggcgaccgtggcggtggctgcgctggcggcctgcccatggggcaacccatgggacgcttcaatactgacatggtgcgaagagtctattgagctaattggtagtcctccggcccctgaatgcggctaatcctaactgcggagcagatacccacataccagtgggcagtctgtcgtaacgggcaactctgcagcggaaccgactactttgggtgtccgtgtttccttttattcttatattggctgcttatggtgacaattgaaaggttgttaccatatagcttttggattggccatccagtgagcaacagagcgatcatactcctttttgttgggtttgtaccacttgattatagtagttacaacaccttgctatacgtcattcatttaaacacgagaaa

SEQ ID NO: 22516 - DNA, 692 bp, synthetic construct
  source 1..692: mol_type = other DNA
cactctggtattacggtacctttgtgcgcctgttttatatccccctccccacttgaaacttagaagtgaaacacactgatcaatagttgacatggcaagccagccatgtcttgatcaagcacctctgtttccccggacctagtatcaatagactgctcgcgcggttgaaagagaaagcgttcgttacccggctaactacttcgagaaacttagtaacaccatggaagttgcggagtgtttcgctcagcacatccccagtgtagatcaggccgatgagtcaccgcattccccacgggcgaccgtggcggtggctgcgttggcggcctgcctgtggggcaacccacaggacgctctaatacaaacatggtgcgaagagtctattgagctagttagtagtcctccggcccctgaatgcggctaatcctaactgcggagcacgtgcttccaatccaggaggtggcgtgtcgtaacgggtaactctgcagcggaaccgactactttgggtgtccgtgtttccttttattcttgcattggctgcttatggtgacaattgagagattgttaccatatagctattggattggccatccggtgacaaacagagcaattatatatctctttgttggatacattccattgaactacaaggagttaaaaaccctcaattatattctgttcttgaattccgcaag

SEQ ID NO: 22517 - DNA, 642 bp, synthetic construct
  source 1..642: mol_type = other DNA
acttgaaacttagaagtgaaacacactgatcaatagttgacatggcaagccagccatgtcttgatcaagcacctctgtttccccggacctagtatcaatagactgctcgcgcggttgaaagagaaagcgttcgttacccggctaactacttcgagaaacttagtaacaccatggaagttgcggagtgtttcgctcagcacatccccagtgtagatcaggccgatgagtcaccgcattccccacgggcgaccgtggcggtggctgcgttggcggcctgcctgtggggcaacccacaggacgctctaatacaaacatggtgcgaagagtctattgagctagttagtagtcctccggcccctgaatgcggctaatcctaactgcggagcacgtgcttccaatccaggaggtggcgtgtcgtaacgggtaactctgcagcggaaccgactactttgggtgtccgtgtttccttttattcttgcattggctgcttatggtgacaattgagagattgttaccatatagctattggattggccatccggtgacaaacagagcaattatatatctctttgttggatacattccattgaactacaaggagttaaaaaccctcaattatattctgttcttgaattccgcaag

SEQ ID NO: 22518 - DNA, 592 bp, synthetic construct
  source 1..592: mol_type = other DNA
cagccatgtcttgatcaagcacctctgtttccccggacctagtatcaatagactgctcgcgcggttgaaagagaaagcgttcgttacccggctaactacttcgagaaacttagtaacaccatggaagttgcggagtgtttcgctcagcacatccccagtgtagatcaggccgatgagtcaccgcattccccacgggcgaccgtggcggtggctgcgttggcggcctgcctgtggggcaacccacaggacgctctaatacaaacatggtgcgaagagtctattgagctagttagtagtcctccggcccctgaatgcggctaatcctaactgcggagcacgtgcttccaatccaggaggtggcgtgtcgtaacgggtaactctgcagcggaaccgactactttgggtgtccgtgtttccttttattcttgcattggctgcttatggtgacaattgagagattgttaccatatagctattggattggccatccggtgacaaacagagcaattatatatctctttgttggatacattccattgaactacaaggagttaaaaaccctcaattatattctgttcttgaattccgcaag

SEQ ID NO: 22519 - DNA, 542 bp, synthetic construct
  source 1..542: mol_type = other DNA
gactgctcgcgcggttgaaagagaaagcgttcgttacccggctaactacttcgagaaacttagtaacaccatggaagttgcggagtgtttcgctcagcacatccccagtgtagatcaggccgatgagtcaccgcattccccacgggcgaccgtggcggtggctgcgttggcggcctgcctgtggggcaacccacaggacgctctaatacaaacatggtgcgaagagtctattgagctagttagtagtcctccggcccctgaatgcggctaatcctaactgcggagcacgtgcttccaatccaggaggtggcgtgtcgtaacgggtaactctgcagcggaaccgactactttgggtgtccgtgtttccttttattcttgcattggctgcttatggtgacaattgagagattgttaccatatagctattggattggccatccggtgacaaacagagcaattatatatctctttgttggatacattccattgaactacaaggagttaaaaaccctcaattatattctgttcttgaattccgcaag

SEQ ID NO: 22520 - DNA, 692 bp, synthetic construct
  source 1..692: mol_type = other DNA
cacactggtattacggtacctttgtgcgcctgttttacatcccctctcccattataacttagaagcacatacaaaacgaccaataggtggtccagcactccagctgggctctggtcaagtacttctgttaccccggactaagtatcaataagcggctaacgcggctgaaggagaaagcgtccgttacccggccaactacttcgggaaatctagtaacaccatgaaggttgcgcagtgtttcgctccgcacaaacccagtgtagatcaggtcgatgagtcaccgcattccccacaggcgactgtggcggtggctgcgttggcggcctgcccatggggcaacccatgggacgcttcaatactgacatggtgcgaagaatctactgagctagttggtagtcctccggcccctgaatgcggctaatcctaactgcggagcacatacccctaacccaaggggcagtgtgtcgtaacgggcaactctgcagcggaaccgactactttgggtgtccgtgtttccttttattcttatactggctgcttatggtgacaattgagaaattgttaccatatagcttttggattggccatccagtgactaacagagctattatttacttgtttgttggctttgtaccactcaaccttagagttttaaggactctcaatttggttctgctatcgaatacaacaaa

SEQ ID NO: 22521 - DNA, 642 bp, synthetic construct
  source 1..642: mol_type = other DNA
attataacttagaagcacatacaaaacgaccaataggtggtccagcactccagctgggctctggtcaagtacttctgttaccccggactaagtatcaataagcggctaacgcggctgaaggagaaagcgtccgttacccggccaactacttcgggaaatctagtaacaccatgaaggttgcgcagtgtttcgctccgcacaaacccagtgtagatcaggtcgatgagtcaccgcattccccacaggcgactgtggcggtggctgcgttggcggcctgcccatggggcaacccatgggacgcttcaatactgacatggtgcgaagaatctactgagctagttggtagtcctccggcccctgaatgcggctaatcctaactgcggagcacatacccctaacccaaggggcagtgtgtcgtaacgggcaactctgcagcggaaccgactactttgggtgtccgtgtttccttttattcttatactggctgcttatggtgacaattgagaaattgttaccatatagcttttggattggccatccagtgactaacagagctattatttacttgtttgttggctttgtaccactcaaccttagagttttaaggactctcaatttggttctgctatcgaatacaacaaa

SEQ ID NO: 22522 - DNA, 592 bp, synthetic construct
  source 1..592: mol_type = other DNA
cagctgggctctggtcaagtacttctgttaccccggactaagtatcaataagcggctaacgcggctgaaggagaaagcgtccgttacccggccaactacttcgggaaatctagtaacaccatgaaggttgcgcagtgtttcgctccgcacaaacccagtgtagatcaggtcgatgagtcaccgcattccccacaggcgactgtggcggtggctgcgttggcggcctgcccatggggcaacccatgggacgcttcaatactgacatggtgcgaagaatctactgagctagttggtagtcctccggcccctgaatgcggctaatcctaactgcggagcacatacccctaacccaaggggcagtgtgtcgtaacgggcaactctgcagcggaaccgactactttgggtgtccgtgtttccttttattcttatactggctgcttatggtgacaattgagaaattgttaccatatagcttttggattggccatccagtgactaacagagctattatttacttgtttgttggctttgtaccactcaaccttagagttttaaggactctcaatttggttctgctatcgaatacaacaaa

SEQ ID NO: 22523 - DNA, 542 bp, synthetic construct
  source 1..542: mol_type = other DNA
agcggctaacgcggctgaaggagaaagcgtccgttacccggccaactacttcgggaaatctagtaacaccatgaaggttgcgcagtgtttcgctccgcacaaacccagtgtagatcaggtcgatgagtcaccgcattccccacaggcgactgtggcggtggctgcgttggcggcctgcccatggggcaacccatgggacgcttcaatactgacatggtgcgaagaatctactgagctagttggtagtcctccggcccctgaatgcggctaatcctaactgcggagcacatacccctaacccaaggggcagtgtgtcgtaacgggcaactctgcagcggaaccgactactttgggtgtccgtgtttccttttattcttatactggctgcttatggtgacaattgagaaattgttaccatatagcttttggattggccatccagtgactaacagagctattatttacttgtttgttggctttgtaccactcaaccttagagttttaaggactctcaatttggttctgctatcgaatacaacaaa

SEQ ID NO: 22524 - DNA, 692 bp, synthetic construct
  source 1..692: mol_type = other DNA
cacactggtatcacggtacctttgtgcgcctgttttatatccccctccccactgtaacttagagaaatcacataaacgatcaatagaaggcgcagcacaccagctgagtcttgaccaagcacttctgtttccccggactgagtatcaatagactgctcacgcggttgaaggagaaaacgttcgttacccggccaactacttcgagaaacctagtaccaccatgaaagttgcgcagtgtttcgctcagcacaaccccagtgtagatcaggtcgatgagtcaccgcattccccacgggcgaccgtggcggtggctgcgttggcggcctgcctatggggcaacccatgggacgcttcaatactgacatggtgcgaagagtctattgagctagttggtagtcctccggcccctgaatgcggctaatcctaactgcggagcaagtgcccacaaaccagtgggtagcttgtcgtaacgggcaactctgcagcggaaccgactactttgggtgtccgtgtttccttttattcttattctggctgcttatggtgacaattgagagattgttaccatatagctattggattggccatccggtgactaacagagcaatcatattcctctttgttggatttataccacttgattccactagttacaacactctgctacacattatttacttaaaaccaagaag

SEQ ID NO: 22525 - DNA, 642 bp, synthetic construct
  source 1..642: mol_type = other DNA
actgtaacttagagaaatcacataaacgatcaatagaaggcgcagcacaccagctgagtcttgaccaagcacttctgtttccccggactgagtatcaatagactgctcacgcggttgaaggagaaaacgttcgttacccggccaactacttcgagaaacctagtaccaccatgaaagttgcgcagtgtttcgctcagcacaaccccagtgtagatcaggtcgatgagtcaccgcattccccacgggcgaccgtggcggtggctgcgttggcggcctgcctatggggcaacccatgggacgcttcaatactgacatggtgcgaagagtctattgagctagttggtagtcctccggcccctgaatgcggctaatcctaactgcggagcaagtgcccacaaaccagtgggtagcttgtcgtaacgggcaactctgcagcggaaccgactactttgggtgtccgtgtttccttttattcttattctggctgcttatggtgacaattgagagattgttaccatatagctattggattggccatccggtgactaacagagcaatcatattcctctttgttggatttataccacttgattccactagttacaacactctgctacacattatttacttaaaaccaagaag

SEQ ID NO: 22526 - DNA, 592 bp, synthetic construct
  source 1..592: mol_type = other DNA
cagctgagtcttgaccaagcacttctgtttccccggactgagtatcaatagactgctcacgcggttgaaggagaaaacgttcgttacccggccaactacttcgagaaacctagtaccaccatgaaagttgcgcagtgtttcgctcagcacaaccccagtgtagatcaggtcgatgagtcaccgcattccccacgggcgaccgtggcggtggctgcgttggcggcctgcctatggggcaacccatgggacgcttcaatactgacatggtgcgaagagtctattgagctagttggtagtcctccggcccctgaatgcggctaatcctaactgcggagcaagtgcccacaaaccagtgggtagcttgtcgtaacgggcaactctgcagcggaaccgactactttgggtgtccgtgtttccttttattcttattctggctgcttatggtgacaattgagagattgttaccatatagctattggattggccatccggtgactaacagagcaatcatattcctctttgttggatttataccacttgattccactagttacaacactctgctacacattatttacttaaaaccaagaag

SEQ ID NO: 22527 - DNA, 542 bp, synthetic construct
  source 1..542: mol_type = other DNA
gactgctcacgcggttgaaggagaaaacgttcgttacccggccaactacttcgagaaacctagtaccaccatgaaagttgcgcagtgtttcgctcagcacaaccccagtgtagatcaggtcgatgagtcaccgcattccccacgggcgaccgtggcggtggctgcgttggcggcctgcctatggggcaacccatgggacgcttcaatactgacatggtgcgaagagtctattgagctagttggtagtcctccggcccctgaatgcggctaatcctaactgcggagcaagtgcccacaaaccagtgggtagcttgtcgtaacgggcaactctgcagcggaaccgactactttgggtgtccgtgtttccttttattcttattctggctgcttatggtgacaattgagagattgttaccatatagctattggattggccatccggtgactaacagagcaatcatattcctctttgttggatttataccacttgattccactagttacaacactctgctacacattatttacttaaaaccaagaag

SEQ ID NO: 22528 - DNA, 692 bp, synthetic construct
  source 1..692: mol_type = other DNA
tacactggtattaaggtacccttgtacgcctgttttatatccctcccccgatttgtaacttagaattaaagcaaacccgatcaatagtaggtgtggcaaaccagccacatcttgatcaagcacttctgtttccccggaccgagtatcaatagactgctgacgcggttgaaggagaaaacgttcgttacccggccaactacttcgggaaacctagtaccaccatgaaggttgcgcagtgtttcgctccgcacaaccccagtgtagatcaggtcgatgagccaccgcattccccacaggcgactgtggcggtggctgcgttggcggcctgcccatggggtaacccatgggacgcttcaatactgacatggtgcgaagagtccactgagctagttggtattcctccggcccctgaatgcggctaatcctaactgcggagcaggcacccacgagccagtgggcagcctgtcgtaatgggtaactctgcagcggaaccgactactttgggtgtccgtgtttccattttctttttattggctgcttatggtgacaatcacggaattgttaccatatagctattggattggccatccagtgactaacagagcagtaatattcctttttgttggttttgtaccactcaccgtcacgagcctcagaacactcgtattcatcttaacccttaacaagataaa

SEQ ID NO: 22529 - DNA, 642 bp, synthetic construct
  source 1..642: mol_type = other DNA
atttgtaacttagaattaaagcaaacccgatcaatagtaggtgtggcaaaccagccacatcttgatcaagcacttctgtttccccggaccgagtatcaatagactgctgacgcggttgaaggagaaaacgttcgttacccggccaactacttcgggaaacctagtaccaccatgaaggttgcgcagtgtttcgctccgcacaaccccagtgtagatcaggtcgatgagccaccgcattccccacaggcgactgtggcggtggctgcgttggcggcctgcccatggggtaacccatgggacgcttcaatactgacatggtgcgaagagtccactgagctagttggtattcctccggcccctgaatgcggctaatcctaactgcggagcaggcacccacgagccagtgggcagcctgtcgtaatgggtaactctgcagcggaaccgactactttgggtgtccgtgtttccattttctttttattggctgcttatggtgacaatcacggaattgttaccatatagctattggattggccatccagtgactaacagagcagtaatattcctttttgttggttttgtaccactcaccgtcacgagcctcagaacactcgtattcatcttaacccttaacaagataaa

SEQ ID NO: 22530 - DNA, 592 bp, synthetic construct
  source 1..592: mol_type = other DNA
ccagccacatcttgatcaagcacttctgtttccccggaccgagtatcaatagactgctgacgcggttgaaggagaaaacgttcgttacccggccaactacttcgggaaacctagtaccaccatgaaggttgcgcagtgtttcgctccgcacaaccccagtgtagatcaggtcgatgagccaccgcattccccacaggcgactgtggcggtggctgcgttggcggcctgcccatggggtaacccatgggacgcttcaatactgacatggtgcgaagagtccactgagctagttggtattcctccggcccctgaatgcggctaatcctaactgcggagcaggcacccacgagccagtgggcagcctgtcgtaatgggtaactctgcagcggaaccgactactttgggtgtccgtgtttccattttctttttattggctgcttatggtgacaatcacggaattgttaccatatagctattggattggccatccagtgactaacagagcagtaatattcctttttgttggttttgtaccactcaccgtcacgagcctcagaacactcgtattcatcttaacccttaacaagataaa

SEQ ID NO: 22531 - DNA, 542 bp, synthetic construct
  source 1..542: mol_type = other DNA
agactgctgacgcggttgaaggagaaaacgttcgttacccggccaactacttcgggaaacctagtaccaccatgaaggttgcgcagtgtttcgctccgcacaaccccagtgtagatcaggtcgatgagccaccgcattccccacaggcgactgtggcggtggctgcgttggcggcctgcccatggggtaacccatgggacgcttcaatactgacatggtgcgaagagtccactgagctagttggtattcctccggcccctgaatgcggctaatcctaactgcggagcaggcacccacgagccagtgggcagcctgtcgtaatgggtaactctgcagcggaaccgactactttgggtgtccgtgtttccattttctttttattggctgcttatggtgacaatcacggaattgttaccatatagctattggattggccatccagtgactaacagagcagtaatattcctttttgttggttttgtaccactcaccgtcacgagcctcagaacactcgtattcatcttaacccttaacaagataaa

SEQ ID NO: 22532 - DNA, 692 bp, synthetic construct
  source 1..692: mol_type = other DNA
cactccggtattacggtacccttgtgcgcctgttttatttccccttccccaactgaaacttagaagaaatacacaatgatcgacagtaagcgtggcgcaccagccatgttttgatcaagcacttctgtttccccggaccaagtatcaatagactgctcacgcggttgaaggagaaagcgttcgttaaccggctaactacttcgagaaacccagtaacaccatgaaagttgcagagtgtttcgctcagcactcccccagtgtggatcaggtcgatgagtcactgcgttccccacgggtgaccgtggcagtggctgcgttggcggcctgcctgtggggcaacccacaggacgctctaatacggacatggtgtgaagagtctattgagctagttagtagtcctccggcccctgaatgcggctaatcctaactgtggagcacatgcccctaacccaaggggtggtgtgtcgtaatgggtaactccgcagcggaaccgactactttgggtgaccgtgtttccttttatttttacattggctgcatatggtgacgattgagagattgttgccatatagctattggattggccatccagtgtctaacagagctattgtatatctttttgttggatttgtaccacttgacttgaaagaggtcaggacactacaatacattatactgctgaatactgcaaa

SEQ ID NO: 22533 - DNA, 642 bp, synthetic construct
  source 1..642: mol_type = other DNA
aactgaaacttagaagaaatacacaatgatcgacagtaagcgtggcgcaccagccatgttttgatcaagcacttctgtttccccggaccaagtatcaatagactgctcacgcggttgaaggagaaagcgttcgttaaccggctaactacttcgagaaacccagtaacaccatgaaagttgcagagtgtttcgctcagcactcccccagtgtggatcaggtcgatgagtcactgcgttccccacgggtgaccgtggcagtggctgcgttggcggcctgcctgtggggcaacccacaggacgctctaatacggacatggtgtgaagagtctattgagctagttagtagtcctccggcccctgaatgcggctaatcctaactgtggagcacatgcccctaacccaaggggtggtgtgtcgtaatgggtaactccgcagcggaaccgactactttgggtgaccgtgtttccttttatttttacattggctgcatatggtgacgattgagagattgttgccatatagctattggattggccatccagtgtctaacagagctattgtatatctttttgttggatttgtaccacttgacttgaaagaggtcaggacactacaatacattatactgctgaatactgcaaa

SEQ ID NO: 22534 - DNA, 592 bp, synthetic construct
  source 1..592: mol_type = other DNA
cagccatgttttgatcaagcacttctgtttccccggaccaagtatcaatagactgctcacgcggttgaaggagaaagcgttcgttaaccggctaactacttcgagaaacccagtaacaccatgaaagttgcagagtgtttcgctcagcactcccccagtgtggatcaggtcgatgagtcactgcgttccccacgggtgaccgtggcagtggctgcgttggcggcctgcctgtggggcaacccacaggacgctctaatacggacatggtgtgaagagtctattgagctagttagtagtcctccggcccctgaatgcggctaatcctaactgtggagcacatgcccctaacccaaggggtggtgtgtcgtaatgggtaactccgcagcggaaccgactactttgggtgaccgtgtttccttttatttttacattggctgcatatggtgacgattgagagattgttgccatatagctattggattggccatccagtgtctaacagagctattgtatatctttttgttggatttgtaccacttgacttgaaagaggtcaggacactacaatacattatactgctgaatactgcaaa

SEQ ID NO: 22535 - DNA, 542 bp, synthetic construct
  source 1..542: mol_type = other DNA
gactgctcacgcggttgaaggagaaagcgttcgttaaccggctaactacttcgagaaacccagtaacaccatgaaagttgcagagtgtttcgctcagcactcccccagtgtggatcaggtcgatgagtcactgcgttccccacgggtgaccgtggcagtggctgcgttggcggcctgcctgtggggcaacccacaggacgctctaatacggacatggtgtgaagagtctattgagctagttagtagtcctccggcccctgaatgcggctaatcctaactgtggagcacatgcccctaacccaaggggtggtgtgtcgtaatgggtaactccgcagcggaaccgactactttgggtgaccgtgtttccttttatttttacattggctgcatatggtgacgattgagagattgttgccatatagctattggattggccatccagtgtctaacagagctattgtatatctttttgttggatttgtaccacttgacttgaaagaggtcaggacactacaatacattatactgctgaatactgcaaa

SEQ ID NO: 22536 - DNA, 692 bp, synthetic construct
  source 1..692: mol_type = other DNA
cactctggtatcacggtacctttgtgcgcctgttttattaccccttccccaattgaaaattagaagcaatgcacaccgatcaacagcaggcgtggcgcaccagtcacgtctcgatcaagcacttctgtttccccggaccgagtatcaatagactgctcacgcggttgaaggagaaagtgttcgttatccggctaaccacttcgagaaacccagtaacaccatgaaagttgcagggtgtttcgctcagcacttccccagtgtagatcaggtcgatgagtcaccgcgttccccacgggcgaccgtggcggtggctgcgttggcggcctgcctatgggttaacccataggacgctctaatacagacatggtgcgaagagtttattgagctggttagtatccctccggcccctgaatgcggctaatcctaactgcggagcacgtgcctccaatccagggggttgcatgtcgtaacgggtaactctgcagcggaaccgactactttgggtgtccgtgtttccttttattcttatactggctgcttatggtgacaatcgaggaattgttaccatatagctattggattggccatccggtgtctaacagagcgattatatacctctttgttggatttatgcagctcaataccaccaactttaacacattgaaatatatcttaaagttaaacacagcaaa

SEQ ID NO: 22537 - DNA, 642 bp, synthetic construct
  source 1..642: mol_type = other DNA
aattgaaaattagaagcaatgcacaccgatcaacagcaggcgtggcgcaccagtcacgtctcgatcaagcacttctgtttccccggaccgagtatcaatagactgctcacgcggttgaaggagaaagtgttcgttatccggctaaccacttcgagaaacccagtaacaccatgaaagttgcagggtgtttcgctcagcacttccccagtgtagatcaggtcgatgagtcaccgcgttccccacgggcgaccgtggcggtggctgcgttggcggcctgcctatgggttaacccataggacgctctaatacagacatggtgcgaagagtttattgagctggttagtatccctccggcccctgaatgcggctaatcctaactgcggagcacgtgcctccaatccagggggttgcatgtcgtaacgggtaactctgcagcggaaccgactactttgggtgtccgtgtttccttttattcttatactggctgcttatggtgacaatcgaggaattgttaccatatagctattggattggccatccggtgtctaacagagcgattatatacctctttgttggatttatgcagctcaataccaccaactttaacacattgaaatatatcttaaagttaaacacagcaaa

SEQ ID NO: 22538 - DNA, 592 bp, synthetic construct
  source 1..592: mol_type = other DNA
cagtcacgtctcgatcaagcacttctgtttccccggaccgagtatcaatagactgctcacgcggttgaaggagaaagtgttcgttatccggctaaccacttcgagaaacccagtaacaccatgaaagttgcagggtgtttcgctcagcacttccccagtgtagatcaggtcgatgagtcaccgcgttccccacgggcgaccgtggcggtggctgcgttggcggcctgcctatgggttaacccataggacgctctaatacagacatggtgcgaagagtttattgagctggttagtatccctccggcccctgaatgcggctaatcctaactgcggagcacgtgcctccaatccagggggttgcatgtcgtaacgggtaactctgcagcggaaccgactactttgggtgtccgtgtttccttttattcttatactggctgcttatggtgacaatcgaggaattgttaccatatagctattggattggccatccggtgtctaacagagcgattatatacctctttgttggatttatgcagctcaataccaccaactttaacacattgaaatatatcttaaagttaaacacagcaaa

SEQ ID NO: 22539 - DNA, 542 bp, synthetic construct
  source 1..542: mol_type = other DNA
gactgctcacgcggttgaaggagaaagtgttcgttatccggctaaccacttcgagaaacccagtaacaccatgaaagttgcagggtgtttcgctcagcacttccccagtgtagatcaggtcgatgagtcaccgcgttccccacgggcgaccgtggcggtggctgcgttggcggcctgcctatgggttaacccataggacgctctaatacagacatggtgcgaagagtttattgagctggttagtatccctccggcccctgaatgcggctaatcctaactgcggagcacgtgcctccaatccagggggttgcatgtcgtaacgggtaactctgcagcggaaccgactactttgggtgtccgtgtttccttttattcttatactggctgcttatggtgacaatcgaggaattgttaccatatagctattggattggccatccggtgtctaacagagcgattatatacctctttgttggatttatgcagctcaataccaccaactttaacacattgaaatatatcttaaagttaaacacagcaaa

SEQ ID NO: 22540 - DNA, 692 bp, synthetic construct
  source 1..692: mol_type = other DNA
cactctggtatcacggtacctttgtgcgcctgttttataccccctcccccaactgtaacttagaagtaacacacaccgatcaacagtcagcgtggcacaccagccacgttttgatcaagcacttctgttaccccggactgagtatcaatagactgctcacgcggttgaaggagaaagcgttcgttatccggccaactacttcgaaaaacctagtaacaccgtggaagttgcagagtgtttcgctcagcactaccccagtgtagatcaggtcgatgagtcaccgcattccccacgggcgaccgtggcggtggctgcgttggcggcctgcccatggggaaacccatgggacgctctaatacagacatggtgcgaagagtctattgagctagttggtagtcctccggcccctgaatgcggctaatcctaactgcggagcacacaccctcaagccagagggcagtgtgtcgtaacgggcaactctgcagcggaaccgactactttgggtgtccgtgtttcattttattcctatactggctgcttatggtgacaattgagagattgttaccatatagctattggattggccatccggtgaccaatagagctattatatatctctttgttgggtttataccacttagcttgaaagaggttaaaacattacaattcattgttaagttgaatacagcaaa

SEQ ID NO: 22541 - DNA, 642 bp, synthetic construct
  source 1..642: mol_type = other DNA
aactgtaacttagaagtaacacacaccgatcaacagtcagcgtggcacaccagccacgttttgatcaagcacttctgttaccccggactgagtatcaatagactgctcacgcggttgaaggagaaagcgttcgttatccggccaactacttcgaaaaacctagtaacaccgtggaagttgcagagtgtttcgctcagcactaccccagtgtagatcaggtcgatgagtcaccgcattccccacgggcgaccgtggcggtggctgcgttggcggcctgcccatggggaaacccatgggacgctctaatacagacatggtgcgaagagtctattgagctagttggtagtcctccggcccctgaatgcggctaatcctaactgcggagcacacaccctcaagccagagggcagtgtgtcgtaacgggcaactctgcagcggaaccgactactttgggtgtccgtgtttcattttattcctatactggctgcttatggtgacaattgagagattgttaccatatagctattggattggccatccggtgaccaatagagctattatatatctctttgttgggtttataccacttagcttgaaagaggttaaaacattacaattcattgttaagttgaatacagcaaa

SEQ ID NO: 22542 - DNA, 592 bp, synthetic construct
  source 1..592: mol_type = other DNA
cagccacgttttgatcaagcacttctgttaccccggactgagtatcaatagactgctcacgcggttgaaggagaaagcgttcgttatccggccaactacttcgaaaaacctagtaacaccgtggaagttgcagagtgtttcgctcagcactaccccagtgtagatcaggtcgatgagtcaccgcattccccacgggcgaccgtggcggtggctgcgttggcggcctgcccatggggaaacccatgggacgctctaatacagacatggtgcgaagagtctattgagctagttggtagtcctccggcccctgaatgcggctaatcctaactgcggagcacacaccctcaagccagagggcagtgtgtcgtaacgggcaactctgcagcggaaccgactactttgggtgtccgtgtttcattttattcctatactggctgcttatggtgacaattgagagattgttaccatatagctattggattggccatccggtgaccaatagagctattatatatctctttgttgggtttataccacttagcttgaaagaggttaaaacattacaattcattgttaagttgaatacagcaaa

SEQ ID NO: 22543 - DNA, 542 bp, synthetic construct
  source 1..542: mol_type = other DNA
gactgctcacgcggttgaaggagaaagcgttcgttatccggccaactacttcgaaaaacctagtaacaccgtggaagttgcagagtgtttcgctcagcactaccccagtgtagatcaggtcgatgagtcaccgcattccccacgggcgaccgtggcggtggctgcgttggcggcctgcccatggggaaacccatgggacgctctaatacagacatggtgcgaagagtctattgagctagttggtagtcctccggcccctgaatgcggctaatcctaactgcggagcacacaccctcaagccagagggcagtgtgtcgtaacgggcaactctgcagcggaaccgactactttgggtgtccgtgtttcattttattcctatactggctgcttatggtgacaattgagagattgttaccatatagctattggattggccatccggtgaccaatagagctattatatatctctttgttgggtttataccacttagcttgaaagaggttaaaacattacaattcattgttaagttgaatacagcaaa

SEQ ID NO: 22544 - DNA, 692 bp, synthetic construct
  source 1..692: mol_type = other DNA
cacactggtatcacggtacccttgtgcgcctgttttataaacccttccccaatgcaacttagaagctcaactttaccggtcaatagacagtccagtacgccaactgggcttcgatcaagcacttctgttaccccggactaagtatcaataggctgctcacgcggctgaaggagaaaacgttcgttacccggccaattacttcgagaaacccagtaacactatggaggttgcgcagtgtttcgttccacacaaccccagtgtagatcaggtcgatgagtcaccgctttccccacgggcgaccgtggcggtggctgcgttggcggcctgcccatggggcaacccatgggacgcttcaatactgacatggtgtgaagagtctattgagctaattggtattcctccggcccctgaatgcggctaatcctaactgcggagcagatactcacgagccagtgggcagtctgtcgtaacgggtaactctgcagcggaaccgactactttgggtgtccgtgtttccttttattcatatattggctgcttatggtgacaattgagagattgttaccatatagctattggattggccatccggtgactaatagagcaattgtttacctatttgttggctttgtgccgttgaactacaaggttttaaaaactattaactacatcctagtacttaacacgttgaa

SEQ ID NO: 22545 - DNA, 642 bp, synthetic construct
  source 1..642: mol_type = other DNA
aatgcaacttagaagctcaactttaccggtcaatagacagtccagtacgccaactgggcttcgatcaagcacttctgttaccccggactaagtatcaataggctgctcacgcggctgaaggagaaaacgttcgttacccggccaattacttcgagaaacccagtaacactatggaggttgcgcagtgtttcgttccacacaaccccagtgtagatcaggtcgatgagtcaccgctttccccacgggcgaccgtggcggtggctgcgttggcggcctgcccatggggcaacccatgggacgcttcaatactgacatggtgtgaagagtctattgagctaattggtattcctccggcccctgaatgcggctaatcctaactgcggagcagatactcacgagccagtgggcagtctgtcgtaacgggtaactctgcagcggaaccgactactttgggtgtccgtgtttccttttattcatatattggctgcttatggtgacaattgagagattgttaccatatagctattggattggccatccggtgactaatagagcaattgtttacctatttgttggctttgtgccgttgaactacaaggttttaaaaactattaactacatcctagtacttaacacgttgaa

SEQ ID NO: 22546 - DNA, 592 bp, synthetic construct
  source 1..592: mol_type = other DNA
caactgggcttcgatcaagcacttctgttaccccggactaagtatcaataggctgctcacgcggctgaaggagaaaacgttcgttacccggccaattacttcgagaaacccagtaacactatggaggttgcgcagtgtttcgttccacacaaccccagtgtagatcaggtcgatgagtcaccgctttccccacgggcgaccgtggcggtggctgcgttggcggcctgcccatggggcaacccatgggacgcttcaatactgacatggtgtgaagagtctattgagctaattggtattcctccggcccctgaatgcggctaatcctaactgcggagcagatactcacgagccagtgggcagtctgtcgtaacgggtaactctgcagcggaaccgactactttgggtgtccgtgtttccttttattcatatattggctgcttatggtgacaattgagagattgttaccatatagctattggattggccatccggtgactaatagagcaattgtttacctatttgttggctttgtgccgttgaactacaaggttttaaaaactattaactacatcctagtacttaacacgttgaa

SEQ ID NO: 22547 - DNA, 542 bp, synthetic construct
  source 1..542: mol_type = other DNA
ggctgctcacgcggctgaaggagaaaacgttcgttacccggccaattacttcgagaaacccagtaacactatggaggttgcgcagtgtttcgttccacacaaccccagtgtagatcaggtcgatgagtcaccgctttccccacgggcgaccgtggcggtggctgcgttggcggcctgcccatggggcaacccatgggacgcttcaatactgacatggtgtgaagagtctattgagctaattggtattcctccggcccctgaatgcggctaatcctaactgcggagcagatactcacgagccagtgggcagtctgtcgtaacgggtaactctgcagcggaaccgactactttgggtgtccgtgtttccttttattcatatattggctgcttatggtgacaattgagagattgttaccatatagctattggattggccatccggtgactaatagagcaattgtttacctatttgttggctttgtgccgttgaactacaaggttttaaaaactattaactacatcctagtacttaacacgttgaa

SEQ ID NO: 22548 - DNA, 692 bp, synthetic construct
  source 1..692: mol_type = other DNA
caccctggtatcacggtacctttgtgcgcctgttttatatcccttcccccaattgtaacttagaagaaacacacaccgatcaacagcaagcgtggcacaccagccatgttttggtcaagcacttctgttaccccggactgagtatcaatagactgctcacgcggttgaaggagaaagcgtccgttatccggccagctacttcgagaaacctagtaacaccatggaagttgcggagtgtttcgctcagcactaccccagtgtagatcaggtcgatgagtcaccgctttccccacgggcgaccgtggcggtggctgcgttggcggcctgcctatgggggaacccataggacgctctaatacagacatggtgcgaagagtctattgagctagctggtattcctccggcccctgaatgcggctaatcctaactgtggagcacatgcccctaatccaaggggtagtgtgtcgtaatgagcaattccgcagcggaaccgactactttgggtgtccgtgtttcctcttattcttgtactggctgcttatggtgacaattgagagattgttaccatatagctattggattggccatccggtgactaatagagctattgtgtatctctttgttggatttgtaccacttaatttgaaagaaatcaggacactacgctacattttactattgaacaccgcaaa

SEQ ID NO: 22549 - DNA, 642 bp, synthetic construct
  source 1..642: mol_type = other DNA
aattgtaacttagaagaaacacacaccgatcaacagcaagcgtggcacaccagccatgttttggtcaagcacttctgttaccccggactgagtatcaatagactgctcacgcggttgaaggagaaagcgtccgttatccggccagctacttcgagaaacctagtaacaccatggaagttgcggagtgtttcgctcagcactaccccagtgtagatcaggtcgatgagtcaccgctttccccacgggcgaccgtggcggtggctgcgttggcggcctgcctatgggggaacccataggacgctctaatacagacatggtgcgaagagtctattgagctagctggtattcctccggcccctgaatgcggctaatcctaactgtggagcacatgcccctaatccaaggggtagtgtgtcgtaatgagcaattccgcagcggaaccgactactttgggtgtccgtgtttcctcttattcttgtactggctgcttatggtgacaattgagagattgttaccatatagctattggattggccatccggtgactaatagagctattgtgtatctctttgttggatttgtaccacttaatttgaaagaaatcaggacactacgctacattttactattgaacaccgcaaa

SEQ ID NO: 22550 - DNA, 592 bp, synthetic construct
  source 1..592: mol_type = other DNA
cagccatgttttggtcaagcacttctgttaccccggactgagtatcaatagactgctcacgcggttgaaggagaaagcgtccgttatccggccagctacttcgagaaacctagtaacaccatggaagttgcggagtgtttcgctcagcactaccccagtgtagatcaggtcgatgagtcaccgctttccccacgggcgaccgtggcggtggctgcgttggcggcctgcctatgggggaacccataggacgctctaatacagacatggtgcgaagagtctattgagctagctggtattcctccggcccctgaatgcggctaatcctaactgtggagcacatgcccctaatccaaggggtagtgtgtcgtaatgagcaattccgcagcggaaccgactactttgggtgtccgtgtttcctcttattcttgtactggctgcttatggtgacaattgagagattgttaccatatagctattggattggccatccggtgactaatagagctattgtgtatctctttgttggatttgtaccacttaatttgaaagaaatcaggacactacgctacattttactattgaacaccgcaaa

SEQ ID NO: 22551 - DNA, 542 bp, synthetic construct
  source 1..542: mol_type = other DNA
gactgctcacgcggttgaaggagaaagcgtccgttatccggccagctacttcgagaaacctagtaacaccatggaagttgcggagtgtttcgctcagcactaccccagtgtagatcaggtcgatgagtcaccgctttccccacgggcgaccgtggcggtggctgcgttggcggcctgcctatgggggaacccataggacgctctaatacagacatggtgcgaagagtctattgagctagctggtattcctccggcccctgaatgcggctaatcctaactgtggagcacatgcccctaatccaaggggtagtgtgtcgtaatgagcaattccgcagcggaaccgactactttgggtgtccgtgtttcctcttattcttgtactggctgcttatggtgacaattgagagattgttaccatatagctattggattggccatccggtgactaatagagctattgtgtatctctttgttggatttgtaccacttaatttgaaagaaatcaggacactacgctacattttactattgaacaccgcaaa

SEQ ID NO: 22552 - DNA, 692 bp, synthetic construct
  source 1..692: mol_type = other DNA
cacactggtatcacggtacctttgtgcgcctgttttataaccccttccccaaacgtaacgtagaagccacacacactgatcaacagtgggcacagcgcaccagccgtgtctcgatcaagcacttctgttttcccggactgagtatcaatagactgctcacgcggttgaaggagaaaacgttcgttacccggctgactacttcgagaagcttagtaacgctatgaaagttgcgaagtgtttcgttcagcactccccccgtgtagatcaggtcgatgagtcaccgcattccccacgggtgaccgtggcggtggctgcgctggcggcctgcccatggggtgacccatgggacgcttcaatacagacatggtgcgaagagcctattgagctagtcagtagtcctccggcccctgaatgcggctaatcctaactgcggagcatgtgccctcaatccagagggtagcgtgtcgtaacgggcaactctgcagcggaaccgactactttgggtgtccgtgtttctttttattcttatattggctgcttatggtgacaattgagagattgttgccatatagctattggattggccatccggtgagtaacagagctattatttactccatcgtaggcttcgtgccattgaactacaaggtcttgaaaactctcaactttgttataatacttaataccacaaa

SEQ ID NO: 22553 - DNA, 642 bp, synthetic construct
  source 1..642: mol_type = other DNA
aaacgtaacgtagaagccacacacactgatcaacagtgggcacagcgcaccagccgtgtctcgatcaagcacttctgttttcccggactgagtatcaatagactgctcacgcggttgaaggagaaaacgttcgttacccggctgactacttcgagaagcttagtaacgctatgaaagttgcgaagtgtttcgttcagcactccccccgtgtagatcaggtcgatgagtcaccgcattccccacgggtgaccgtggcggtggctgcgctggcggcctgcccatggggtgacccatgggacgcttcaatacagacatggtgcgaagagcctattgagctagtcagtagtcctccggcccctgaatgcggctaatcctaactgcggagcatgtgccctcaatccagagggtagcgtgtcgtaacgggcaactctgcagcggaaccgactactttgggtgtccgtgtttctttttattcttatattggctgcttatggtgacaattgagagattgttgccatatagctattggattggccatccggtgagtaacagagctattatttactccatcgtaggcttcgtgccattgaactacaaggtcttgaaaactctcaactttgttataatacttaataccacaaa

SEQ ID NO: 22554 - DNA, 592 bp, synthetic construct
  source 1..592: mol_type = other DNA
cagccgtgtctcgatcaagcacttctgttttcccggactgagtatcaatagactgctcacgcggttgaaggagaaaacgttcgttacccggctgactacttcgagaagcttagtaacgctatgaaagttgcgaagtgtttcgttcagcactccccccgtgtagatcaggtcgatgagtcaccgcattccccacgggtgaccgtggcggtggctgcgctggcggcctgcccatggggtgacccatgggacgcttcaatacagacatggtgcgaagagcctattgagctagtcagtagtcctccggcccctgaatgcggctaatcctaactgcggagcatgtgccctcaatccagagggtagcgtgtcgtaacgggcaactctgcagcggaaccgactactttgggtgtccgtgtttctttttattcttatattggctgcttatggtgacaattgagagattgttgccatatagctattggattggccatccggtgagtaacagagctattatttactccatcgtaggcttcgtgccattgaactacaaggtcttgaaaactctcaactttgttataatacttaataccacaaa

SEQ ID NO: 22555 - DNA, 542 bp, synthetic construct
  source 1..542: mol_type = other DNA
gactgctcacgcggttgaaggagaaaacgttcgttacccggctgactacttcgagaagcttagtaacgctatgaaagttgcgaagtgtttcgttcagcactccccccgtgtagatcaggtcgatgagtcaccgcattccccacgggtgaccgtggcggtggctgcgctggcggcctgcccatggggtgacccatgggacgcttcaatacagacatggtgcgaagagcctattgagctagtcagtagtcctccggcccctgaatgcggctaatcctaactgcggagcatgtgccctcaatccagagggtagcgtgtcgtaacgggcaactctgcagcggaaccgactactttgggtgtccgtgtttctttttattcttatattggctgcttatggtgacaattgagagattgttgccatatagctattggattggccatccggtgagtaacagagctattatttactccatcgtaggcttcgtgccattgaactacaaggtcttgaaaactctcaactttgttataatacttaataccacaaa

SEQ ID NO: 22556 - DNA, 692 bp, synthetic construct
  source 1..692: mol_type = other DNA
cacactggtatcacggtacccttgtgcgcctgttttatcttcccctccccactgtaacttagaagaatgacataaacggtcaacagatagctcagtacaccaactgagccccgaccaagcacttctgttaccccggaccgagtaacaataggctgctcgcgcggctgaaggtgaaaacgttcgttacccggccaattacttcgagaaacctagtaccaccatgaaggttgcgcagcgtttcgctccgcacaaccccagtgtagatcaggtcgatgagtcaccgcactccccacgggcgaccgtggcggtggctgcgctggcggcctgcctatggggcaacccatgggacgcttcaatactgacatggtgcgaagagtctattgagctaattggtagtcctccggcccctgaatgcggctaatcctaactgcggggcaagtgcccacaaaccagtgggtggcttgtcgtaacgggtaaccctgcagcggaaccgactactttgggtgtccgtgtttccttttattcttattctggctgcttatggtgacaattgagagattgttgccatatagctattggattggccatctggtgagtaacagagcaatcatattcctctttgttggatttataccacttgattccactagttacaacactctgctacatattatttgcttaaatacaagaag

SEQ ID NO: 22557 - DNA, 642 bp, synthetic construct
  source 1..642: mol_type = other DNA
actgtaacttagaagaatgacataaacggtcaacagatagctcagtacaccaactgagccccgaccaagcacttctgttaccccggaccgagtaacaataggctgctcgcgcggctgaaggtgaaaacgttcgttacccggccaattacttcgagaaacctagtaccaccatgaaggttgcgcagcgtttcgctccgcacaaccccagtgtagatcaggtcgatgagtcaccgcactccccacgggcgaccgtggcggtggctgcgctggcggcctgcctatggggcaacccatgggacgcttcaatactgacatggtgcgaagagtctattgagctaattggtagtcctccggcccctgaatgcggctaatcctaactgcggggcaagtgcccacaaaccagtgggtggcttgtcgtaacgggtaaccctgcagcggaaccgactactttgggtgtccgtgtttccttttattcttattctggctgcttatggtgacaattgagagattgttgccatatagctattggattggccatctggtgagtaacagagcaatcatattcctctttgttggatttataccacttgattccactagttacaacactctgctacatattatttgcttaaatacaagaag

SEQ ID NO: 22558 - DNA, 592 bp, synthetic construct
  source 1..592: mol_type = other DNA
caactgagccccgaccaagcacttctgttaccccggaccgagtaacaataggctgctcgcgcggctgaaggtgaaaacgttcgttacccggccaattacttcgagaaacctagtaccaccatgaaggttgcgcagcgtttcgctccgcacaaccccagtgtagatcaggtcgatgagtcaccgcactccccacgggcgaccgtggcggtggctgcgctggcggcctgcctatggggcaacccatgggacgcttcaatactgacatggtgcgaagagtctattgagctaattggtagtcctccggcccctgaatgcggctaatcctaactgcggggcaagtgcccacaaaccagtgggtggcttgtcgtaacgggtaaccctgcagcggaaccgactactttgggtgtccgtgtttccttttattcttattctggctgcttatggtgacaattgagagattgttgccatatagctattggattggccatctggtgagtaacagagcaatcatattcctctttgttggatttataccacttgattccactagttacaacactctgctacatattatttgcttaaatacaagaag

SEQ ID NO: 22559 - DNA, 542 bp, synthetic construct
  source 1..542: mol_type = other DNA
ggctgctcgcgcggctgaaggtgaaaacgttcgttacccggccaattacttcgagaaacctagtaccaccatgaaggttgcgcagcgtttcgctccgcacaaccccagtgtagatcaggtcgatgagtcaccgcactccccacgggcgaccgtggcggtggctgcgctggcggcctgcctatggggcaacccatgggacgcttcaatactgacatggtgcgaagagtctattgagctaattggtagtcctccggcccctgaatgcggctaatcctaactgcggggcaagtgcccacaaaccagtgggtggcttgtcgtaacgggtaaccctgcagcggaaccgactactttgggtgtccgtgtttccttttattcttattctggctgcttatggtgacaattgagagattgttgccatatagctattggattggccatctggtgagtaacagagcaatcatattcctctttgttggatttataccacttgattccactagttacaacactctgctacatattatttgcttaaatacaagaag

SEQ ID NO: 22560 - DNA, 692 bp, synthetic construct
  source 1..692: mol_type = other DNA
actctggtattgcggtacctttgtgcgcctgttttatatccccctcccccatttgaaacttagaagcaagacacaccgatcaatagctgatatggcaagccagccatatcttgatcaagtacttctgtttccccggaccgagtatcaatagactgcttgcgcggtcgaaggagaaagcgttcgttacccggctaattacttcgagaaacctagtaacaccatgaaagttgcagagtgtttcgctcagcacaaccccagtgtagatcaggctgatgagtcaccgcattccccacgggtgaccgtggcggtggctgcgttggcggcctgcctgtggggcaacccacaggacgctctaatacagacatggtgtgaagagtctattgagctaattagtagtcctccggcccctgaatgcggctaatcctaactgcggagcacgtacccccattccaggaggtggcgtgtcgtaacgggtaactctgcagcggaaccgactactttgggtgtccgtgtttccttttatctttacactggctgcttatggtgacaattgaaagattgttaccatatagctattggattggccatccggtgacaaatagagcgattgtatatttgttcattggatttgtaccactaagctataaagcattaaacactcttaaccttatcctagtgcttaactcaacaaa

SEQ ID NO: 22561 - DNA, 642 bp, synthetic construct
  source 1..642: mol_type = other DNA
atttgaaacttagaagcaagacacaccgatcaatagctgatatggcaagccagccatatcttgatcaagtacttctgtttccccggaccgagtatcaatagactgcttgcgcggtcgaaggagaaagcgttcgttacccggctaattacttcgagaaacctagtaacaccatgaaagttgcagagtgtttcgctcagcacaaccccagtgtagatcaggctgatgagtcaccgcattccccacgggtgaccgtggcggtggctgcgttggcggcctgcctgtggggcaacccacaggacgctctaatacagacatggtgtgaagagtctattgagctaattagtagtcctccggcccctgaatgcggctaatcctaactgcggagcacgtacccccattccaggaggtggcgtgtcgtaacgggtaactctgcagcggaaccgactactttgggtgtccgtgtttccttttatctttacactggctgcttatggtgacaattgaaagattgttaccatatagctattggattggccatccggtgacaaatagagcgattgtatatttgttcattggatttgtaccactaagctataaagcattaaacactcttaaccttatcctagtgcttaactcaacaaa

SEQ ID NO: 22562 - DNA, 592 bp, synthetic construct
  source 1..592: mol_type = other DNA
cagccatatcttgatcaagtacttctgtttccccggaccgagtatcaatagactgcttgcgcggtcgaaggagaaagcgttcgttacccggctaattacttcgagaaacctagtaacaccatgaaagttgcagagtgtttcgctcagcacaaccccagtgtagatcaggctgatgagtcaccgcattccccacgggtgaccgtggcggtggctgcgttggcggcctgcctgtggggcaacccacaggacgctctaatacagacatggtgtgaagagtctattgagctaattagtagtcctccggcccctgaatgcggctaatcctaactgcggagcacgtacccccattccaggaggtggcgtgtcgtaacgggtaactctgcagcggaaccgactactttgggtgtccgtgtttccttttatctttacactggctgcttatggtgacaattgaaagattgttaccatatagctattggattggccatccggtgacaaatagagcgattgtatatttgttcattggatttgtaccactaagctataaagcattaaacactcttaaccttatcctagtgcttaactcaacaaa

SEQ ID NO: 22563 - DNA, 542 bp, synthetic construct
  source 1..542: mol_type = other DNA
gactgcttgcgcggtcgaaggagaaagcgttcgttacccggctaattacttcgagaaacctagtaacaccatgaaagttgcagagtgtttcgctcagcacaaccccagtgtagatcaggctgatgagtcaccgcattccccacgggtgaccgtggcggtggctgcgttggcggcctgcctgtggggcaacccacaggacgctctaatacagacatggtgtgaagagtctattgagctaattagtagtcctccggcccctgaatgcggctaatcctaactgcggagcacgtacccccattccaggaggtggcgtgtcgtaacgggtaactctgcagcggaaccgactactttgggtgtccgtgtttccttttatctttacactggctgcttatggtgacaattgaaagattgttaccatatagctattggattggccatccggtgacaaatagagcgattgtatatttgttcattggatttgtaccactaagctataaagcattaaacactcttaaccttatcctagtgcttaactcaacaaa

SEQ ID NO: 22564 - DNA, 692 bp, synthetic construct
  source 1..692: mol_type = other DNA
gcacactggtatcacggtacttttgtgcgcctgttttatccaccctcccccaatgaaacttagaagcttgattcaaacggtcaatagacaacccagtacaccaactgggtctcgaccaagcacctctgtttccccggactgagtatcaataggctgcttacgtggctgaaggagaaaacgttcgttacccggccaattacttcgagaaacctagtaccaccatgaacgttgcgcagtgtttcgctccacacaaccccagtgtagatcaggtcgatgagtcaccgcattccccacgggtgaccgtggcggtggctgcgctggcggcctgcccatggggtaacccatgggacgctacaatactgacatggtgtgaagagtctattgagctaattggtagtcctccggcccctgaatgcggctaatcctaactgcggagcagatactcacatgccagtgggcagtctgtcgtaacgggcaactctgcagcggaaccgactactttgggtgtccgtgtttccttttattctcatctggctgcttatggtgacaatcgaaagactgttaccatatagctattggattggccatccagtgagtaacagagcgatcattttcctttttgttgggtttataccacttgattacaatagttacaataccttgctatacatcgttcatttgaacacaacaag

SEQ ID NO: 22565 - DNA, 642 bp, synthetic construct
  source 1..642: mol_type = other DNA
caatgaaacttagaagcttgattcaaacggtcaatagacaacccagtacaccaactgggtctcgaccaagcacctctgtttccccggactgagtatcaataggctgcttacgtggctgaaggagaaaacgttcgttacccggccaattacttcgagaaacctagtaccaccatgaacgttgcgcagtgtttcgctccacacaaccccagtgtagatcaggtcgatgagtcaccgcattccccacgggtgaccgtggcggtggctgcgctggcggcctgcccatggggtaacccatgggacgctacaatactgacatggtgtgaagagtctattgagctaattggtagtcctccggcccctgaatgcggctaatcctaactgcggagcagatactcacatgccagtgggcagtctgtcgtaacgggcaactctgcagcggaaccgactactttgggtgtccgtgtttccttttattctcatctggctgcttatggtgacaatcgaaagactgttaccatatagctattggattggccatccagtgagtaacagagcgatcattttcctttttgttgggtttataccacttgattacaatagttacaataccttgctatacatcgttcatttgaacacaacaag

SEQ ID NO: 22566 - DNA, 592 bp, synthetic construct
  source 1..592: mol_type = other DNA
ccaactgggtctcgaccaagcacctctgtttccccggactgagtatcaataggctgcttacgtggctgaaggagaaaacgttcgttacccggccaattacttcgagaaacctagtaccaccatgaacgttgcgcagtgtttcgctccacacaaccccagtgtagatcaggtcgatgagtcaccgcattccccacgggtgaccgtggcggtggctgcgctggcggcctgcccatggggtaacccatgggacgctacaatactgacatggtgtgaagagtctattgagctaattggtagtcctccggcccctgaatgcggctaatcctaactgcggagcagatactcacatgccagtgggcagtctgtcgtaacgggcaactctgcagcggaaccgactactttgggtgtccgtgtttccttttattctcatctggctgcttatggtgacaatcgaaagactgttaccatatagctattggattggccatccagtgagtaacagagcgatcattttcctttttgttgggtttataccacttgattacaatagttacaataccttgctatacatcgttcatttgaacacaacaag

SEQ ID NO: 22567 - DNA, 542 bp, synthetic construct
  source 1..542: mol_type = other DNA
aggctgcttacgtggctgaaggagaaaacgttcgttacccggccaattacttcgagaaacctagtaccaccatgaacgttgcgcagtgtttcgctccacacaaccccagtgtagatcaggtcgatgagtcaccgcattccccacgggtgaccgtggcggtggctgcgctggcggcctgcccatggggtaacccatgggacgctacaatactgacatggtgtgaagagtctattgagctaattggtagtcctccggcccctgaatgcggctaatcctaactgcggagcagatactcacatgccagtgggcagtctgtcgtaacgggcaactctgcagcggaaccgactactttgggtgtccgtgtttccttttattctcatctggctgcttatggtgacaatcgaaagactgttaccatatagctattggattggccatccagtgagtaacagagcgatcattttcctttttgttgggtttataccacttgattacaatagttacaataccttgctatacatcgttcatttgaacacaacaag

SEQ ID NO: 22568 - DNA, 692 bp, synthetic construct
  source 1..692: mol_type = other DNA
cacactggtatcacggtacccttgtgcgcctgttttatcaaccccttcccgatgtaacttagaagccaaatcttaccggtcaacaggtggtccagtatgccaactgggctctgaccaagcacttctgttaccccggactgagtatcaataggctgctcacgcggctgaaggagaaaatgtccgttacccggccaattacttcgagaaacctagtaccaccatgaaggttgcgcggcgtttcgctccacacaaccccagtgcagatcaggtcgatgagccaccgcttcccccacgggcgaccgtggcggtggctgcgttggcggcctgcccatgggacaacccatgggacgcttcaatactgacatggtgcgaagagtctattgagctaattggtagtcctccggcccctgaatgcggctaatcctaactgtggagcagatgcccgcaagccagcgggtggtctgtcgtaacgggcaactccgcagcggaaccgactactttgggtgaccgtgtttccttttatttttatactggctgcttatggtgacaattgaaagattgttaccatatagctattggattggccatccggtgactaacagagctatcatatatctatttgttggttacgtcccacttgactatagagttctacgcaccttatatttcattttagatctgaacaaagcgag

SEQ ID NO: 22569 - DNA, 642 bp, synthetic construct
  source 1..642: mol_type = other DNA
gatgtaacttagaagccaaatcttaccggtcaacaggtggtccagtatgccaactgggctctgaccaagcacttctgttaccccggactgagtatcaataggctgctcacgcggctgaaggagaaaatgtccgttacccggccaattacttcgagaaacctagtaccaccatgaaggttgcgcggcgtttcgctccacacaaccccagtgcagatcaggtcgatgagccaccgcttcccccacgggcgaccgtggcggtggctgcgttggcggcctgcccatgggacaacccatgggacgcttcaatactgacatggtgcgaagagtctattgagctaattggtagtcctccggcccctgaatgcggctaatcctaactgtggagcagatgcccgcaagccagcgggtggtctgtcgtaacgggcaactccgcagcggaaccgactactttgggtgaccgtgtttccttttatttttatactggctgcttatggtgacaattgaaagattgttaccatatagctattggattggccatccggtgactaacagagctatcatatatctatttgttggttacgtcccacttgactatagagttctacgcaccttatatttcattttagatctgaacaaagcgag

SEQ ID NO: 22570 - DNA, 592 bp, synthetic construct
  source 1..592: mol_type = other DNA
caactgggctctgaccaagcacttctgttaccccggactgagtatcaataggctgctcacgcggctgaaggagaaaatgtccgttacccggccaattacttcgagaaacctagtaccaccatgaaggttgcgcggcgtttcgctccacacaaccccagtgcagatcaggtcgatgagccaccgcttcccccacgggcgaccgtggcggtggctgcgttggcggcctgcccatgggacaacccatgggacgcttcaatactgacatggtgcgaagagtctattgagctaattggtagtcctccggcccctgaatgcggctaatcctaactgtggagcagatgcccgcaagccagcgggtggtctgtcgtaacgggcaactccgcagcggaaccgactactttgggtgaccgtgtttccttttatttttatactggctgcttatggtgacaattgaaagattgttaccatatagctattggattggccatccggtgactaacagagctatcatatatctatttgttggttacgtcccacttgactatagagttctacgcaccttatatttcattttagatctgaacaaagcgag

SEQ ID NO: 22571 - DNA, 542 bp, synthetic construct
  source 1..542: mol_type = other DNA
ggctgctcacgcggctgaaggagaaaatgtccgttacccggccaattacttcgagaaacctagtaccaccatgaaggttgcgcggcgtttcgctccacacaaccccagtgcagatcaggtcgatgagccaccgcttcccccacgggcgaccgtggcggtggctgcgttggcggcctgcccatgggacaacccatgggacgcttcaatactgacatggtgcgaagagtctattgagctaattggtagtcctccggcccctgaatgcggctaatcctaactgtggagcagatgcccgcaagccagcgggtggtctgtcgtaacgggcaactccgcagcggaaccgactactttgggtgaccgtgtttccttttatttttatactggctgcttatggtgacaattgaaagattgttaccatatagctattggattggccatccggtgactaacagagctatcatatatctatttgttggttacgtcccacttgactatagagttctacgcaccttatatttcattttagatctgaacaaagcgag

SEQ ID NO: 22572 - DNA, 692 bp, synthetic construct
  source 1..692: mol_type = other DNA
cacactggtattgcggtacctttgtgcgcctgttttattcaccctttcccaatgaaacttagaagcttaactcaaccggtcgatagacagcccagtacaccaactgggttttgaccaagtactcctgtttccccggactgagtatcaataagctgctcgcgcggctgaaggagaaaacgttcgttacccggccaattacttcgagaaacctagtaccaccatgaacgttgcgcagtgtttcgctccgcacaaccccagtgtagatcaggtcgatgagtcaccgcaatccccacgggcgaccgtggcggtggctgcgctggcggcctgcccatggggcatcccatgggacgcttcaatactgacatggtgcgaagagtctattgagctaattggtaatcctccggcccctgaatgcggctaatcctaactgcggggcagacacccacacgccagtgggcagtctgtcgtaacgggtaactccgcagcggaaccgactactttgggtgtccgtgtttccttttatctttatattggctgcttatggtgacaattgaaagattgttgccatatagctattggattggccatccggtgtctaatagagcaattatatatctctttgttggcttcatcccgttaaataaagtgagctaccagaccctgtgctatattatcaaattgaacacaataaa

SEQ ID NO: 22573 - DNA, 642 bp, synthetic construct
  source 1..642: mol_type = other DNA
aatgaaacttagaagcttaactcaaccggtcgatagacagcccagtacaccaactgggttttgaccaagtactcctgtttccccggactgagtatcaataagctgctcgcgcggctgaaggagaaaacgttcgttacccggccaattacttcgagaaacctagtaccaccatgaacgttgcgcagtgtttcgctccgcacaaccccagtgtagatcaggtcgatgagtcaccgcaatccccacgggcgaccgtggcggtggctgcgctggcggcctgcccatggggcatcccatgggacgcttcaatactgacatggtgcgaagagtctattgagctaattggtaatcctccggcccctgaatgcggctaatcctaactgcggggcagacacccacacgccagtgggcagtctgtcgtaacgggtaactccgcagcggaaccgactactttgggtgtccgtgtttccttttatctttatattggctgcttatggtgacaattgaaagattgttgccatatagctattggattggccatccggtgtctaatagagcaattatatatctctttgttggcttcatcccgttaaataaagtgagctaccagaccctgtgctatattatcaaattgaacacaataaa

SEQ ID NO: 22574 - DNA, 592 bp, synthetic construct
  source 1..592: mol_type = other DNA
caactgggttttgaccaagtactcctgtttccccggactgagtatcaataagctgctcgcgcggctgaaggagaaaacgttcgttacccggccaattacttcgagaaacctagtaccaccatgaacgttgcgcagtgtttcgctccgcacaaccccagtgtagatcaggtcgatgagtcaccgcaatccccacgggcgaccgtggcggtggctgcgctggcggcctgcccatggggcatcccatgggacgcttcaatactgacatggtgcgaagagtctattgagctaattggtaatcctccggcccctgaatgcggctaatcctaactgcggggcagacacccacacgccagtgggcagtctgtcgtaacgggtaactccgcagcggaaccgactactttgggtgtccgtgtttccttttatctttatattggctgcttatggtgacaattgaaagattgttgccatatagctattggattggccatccggtgtctaatagagcaattatatatctctttgttggcttcatcccgttaaataaagtgagctaccagaccctgtgctatattatcaaattgaacacaataaa

SEQ ID NO: 22575 - DNA, 542 bp, synthetic construct
  source 1..542: mol_type = other DNA
agctgctcgcgcggctgaaggagaaaacgttcgttacccggccaattacttcgagaaacctagtaccaccatgaacgttgcgcagtgtttcgctccgcacaaccccagtgtagatcaggtcgatgagtcaccgcaatccccacgggcgaccgtggcggtggctgcgctggcggcctgcccatggggcatcccatgggacgcttcaatactgacatggtgcgaagagtctattgagctaattggtaatcctccggcccctgaatgcggctaatcctaactgcggggcagacacccacacgccagtgggcagtctgtcgtaacgggtaactccgcagcggaaccgactactttgggtgtccgtgtttccttttatctttatattggctgcttatggtgacaattgaaagattgttgccatatagctattggattggccatccggtgtctaatagagcaattatatatctctttgttggcttcatcccgttaaataaagtgagctaccagaccctgtgctatattatcaaattgaacacaataaa

SEQ ID NO: 22576 - DNA, 692 bp, synthetic construct
  source 1..692: mol_type = other DNA
cacactggtatcacggtacctttgtgcgcctgttttatcctccctccccaagtgcaacgtagaagcaagacacaaaaggtcaacagatagcccagcacaccagttgggtttcgaccaagcacttctgtctccccggaccgagtatcaataagctgctcacgcggctgaaggagaaagcgttcgttacccggctagttacttcgagaaacccagtaccaccatgaaggttgcgcagcgtttcgctccgcacaaccccagtgtagatcaggtcgatgagtcaccgcgttccccacgggcgaccgtggcggtggctgcgttggcggcctgcccatggggcaacccatgggacgcttcaatactgacatggtgcgaagagtctattgagctaactagtagtcctccggcccctgaatgcggataatcttaactgcggagcaggtgctcacaatccagtgggtggcctgtcgtaacgggcaactctgcagcggaaccgactactttgggtgtccgtgtttccttttatctctttgttggctgcttatggtgacaattgaatgattgttgccatatagctattggattggccatccggtgagcagcagatccattatttaccagtttgttggatttgtaccacttgatcacatagtctttagaacacttgtctttattctaaatcttaacaaggcaag

SEQ ID NO: 22577 - DNA, 642 bp, synthetic construct
  source 1..642: mol_type = other DNA
agtgcaacgtagaagcaagacacaaaaggtcaacagatagcccagcacaccagttgggtttcgaccaagcacttctgtctccccggaccgagtatcaataagctgctcacgcggctgaaggagaaagcgttcgttacccggctagttacttcgagaaacccagtaccaccatgaaggttgcgcagcgtttcgctccgcacaaccccagtgtagatcaggtcgatgagtcaccgcgttccccacgggcgaccgtggcggtggctgcgttggcggcctgcccatggggcaacccatgggacgcttcaatactgacatggtgcgaagagtctattgagctaactagtagtcctccggcccctgaatgcggataatcttaactgcggagcaggtgctcacaatccagtgggtggcctgtcgtaacgggcaactctgcagcggaaccgactactttgggtgtccgtgtttccttttatctctttgttggctgcttatggtgacaattgaatgattgttgccatatagctattggattggccatccggtgagcagcagatccattatttaccagtttgttggatttgtaccacttgatcacatagtctttagaacacttgtctttattctaaatcttaacaaggcaag

SEQ ID NO: 22578 - DNA, 592 bp, synthetic construct
  source 1..592: mol_type = other DNA
cagttgggtttcgaccaagcacttctgtctccccggaccgagtatcaataagctgctcacgcggctgaaggagaaagcgttcgttacccggctagttacttcgagaaacccagtaccaccatgaaggttgcgcagcgtttcgctccgcacaaccccagtgtagatcaggtcgatgagtcaccgcgttccccacgggcgaccgtggcggtggctgcgttggcggcctgcccatggggcaacccatgggacgcttcaatactgacatggtgcgaagagtctattgagctaactagtagtcctccggcccctgaatgcggataatcttaactgcggagcaggtgctcacaatccagtgggtggcctgtcgtaacgggcaactctgcagcggaaccgactactttgggtgtccgtgtttccttttatctctttgttggctgcttatggtgacaattgaatgattgttgccatatagctattggattggccatccggtgagcagcagatccattatttaccagtttgttggatttgtaccacttgatcacatagtctttagaacacttgtctttattctaaatcttaacaaggcaag

SEQ ID NO: 22579 - DNA, 542 bp, synthetic construct
  source 1..542: mol_type = other DNA
agctgctcacgcggctgaaggagaaagcgttcgttacccggctagttacttcgagaaacccagtaccaccatgaaggttgcgcagcgtttcgctccgcacaaccccagtgtagatcaggtcgatgagtcaccgcgttccccacgggcgaccgtggcggtggctgcgttggcggcctgcccatggggcaacccatgggacgcttcaatactgacatggtgcgaagagtctattgagctaactagtagtcctccggcccctgaatgcggataatcttaactgcggagcaggtgctcacaatccagtgggtggcctgtcgtaacgggcaactctgcagcggaaccgactactttgggtgtccgtgtttccttttatctctttgttggctgcttatggtgacaattgaatgattgttgccatatagctattggattggccatccggtgagcagcagatccattatttaccagtttgttggatttgtaccacttgatcacatagtctttagaacacttgtctttattctaaatcttaacaaggcaag

SEQ ID NO: 22580 - DNA, 692 bp, synthetic construct
  source 1..692: mol_type = other DNA
cacactggtattgcggtacctttgtgcgcctgttttatacacccctccttaatgtaactcagaagtacaacattaccggtcaacagatgactcagtaaaccaactgagcctcgaccaagcacttctgtttccccggaccgagtatcaataggctgctcacgcggctgaaggagaaagtgttcgttacccggccaattacttcgagaagcccagtaccaccatggaggttgcgcggcgtttcgctccgcacatccccagtgtagatcaggctgatgagtcaccgcgttccccacgggtgaccgtggcggtggctgcgctggcggcctgcccatggggtaacccatgggacgcttcaatactgacatggtgtgaagagcctattgagctaattggtagtcctccggcccctgaatgcggctaatcctaactgcggagcagatacccacacaccagcgggcagtctgtcgtaacgggcaactctgcagcggaaccgactactttgggtgtccgtgtttccttttatttttatgctggctgcttatggtgacaattgaggaattgttaccatatagctattggattggccatccagtgtccaacagagcgatcatttacctgttcgttgggttcgtaccactaaaccacaagtcactcagcacacttaattacattataactctcaacacaacaag

SEQ ID NO: 22581 - DNA, 642 bp, synthetic construct
  source 1..642: mol_type = other DNA
aatgtaactcagaagtacaacattaccggtcaacagatgactcagtaaaccaactgagcctcgaccaagcacttctgtttccccggaccgagtatcaataggctgctcacgcggctgaaggagaaagtgttcgttacccggccaattacttcgagaagcccagtaccaccatggaggttgcgcggcgtttcgctccgcacatccccagtgtagatcaggctgatgagtcaccgcgttccccacgggtgaccgtggcggtggctgcgctggcggcctgcccatggggtaacccatgggacgcttcaatactgacatggtgtgaagagcctattgagctaattggtagtcctccggcccctgaatgcggctaatcctaactgcggagcagatacccacacaccagcgggcagtctgtcgtaacgggcaactctgcagcggaaccgactactttgggtgtccgtgtttccttttatttttatgctggctgcttatggtgacaattgaggaattgttaccatatagctattggattggccatccagtgtccaacagagcgatcatttacctgttcgttgggttcgtaccactaaaccacaagtcactcagcacacttaattacattataactctcaacacaacaag

SEQ ID NO: 22582 - DNA, 592 bp, synthetic construct
  source 1..592: mol_type = other DNA
caactgagcctcgaccaagcacttctgtttccccggaccgagtatcaataggctgctcacgcggctgaaggagaaagtgttcgttacccggccaattacttcgagaagcccagtaccaccatggaggttgcgcggcgtttcgctccgcacatccccagtgtagatcaggctgatgagtcaccgcgttccccacgggtgaccgtggcggtggctgcgctggcggcctgcccatggggtaacccatgggacgcttcaatactgacatggtgtgaagagcctattgagctaattggtagtcctccggcccctgaatgcggctaatcctaactgcggagcagatacccacacaccagcgggcagtctgtcgtaacgggcaactctgcagcggaaccgactactttgggtgtccgtgtttccttttatttttatgctggctgcttatggtgacaattgaggaattgttaccatatagctattggattggccatccagtgtccaacagagcgatcatttacctgttcgttgggttcgtaccactaaaccacaagtcactcagcacacttaattacattataactctcaacacaacaag

SEQ ID NO: 22583 - DNA, 542 bp, synthetic construct
  source 1..542: mol_type = other DNA
ggctgctcacgcggctgaaggagaaagtgttcgttacccggccaattacttcgagaagcccagtaccaccatggaggttgcgcggcgtttcgctccgcacatccccagtgtagatcaggctgatgagtcaccgcgttccccacgggtgaccgtggcggtggctgcgctggcggcctgcccatggggtaacccatgggacgcttcaatactgacatggtgtgaagagcctattgagctaattggtagtcctccggcccctgaatgcggctaatcctaactgcggagcagatacccacacaccagcgggcagtctgtcgtaacgggcaactctgcagcggaaccgactactttgggtgtccgtgtttccttttatttttatgctggctgcttatggtgacaattgaggaattgttaccatatagctattggattggccatccagtgtccaacagagcgatcatttacctgttcgttgggttcgtaccactaaaccacaagtcactcagcacacttaattacattataactctcaacacaacaag

SEQ ID NO: 22584 - DNA, 692 bp, synthetic construct
  source 1..692: mol_type = other DNA
cacactggtattacggtacctttgtgcgcctgttttatctacccttgcccaatgcaacatagaagcttagtccaaaaggtcaataggcagcccagtgcaccaactgggtccagaccaagcacttctgttaccccggaccaagtatcagtaggctgctcacgcggctgaaggagaaaacgttcgttacccggccaactacttcgagaaacctagtagcaccatgaaggttgcgcagtgtttcgctccgcacagccccagtgtagatcaggtcgatgagccaccgcattccccacgggtgaccgtggcggtggctgcgttggcggcctgcccatggggtaacccatgggacgcttcaatactgacatggtgtgaagagtctattgagctagttggtagtcctccggcccctgaatgcggctaatcctaactgcggagcgtgcgcttgcaacccagtgagtagcacgtcgtaatgggtaactctgcagcggaaccgactactttgggtgtccgtgtttccttttattccttgtctggctgcttatggtgacaattgagagattgttgccatatagctattggattggccatccggtatctaacagggcgatcatttacctgtttgttggtttcatacccttgaatcttgaggtttataataccctcactcttataataaaactcaatacatcaag

SEQ ID NO: 22585 - DNA, 642 bp, synthetic construct
  source 1..642: mol_type = other DNA
aatgcaacatagaagcttagtccaaaaggtcaataggcagcccagtgcaccaactgggtccagaccaagcacttctgttaccccggaccaagtatcagtaggctgctcacgcggctgaaggagaaaacgttcgttacccggccaactacttcgagaaacctagtagcaccatgaaggttgcgcagtgtttcgctccgcacagccccagtgtagatcaggtcgatgagccaccgcattccccacgggtgaccgtggcggtggctgcgttggcggcctgcccatggggtaacccatgggacgcttcaatactgacatggtgtgaagagtctattgagctagttggtagtcctccggcccctgaatgcggctaatcctaactgcggagcgtgcgcttgcaacccagtgagtagcacgtcgtaatgggtaactctgcagcggaaccgactactttgggtgtccgtgtttccttttattccttgtctggctgcttatggtgacaattgagagattgttgccatatagctattggattggccatccggtatctaacagggcgatcatttacctgtttgttggtttcatacccttgaatcttgaggtttataataccctcactcttataataaaactcaatacatcaag

SEQ ID NO: 22586 - DNA, 592 bp, synthetic construct
  source 1..592: mol_type = other DNA
caactgggtccagaccaagcacttctgttaccccggaccaagtatcagtaggctgctcacgcggctgaaggagaaaacgttcgttacccggccaactacttcgagaaacctagtagcaccatgaaggttgcgcagtgtttcgctccgcacagccccagtgtagatcaggtcgatgagccaccgcattccccacgggtgaccgtggcggtggctgcgttggcggcctgcccatggggtaacccatgggacgcttcaatactgacatggtgtgaagagtctattgagctagttggtagtcctccggcccctgaatgcggctaatcctaactgcggagcgtgcgcttgcaacccagtgagtagcacgtcgtaatgggtaactctgcagcggaaccgactactttgggtgtccgtgtttccttttattccttgtctggctgcttatggtgacaattgagagattgttgccatatagctattggattggccatccggtatctaacagggcgatcatttacctgtttgttggtttcatacccttgaatcttgaggtttataataccctcactcttataataaaactcaatacatcaag

SEQ ID NO: 22587 - DNA, 542 bp, synthetic construct
  source 1..542: mol_type = other DNA
ggctgctcacgcggctgaaggagaaaacgttcgttacccggccaactacttcgagaaacctagtagcaccatgaaggttgcgcagtgtttcgctccgcacagccccagtgtagatcaggtcgatgagccaccgcattccccacgggtgaccgtggcggtggctgcgttggcggcctgcccatggggtaacccatgggacgcttcaatactgacatggtgtgaagagtctattgagctagttggtagtcctccggcccctgaatgcggctaatcctaactgcggagcgtgcgcttgcaacccagtgagtagcacgtcgtaatgggtaactctgcagcggaaccgactactttgggtgtccgtgtttccttttattccttgtctggctgcttatggtgacaattgagagattgttgccatatagctattggattggccatccggtatctaacagggcgatcatttacctgtttgttggtttcatacccttgaatcttgaggtttataataccctcactcttataataaaactcaatacatcaag

SEQ ID NO: 22588 - DNA, 692 bp, synthetic construct
  source 1..692: mol_type = other DNA
cacactggtatcacggtacccttgtgcgcctgttttatccacccctccccgaagtaacttagaagctctaaataagcggtcagcagccagcccagcacaccagctgggttttgaccaagtacttctgttaccccggaccgagtatcaataggctgcacacgcggctgaaggagaaaacgttcgttacccggccatctacttcgagaaacctagtaccactatgaaagttgcgaagcgtttcgctccacacaaccccagtgtagatcaggctgatgagtcaccgcattccccacaggtgactgtggcggtggctgcgttggcggcctgcccatggggcaacccatgggacgcttcaataccgacatggtgcgaagagtctattgagctagatggtagtcctccggcccctgaatgcggctaatcctaactgcggagcaggtgcacacaaaccagtgagtagcctgtcgtaatgggcaactctgcagcggaaccgactactttgggtgtccgtgtttctttttattcttatattggctgcttatggtgacaattgaaagattgttaccatatagctattggattggccatccggtgactagcagagcactgatatacctatttgtgggctttgtaccactcaactttgtcagctacaccacattgctatatattgtccaactgaacgcaagaag

SEQ ID NO: 22589 - DNA, 642 bp, synthetic construct
  source 1..642: mol_type = other DNA
gaagtaacttagaagctctaaataagcggtcagcagccagcccagcacaccagctgggttttgaccaagtacttctgttaccccggaccgagtatcaataggctgcacacgcggctgaaggagaaaacgttcgttacccggccatctacttcgagaaacctagtaccactatgaaagttgcgaagcgtttcgctccacacaaccccagtgtagatcaggctgatgagtcaccgcattccccacaggtgactgtggcggtggctgcgttggcggcctgcccatggggcaacccatgggacgcttcaataccgacatggtgcgaagagtctattgagctagatggtagtcctccggcccctgaatgcggctaatcctaactgcggagcaggtgcacacaaaccagtgagtagcctgtcgtaatgggcaactctgcagcggaaccgactactttgggtgtccgtgtttctttttattcttatattggctgcttatggtgacaattgaaagattgttaccatatagctattggattggccatccggtgactagcagagcactgatatacctatttgtgggctttgtaccactcaactttgtcagctacaccacattgctatatattgtccaactgaacgcaagaag

SEQ ID NO: 22590 - DNA, 592 bp, synthetic construct
  source 1..592: mol_type = other DNA
cagctgggttttgaccaagtacttctgttaccccggaccgagtatcaataggctgcacacgcggctgaaggagaaaacgttcgttacccggccatctacttcgagaaacctagtaccactatgaaagttgcgaagcgtttcgctccacacaaccccagtgtagatcaggctgatgagtcaccgcattccccacaggtgactgtggcggtggctgcgttggcggcctgcccatggggcaacccatgggacgcttcaataccgacatggtgcgaagagtctattgagctagatggtagtcctccggcccctgaatgcggctaatcctaactgcggagcaggtgcacacaaaccagtgagtagcctgtcgtaatgggcaactctgcagcggaaccgactactttgggtgtccgtgtttctttttattcttatattggctgcttatggtgacaattgaaagattgttaccatatagctattggattggccatccggtgactagcagagcactgatatacctatttgtgggctttgtaccactcaactttgtcagctacaccacattgctatatattgtccaactgaacgcaagaag

SEQ ID NO: 22591 - DNA, 542 bp, synthetic construct
  source 1..542: mol_type = other DNA
ggctgcacacgcggctgaaggagaaaacgttcgttacccggccatctacttcgagaaacctagtaccactatgaaagttgcgaagcgtttcgctccacacaaccccagtgtagatcaggctgatgagtcaccgcattccccacaggtgactgtggcggtggctgcgttggcggcctgcccatggggcaacccatgggacgcttcaataccgacatggtgcgaagagtctattgagctagatggtagtcctccggcccctgaatgcggctaatcctaactgcggagcaggtgcacacaaaccagtgagtagcctgtcgtaatgggcaactctgcagcggaaccgactactttgggtgtccgtgtttctttttattcttatattggctgcttatggtgacaattgaaagattgttaccatatagctattggattggccatccggtgactagcagagcactgatatacctatttgtgggctttgtaccactcaactttgtcagctacaccacattgctatatattgtccaactgaacgcaagaag

SEQ ID NO: 22592 - DNA, 692 bp, synthetic construct
  source 1..692: mol_type = other DNA
cacactggtattgcggtacctttgtgcgcctgttttatctgcccttccccaatgtaacttagaagttaaactcagacggccaatagacagcccagtacaccaactgggtctcggccaggcacttctgtttccccggactgagtatcaataagctgctcgcgcggctgaaggagaaaacgttcgttatccggccaattacttcgagaaacctagtaccaccatggacgttgcgcagtgtttcgctccgcacaaccccagtgtagatcaggtcgatgagtcaccgcaatccccatgggcgaccgtggcggtggctgcgctggcggcctgcccatgggtcaacccatgggacgcttcaatactgacatggtgtgaagagtctattgagctaattggtagtcctccggcccctgaatgcggctaatcccaactgcggagcagatacccacacgccagtgggcagtctgtcgtaacgggcaactctgcagcggaaccgactactttgggtgtccgtgtttccttttatccttacattggctgcttatggtgacaattgagagattgttaccatatagctattggattggccatccagtgagcaacagagcaattatatttctctttgttgggtttgtaccacttgattttgatagttacaacaccctactttatattgttcgcctgaacacgagaaa

SEQ ID NO: 22593 - DNA, 642 bp, synthetic construct
  source 1..642: mol_type = other DNA
aatgtaacttagaagttaaactcagacggccaatagacagcccagtacaccaactgggtctcggccaggcacttctgtttccccggactgagtatcaataagctgctcgcgcggctgaaggagaaaacgttcgttatccggccaattacttcgagaaacctagtaccaccatggacgttgcgcagtgtttcgctccgcacaaccccagtgtagatcaggtcgatgagtcaccgcaatccccatgggcgaccgtggcggtggctgcgctggcggcctgcccatgggtcaacccatgggacgcttcaatactgacatggtgtgaagagtctattgagctaattggtagtcctccggcccctgaatgcggctaatcccaactgcggagcagatacccacacgccagtgggcagtctgtcgtaacgggcaactctgcagcggaaccgactactttgggtgtccgtgtttccttttatccttacattggctgcttatggtgacaattgagagattgttaccatatagctattggattggccatccagtgagcaacagagcaattatatttctctttgttgggtttgtaccacttgattttgatagttacaacaccctactttatattgttcgcctgaacacgagaaa

SEQ ID NO: 22594 - DNA, 592 bp, synthetic construct
  source 1..592: mol_type = other DNA
caactgggtctcggccaggcacttctgtttccccggactgagtatcaataagctgctcgcgcggctgaaggagaaaacgttcgttatccggccaattacttcgagaaacctagtaccaccatggacgttgcgcagtgtttcgctccgcacaaccccagtgtagatcaggtcgatgagtcaccgcaatccccatgggcgaccgtggcggtggctgcgctggcggcctgcccatgggtcaacccatgggacgcttcaatactgacatggtgtgaagagtctattgagctaattggtagtcctccggcccctgaatgcggctaatcccaactgcggagcagatacccacacgccagtgggcagtctgtcgtaacgggcaactctgcagcggaaccgactactttgggtgtccgtgtttccttttatccttacattggctgcttatggtgacaattgagagattgttaccatatagctattggattggccatccagtgagcaacagagcaattatatttctctttgttgggtttgtaccacttgattttgatagttacaacaccctactttatattgttcgcctgaacacgagaaa

SEQ ID NO: 22595 - DNA, 542 bp, synthetic construct
  source 1..542: mol_type = other DNA
agctgctcgcgcggctgaaggagaaaacgttcgttatccggccaattacttcgagaaacctagtaccaccatggacgttgcgcagtgtttcgctccgcacaaccccagtgtagatcaggtcgatgagtcaccgcaatccccatgggcgaccgtggcggtggctgcgctggcggcctgcccatgggtcaacccatgggacgcttcaatactgacatggtgtgaagagtctattgagctaattggtagtcctccggcccctgaatgcggctaatcccaactgcggagcagatacccacacgccagtgggcagtctgtcgtaacgggcaactctgcagcggaaccgactactttgggtgtccgtgtttccttttatccttacattggctgcttatggtgacaattgagagattgttaccatatagctattggattggccatccagtgagcaacagagcaattatatttctctttgttgggtttgtaccacttgattttgatagttacaacaccctactttatattgttcgcctgaacacgagaaa

SEQ ID NO: 22596 - DNA, 692 bp, synthetic construct
  source 1..692: mol_type = other DNA
gtactccggtattgcggtacccttgtacgcctgttttatactcccttcccccgtaacttagaagaaataaaccaagttcactaggagggggtacaaaccagtaccaccacgaacaagcacttctgtttccccggtgacattgcatagactgtacccacggttgaaagcgactgatccgttacccgctactgtacttcgagaagcctagtaccatcttggaatcttcgacgcgttgcgctcagcactcaaccccagagtgtagcttaggtcgatgagtctggacaatccccaccggtgacggtggtccaggctgcgttggcggcctacctgtggcccaaagccacaggacgctagttgtgaacaaggtgtgaagagcctattgagcttcagtagagtcctccggcccctgaatgcggctaatcccaaccacggagcaggtggtcataatccaatgactggcctgtcgtaacgcgcaagtctgtggcggaaccgactactttgggtgtccgtgtttccttttattttgtcaatggctgcttatggtgacaatctaagattgccatcatatagcttttggattggccatccggtattattttgagttatttgatttgttgtccacagctctttacagtatcacttaactattattgtttgtattttgctccttggatcacaaccaggtaatcaga

SEQ ID NO: 22597 - DNA, 642 bp, synthetic construct
  source 1..642: mol_type = other DNA
ccgtaacttagaagaaataaaccaagttcactaggagggggtacaaaccagtaccaccacgaacaagcacttctgtttccccggtgacattgcatagactgtacccacggttgaaagcgactgatccgttacccgctactgtacttcgagaagcctagtaccatcttggaatcttcgacgcgttgcgctcagcactcaaccccagagtgtagcttaggtcgatgagtctggacaatccccaccggtgacggtggtccaggctgcgttggcggcctacctgtggcccaaagccacaggacgctagttgtgaacaaggtgtgaagagcctattgagcttcagtagagtcctccggcccctgaatgcggctaatcccaaccacggagcaggtggtcataatccaatgactggcctgtcgtaacgcgcaagtctgtggcggaaccgactactttgggtgtccgtgtttccttttattttgtcaatggctgcttatggtgacaatctaagattgccatcatatagcttttggattggccatccggtattattttgagttatttgatttgttgtccacagctctttacagtatcacttaactattattgtttgtattttgctccttggatcacaaccaggtaatcaga

SEQ ID NO: 22598 - DNA, 592 bp, synthetic construct
  source 1..592: mol_type = other DNA
gtaccaccacgaacaagcacttctgtttccccggtgacattgcatagactgtacccacggttgaaagcgactgatccgttacccgctactgtacttcgagaagcctagtaccatcttggaatcttcgacgcgttgcgctcagcactcaaccccagagtgtagcttaggtcgatgagtctggacaatccccaccggtgacggtggtccaggctgcgttggcggcctacctgtggcccaaagccacaggacgctagttgtgaacaaggtgtgaagagcctattgagcttcagtagagtcctccggcccctgaatgcggctaatcccaaccacggagcaggtggtcataatccaatgactggcctgtcgtaacgcgcaagtctgtggcggaaccgactactttgggtgtccgtgtttccttttattttgtcaatggctgcttatggtgacaatctaagattgccatcatatagcttttggattggccatccggtattattttgagttatttgatttgttgtccacagctctttacagtatcacttaactattattgtttgtattttgctccttggatcacaaccaggtaatcaga

SEQ ID NO: 22599 - DNA, 542 bp, synthetic construct
  source 1..542: mol_type = other DNA
gtacccacggttgaaagcgactgatccgttacccgctactgtacttcgagaagcctagtaccatcttggaatcttcgacgcgttgcgctcagcactcaaccccagagtgtagcttaggtcgatgagtctggacaatccccaccggtgacggtggtccaggctgcgttggcggcctacctgtggcccaaagccacaggacgctagttgtgaacaaggtgtgaagagcctattgagcttcagtagagtcctccggcccctgaatgcggctaatcccaaccacggagcaggtggtcataatccaatgactggcctgtcgtaacgcgcaagtctgtggcggaaccgactactttgggtgtccgtgtttccttttattttgtcaatggctgcttatggtgacaatctaagattgccatcatatagcttttggattggccatccggtattattttgagttatttgatttgttgtccacagctctttacagtatcacttaactattattgtttgtattttgctccttggatcacaaccaggtaatcaga

SEQ ID NO: 22600 - DNA, 692 bp, synthetic construct
  source 1..692: mol_type = other DNA
cactctggtattacggtacctttgtgcgcctgttttatgtcccctcccccaatcgcaacttagaagcaacacacactgatcaacagtaagcgtggcataccagccacgttttgatcaagcacttctgttaccccggactgagtatcaatagactgctcacgcggttgaaggagaaagcgttcgttatccggccaactacttcgagaaacctagtaacaccgtgaaagttgcagagtgtttcgctcagcactaccccagtgtagatcaggtcgatgagtcaccgcattccccacgggcgaccgtggcggtggctgcgctggcggcctgcctacggggaaacccgtaggacgctctaatacagacatggtgcgaagagtctattgagctagttggtagtcctccggcccctgaatgcggctaatcctaactgcggagcacacacccccaagccagggggcagtgtgtcgtaacgggtaactctgcagcggaaccgactactttgggtgtccgtgtttcattttattcctatgctggctgcttatggtgacaattgacagattgttaccatatagctattggattggccatccggtgactaatagagccattatataccactttgttgggtttataccactcaacttgaaagaggtcaaaacactacagctcatcattaaattgaacacaacaaa

SEQ ID NO: 22601 - DNA, 642 bp, synthetic construct
  source 1..642: mol_type = other DNA
aatcgcaacttagaagcaacacacactgatcaacagtaagcgtggcataccagccacgttttgatcaagcacttctgttaccccggactgagtatcaatagactgctcacgcggttgaaggagaaagcgttcgttatccggccaactacttcgagaaacctagtaacaccgtgaaagttgcagagtgtttcgctcagcactaccccagtgtagatcaggtcgatgagtcaccgcattccccacgggcgaccgtggcggtggctgcgctggcggcctgcctacggggaaacccgtaggacgctctaatacagacatggtgcgaagagtctattgagctagttggtagtcctccggcccctgaatgcggctaatcctaactgcggagcacacacccccaagccagggggcagtgtgtcgtaacgggtaactctgcagcggaaccgactactttgggtgtccgtgtttcattttattcctatgctggctgcttatggtgacaattgacagattgttaccatatagctattggattggccatccggtgactaatagagccattatataccactttgttgggtttataccactcaacttgaaagaggtcaaaacactacagctcatcattaaattgaacacaacaaa

SEQ ID NO: 22602 - DNA, 592 bp, synthetic construct
  source 1..592: mol_type = other DNA
cagccacgttttgatcaagcacttctgttaccccggactgagtatcaatagactgctcacgcggttgaaggagaaagcgttcgttatccggccaactacttcgagaaacctagtaacaccgtgaaagttgcagagtgtttcgctcagcactaccccagtgtagatcaggtcgatgagtcaccgcattccccacgggcgaccgtggcggtggctgcgctggcggcctgcctacggggaaacccgtaggacgctctaatacagacatggtgcgaagagtctattgagctagttggtagtcctccggcccctgaatgcggctaatcctaactgcggagcacacacccccaagccagggggcagtgtgtcgtaacgggtaactctgcagcggaaccgactactttgggtgtccgtgtttcattttattcctatgctggctgcttatggtgacaattgacagattgttaccatatagctattggattggccatccggtgactaatagagccattatataccactttgttgggtttataccactcaacttgaaagaggtcaaaacactacagctcatcattaaattgaacacaacaaa

SEQ ID NO: 22603 - DNA, 542 bp, synthetic construct
  source 1..542: mol_type = other DNA
gactgctcacgcggttgaaggagaaagcgttcgttatccggccaactacttcgagaaacctagtaacaccgtgaaagttgcagagtgtttcgctcagcactaccccagtgtagatcaggtcgatgagtcaccgcattccccacgggcgaccgtggcggtggctgcgctggcggcctgcctacggggaaacccgtaggacgctctaatacagacatggtgcgaagagtctattgagctagttggtagtcctccggcccctgaatgcggctaatcctaactgcggagcacacacccccaagccagggggcagtgtgtcgtaacgggtaactctgcagcggaaccgactactttgggtgtccgtgtttcattttattcctatgctggctgcttatggtgacaattgacagattgttaccatatagctattggattggccatccggtgactaatagagccattatataccactttgttgggtttataccactcaacttgaaagaggtcaaaacactacagctcatcattaaattgaacacaacaaa

SEQ ID NO: 22604 - DNA, 692 bp, synthetic construct
  source 1..692: mol_type = other DNA
gcactctggtatcacggtacccttgtgcgcctgttttatatccccaccccagtggaacattagaagcagcacacctatgatcaatagtgggcgtggcatccagtcacgttatgatcaagcacttctgtgaccccggactgagtatcaatagactgctcacgcggttgaaggagaaaacgttcgttacccggccagttacttcgagaaacccagtaacaccatgaatgttgcagagtgtttcgctcagcacttcccccgtgtagatcaggtcgatgagccactgcattccccacgggcgaccgtggcagtggctgcgttggcggcctgcctatggggtcacccataggacgctctaatactgacatggtgcgaagagtctattgagctaactggtagtcctccggcccctgaatgcggctaatcctaactgtggagcacattcccccaatccagggggcagtgtgtcgtaacgggcaactctgcagcggaaccgactactttgggtgtccgtgtttctttttattctcatattggctgcttatggtgacaattacagaattgttaccatatagctattggattggccatccggtgactaacagagcaattatttatcaattcgttggatttgtcccactcgatttcaaagcagtcaatacactctcatatatcgttacactcaacacaacaaa

SEQ ID NO: 22605 - DNA, 642 bp, synthetic construct
  source 1..642: mol_type = other DNA
agtggaacattagaagcagcacacctatgatcaatagtgggcgtggcatccagtcacgttatgatcaagcacttctgtgaccccggactgagtatcaatagactgctcacgcggttgaaggagaaaacgttcgttacccggccagttacttcgagaaacccagtaacaccatgaatgttgcagagtgtttcgctcagcacttcccccgtgtagatcaggtcgatgagccactgcattccccacgggcgaccgtggcagtggctgcgttggcggcctgcctatggggtcacccataggacgctctaatactgacatggtgcgaagagtctattgagctaactggtagtcctccggcccctgaatgcggctaatcctaactgtggagcacattcccccaatccagggggcagtgtgtcgtaacgggcaactctgcagcggaaccgactactttgggtgtccgtgtttctttttattctcatattggctgcttatggtgacaattacagaattgttaccatatagctattggattggccatccggtgactaacagagcaattatttatcaattcgttggatttgtcccactcgatttcaaagcagtcaatacactctcatatatcgttacactcaacacaacaaa

SEQ ID NO: 22606 - DNA, 592 bp, synthetic construct
  source 1..592: mol_type = other DNA
cagtcacgttatgatcaagcacttctgtgaccccggactgagtatcaatagactgctcacgcggttgaaggagaaaacgttcgttacccggccagttacttcgagaaacccagtaacaccatgaatgttgcagagtgtttcgctcagcacttcccccgtgtagatcaggtcgatgagccactgcattccccacgggcgaccgtggcagtggctgcgttggcggcctgcctatggggtcacccataggacgctctaatactgacatggtgcgaagagtctattgagctaactggtagtcctccggcccctgaatgcggctaatcctaactgtggagcacattcccccaatccagggggcagtgtgtcgtaacgggcaactctgcagcggaaccgactactttgggtgtccgtgtttctttttattctcatattggctgcttatggtgacaattacagaattgttaccatatagctattggattggccatccggtgactaacagagcaattatttatcaattcgttggatttgtcccactcgatttcaaagcagtcaatacactctcatatatcgttacactcaacacaacaaa

SEQ ID NO: 22607 - DNA, 542 bp, synthetic construct
  source 1..542: mol_type = other DNA
gactgctcacgcggttgaaggagaaaacgttcgttacccggccagttacttcgagaaacccagtaacaccatgaatgttgcagagtgtttcgctcagcacttcccccgtgtagatcaggtcgatgagccactgcattccccacgggcgaccgtggcagtggctgcgttggcggcctgcctatggggtcacccataggacgctctaatactgacatggtgcgaagagtctattgagctaactggtagtcctccggcccctgaatgcggctaatcctaactgtggagcacattcccccaatccagggggcagtgtgtcgtaacgggcaactctgcagcggaaccgactactttgggtgtccgtgtttctttttattctcatattggctgcttatggtgacaattacagaattgttaccatatagctattggattggccatccggtgactaacagagcaattatttatcaattcgttggatttgtcccactcgatttcaaagcagtcaatacactctcatatatcgttacactcaacacaacaaa

SEQ ID NO: 22608 - DNA, 692 bp, synthetic construct
  source 1..692: mol_type = other DNA
cacactggtatcacggtacctttgtgcgcctgttttatccacccttccccaagtgacttagaagcataccacacacggtcaacaggcggctcaatgcaccaattgagtcatgaccaagtacttctgttaccccggacttagtatcaataagctgctcacgcggctgaaggagaaaacgttcgttacccggccaattacttcgagaaacctagtagcaccatggaggttgcgcggcgtttcgctccacacaaccccagtgtagatcaggctgatgagtcaccacaatcctcacgggcgaccgtggtggtggctgcgctggcggcctgcccatggggtaacccatgggacgctacaatactgacatggtgtgaagagtctattgagctaattggtagtcctccggcccctgaatgcggctaatcctaactgcggagcagatacccacacaccagtgggcagtctgtcgtaacgggcaactctgcagcggaaccgactactttgggtgtccgtgtttccttttttctcttatactggctgcttatggtgacaattgaaagattgttaccatatagctattggattggccatccagtgacaaacagagcgattgtttacctgttcattggtttcgtaccgctgaattacacagttttaaacacccttaatcttattttggcacttaatacatcaaa

SEQ ID NO: 22609 - DNA, 642 bp, synthetic construct
  source 1..642: mol_type = other DNA
aagtgacttagaagcataccacacacggtcaacaggcggctcaatgcaccaattgagtcatgaccaagtacttctgttaccccggacttagtatcaataagctgctcacgcggctgaaggagaaaacgttcgttacccggccaattacttcgagaaacctagtagcaccatggaggttgcgcggcgtttcgctccacacaaccccagtgtagatcaggctgatgagtcaccacaatcctcacgggcgaccgtggtggtggctgcgctggcggcctgcccatggggtaacccatgggacgctacaatactgacatggtgtgaagagtctattgagctaattggtagtcctccggcccctgaatgcggctaatcctaactgcggagcagatacccacacaccagtgggcagtctgtcgtaacgggcaactctgcagcggaaccgactactttgggtgtccgtgtttccttttttctcttatactggctgcttatggtgacaattgaaagattgttaccatatagctattggattggccatccagtgacaaacagagcgattgtttacctgttcattggtttcgtaccgctgaattacacagttttaaacacccttaatcttattttggcacttaatacatcaaa

SEQ ID NO: 22610 - DNA, 592 bp, synthetic construct
  source 1..592: mol_type = other DNA
aattgagtcatgaccaagtacttctgttaccccggacttagtatcaataagctgctcacgcggctgaaggagaaaacgttcgttacccggccaattacttcgagaaacctagtagcaccatggaggttgcgcggcgtttcgctccacacaaccccagtgtagatcaggctgatgagtcaccacaatcctcacgggcgaccgtggtggtggctgcgctggcggcctgcccatggggtaacccatgggacgctacaatactgacatggtgtgaagagtctattgagctaattggtagtcctccggcccctgaatgcggctaatcctaactgcggagcagatacccacacaccagtgggcagtctgtcgtaacgggcaactctgcagcggaaccgactactttgggtgtccgtgtttccttttttctcttatactggctgcttatggtgacaattgaaagattgttaccatatagctattggattggccatccagtgacaaacagagcgattgtttacctgttcattggtttcgtaccgctgaattacacagttttaaacacccttaatcttattttggcacttaatacatcaaa

SEQ ID NO: 22611 - DNA, 542 bp, synthetic construct
  source 1..542: mol_type = other DNA
gctgctcacgcggctgaaggagaaaacgttcgttacccggccaattacttcgagaaacctagtagcaccatggaggttgcgcggcgtttcgctccacacaaccccagtgtagatcaggctgatgagtcaccacaatcctcacgggcgaccgtggtggtggctgcgctggcggcctgcccatggggtaacccatgggacgctacaatactgacatggtgtgaagagtctattgagctaattggtagtcctccggcccctgaatgcggctaatcctaactgcggagcagatacccacacaccagtgggcagtctgtcgtaacgggcaactctgcagcggaaccgactactttgggtgtccgtgtttccttttttctcttatactggctgcttatggtgacaattgaaagattgttaccatatagctattggattggccatccagtgacaaacagagcgattgtttacctgttcattggtttcgtaccgctgaattacacagttttaaacacccttaatcttattttggcacttaatacatcaaa

SEQ ID NO: 22612 - DNA, 692 bp, synthetic construct
  source 1..692: mol_type = other DNA
cacactggtatcacggtacctttgtgcgcctgttttataaccccttccccaaacgtaacgtagaagctacacacactgatcaatagtaggcacagcgcaccagttgtgtcccgatcaagcacttctgtctccccggaccgagtatcaatagactgctcacgcggttgaaggagaaaacgttcgttaaccggctgactacttcgagaaacctagtagtactatgaaagttgcgaagcgtttcactcagcacttcccccgtgtagatcaggctgatgagtcactgcgttccccacgggtgaccgtggcagtgactgcgttggcggcctgcccatggggtaacccatgggacgcttcaatacggacatggtgcgaagagtctattgagctagccagtagtcctccggcccctgaatgcggctaatcctaactgcggagcatgtgccctcgatccagggggtagcgtgtcgtaacgggcaactctgcagcggaaccgactactttgggtgtccgtgtttctttttattcttatattggctgcttatggtgacaattgagagattgttaccatatagctattggattggccacccggtgactaatagagctattatctactcctttataggttttgtgccgttgaactacaaggtcttaaggactctcaactttatcataatacttaatactgcaaa

SEQ ID NO: 22613 - DNA, 642 bp, synthetic construct
  source 1..642: mol_type = other DNA
aaacgtaacgtagaagctacacacactgatcaatagtaggcacagcgcaccagttgtgtcccgatcaagcacttctgtctccccggaccgagtatcaatagactgctcacgcggttgaaggagaaaacgttcgttaaccggctgactacttcgagaaacctagtagtactatgaaagttgcgaagcgtttcactcagcacttcccccgtgtagatcaggctgatgagtcactgcgttccccacgggtgaccgtggcagtgactgcgttggcggcctgcccatggggtaacccatgggacgcttcaatacggacatggtgcgaagagtctattgagctagccagtagtcctccggcccctgaatgcggctaatcctaactgcggagcatgtgccctcgatccagggggtagcgtgtcgtaacgggcaactctgcagcggaaccgactactttgggtgtccgtgtttctttttattcttatattggctgcttatggtgacaattgagagattgttaccatatagctattggattggccacccggtgactaatagagctattatctactcctttataggttttgtgccgttgaactacaaggtcttaaggactctcaactttatcataatacttaatactgcaaa

SEQ ID NO: 22614 - DNA, 592 bp, synthetic construct
  source 1..592: mol_type = other DNA
cagttgtgtcccgatcaagcacttctgtctccccggaccgagtatcaatagactgctcacgcggttgaaggagaaaacgttcgttaaccggctgactacttcgagaaacctagtagtactatgaaagttgcgaagcgtttcactcagcacttcccccgtgtagatcaggctgatgagtcactgcgttccccacgggtgaccgtggcagtgactgcgttggcggcctgcccatggggtaacccatgggacgcttcaatacggacatggtgcgaagagtctattgagctagccagtagtcctccggcccctgaatgcggctaatcctaactgcggagcatgtgccctcgatccagggggtagcgtgtcgtaacgggcaactctgcagcggaaccgactactttgggtgtccgtgtttctttttattcttatattggctgcttatggtgacaattgagagattgttaccatatagctattggattggccacccggtgactaatagagctattatctactcctttataggttttgtgccgttgaactacaaggtcttaaggactctcaactttatcataatacttaatactgcaaa

SEQ ID NO: 22615 - DNA, 542 bp, synthetic construct
  source 1..542: mol_type = other DNA
gactgctcacgcggttgaaggagaaaacgttcgttaaccggctgactacttcgagaaacctagtagtactatgaaagttgcgaagcgtttcactcagcacttcccccgtgtagatcaggctgatgagtcactgcgttccccacgggtgaccgtggcagtgactgcgttggcggcctgcccatggggtaacccatgggacgcttcaatacggacatggtgcgaagagtctattgagctagccagtagtcctccggcccctgaatgcggctaatcctaactgcggagcatgtgccctcgatccagggggtagcgtgtcgtaacgggcaactctgcagcggaaccgactactttgggtgtccgtgtttctttttattcttatattggctgcttatggtgacaattgagagattgttaccatatagctattggattggccacccggtgactaatagagctattatctactcctttataggttttgtgccgttgaactacaaggtcttaaggactctcaactttatcataatacttaatactgcaaa

SEQ ID NO: 22616 - DNA, 692 bp, synthetic construct
  source 1..692: mol_type = other DNA
cacactggtatcaaggtacctttgtgcgcctgttttattcacccttccccttcgtaacttagaagcatagctcagacggtcaatagacagcccagcataccagctgggtcatgaccaagcacttctgttgccccggactgagtatcaataggctgcttgcgcggctgaaggagaaaagttcgttacccggccagttacttcgagaaacctagtaacaccatggaagttgcgtagtgtttcgctccgcacaaccccagtgtagatcaggtcgatgagtcaccgcataccccacgggtgaccgtggcggtggctgcgttggcggcctgcccatggggcatacccatgggacgctacaatactgacatggtgcgaagagtctattgagctaattggtagtcctccggcccctgaatgcggctaatcctaactgcggagcagatacccacacaccagtgggcggtctgtcgtaacgggtaactctgcagcggaaccgactactttgggtgtccgtgtttccttttattcctaatctggctgcttatggtgacaattgagagattgttaccatatagctattggattggccatccggtgactaacagagcgatcatctacctgtttgttggtttcattccactaaactacaaagtactaaacactctgaattacattttactgcttaactcatcaaa

SEQ ID NO: 22617 - DNA, 642 bp, synthetic construct
  source 1..642: mol_type = other DNA
ttcgtaacttagaagcatagctcagacggtcaatagacagcccagcataccagctgggtcatgaccaagcacttctgttgccccggactgagtatcaataggctgcttgcgcggctgaaggagaaaagttcgttacccggccagttacttcgagaaacctagtaacaccatggaagttgcgtagtgtttcgctccgcacaaccccagtgtagatcaggtcgatgagtcaccgcataccccacgggtgaccgtggcggtggctgcgttggcggcctgcccatggggcatacccatgggacgctacaatactgacatggtgcgaagagtctattgagctaattggtagtcctccggcccctgaatgcggctaatcctaactgcggagcagatacccacacaccagtgggcggtctgtcgtaacgggtaactctgcagcggaaccgactactttgggtgtccgtgtttccttttattcctaatctggctgcttatggtgacaattgagagattgttaccatatagctattggattggccatccggtgactaacagagcgatcatctacctgtttgttggtttcattccactaaactacaaagtactaaacactctgaattacattttactgcttaactcatcaaa

SEQ ID NO: 22618 - DNA, 592 bp, synthetic construct
  source 1..592: mol_type = other DNA
cagctgggtcatgaccaagcacttctgttgccccggactgagtatcaataggctgcttgcgcggctgaaggagaaaagttcgttacccggccagttacttcgagaaacctagtaacaccatggaagttgcgtagtgtttcgctccgcacaaccccagtgtagatcaggtcgatgagtcaccgcataccccacgggtgaccgtggcggtggctgcgttggcggcctgcccatggggcatacccatgggacgctacaatactgacatggtgcgaagagtctattgagctaattggtagtcctccggcccctgaatgcggctaatcctaactgcggagcagatacccacacaccagtgggcggtctgtcgtaacgggtaactctgcagcggaaccgactactttgggtgtccgtgtttccttttattcctaatctggctgcttatggtgacaattgagagattgttaccatatagctattggattggccatccggtgactaacagagcgatcatctacctgtttgttggtttcattccactaaactacaaagtactaaacactctgaattacattttactgcttaactcatcaaa

SEQ ID NO: 22619 - DNA, 542 bp, synthetic construct
  source 1..542: mol_type = other DNA
ggctgcttgcgcggctgaaggagaaaagttcgttacccggccagttacttcgagaaacctagtaacaccatggaagttgcgtagtgtttcgctccgcacaaccccagtgtagatcaggtcgatgagtcaccgcataccccacgggtgaccgtggcggtggctgcgttggcggcctgcccatggggcatacccatgggacgctacaatactgacatggtgcgaagagtctattgagctaattggtagtcctccggcccctgaatgcggctaatcctaactgcggagcagatacccacacaccagtgggcggtctgtcgtaacgggtaactctgcagcggaaccgactactttgggtgtccgtgtttccttttattcctaatctggctgcttatggtgacaattgagagattgttaccatatagctattggattggccatccggtgactaacagagcgatcatctacctgtttgttggtttcattccactaaactacaaagtactaaacactctgaattacattttactgcttaactcatcaaa

SEQ ID NO: 22620 - DNA, 693 bp, synthetic construct
  source 1..693: mol_type = other DNA
tacactggtatctcggtacctttgtacgcctgttttataccccctccctgatttgcaacttagaagcaacgcaaaccagatcaatagtaggtgtgacataccagtcgcatcttgatcaagcacttctgtatccccggaccgagtatcaatagactgtgcacacggttgaaggagaaaacgtccgttacccggctaactacttcgagaagcctagtaacgccattgaagttgcagagtgtttcgctcagcactccccccgtgtagatcaggtcgatgagtcaccgcattccccacgggcgaccgtggcggtggctgcgttggcggcctgcctatggggtaacccataggacgctctaatacggacatggcgtgaagagtctattgagctagttagtagtcctccggcccctgaatgcggctaatcctaactgcggagcacatacccttaatccaaagggcagtgtgtcgtaacgggcaactctgcagcggaaccgactactttgggtgtccgtgtttctttttattcttgtattggctgcttatggtgacaattaaagaattgttaccatatagctattggattggccatccagtgtcaaacagagctattgtatatctctttgttggattcacacctctcactcttgaaacgttacacaccctcaattacattatactgctgaacacgaagcg

SEQ ID NO: 22621 - DNA, 643 bp, synthetic construct
  source 1..643: mol_type = other DNA
atttgcaacttagaagcaacgcaaaccagatcaatagtaggtgtgacataccagtcgcatcttgatcaagcacttctgtatccccggaccgagtatcaatagactgtgcacacggttgaaggagaaaacgtccgttacccggctaactacttcgagaagcctagtaacgccattgaagttgcagagtgtttcgctcagcactccccccgtgtagatcaggtcgatgagtcaccgcattccccacgggcgaccgtggcggtggctgcgttggcggcctgcctatggggtaacccataggacgctctaatacggacatggcgtgaagagtctattgagctagttagtagtcctccggcccctgaatgcggctaatcctaactgcggagcacatacccttaatccaaagggcagtgtgtcgtaacgggcaactctgcagcggaaccgactactttgggtgtccgtgtttctttttattcttgtattggctgcttatggtgacaattaaagaattgttaccatatagctattggattggccatccagtgtcaaacagagctattgtatatctctttgttggattcacacctctcactcttgaaacgttacacaccctcaattacattatactgctgaacacgaagcg

SEQ ID NO: 22622 - DNA, 593 bp, synthetic construct
  source 1..593: mol_type = other DNA
ccagtcgcatcttgatcaagcacttctgtatccccggaccgagtatcaatagactgtgcacacggttgaaggagaaaacgtccgttacccggctaactacttcgagaagcctagtaacgccattgaagttgcagagtgtttcgctcagcactccccccgtgtagatcaggtcgatgagtcaccgcattccccacgggcgaccgtggcggtggctgcgttggcggcctgcctatggggtaacccataggacgctctaatacggacatggcgtgaagagtctattgagctagttagtagtcctccggcccctgaatgcggctaatcctaactgcggagcacatacccttaatccaaagggcagtgtgtcgtaacgggcaactctgcagcggaaccgactactttgggtgtccgtgtttctttttattcttgtattggctgcttatggtgacaattaaagaattgttaccatatagctattggattggccatccagtgtcaaacagagctattgtatatctctttgttggattcacacctctcactcttgaaacgttacacaccctcaattacattatactgctgaacacgaagcg

SEQ ID NO: 22623 - DNA, 543 bp, synthetic construct
  source 1..543: mol_type = other DNA
agactgtgcacacggttgaaggagaaaacgtccgttacccggctaactacttcgagaagcctagtaacgccattgaagttgcagagtgtttcgctcagcactccccccgtgtagatcaggtcgatgagtcaccgcattccccacgggcgaccgtggcggtggctgcgttggcggcctgcctatggggtaacccataggacgctctaatacggacatggcgtgaagagtctattgagctagttagtagtcctccggcccctgaatgcggctaatcctaactgcggagcacatacccttaatccaaagggcagtgtgtcgtaacgggcaactctgcagcggaaccgactactttgggtgtccgtgtttctttttattcttgtattggctgcttatggtgacaattaaagaattgttaccatatagctattggattggccatccagtgtcaaacagagctattgtatatctctttgttggattcacacctctcactcttgaaacgttacacaccctcaattacattatactgctgaacacgaagcg

SEQ ID NO: 22624 - DNA, 693 bp, synthetic construct
  source 1..693: mol_type = other DNA
cactctggcacttcggtacctttgtgcgcctgttttatatcccctcccccaatgaaatttagaagcagcaaaccccgatcaatagcaggcataacgctccagttatgtcttgatcaagcacttctgtttccccggactgagtatcaatagactgctcacgcggttgaaggagaaaacgttcgttatccggctaactacttcggaaagcctagtaacaccatggaagttgcggagagtttcgttcagcacttccccagtgtagatcaggtcgatgagtcaccgcattccccacgggcgaccgtggcggtggctgcgttggcggcctgcccatggggtaacccatgggacgctctaatacggacatggtgtgaagagtctactgagctagttagtagtcctccggcccctgaatgcggctaatcccaactgcggagcacacgcccacaagccagtgggtagtgtgtcgtaacgggcaactctgcagcggaaccgactactttgggtgtccgtgtttccttttattcttatgttggctgcttatggtgacaattaaagagttgttaccatatagctattggattggccatccggtgtgcaacagagcgatcgtttacctatttattggttttgtaccattgacactgaagtctgtgatcacccttaattttatcttaaccctcaacacagccaaac

SEQ ID NO: 22625 - DNA, 643 bp, synthetic construct
  source 1..643: mol_type = other DNA
aatgaaatttagaagcagcaaaccccgatcaatagcaggcataacgctccagttatgtcttgatcaagcacttctgtttccccggactgagtatcaatagactgctcacgcggttgaaggagaaaacgttcgttatccggctaactacttcggaaagcctagtaacaccatggaagttgcggagagtttcgttcagcacttccccagtgtagatcaggtcgatgagtcaccgcattccccacgggcgaccgtggcggtggctgcgttggcggcctgcccatggggtaacccatgggacgctctaatacggacatggtgtgaagagtctactgagctagttagtagtcctccggcccctgaatgcggctaatcccaactgcggagcacacgcccacaagccagtgggtagtgtgtcgtaacgggcaactctgcagcggaaccgactactttgggtgtccgtgtttccttttattcttatgttggctgcttatggtgacaattaaagagttgttaccatatagctattggattggccatccggtgtgcaacagagcgatcgtttacctatttattggttttgtaccattgacactgaagtctgtgatcacccttaattttatcttaaccctcaacacagccaaac

SEQ ID NO: 22626 - DNA, 593 bp, synthetic construct
  source 1..593: mol_type = other DNA
agttatgtcttgatcaagcacttctgtttccccggactgagtatcaatagactgctcacgcggttgaaggagaaaacgttcgttatccggctaactacttcggaaagcctagtaacaccatggaagttgcggagagtttcgttcagcacttccccagtgtagatcaggtcgatgagtcaccgcattccccacgggcgaccgtggcggtggctgcgttggcggcctgcccatggggtaacccatgggacgctctaatacggacatggtgtgaagagtctactgagctagttagtagtcctccggcccctgaatgcggctaatcccaactgcggagcacacgcccacaagccagtgggtagtgtgtcgtaacgggcaactctgcagcggaaccgactactttgggtgtccgtgtttccttttattcttatgttggctgcttatggtgacaattaaagagttgttaccatatagctattggattggccatccggtgtgcaacagagcgatcgtttacctatttattggttttgtaccattgacactgaagtctgtgatcacccttaattttatcttaaccctcaacacagccaaac

SEQ ID NO: 22627 - DNA, 543 bp, synthetic construct
  source 1..543: mol_type = other DNA
actgctcacgcggttgaaggagaaaacgttcgttatccggctaactacttcggaaagcctagtaacaccatggaagttgcggagagtttcgttcagcacttccccagtgtagatcaggtcgatgagtcaccgcattccccacgggcgaccgtggcggtggctgcgttggcggcctgcccatggggtaacccatgggacgctctaatacggacatggtgtgaagagtctactgagctagttagtagtcctccggcccctgaatgcggctaatcccaactgcggagcacacgcccacaagccagtgggtagtgtgtcgtaacgggcaactctgcagcggaaccgactactttgggtgtccgtgtttccttttattcttatgttggctgcttatggtgacaattaaagagttgttaccatatagctattggattggccatccggtgtgcaacagagcgatcgtttacctatttattggttttgtaccattgacactgaagtctgtgatcacccttaattttatcttaaccctcaacacagccaaac

SEQ ID NO: 22628 - DNA, 693 bp, synthetic construct
  source 1..693: mol_type = other DNA
cactctggtaccacggtacctttgtgcgcctgttttatcatcccacccctacctgaaacgtagaagcaataatcagtcgaccaatagtgggtgtggcacaccagccacatcttggtcaagcacttctgtttccccgggttgagtatcaatatgctgttcacacggctgaaggagaaaacgcccgttatccggccaactacttcgagaagcctagtatcgccatgaacattgcaaggcgtttcgctcagcacttcccccgtgtagatcaggccgatgagtcaccgcattccccacgggcgaccgtggcggtggctgcgttggcggcctgcctgtgggttgacccacaggacgccttaatatagacatggtgtgaagagcctattgagctggttggtattcctccggcccctgaatgcggctaatcctaactgtggagcacatactcacaagccagtgggtggtgtgtcgtaatgggcaactctgcagcggaaccgactactttgggtgtccgtgtttccttttatacttatactggctgcttatggtgacaatcagagaattgttaccatatagctattggattggccatccggtgtgcaacagagctattgtgtatttatttgttggatttgtcccactatcacatacatcccttaacactttgtattttattttgaaattaaacgcaagaaa

SEQ ID NO: 22629 - DNA, 643 bp, synthetic construct
  source 1..643: mol_type = other DNA
acctgaaacgtagaagcaataatcagtcgaccaatagtgggtgtggcacaccagccacatcttggtcaagcacttctgtttccccgggttgagtatcaatatgctgttcacacggctgaaggagaaaacgcccgttatccggccaactacttcgagaagcctagtatcgccatgaacattgcaaggcgtttcgctcagcacttcccccgtgtagatcaggccgatgagtcaccgcattccccacgggcgaccgtggcggtggctgcgttggcggcctgcctgtgggttgacccacaggacgccttaatatagacatggtgtgaagagcctattgagctggttggtattcctccggcccctgaatgcggctaatcctaactgtggagcacatactcacaagccagtgggtggtgtgtcgtaatgggcaactctgcagcggaaccgactactttgggtgtccgtgtttccttttatacttatactggctgcttatggtgacaatcagagaattgttaccatatagctattggattggccatccggtgtgcaacagagctattgtgtatttatttgttggatttgtcccactatcacatacatcccttaacactttgtattttattttgaaattaaacgcaagaaa

SEQ ID NO: 22630 - DNA, 593 bp, synthetic construct
  source 1..593: mol_type = other DNA
ccagccacatcttggtcaagcacttctgtttccccgggttgagtatcaatatgctgttcacacggctgaaggagaaaacgcccgttatccggccaactacttcgagaagcctagtatcgccatgaacattgcaaggcgtttcgctcagcacttcccccgtgtagatcaggccgatgagtcaccgcattccccacgggcgaccgtggcggtggctgcgttggcggcctgcctgtgggttgacccacaggacgccttaatatagacatggtgtgaagagcctattgagctggttggtattcctccggcccctgaatgcggctaatcctaactgtggagcacatactcacaagccagtgggtggtgtgtcgtaatgggcaactctgcagcggaaccgactactttgggtgtccgtgtttccttttatacttatactggctgcttatggtgacaatcagagaattgttaccatatagctattggattggccatccggtgtgcaacagagctattgtgtatttatttgttggatttgtcccactatcacatacatcccttaacactttgtattttattttgaaattaaacgcaagaaa

SEQ ID NO: 22631 - DNA, 543 bp, synthetic construct
  source 1..543: mol_type = other DNA
atgctgttcacacggctgaaggagaaaacgcccgttatccggccaactacttcgagaagcctagtatcgccatgaacattgcaaggcgtttcgctcagcacttcccccgtgtagatcaggccgatgagtcaccgcattccccacgggcgaccgtggcggtggctgcgttggcggcctgcctgtgggttgacccacaggacgccttaatatagacatggtgtgaagagcctattgagctggttggtattcctccggcccctgaatgcggctaatcctaactgtggagcacatactcacaagccagtgggtggtgtgtcgtaatgggcaactctgcagcggaaccgactactttgggtgtccgtgtttccttttatacttatactggctgcttatggtgacaatcagagaattgttaccatatagctattggattggccatccggtgtgcaacagagctattgtgtatttatttgttggatttgtcccactatcacatacatcccttaacactttgtattttattttgaaattaaacgcaagaaa

SEQ ID NO: 22632 - DNA, 693 bp, synthetic construct
  source 1..693: mol_type = other DNA
gcactctggtactgcggtacctttgtgcgcctgttttatcaccccaccccatctggaacgtagaagcaatgcacaactgaccaatagtgggtgtggcgcaccagccacatcttggtcgagcacttctgtttccccgggtttagtatcaataagctgctcacgcggctgaaggagaaaacacccgttatccggccgactacttcgagaaacctagtaccgctatgaacgttgcaaggcgtttcgttcagcacttcccccgtgtagatcaggccgatgagtcaccgcattcctcacgggcgaccgtggcggtggctgcgttggcggcctgcctatgggcttgcccataggacgccttaatactgacatggtgcgaagagtctattgagctagttggtagtcctccggcccctgaatgcggctaatcctaactgcggagcacatactcacaaaccagtgagcggtgtgtcgtaacgggcaactctgcagcggaaccgactactttgggtgtccgtgtttccttttattcttatactggctgcttatggtgacaattaaagaattgttaccatatagctattggattggccatccggtgtctaacagagctattatatacttgtttgttggattcatctcgttatcacacaaatcccttaacactttgtgttttatcttgaatttgaactcaaaaag

SEQ ID NO: 22633 - DNA, 643 bp, synthetic construct
  source 1..643: mol_type = other DNA
atctggaacgtagaagcaatgcacaactgaccaatagtgggtgtggcgcaccagccacatcttggtcgagcacttctgtttccccgggtttagtatcaataagctgctcacgcggctgaaggagaaaacacccgttatccggccgactacttcgagaaacctagtaccgctatgaacgttgcaaggcgtttcgttcagcacttcccccgtgtagatcaggccgatgagtcaccgcattcctcacgggcgaccgtggcggtggctgcgttggcggcctgcctatgggcttgcccataggacgccttaatactgacatggtgcgaagagtctattgagctagttggtagtcctccggcccctgaatgcggctaatcctaactgcggagcacatactcacaaaccagtgagcggtgtgtcgtaacgggcaactctgcagcggaaccgactactttgggtgtccgtgtttccttttattcttatactggctgcttatggtgacaattaaagaattgttaccatatagctattggattggccatccggtgtctaacagagctattatatacttgtttgttggattcatctcgttatcacacaaatcccttaacactttgtgttttatcttgaatttgaactcaaaaag

SEQ ID NO: 22634 - DNA, 593 bp, synthetic construct
  source 1..593: mol_type = other DNA
ccagccacatcttggtcgagcacttctgtttccccgggtttagtatcaataagctgctcacgcggctgaaggagaaaacacccgttatccggccgactacttcgagaaacctagtaccgctatgaacgttgcaaggcgtttcgttcagcacttcccccgtgtagatcaggccgatgagtcaccgcattcctcacgggcgaccgtggcggtggctgcgttggcggcctgcctatgggcttgcccataggacgccttaatactgacatggtgcgaagagtctattgagctagttggtagtcctccggcccctgaatgcggctaatcctaactgcggagcacatactcacaaaccagtgagcggtgtgtcgtaacgggcaactctgcagcggaaccgactactttgggtgtccgtgtttccttttattcttatactggctgcttatggtgacaattaaagaattgttaccatatagctattggattggccatccggtgtctaacagagctattatatacttgtttgttggattcatctcgttatcacacaaatcccttaacactttgtgttttatcttgaatttgaactcaaaaag

SEQ ID NO: 22635 - DNA, 543 bp, synthetic construct
  source 1..543: mol_type = other DNA
aagctgctcacgcggctgaaggagaaaacacccgttatccggccgactacttcgagaaacctagtaccgctatgaacgttgcaaggcgtttcgttcagcacttcccccgtgtagatcaggccgatgagtcaccgcattcctcacgggcgaccgtggcggtggctgcgttggcggcctgcctatgggcttgcccataggacgccttaatactgacatggtgcgaagagtctattgagctagttggtagtcctccggcccctgaatgcggctaatcctaactgcggagcacatactcacaaaccagtgagcggtgtgtcgtaacgggcaactctgcagcggaaccgactactttgggtgtccgtgtttccttttattcttatactggctgcttatggtgacaattaaagaattgttaccatatagctattggattggccatccggtgtctaacagagctattatatacttgtttgttggattcatctcgttatcacacaaatcccttaacactttgtgttttatcttgaatttgaactcaaaaag

SEQ ID NO: 22636 - DNA, 693 bp, synthetic construct
  source 1..693: mol_type = other DNA
gcactctggtactatggtacctttgtgcgcctgttttatattcctcccccaaattgcaacttagaagacatgcactccgatcaatagcaggcgtggcgcaccagctgcgtcttgatcaagcatttctgtttccccggactgagtatcaatagactgctcacgcggttgagggagaaaacgtccgttacccggccaactacttcgagaagcctagtaacactatgaaagttgcggggcgtttcgctcagcactcccccagtgtagatcaggtcgatgagtcaccgcattccccacgggcgaccgtggcggtggctgcgttggcggcctgcctatggggcaacccatgggacgctctaatatggacatggtgtgaagagcttattgagctagttggtagtcctccggcccctgaatgcggctaatcctaactgcggagcacgtgcctccaaaccagaaggtggcgtgtcgtaatgggcaactctgcagcggaaccgactactttgggtgtccgtgtttccttttattcttactctggctgcttatggtgacaattgacagattgttaccatatagctattggattggccatccggtgacgaacagagcgattgtgtaccagtttattggtttcgtccacttgaatacacgtgaattcaataccttgctgttggtattgaatttcaatacaacaaa

SEQ ID NO: 22637 - DNA, 643 bp, synthetic construct
  source 1..643: mol_type = other DNA
aaattgcaacttagaagacatgcactccgatcaatagcaggcgtggcgcaccagctgcgtcttgatcaagcatttctgtttccccggactgagtatcaatagactgctcacgcggttgagggagaaaacgtccgttacccggccaactacttcgagaagcctagtaacactatgaaagttgcggggcgtttcgctcagcactcccccagtgtagatcaggtcgatgagtcaccgcattccccacgggcgaccgtggcggtggctgcgttggcggcctgcctatggggcaacccatgggacgctctaatatggacatggtgtgaagagcttattgagctagttggtagtcctccggcccctgaatgcggctaatcctaactgcggagcacgtgcctccaaaccagaaggtggcgtgtcgtaatgggcaactctgcagcggaaccgactactttgggtgtccgtgtttccttttattcttactctggctgcttatggtgacaattgacagattgttaccatatagctattggattggccatccggtgacgaacagagcgattgtgtaccagtttattggtttcgtccacttgaatacacgtgaattcaataccttgctgttggtattgaatttcaatacaacaaa

SEQ ID NO: 22638 - DNA, 593 bp, synthetic construct
  source 1..593: mol_type = other DNA
ccagctgcgtcttgatcaagcatttctgtttccccggactgagtatcaatagactgctcacgcggttgagggagaaaacgtccgttacccggccaactacttcgagaagcctagtaacactatgaaagttgcggggcgtttcgctcagcactcccccagtgtagatcaggtcgatgagtcaccgcattccccacgggcgaccgtggcggtggctgcgttggcggcctgcctatggggcaacccatgggacgctctaatatggacatggtgtgaagagcttattgagctagttggtagtcctccggcccctgaatgcggctaatcctaactgcggagcacgtgcctccaaaccagaaggtggcgtgtcgtaatgggcaactctgcagcggaaccgactactttgggtgtccgtgtttccttttattcttactctggctgcttatggtgacaattgacagattgttaccatatagctattggattggccatccggtgacgaacagagcgattgtgtaccagtttattggtttcgtccacttgaatacacgtgaattcaataccttgctgttggtattgaatttcaatacaacaaa

SEQ ID NO: 22639 - DNA, 543 bp, synthetic construct
  source 1..543: mol_type = other DNA
agactgctcacgcggttgagggagaaaacgtccgttacccggccaactacttcgagaagcctagtaacactatgaaagttgcggggcgtttcgctcagcactcccccagtgtagatcaggtcgatgagtcaccgcattccccacgggcgaccgtggcggtggctgcgttggcggcctgcctatggggcaacccatgggacgctctaatatggacatggtgtgaagagcttattgagctagttggtagtcctccggcccctgaatgcggctaatcctaactgcggagcacgtgcctccaaaccagaaggtggcgtgtcgtaatgggcaactctgcagcggaaccgactactttgggtgtccgtgtttccttttattcttactctggctgcttatggtgacaattgacagattgttaccatatagctattggattggccatccggtgacgaacagagcgattgtgtaccagtttattggtttcgtccacttgaatacacgtgaattcaataccttgctgttggtattgaatttcaatacaacaaa

SEQ ID NO: 22640 - DNA, 693 bp, synthetic construct
  source 1..693: mol_type = other DNA
cactctggtaccgaggtacctttgtgcgcctgttttatttccccttcccctgatgcaacttagaagctccgaactaatgatcaatagtaggtgtggcacgccagccacatcttgatcaagcacttctgtttacccggaccgagtatcaataagctgcgcaagcggctgaaggagaaagcgttcgttatccggccaactacttcgagaagcttagtaccaccatgaacgttgcagagtgtttcgttcagcacaaccccggtgtagatcaggccgatgagtcaccgcgttccccatgggcgaccatggcggtggctgcgttggcggcctgcccatggagcaatccatgggacgctctaatactgacatggtgcgaagagcctattgagctagttggtgatcctccggcccctgaatgcggctaatcctaactgcggagcatgcgcccacaagccagtgggtggtgtgtcgtaacgggtaactctgcagcggaaccgactactttgggtgtccgtgtttccttttatctttacattggctgcttatggtgacaattgaagaattgttaccatatagctattggattggccatccggtgtgcaatagagcgattatatacctatttgttggatttgttccattgacatatagatctcttaacactctacaacacatcttgatcttgaacacgagaaa

SEQ ID NO: 22641 - DNA, 643 bp, synthetic construct
  source 1..643: mol_type = other DNA
tgatgcaacttagaagctccgaactaatgatcaatagtaggtgtggcacgccagccacatcttgatcaagcacttctgtttacccggaccgagtatcaataagctgcgcaagcggctgaaggagaaagcgttcgttatccggccaactacttcgagaagcttagtaccaccatgaacgttgcagagtgtttcgttcagcacaaccccggtgtagatcaggccgatgagtcaccgcgttccccatgggcgaccatggcggtggctgcgttggcggcctgcccatggagcaatccatgggacgctctaatactgacatggtgcgaagagcctattgagctagttggtgatcctccggcccctgaatgcggctaatcctaactgcggagcatgcgcccacaagccagtgggtggtgtgtcgtaacgggtaactctgcagcggaaccgactactttgggtgtccgtgtttccttttatctttacattggctgcttatggtgacaattgaagaattgttaccatatagctattggattggccatccggtgtgcaatagagcgattatatacctatttgttggatttgttccattgacatatagatctcttaacactctacaacacatcttgatcttgaacacgagaaa

SEQ ID NO: 22642 - DNA, 593 bp, synthetic construct
  source 1..593: mol_type = other DNA
ccagccacatcttgatcaagcacttctgtttacccggaccgagtatcaataagctgcgcaagcggctgaaggagaaagcgttcgttatccggccaactacttcgagaagcttagtaccaccatgaacgttgcagagtgtttcgttcagcacaaccccggtgtagatcaggccgatgagtcaccgcgttccccatgggcgaccatggcggtggctgcgttggcggcctgcccatggagcaatccatgggacgctctaatactgacatggtgcgaagagcctattgagctagttggtgatcctccggcccctgaatgcggctaatcctaactgcggagcatgcgcccacaagccagtgggtggtgtgtcgtaacgggtaactctgcagcggaaccgactactttgggtgtccgtgtttccttttatctttacattggctgcttatggtgacaattgaagaattgttaccatatagctattggattggccatccggtgtgcaatagagcgattatatacctatttgttggatttgttccattgacatatagatctcttaacactctacaacacatcttgatcttgaacacgagaaa

SEQ ID NO: 22643 - DNA, 543 bp, synthetic construct
  source 1..543: mol_type = other DNA
aagctgcgcaagcggctgaaggagaaagcgttcgttatccggccaactacttcgagaagcttagtaccaccatgaacgttgcagagtgtttcgttcagcacaaccccggtgtagatcaggccgatgagtcaccgcgttccccatgggcgaccatggcggtggctgcgttggcggcctgcccatggagcaatccatgggacgctctaatactgacatggtgcgaagagcctattgagctagttggtgatcctccggcccctgaatgcggctaatcctaactgcggagcatgcgcccacaagccagtgggtggtgtgtcgtaacgggtaactctgcagcggaaccgactactttgggtgtccgtgtttccttttatctttacattggctgcttatggtgacaattgaagaattgttaccatatagctattggattggccatccggtgtgcaatagagcgattatatacctatttgttggatttgttccattgacatatagatctcttaacactctacaacacatcttgatcttgaacacgagaaa

SEQ ID NO: 22644 - DNA, 693 bp, synthetic construct
  source 1..693: mol_type = other DNA
cactctgattctacggaatctttgtgcgcctgttttacaaccccctccccctatgtaacttagaagcaatgcaccaatgatcaacagcaggcgtggcgcaccagccatgtcttgatcaagcacttctgtttccccggacagagtatcaatagactgctcgcgtggtcgaaggagaaaacgtccgttacccggctaactacttcgagaaacctagtagcaccaatgaagctgcagagcgtttcgctcagcacttaccccgtgtagatcaggccgatgagtcactgcgttccccacgggcgaccgtggcagtggctgcgttggcggcctgcctatggggtcacccataggacgctctaatgtggacatggtgcgaagagtctattgagctagttagtagtcctccggcccctgaatgcggctaatcctaactgcggagcgcataccctcaaaccagggggtggtgcgtcgtaacgggtaactctgcagcggaaccgactactttgggtgtccgtgtttccttttattttcttaatggctgcttatggtgacaattgaggaattgttaccatatagctattggattggccatcaggtgtgtaacagagcaattatctacttgtttgtaggatataccccattaacgttcaaatctcttaacacactacagtacatactaactttgaacacaagaaa

SEQ ID NO: 22645 - DNA, 643 bp, synthetic construct
  source 1..643: mol_type = other DNA
ctatgtaacttagaagcaatgcaccaatgatcaacagcaggcgtggcgcaccagccatgtcttgatcaagcacttctgtttccccggacagagtatcaatagactgctcgcgtggtcgaaggagaaaacgtccgttacccggctaactacttcgagaaacctagtagcaccaatgaagctgcagagcgtttcgctcagcacttaccccgtgtagatcaggccgatgagtcactgcgttccccacgggcgaccgtggcagtggctgcgttggcggcctgcctatggggtcacccataggacgctctaatgtggacatggtgcgaagagtctattgagctagttagtagtcctccggcccctgaatgcggctaatcctaactgcggagcgcataccctcaaaccagggggtggtgcgtcgtaacgggtaactctgcagcggaaccgactactttgggtgtccgtgtttccttttattttcttaatggctgcttatggtgacaattgaggaattgttaccatatagctattggattggccatcaggtgtgtaacagagcaattatctacttgtttgtaggatataccccattaacgttcaaatctcttaacacactacagtacatactaactttgaacacaagaaa

SEQ ID NO: 22646 - DNA, 593 bp, synthetic construct
  source 1..593: mol_type = other DNA
ccagccatgtcttgatcaagcacttctgtttccccggacagagtatcaatagactgctcgcgtggtcgaaggagaaaacgtccgttacccggctaactacttcgagaaacctagtagcaccaatgaagctgcagagcgtttcgctcagcacttaccccgtgtagatcaggccgatgagtcactgcgttccccacgggcgaccgtggcagtggctgcgttggcggcctgcctatggggtcacccataggacgctctaatgtggacatggtgcgaagagtctattgagctagttagtagtcctccggcccctgaatgcggctaatcctaactgcggagcgcataccctcaaaccagggggtggtgcgtcgtaacgggtaactctgcagcggaaccgactactttgggtgtccgtgtttccttttattttcttaatggctgcttatggtgacaattgaggaattgttaccatatagctattggattggccatcaggtgtgtaacagagcaattatctacttgtttgtaggatataccccattaacgttcaaatctcttaacacactacagtacatactaactttgaacacaagaaa

SEQ ID NO: 22647 - DNA, 543 bp, synthetic construct
  source 1..543: mol_type = other DNA
agactgctcgcgtggtcgaaggagaaaacgtccgttacccggctaactacttcgagaaacctagtagcaccaatgaagctgcagagcgtttcgctcagcacttaccccgtgtagatcaggccgatgagtcactgcgttccccacgggcgaccgtggcagtggctgcgttggcggcctgcctatggggtcacccataggacgctctaatgtggacatggtgcgaagagtctattgagctagttagtagtcctccggcccctgaatgcggctaatcctaactgcggagcgcataccctcaaaccagggggtggtgcgtcgtaacgggtaactctgcagcggaaccgactactttgggtgtccgtgtttccttttattttcttaatggctgcttatggtgacaattgaggaattgttaccatatagctattggattggccatcaggtgtgtaacagagcaattatctacttgtttgtaggatataccccattaacgttcaaatctcttaacacactacagtacatactaactttgaacacaagaaa

SEQ ID NO: 22648 - DNA, 693 bp, synthetic construct
  source 1..693: mol_type = other DNA
cactctggtaatacgttacctttgtgcgcctgttttacctccccctaccctggaacactttagaagtaaagcatatctggtcaatagaaggtgtggcgaaccagctgcatctcgaccaagcacttctgtttccccggactgagtatcaatagactgctaacgcggtcgaaggagaaaacgttcgttatccggctagctacttcgagaagcctagtaacaccatgaaagttgcagagtgtttcactcagcacttcccccgtgtagatcaggtcgatgagtcaccgcgacccccacgggcgaccgtggcggtggctgcgttggcggcctgcctgtggggcaacccataggacgctctaatacagacatggtgtgaagagcctattgagctagctagtagtcctccggcccctgaatgcggctaatcctaactgcggagcacatgctcgtgaaccagcgagtagtgtgtcgtaatgggtaactctgcagcggaaccgactactttgggtgtccgtgtttctttttattcttacattggctgcttatggtgacaattaaagaattggcaccatatagctattggattggccatcctgtgactaacagagctattatatatctctttgttggatttgttcccttgaggctcactacttataacacactttgttttatattgactctcaattcagcaaa

SEQ ID NO: 22649 - DNA, 643 bp, synthetic construct
  source 1..643: mol_type = other DNA
tggaacactttagaagtaaagcatatctggtcaatagaaggtgtggcgaaccagctgcatctcgaccaagcacttctgtttccccggactgagtatcaatagactgctaacgcggtcgaaggagaaaacgttcgttatccggctagctacttcgagaagcctagtaacaccatgaaagttgcagagtgtttcactcagcacttcccccgtgtagatcaggtcgatgagtcaccgcgacccccacgggcgaccgtggcggtggctgcgttggcggcctgcctgtggggcaacccataggacgctctaatacagacatggtgtgaagagcctattgagctagctagtagtcctccggcccctgaatgcggctaatcctaactgcggagcacatgctcgtgaaccagcgagtagtgtgtcgtaatgggtaactctgcagcggaaccgactactttgggtgtccgtgtttctttttattcttacattggctgcttatggtgacaattaaagaattggcaccatatagctattggattggccatcctgtgactaacagagctattatatatctctttgttggatttgttcccttgaggctcactacttataacacactttgttttatattgactctcaattcagcaaa

SEQ ID NO: 22650 - DNA, 593 bp, synthetic construct
  source 1..593: mol_type = other DNA
ccagctgcatctcgaccaagcacttctgtttccccggactgagtatcaatagactgctaacgcggtcgaaggagaaaacgttcgttatccggctagctacttcgagaagcctagtaacaccatgaaagttgcagagtgtttcactcagcacttcccccgtgtagatcaggtcgatgagtcaccgcgacccccacgggcgaccgtggcggtggctgcgttggcggcctgcctgtggggcaacccataggacgctctaatacagacatggtgtgaagagcctattgagctagctagtagtcctccggcccctgaatgcggctaatcctaactgcggagcacatgctcgtgaaccagcgagtagtgtgtcgtaatgggtaactctgcagcggaaccgactactttgggtgtccgtgtttctttttattcttacattggctgcttatggtgacaattaaagaattggcaccatatagctattggattggccatcctgtgactaacagagctattatatatctctttgttggatttgttcccttgaggctcactacttataacacactttgttttatattgactctcaattcagcaaa

SEQ ID NO: 22651 - DNA, 543 bp, synthetic construct
  source 1..543: mol_type = other DNA
agactgctaacgcggtcgaaggagaaaacgttcgttatccggctagctacttcgagaagcctagtaacaccatgaaagttgcagagtgtttcactcagcacttcccccgtgtagatcaggtcgatgagtcaccgcgacccccacgggcgaccgtggcggtggctgcgttggcggcctgcctgtggggcaacccataggacgctctaatacagacatggtgtgaagagcctattgagctagctagtagtcctccggcccctgaatgcggctaatcctaactgcggagcacatgctcgtgaaccagcgagtagtgtgtcgtaatgggtaactctgcagcggaaccgactactttgggtgtccgtgtttctttttattcttacattggctgcttatggtgacaattaaagaattggcaccatatagctattggattggccatcctgtgactaacagagctattatatatctctttgttggatttgttcccttgaggctcactacttataacacactttgttttatattgactctcaattcagcaaa

SEQ ID NO: 22652 - DNA, 693 bp, synthetic construct
  source 1..693: mol_type = other DNA
cactctggtatcacgatacctttgtgcgcctgttttatatcccttccccattaatgtaacatagaagttatgcaccccgatcaatagcaggcatggcgctccagctatgtcttgatcaagcacttctgtttccccggactgagtatcaatagactgcttgcgcggttgaaggagaaaacgttcgttatccggctaactacttcgggaagcttagtaatgccatggaagttgcggagagtttcgctcagcacttccccagtgtagatcaggctgatgagtcaccgcattccccacgggtgaccgtggcggtggctgcgttggcggcctgcccatagggagacctatgggacgctctaatacggacatggtgtgaagagcctactgagctagttagcagtcctccggcccctgaatgcggctaatcctaactgcggagcacgcgtctccaatccaggggatagcgtgtcgtaatgggcaactctgcagcggaaccgactactttgggtgtccgtgtttccttttattcttacactggctgcttatggtgacaattgaggaattgttaccatatagctattggattggccatccggtgactaacagagctattatttaccaatttgttggatttgtacctctttcactcaccgtttaccacacccttctatacctattacaactgaatagtagaag

SEQ ID NO: 22653 - DNA, 643 bp, synthetic construct
  source 1..643: mol_type = other DNA
ttaatgtaacatagaagttatgcaccccgatcaatagcaggcatggcgctccagctatgtcttgatcaagcacttctgtttccccggactgagtatcaatagactgcttgcgcggttgaaggagaaaacgttcgttatccggctaactacttcgggaagcttagtaatgccatggaagttgcggagagtttcgctcagcacttccccagtgtagatcaggctgatgagtcaccgcattccccacgggtgaccgtggcggtggctgcgttggcggcctgcccatagggagacctatgggacgctctaatacggacatggtgtgaagagcctactgagctagttagcagtcctccggcccctgaatgcggctaatcctaactgcggagcacgcgtctccaatccaggggatagcgtgtcgtaatgggcaactctgcagcggaaccgactactttgggtgtccgtgtttccttttattcttacactggctgcttatggtgacaattgaggaattgttaccatatagctattggattggccatccggtgactaacagagctattatttaccaatttgttggatttgtacctctttcactcaccgtttaccacacccttctatacctattacaactgaatagtagaag

SEQ ID NO: 22654 - DNA, 593 bp, synthetic construct
  source 1..593: mol_type = other DNA
ccagctatgtcttgatcaagcacttctgtttccccggactgagtatcaatagactgcttgcgcggttgaaggagaaaacgttcgttatccggctaactacttcgggaagcttagtaatgccatggaagttgcggagagtttcgctcagcacttccccagtgtagatcaggctgatgagtcaccgcattccccacgggtgaccgtggcggtggctgcgttggcggcctgcccatagggagacctatgggacgctctaatacggacatggtgtgaagagcctactgagctagttagcagtcctccggcccctgaatgcggctaatcctaactgcggagcacgcgtctccaatccaggggatagcgtgtcgtaatgggcaactctgcagcggaaccgactactttgggtgtccgtgtttccttttattcttacactggctgcttatggtgacaattgaggaattgttaccatatagctattggattggccatccggtgactaacagagctattatttaccaatttgttggatttgtacctctttcactcaccgtttaccacacccttctatacctattacaactgaatagtagaag

SEQ ID NO: 22655 - DNA, 543 bp, synthetic construct
  source 1..543: mol_type = other DNA
agactgcttgcgcggttgaaggagaaaacgttcgttatccggctaactacttcgggaagcttagtaatgccatggaagttgcggagagtttcgctcagcacttccccagtgtagatcaggctgatgagtcaccgcattccccacgggtgaccgtggcggtggctgcgttggcggcctgcccatagggagacctatgggacgctctaatacggacatggtgtgaagagcctactgagctagttagcagtcctccggcccctgaatgcggctaatcctaactgcggagcacgcgtctccaatccaggggatagcgtgtcgtaatgggcaactctgcagcggaaccgactactttgggtgtccgtgtttccttttattcttacactggctgcttatggtgacaattgaggaattgttaccatatagctattggattggccatccggtgactaacagagctattatttaccaatttgttggatttgtacctctttcactcaccgtttaccacacccttctatacctattacaactgaatagtagaag

SEQ ID NO: 22656 - DNA, 693 bp, synthetic construct
  source 1..693: mol_type = other DNA
gtactctggtattacggtacctttgtacgcctgttttatactccctccccatgtaactttagaagcaattcaataagttcaatagagggggtacaaaccagtaccaccacgaacaagcacttctgtctccccggtgatcttgcatagactgttcccacggttgaaagcgagtgatccgttatccgcttgagtacttcgagaagcctagtaccaccttggaatcttcgatgcgttgcgctcagcactctgccccgagtgtagcttaggctgatgagtctgggctttccccaccggcgacggtggcccaggctgcgttggcggcctacccgtggtcaacaccacgggacgctagttgtgaacaaggtgtgaagagcctattgagctactcaagagtcctccggcccctgaatgcggctaatcctaaccatggagcaggtactctcaacccagagggcagcctgtcgtaacgcgtgagtccgtggcggaaccgactactttgggtgaccgtgtttccttttatttttgactggctgcttatggtgacaatcatagattgttatcatagagcgaattggattggccatccagtgaaatataaacacgttatctacttgtttgttggatttactccactcactcagtttacccctagcataataatagcagtactactgataaggaattattgccacc

SEQ ID NO: 22657 - DNA, 643 bp, synthetic construct
  source 1..643: mol_type = other DNA
atgtaactttagaagcaattcaataagttcaatagagggggtacaaaccagtaccaccacgaacaagcacttctgtctccccggtgatcttgcatagactgttcccacggttgaaagcgagtgatccgttatccgcttgagtacttcgagaagcctagtaccaccttggaatcttcgatgcgttgcgctcagcactctgccccgagtgtagcttaggctgatgagtctgggctttccccaccggcgacggtggcccaggctgcgttggcggcctacccgtggtcaacaccacgggacgctagttgtgaacaaggtgtgaagagcctattgagctactcaagagtcctccggcccctgaatgcggctaatcctaaccatggagcaggtactctcaacccagagggcagcctgtcgtaacgcgtgagtccgtggcggaaccgactactttgggtgaccgtgtttccttttatttttgactggctgcttatggtgacaatcatagattgttatcatagagcgaattggattggccatccagtgaaatataaacacgttatctacttgtttgttggatttactccactcactcagtttacccctagcataataatagcagtactactgataaggaattattgccacc

SEQ ID NO: 22658 - DNA, 593 bp, synthetic construct
  source 1..593: mol_type = other DNA
gtaccaccacgaacaagcacttctgtctccccggtgatcttgcatagactgttcccacggttgaaagcgagtgatccgttatccgcttgagtacttcgagaagcctagtaccaccttggaatcttcgatgcgttgcgctcagcactctgccccgagtgtagcttaggctgatgagtctgggctttccccaccggcgacggtggcccaggctgcgttggcggcctacccgtggtcaacaccacgggacgctagttgtgaacaaggtgtgaagagcctattgagctactcaagagtcctccggcccctgaatgcggctaatcctaaccatggagcaggtactctcaacccagagggcagcctgtcgtaacgcgtgagtccgtggcggaaccgactactttgggtgaccgtgtttccttttatttttgactggctgcttatggtgacaatcatagattgttatcatagagcgaattggattggccatccagtgaaatataaacacgttatctacttgtttgttggatttactccactcactcagtttacccctagcataataatagcagtactactgataaggaattattgccacc

SEQ ID NO: 22659 - DNA, 543 bp, synthetic construct
  source 1..543: mol_type = other DNA
gttcccacggttgaaagcgagtgatccgttatccgcttgagtacttcgagaagcctagtaccaccttggaatcttcgatgcgttgcgctcagcactctgccccgagtgtagcttaggctgatgagtctgggctttccccaccggcgacggtggcccaggctgcgttggcggcctacccgtggtcaacaccacgggacgctagttgtgaacaaggtgtgaagagcctattgagctactcaagagtcctccggcccctgaatgcggctaatcctaaccatggagcaggtactctcaacccagagggcagcctgtcgtaacgcgtgagtccgtggcggaaccgactactttgggtgaccgtgtttccttttatttttgactggctgcttatggtgacaatcatagattgttatcatagagcgaattggattggccatccagtgaaatataaacacgttatctacttgtttgttggatttactccactcactcagtttacccctagcataataatagcagtactactgataaggaattattgccacc

SEQ ID NO: 22660 - DNA, 693 bp, synthetic construct
  source 1..693: mol_type = other DNA
gtactctggtatcacggtacctttgtacgcctgttttatactcccttcccgcaacttagacgcataaaaaccaagttcaatagaagggggtacaagccagtaccaccacgaacaagcacttctgtttccccggtgatgttgtatagactgctcgcgtggttgaaagcgacagatccgttatccgcttgtgtacttcgagaagcccagtaccaccttggaatcttcgatgcgttgcgctcagcactcaaccccagagtgtagcttaggctgatgagtctggacatcccccaccggtgacggtggtccaggctgcgttggcggcctacccatggctaacgccatgggacgctagttgtgaacagggtgtgaagagcctattgagctacataagagtcctccggcccctgaatgcggctaatcccaacctcggagcaggtggtcacataccagtgactggcctgtcgtaacgcgcaagtccgtggcggaaccgactactttgggtgtccgtgtttccttttattttataatggctgcttatggtgacaatcacagattgtcgtcataaagcgaattggattggccatccggtgatagtgaaattcattacttaactgtttactggattcgctccaccgcaagtgtttgctctgagtacaatttcaatagttactttaagtagacaattgtattaca

SEQ ID NO: 22661 - DNA, 643 bp, synthetic construct
  source 1..643: mol_type = other DNA
gcaacttagacgcataaaaaccaagttcaatagaagggggtacaagccagtaccaccacgaacaagcacttctgtttccccggtgatgttgtatagactgctcgcgtggttgaaagcgacagatccgttatccgcttgtgtacttcgagaagcccagtaccaccttggaatcttcgatgcgttgcgctcagcactcaaccccagagtgtagcttaggctgatgagtctggacatcccccaccggtgacggtggtccaggctgcgttggcggcctacccatggctaacgccatgggacgctagttgtgaacagggtgtgaagagcctattgagctacataagagtcctccggcccctgaatgcggctaatcccaacctcggagcaggtggtcacataccagtgactggcctgtcgtaacgcgcaagtccgtggcggaaccgactactttgggtgtccgtgtttccttttattttataatggctgcttatggtgacaatcacagattgtcgtcataaagcgaattggattggccatccggtgatagtgaaattcattacttaactgtttactggattcgctccaccgcaagtgtttgctctgagtacaatttcaatagttactttaagtagacaattgtattaca

SEQ ID NO: 22662 - DNA, 593 bp, synthetic construct
  source 1..593: mol_type = other DNA
taccaccacgaacaagcacttctgtttccccggtgatgttgtatagactgctcgcgtggttgaaagcgacagatccgttatccgcttgtgtacttcgagaagcccagtaccaccttggaatcttcgatgcgttgcgctcagcactcaaccccagagtgtagcttaggctgatgagtctggacatcccccaccggtgacggtggtccaggctgcgttggcggcctacccatggctaacgccatgggacgctagttgtgaacagggtgtgaagagcctattgagctacataagagtcctccggcccctgaatgcggctaatcccaacctcggagcaggtggtcacataccagtgactggcctgtcgtaacgcgcaagtccgtggcggaaccgactactttgggtgtccgtgtttccttttattttataatggctgcttatggtgacaatcacagattgtcgtcataaagcgaattggattggccatccggtgatagtgaaattcattacttaactgtttactggattcgctccaccgcaagtgtttgctctgagtacaatttcaatagttactttaagtagacaattgtattaca

SEQ ID NO: 22663 - DNA, 543 bp, synthetic construct
  source 1..543: mol_type = other DNA
ctcgcgtggttgaaagcgacagatccgttatccgcttgtgtacttcgagaagcccagtaccaccttggaatcttcgatgcgttgcgctcagcactcaaccccagagtgtagcttaggctgatgagtctggacatcccccaccggtgacggtggtccaggctgcgttggcggcctacccatggctaacgccatgggacgctagttgtgaacagggtgtgaagagcctattgagctacataagagtcctccggcccctgaatgcggctaatcccaacctcggagcaggtggtcacataccagtgactggcctgtcgtaacgcgcaagtccgtggcggaaccgactactttgggtgtccgtgtttccttttattttataatggctgcttatggtgacaatcacagattgtcgtcataaagcgaattggattggccatccggtgatagtgaaattcattacttaactgtttactggattcgctccaccgcaagtgtttgctctgagtacaatttcaatagttactttaagtagacaattgtattaca

SEQ ID NO: 22664 - DNA, 693 bp, synthetic construct
  source 1..693: mol_type = other DNA
cactctggtattacggtacccttgtgcgcctgttttatataccccgccccaagcaaacgctagatgtaacgcacttatgatcaatagcaggcgtggcactccagccacgttatgatcaagcacttctgtctccccggaccgagtatcaatagactgctcacgcggtcgaaggagaaaacgttcgttacccgaccagctacttcgagaaacctagtaactccatggaggttgcagagtgtttcgttcagcacttcccccgtgtagatcaggctgatgagtcaccgcgttcctcacgggcgaccgtggcggtggctgcgttggcggcctgcctatgggtatacccataggacgctctaatactgacatggtgcgaagagtctattgagctagttggtagtcctccggcccctgaatgcggctaatcctaactgcggagcacatacccccaacccagggggcagtgtgtcgtaacgggtaactctgcagcggaaccgactactttgggtgtccgtgtttccttttattcttacattggctgcttatggtgacaattgagagattgttaccatatagctattggattggccatccagtgactaacagagctattatttacctttttgttggcttcgtatcacttggtttaaaagaggttagtactttatattgcattatattactaaacacgagaaa

SEQ ID NO: 22665 - DNA, 643 bp, synthetic construct
  source 1..643: mol_type = other DNA
aagcaaacgctagatgtaacgcacttatgatcaatagcaggcgtggcactccagccacgttatgatcaagcacttctgtctccccggaccgagtatcaatagactgctcacgcggtcgaaggagaaaacgttcgttacccgaccagctacttcgagaaacctagtaactccatggaggttgcagagtgtttcgttcagcacttcccccgtgtagatcaggctgatgagtcaccgcgttcctcacgggcgaccgtggcggtggctgcgttggcggcctgcctatgggtatacccataggacgctctaatactgacatggtgcgaagagtctattgagctagttggtagtcctccggcccctgaatgcggctaatcctaactgcggagcacatacccccaacccagggggcagtgtgtcgtaacgggtaactctgcagcggaaccgactactttgggtgtccgtgtttccttttattcttacattggctgcttatggtgacaattgagagattgttaccatatagctattggattggccatccagtgactaacagagctattatttacctttttgttggcttcgtatcacttggtttaaaagaggttagtactttatattgcattatattactaaacacgagaaa

SEQ ID NO: 22666 - DNA, 593 bp, synthetic construct
  source 1..593: mol_type = other DNA
ccagccacgttatgatcaagcacttctgtctccccggaccgagtatcaatagactgctcacgcggtcgaaggagaaaacgttcgttacccgaccagctacttcgagaaacctagtaactccatggaggttgcagagtgtttcgttcagcacttcccccgtgtagatcaggctgatgagtcaccgcgttcctcacgggcgaccgtggcggtggctgcgttggcggcctgcctatgggtatacccataggacgctctaatactgacatggtgcgaagagtctattgagctagttggtagtcctccggcccctgaatgcggctaatcctaactgcggagcacatacccccaacccagggggcagtgtgtcgtaacgggtaactctgcagcggaaccgactactttgggtgtccgtgtttccttttattcttacattggctgcttatggtgacaattgagagattgttaccatatagctattggattggccatccagtgactaacagagctattatttacctttttgttggcttcgtatcacttggtttaaaagaggttagtactttatattgcattatattactaaacacgagaaa

SEQ ID NO: 22667 - DNA, 543 bp, synthetic construct
  source 1..543: mol_type = other DNA
agactgctcacgcggtcgaaggagaaaacgttcgttacccgaccagctacttcgagaaacctagtaactccatggaggttgcagagtgtttcgttcagcacttcccccgtgtagatcaggctgatgagtcaccgcgttcctcacgggcgaccgtggcggtggctgcgttggcggcctgcctatgggtatacccataggacgctctaatactgacatggtgcgaagagtctattgagctagttggtagtcctccggcccctgaatgcggctaatcctaactgcggagcacatacccccaacccagggggcagtgtgtcgtaacgggtaactctgcagcggaaccgactactttgggtgtccgtgtttccttttattcttacattggctgcttatggtgacaattgagagattgttaccatatagctattggattggccatccagtgactaacagagctattatttacctttttgttggcttcgtatcacttggtttaaaagaggttagtactttatattgcattatattactaaacacgagaaa

SEQ ID NO: 22668 - DNA, 693 bp, synthetic construct
  source 1..693: mol_type = other DNA
cactctggtatcgcggtacccttgtgcgcctgttttatccgccctttcccaaacgtaacttagaagctcaacttgaatggtcagcaggaaacccagtacgccaactgggtcacgaccaagcacttctgtaaccccgggccgagtatcaataagctgctcacgcggttgaaggagaaaacgcccgttacccggccaattacttcgagaaacctagtaccaccatggaggttgcgtagtgtttcgctccgcacaaccccagtgtagatcaggccgatgagtcaccgcgttccccacgggcgaccgtggcggtggctgcgttggcggcctgcccatgggataacccatgggacgcttcaatactgacatggtgcgaagagtctattgagctaattggtagtcctccggcccctgaatgcggctaatcccaactgcggagcagatacccacatgccagtgggcagtctgtcgtaacgggcaactctgcagcggaaccgactactttgggtgtccgtgtttccttttattcatacattggctgcttatggtgacaattgaaagattgttaccatatagctattggattggccatccggtgtctaatagagcgattgtctacttgttcattgggtttgtacctttaaaccttaaagttcttaacactctcaaccttgtgctacaactcaacacggcaaa

SEQ ID NO: 22669 - DNA, 643 bp, synthetic construct
  source 1..643: mol_type = other DNA
aaacgtaacttagaagctcaacttgaatggtcagcaggaaacccagtacgccaactgggtcacgaccaagcacttctgtaaccccgggccgagtatcaataagctgctcacgcggttgaaggagaaaacgcccgttacccggccaattacttcgagaaacctagtaccaccatggaggttgcgtagtgtttcgctccgcacaaccccagtgtagatcaggccgatgagtcaccgcgttccccacgggcgaccgtggcggtggctgcgttggcggcctgcccatgggataacccatgggacgcttcaatactgacatggtgcgaagagtctattgagctaattggtagtcctccggcccctgaatgcggctaatcccaactgcggagcagatacccacatgccagtgggcagtctgtcgtaacgggcaactctgcagcggaaccgactactttgggtgtccgtgtttccttttattcatacattggctgcttatggtgacaattgaaagattgttaccatatagctattggattggccatccggtgtctaatagagcgattgtctacttgttcattgggtttgtacctttaaaccttaaagttcttaacactctcaaccttgtgctacaactcaacacggcaaa

SEQ ID NO: 22670 - DNA, 593 bp, synthetic construct
  source 1..593: mol_type = other DNA
ccaactgggtcacgaccaagcacttctgtaaccccgggccgagtatcaataagctgctcacgcggttgaaggagaaaacgcccgttacccggccaattacttcgagaaacctagtaccaccatggaggttgcgtagtgtttcgctccgcacaaccccagtgtagatcaggccgatgagtcaccgcgttccccacgggcgaccgtggcggtggctgcgttggcggcctgcccatgggataacccatgggacgcttcaatactgacatggtgcgaagagtctattgagctaattggtagtcctccggcccctgaatgcggctaatcccaactgcggagcagatacccacatgccagtgggcagtctgtcgtaacgggcaactctgcagcggaaccgactactttgggtgtccgtgtttccttttattcatacattggctgcttatggtgacaattgaaagattgttaccatatagctattggattggccatccggtgtctaatagagcgattgtctacttgttcattgggtttgtacctttaaaccttaaagttcttaacactctcaaccttgtgctacaactcaacacggcaaa

SEQ ID NO: 22671 - DNA, 543 bp, synthetic construct
  source 1..543: mol_type = other DNA
aagctgctcacgcggttgaaggagaaaacgcccgttacccggccaattacttcgagaaacctagtaccaccatggaggttgcgtagtgtttcgctccgcacaaccccagtgtagatcaggccgatgagtcaccgcgttccccacgggcgaccgtggcggtggctgcgttggcggcctgcccatgggataacccatgggacgcttcaatactgacatggtgcgaagagtctattgagctaattggtagtcctccggcccctgaatgcggctaatcccaactgcggagcagatacccacatgccagtgggcagtctgtcgtaacgggcaactctgcagcggaaccgactactttgggtgtccgtgtttccttttattcatacattggctgcttatggtgacaattgaaagattgttaccatatagctattggattggccatccggtgtctaatagagcgattgtctacttgttcattgggtttgtacctttaaaccttaaagttcttaacactctcaaccttgtgctacaactcaacacggcaaa

SEQ ID NO: 22672 - DNA, 693 bp, synthetic construct
  source 1..693: mol_type = other DNA
cactctggtatcacggtacctttgtgcgcctgttttatactccctccccccaaccgtaacttagaagcagcactaactgatcaatagccagcgcggcatgccagccacgcttcgatcaagcacttctgttaccccggactgagtatcaatagactgctcacgcggttgaaggagaaaacgttcgtcatccggccaactacttcgagaaacctagtaacaccatggaagttgcggagtgtttcgctcagcactaccccagtgtagatcaggtcgatgagtcaccgcattccccacaggcgactgtggcggtggctgcgttggcggcctgcccatggggaaacccatgggacgctcttatatagacatggtgcgaagagtctattgagctagttggtagtcctccggcccctgaatgcggctaatcctaactgcggagcatacaccctcaaaccagagggcagtgtgtcgtaatgggcaactctgcagcggaaccgactactttgggtgtccgtgtttcactttatttctaaattggctgcttatggtgacaattgagagattgttaccatatagctattggattggccatccggtgaccaatagagctattatatatctctttgttgggttcataccacttagcttgaaagaggttaaaactctgcattacattatactattgaattccgcaaa

SEQ ID NO: 22673 - DNA, 643 bp, synthetic construct
  source 1..643: mol_type = other DNA
caaccgtaacttagaagcagcactaactgatcaatagccagcgcggcatgccagccacgcttcgatcaagcacttctgttaccccggactgagtatcaatagactgctcacgcggttgaaggagaaaacgttcgtcatccggccaactacttcgagaaacctagtaacaccatggaagttgcggagtgtttcgctcagcactaccccagtgtagatcaggtcgatgagtcaccgcattccccacaggcgactgtggcggtggctgcgttggcggcctgcccatggggaaacccatgggacgctcttatatagacatggtgcgaagagtctattgagctagttggtagtcctccggcccctgaatgcggctaatcctaactgcggagcatacaccctcaaaccagagggcagtgtgtcgtaatgggcaactctgcagcggaaccgactactttgggtgtccgtgtttcactttatttctaaattggctgcttatggtgacaattgagagattgttaccatatagctattggattggccatccggtgaccaatagagctattatatatctctttgttgggttcataccacttagcttgaaagaggttaaaactctgcattacattatactattgaattccgcaaa

SEQ ID NO: 22674 - DNA, 593 bp, synthetic construct
  source 1..593: mol_type = other DNA
ccagccacgcttcgatcaagcacttctgttaccccggactgagtatcaatagactgctcacgcggttgaaggagaaaacgttcgtcatccggccaactacttcgagaaacctagtaacaccatggaagttgcggagtgtttcgctcagcactaccccagtgtagatcaggtcgatgagtcaccgcattccccacaggcgactgtggcggtggctgcgttggcggcctgcccatggggaaacccatgggacgctcttatatagacatggtgcgaagagtctattgagctagttggtagtcctccggcccctgaatgcggctaatcctaactgcggagcatacaccctcaaaccagagggcagtgtgtcgtaatgggcaactctgcagcggaaccgactactttgggtgtccgtgtttcactttatttctaaattggctgcttatggtgacaattgagagattgttaccatatagctattggattggccatccggtgaccaatagagctattatatatctctttgttgggttcataccacttagcttgaaagaggttaaaactctgcattacattatactattgaattccgcaaa

SEQ ID NO: 22675 - DNA, 543 bp, synthetic construct
  source 1..543: mol_type = other DNA
agactgctcacgcggttgaaggagaaaacgttcgtcatccggccaactacttcgagaaacctagtaacaccatggaagttgcggagtgtttcgctcagcactaccccagtgtagatcaggtcgatgagtcaccgcattccccacaggcgactgtggcggtggctgcgttggcggcctgcccatggggaaacccatgggacgctcttatatagacatggtgcgaagagtctattgagctagttggtagtcctccggcccctgaatgcggctaatcctaactgcggagcatacaccctcaaaccagagggcagtgtgtcgtaatgggcaactctgcagcggaaccgactactttgggtgtccgtgtttcactttatttctaaattggctgcttatggtgacaattgagagattgttaccatatagctattggattggccatccggtgaccaatagagctattatatatctctttgttgggttcataccacttagcttgaaagaggttaaaactctgcattacattatactattgaattccgcaaa

SEQ ID NO: 22676 - DNA, 693 bp, synthetic construct
  source 1..693: mol_type = other DNA
cactctggtatcacggtacccttgtgcgcctgttttataatccctttccccacaagtaacttagacacagcacaaaccgatcaacagtaggcgtgacactccagtcatgtcgtgatcaagcacttctgttaccccggaccgagtatcaatagactgcttacgcggttgaaggagaaaacgcccgttacccggccaactacttcgagaaacccagtaacaccatggaaattgcggagtgtttcgctcagcacaaccccagtgtagatcaggtcgatgagccaccacattccccacgggtgaccgtggtggtggctgcgttggcggcctgcctatgggggaacccataggacgcttcaatacggacatggtgcgaagagtctattgagctagttggtaatcctccggcccctgaatgcggctaatcctaactgcggagcgcgtgcccccaaaccaggaggtggcgcgtcgtaatgggcaactccgcagcggaaccgactactttgggtgtccgtgtttccttttatatttttattggctgcttatggtgacaattgagaaattgttaccatatagctattggattggccatccggtgtctaacagagcgattatttatctttttgttggatttgtaccactcaacataacaaactatcagactttgtgttgcattattggattgaacacagcaaa

SEQ ID NO: 22677 - DNA, 643 bp, synthetic construct
  source 1..643: mol_type = other DNA
cacaagtaacttagacacagcacaaaccgatcaacagtaggcgtgacactccagtcatgtcgtgatcaagcacttctgttaccccggaccgagtatcaatagactgcttacgcggttgaaggagaaaacgcccgttacccggccaactacttcgagaaacccagtaacaccatggaaattgcggagtgtttcgctcagcacaaccccagtgtagatcaggtcgatgagccaccacattccccacgggtgaccgtggtggtggctgcgttggcggcctgcctatgggggaacccataggacgcttcaatacggacatggtgcgaagagtctattgagctagttggtaatcctccggcccctgaatgcggctaatcctaactgcggagcgcgtgcccccaaaccaggaggtggcgcgtcgtaatgggcaactccgcagcggaaccgactactttgggtgtccgtgtttccttttatatttttattggctgcttatggtgacaattgagaaattgttaccatatagctattggattggccatccggtgtctaacagagcgattatttatctttttgttggatttgtaccactcaacataacaaactatcagactttgtgttgcattattggattgaacacagcaaa

SEQ ID NO: 22678 - DNA, 593 bp, synthetic construct
  source 1..593: mol_type = other DNA
ccagtcatgtcgtgatcaagcacttctgttaccccggaccgagtatcaatagactgcttacgcggttgaaggagaaaacgcccgttacccggccaactacttcgagaaacccagtaacaccatggaaattgcggagtgtttcgctcagcacaaccccagtgtagatcaggtcgatgagccaccacattccccacgggtgaccgtggtggtggctgcgttggcggcctgcctatgggggaacccataggacgcttcaatacggacatggtgcgaagagtctattgagctagttggtaatcctccggcccctgaatgcggctaatcctaactgcggagcgcgtgcccccaaaccaggaggtggcgcgtcgtaatgggcaactccgcagcggaaccgactactttgggtgtccgtgtttccttttatatttttattggctgcttatggtgacaattgagaaattgttaccatatagctattggattggccatccggtgtctaacagagcgattatttatctttttgttggatttgtaccactcaacataacaaactatcagactttgtgttgcattattggattgaacacagcaaa

SEQ ID NO: 22679 - DNA, 543 bp, synthetic construct
  source 1..543: mol_type = other DNA
agactgcttacgcggttgaaggagaaaacgcccgttacccggccaactacttcgagaaacccagtaacaccatggaaattgcggagtgtttcgctcagcacaaccccagtgtagatcaggtcgatgagccaccacattccccacgggtgaccgtggtggtggctgcgttggcggcctgcctatgggggaacccataggacgcttcaatacggacatggtgcgaagagtctattgagctagttggtaatcctccggcccctgaatgcggctaatcctaactgcggagcgcgtgcccccaaaccaggaggtggcgcgtcgtaatgggcaactccgcagcggaaccgactactttgggtgtccgtgtttccttttatatttttattggctgcttatggtgacaattgagaaattgttaccatatagctattggattggccatccggtgtctaacagagcgattatttatctttttgttggatttgtaccactcaacataacaaactatcagactttgtgttgcattattggattgaacacagcaaa

SEQ ID NO: 22680 - DNA, 693 bp, synthetic construct
  source 1..693: mol_type = other DNA
gcacactggtattacggtacccttgtgcgcctgttttatccacccccccccactgtaacttagaagataaccacacgcggtcaataggtgactcagtacgccaactgggtcgcgaccaagcacttctgttaccccggaccgagtatcaataagctgctcgcgcggctgaaggagaaaacgttcgttacccggccaattacttcgagaaacctagtaccaccatggaggttgcgcagcgtttcgctccgcacaaccccagtgtagatcaggtcgatgagtcaccgcaatccccacaggcgactgtggcggtggctgcgttggcggcctgcccatggggaaacccatgggacgcttcaatatcgacatggtgcgaagagtctattgagctaattggtagtcctccggcccctgaatgcggctaatcctaactgtggagcagatacccacactccagtgggcagtctgtcgtaatgggcaactctgcagcggaaccgactactttgggtgtccgtgtttccttttattcctatgctggctgcttatggtgacaattgacagattgttaccatatagctactggattggccatccggtgacaagcagagcgattgtttacttatttgttggtttcattccactcaattataaagtactaaacacccttaatttcattataactcttaacacgttaaa

SEQ ID NO: 22681 - DNA, 643 bp, synthetic construct
  source 1..643: mol_type = other DNA
cactgtaacttagaagataaccacacgcggtcaataggtgactcagtacgccaactgggtcgcgaccaagcacttctgttaccccggaccgagtatcaataagctgctcgcgcggctgaaggagaaaacgttcgttacccggccaattacttcgagaaacctagtaccaccatggaggttgcgcagcgtttcgctccgcacaaccccagtgtagatcaggtcgatgagtcaccgcaatccccacaggcgactgtggcggtggctgcgttggcggcctgcccatggggaaacccatgggacgcttcaatatcgacatggtgcgaagagtctattgagctaattggtagtcctccggcccctgaatgcggctaatcctaactgtggagcagatacccacactccagtgggcagtctgtcgtaatgggcaactctgcagcggaaccgactactttgggtgtccgtgtttccttttattcctatgctggctgcttatggtgacaattgacagattgttaccatatagctactggattggccatccggtgacaagcagagcgattgtttacttatttgttggtttcattccactcaattataaagtactaaacacccttaatttcattataactcttaacacgttaaa

SEQ ID NO: 22682 - DNA, 593 bp, synthetic construct
  source 1..593: mol_type = other DNA
ccaactgggtcgcgaccaagcacttctgttaccccggaccgagtatcaataagctgctcgcgcggctgaaggagaaaacgttcgttacccggccaattacttcgagaaacctagtaccaccatggaggttgcgcagcgtttcgctccgcacaaccccagtgtagatcaggtcgatgagtcaccgcaatccccacaggcgactgtggcggtggctgcgttggcggcctgcccatggggaaacccatgggacgcttcaatatcgacatggtgcgaagagtctattgagctaattggtagtcctccggcccctgaatgcggctaatcctaactgtggagcagatacccacactccagtgggcagtctgtcgtaatgggcaactctgcagcggaaccgactactttgggtgtccgtgtttccttttattcctatgctggctgcttatggtgacaattgacagattgttaccatatagctactggattggccatccggtgacaagcagagcgattgtttacttatttgttggtttcattccactcaattataaagtactaaacacccttaatttcattataactcttaacacgttaaa

SEQ ID NO: 22683 - DNA, 543 bp, synthetic construct
  source 1..543: mol_type = other DNA
aagctgctcgcgcggctgaaggagaaaacgttcgttacccggccaattacttcgagaaacctagtaccaccatggaggttgcgcagcgtttcgctccgcacaaccccagtgtagatcaggtcgatgagtcaccgcaatccccacaggcgactgtggcggtggctgcgttggcggcctgcccatggggaaacccatgggacgcttcaatatcgacatggtgcgaagagtctattgagctaattggtagtcctccggcccctgaatgcggctaatcctaactgtggagcagatacccacactccagtgggcagtctgtcgtaatgggcaactctgcagcggaaccgactactttgggtgtccgtgtttccttttattcctatgctggctgcttatggtgacaattgacagattgttaccatatagctactggattggccatccggtgacaagcagagcgattgtttacttatttgttggtttcattccactcaattataaagtactaaacacccttaatttcattataactcttaacacgttaaa

SEQ ID NO: 22684 - DNA, 693 bp, synthetic construct
  source 1..693: mol_type = other DNA
cacactggtatcacggtacctttgtgcgcctgttttatccacccttccccgaacgaaacttagaagtttgacttaaacggtcaatagaaagcccagtacaccaactgggtcgtgaccaagcacttctgtgaccccggactgagtatcaataagctactcacgtggctgaaggagaaaacgttcgttatccggccaattacttcgagaaacttagtaccaccatgaaggttgcgtagcgtttcgctccgcacaaccccagtgtagatcaggtcgatgagtcaccgcgttcctcacgggcgaccgtggcggtggctgcgttggcggcctgcccttggggcaacccaagggacgcttcaatactgacatggtgcgaagagtctattgagctaattggtagtcctccggcccctgaatgcggctaatcctaactgcggagcagatacccacatgccagtgggcagtctgtcgtaatgggcaactctgcagcggaaccgactactttgggtgtccgtgtttccttttattcttatactggctgcttatggtgacaattgagaaattgttaccatatagctattggattggccatccagtgtccaatagagcaatcatttaccttttcgttggatttattccacttgactacaaagcactcaaaacactcgaatacattgtagacctcaatacaacaaa

SEQ ID NO: 22685 - DNA, 643 bp, synthetic construct
  source 1..643: mol_type = other DNA
gaacgaaacttagaagtttgacttaaacggtcaatagaaagcccagtacaccaactgggtcgtgaccaagcacttctgtgaccccggactgagtatcaataagctactcacgtggctgaaggagaaaacgttcgttatccggccaattacttcgagaaacttagtaccaccatgaaggttgcgtagcgtttcgctccgcacaaccccagtgtagatcaggtcgatgagtcaccgcgttcctcacgggcgaccgtggcggtggctgcgttggcggcctgcccttggggcaacccaagggacgcttcaatactgacatggtgcgaagagtctattgagctaattggtagtcctccggcccctgaatgcggctaatcctaactgcggagcagatacccacatgccagtgggcagtctgtcgtaatgggcaactctgcagcggaaccgactactttgggtgtccgtgtttccttttattcttatactggctgcttatggtgacaattgagaaattgttaccatatagctattggattggccatccagtgtccaatagagcaatcatttaccttttcgttggatttattccacttgactacaaagcactcaaaacactcgaatacattgtagacctcaatacaacaaa

SEQ ID NO: 22686 - DNA, 593 bp, synthetic construct
  source 1..593: mol_type = other DNA
ccaactgggtcgtgaccaagcacttctgtgaccccggactgagtatcaataagctactcacgtggctgaaggagaaaacgttcgttatccggccaattacttcgagaaacttagtaccaccatgaaggttgcgtagcgtttcgctccgcacaaccccagtgtagatcaggtcgatgagtcaccgcgttcctcacgggcgaccgtggcggtggctgcgttggcggcctgcccttggggcaacccaagggacgcttcaatactgacatggtgcgaagagtctattgagctaattggtagtcctccggcccctgaatgcggctaatcctaactgcggagcagatacccacatgccagtgggcagtctgtcgtaatgggcaactctgcagcggaaccgactactttgggtgtccgtgtttccttttattcttatactggctgcttatggtgacaattgagaaattgttaccatatagctattggattggccatccagtgtccaatagagcaatcatttaccttttcgttggatttattccacttgactacaaagcactcaaaacactcgaatacattgtagacctcaatacaacaaa

SEQ ID NO: 22687 - DNA, 543 bp, synthetic construct
  source 1..543: mol_type = other DNA
aagctactcacgtggctgaaggagaaaacgttcgttatccggccaattacttcgagaaacttagtaccaccatgaaggttgcgtagcgtttcgctccgcacaaccccagtgtagatcaggtcgatgagtcaccgcgttcctcacgggcgaccgtggcggtggctgcgttggcggcctgcccttggggcaacccaagggacgcttcaatactgacatggtgcgaagagtctattgagctaattggtagtcctccggcccctgaatgcggctaatcctaactgcggagcagatacccacatgccagtgggcagtctgtcgtaatgggcaactctgcagcggaaccgactactttgggtgtccgtgtttccttttattcttatactggctgcttatggtgacaattgagaaattgttaccatatagctattggattggccatccagtgtccaatagagcaatcatttaccttttcgttggatttattccacttgactacaaagcactcaaaacactcgaatacattgtagacctcaatacaacaaa

SEQ ID NO: 22688 - DNA, 693 bp, synthetic construct
  source 1..693: mol_type = other DNA
gcacactggtatctaggtacccttgtgcgcctgttttattcgccccaccccatcgtaacttagaagttgatcaataatggtcgttaggtagcccagcacgccagctgggtcttgaccaagcacttctgttaccccggaccgagtatcaatacgctgctcacgcggctgaaggagaaaacgttcgttacccggccaattacttcgagaagcctagtaccaccatgaaggttgcgcagcgtttcgctccgcacaaccccagtgtagatcaggccgatgagtcaccgcactcctcacgggcgaccgtggcggtgactgcgttggcggcctgcccatggggtgacccatgggacgcttcaatactgacatggtgcgaagagcctattgagctaattggtagtcctccggcccctgaatgcggctaatcctaactgcggagcagatacccacacaccagtgggcagtctgtcgtaacgggcaactctgcagcggaaccgactactttgggtgtccgtgtttccttttattctaatattggctgcttatggtgacaattgaaaaattgttaccatatagctattggattggccatccggtgacaaatagagcgattgtttacctgtttgttggtttcataccattaaatcttaaagtcttaaaaacccttgattttatactagcactcaattcagcaaa

SEQ ID NO: 22689 - DNA, 643 bp, synthetic construct
  source 1..643: mol_type = other DNA
catcgtaacttagaagttgatcaataatggtcgttaggtagcccagcacgccagctgggtcttgaccaagcacttctgttaccccggaccgagtatcaatacgctgctcacgcggctgaaggagaaaacgttcgttacccggccaattacttcgagaagcctagtaccaccatgaaggttgcgcagcgtttcgctccgcacaaccccagtgtagatcaggccgatgagtcaccgcactcctcacgggcgaccgtggcggtgactgcgttggcggcctgcccatggggtgacccatgggacgcttcaatactgacatggtgcgaagagcctattgagctaattggtagtcctccggcccctgaatgcggctaatcctaactgcggagcagatacccacacaccagtgggcagtctgtcgtaacgggcaactctgcagcggaaccgactactttgggtgtccgtgtttccttttattctaatattggctgcttatggtgacaattgaaaaattgttaccatatagctattggattggccatccggtgacaaatagagcgattgtttacctgtttgttggtttcataccattaaatcttaaagtcttaaaaacccttgattttatactagcactcaattcagcaaa

SEQ ID NO: 22690 - DNA, 593 bp, synthetic construct
  source 1..593: mol_type = other DNA
ccagctgggtcttgaccaagcacttctgttaccccggaccgagtatcaatacgctgctcacgcggctgaaggagaaaacgttcgttacccggccaattacttcgagaagcctagtaccaccatgaaggttgcgcagcgtttcgctccgcacaaccccagtgtagatcaggccgatgagtcaccgcactcctcacgggcgaccgtggcggtgactgcgttggcggcctgcccatggggtgacccatgggacgcttcaatactgacatggtgcgaagagcctattgagctaattggtagtcctccggcccctgaatgcggctaatcctaactgcggagcagatacccacacaccagtgggcagtctgtcgtaacgggcaactctgcagcggaaccgactactttgggtgtccgtgtttccttttattctaatattggctgcttatggtgacaattgaaaaattgttaccatatagctattggattggccatccggtgacaaatagagcgattgtttacctgtttgttggtttcataccattaaatcttaaagtcttaaaaacccttgattttatactagcactcaattcagcaaa

SEQ ID NO: 22691 - DNA, 543 bp, synthetic construct
  source 1..543: mol_type = other DNA
acgctgctcacgcggctgaaggagaaaacgttcgttacccggccaattacttcgagaagcctagtaccaccatgaaggttgcgcagcgtttcgctccgcacaaccccagtgtagatcaggccgatgagtcaccgcactcctcacgggcgaccgtggcggtgactgcgttggcggcctgcccatggggtgacccatgggacgcttcaatactgacatggtgcgaagagcctattgagctaattggtagtcctccggcccctgaatgcggctaatcctaactgcggagcagatacccacacaccagtgggcagtctgtcgtaacgggcaactctgcagcggaaccgactactttgggtgtccgtgtttccttttattctaatattggctgcttatggtgacaattgaaaaattgttaccatatagctattggattggccatccggtgacaaatagagcgattgtttacctgtttgttggtttcataccattaaatcttaaagtcttaaaaacccttgattttatactagcactcaattcagcaaa

SEQ ID NO: 22692 - DNA, 693 bp, synthetic construct
  source 1..693: mol_type = other DNA
gcacactggtattacggtacctttgtgcgcctgttttatccacccttccctgatgtaacttagaagtaaaacataggcggtcaataggtagcccaacacaccagttgggtttcgaccaaacacttctgttaccccggaccgagtatcaataggctgctcacgcggctgaaggagaaaacgttcgttacccgaccaattacttcgagaaacccagtaacaccatgaaagttgcgcagtgtttcgctccgcacaaccccagtgtagatcaggtcgatgagtcaccgcattccccacgggcgaccgtggcggtggctgcgttggcggcctgcccatgggctaacccatgggacgctacaataccgacatggtgcgaagagtctattgagctaattggtagtcctccggcccctgaatgcggctaatcctaactgcggagcagatacccacacaccagtgggcggtctgtcgtaacgggcaactctgcagcggaaccgactactttgggtgtccgtgtttccttttattcctatattggctgcttatggtgacaattgagagattgttaccatatagctattggattggccatccggtgacaaacagggcggtcatttacctatttgttggttttgtaccattgaattttaaggtattgaaaaccctcaaccttgttttagcactcaatacagcaaa

SEQ ID NO: 22693 - DNA, 643 bp, synthetic construct
  source 1..643: mol_type = other DNA
tgatgtaacttagaagtaaaacataggcggtcaataggtagcccaacacaccagttgggtttcgaccaaacacttctgttaccccggaccgagtatcaataggctgctcacgcggctgaaggagaaaacgttcgttacccgaccaattacttcgagaaacccagtaacaccatgaaagttgcgcagtgtttcgctccgcacaaccccagtgtagatcaggtcgatgagtcaccgcattccccacgggcgaccgtggcggtggctgcgttggcggcctgcccatgggctaacccatgggacgctacaataccgacatggtgcgaagagtctattgagctaattggtagtcctccggcccctgaatgcggctaatcctaactgcggagcagatacccacacaccagtgggcggtctgtcgtaacgggcaactctgcagcggaaccgactactttgggtgtccgtgtttccttttattcctatattggctgcttatggtgacaattgagagattgttaccatatagctattggattggccatccggtgacaaacagggcggtcatttacctatttgttggttttgtaccattgaattttaaggtattgaaaaccctcaaccttgttttagcactcaatacagcaaa

SEQ ID NO: 22694 - DNA, 593 bp, synthetic construct
  source 1..593: mol_type = other DNA
ccagttgggtttcgaccaaacacttctgttaccccggaccgagtatcaataggctgctcacgcggctgaaggagaaaacgttcgttacccgaccaattacttcgagaaacccagtaacaccatgaaagttgcgcagtgtttcgctccgcacaaccccagtgtagatcaggtcgatgagtcaccgcattccccacgggcgaccgtggcggtggctgcgttggcggcctgcccatgggctaacccatgggacgctacaataccgacatggtgcgaagagtctattgagctaattggtagtcctccggcccctgaatgcggctaatcctaactgcggagcagatacccacacaccagtgggcggtctgtcgtaacgggcaactctgcagcggaaccgactactttgggtgtccgtgtttccttttattcctatattggctgcttatggtgacaattgagagattgttaccatatagctattggattggccatccggtgacaaacagggcggtcatttacctatttgttggttttgtaccattgaattttaaggtattgaaaaccctcaaccttgttttagcactcaatacagcaaa

SEQ ID NO: 22695 - DNA, 543 bp, synthetic construct
  source 1..543: mol_type = other DNA
aggctgctcacgcggctgaaggagaaaacgttcgttacccgaccaattacttcgagaaacccagtaacaccatgaaagttgcgcagtgtttcgctccgcacaaccccagtgtagatcaggtcgatgagtcaccgcattccccacgggcgaccgtggcggtggctgcgttggcggcctgcccatgggctaacccatgggacgctacaataccgacatggtgcgaagagtctattgagctaattggtagtcctccggcccctgaatgcggctaatcctaactgcggagcagatacccacacaccagtgggcggtctgtcgtaacgggcaactctgcagcggaaccgactactttgggtgtccgtgtttccttttattcctatattggctgcttatggtgacaattgagagattgttaccatatagctattggattggccatccggtgacaaacagggcggtcatttacctatttgttggttttgtaccattgaattttaaggtattgaaaaccctcaaccttgttttagcactcaatacagcaaa

SEQ ID NO: 22696 - DNA, 693 bp, synthetic construct
  source 1..693: mol_type = other DNA
cactctggtattgcggtacctttgtgcgcctgttttatattccctccccctgaccgtaacttagaagtaacacacaccgatcaacagtaagcatggcacaccagccatgttttgatcaagcacttctgttatcccggactgagtatcaatagactgctcacgcggttgaaggagaaaacgttcgttacccggccaactacttcgaaaaacctagtaacaccatggaagttgcagagtgtttcgctcagcactaccccagtgtagatcaggtcgatgagtcaccgcattccccacgggcgaccgtggcggtggctgcgttggcggcctgcctatggggaaacccataggacgctctaatacagacatggtgcgaagagtctattgagctagttggtagtcctccggcccctgaatgcggctaatcctaactgcggagcacacaccctcaagccagggggcagtgtgtcgtaacgggcaactctgcagcggaaccgactactttgggtgtccgtgtttccccttactcttgtattggctgcttatggtgacaattttggaattgttgccatatagctattggattggccatccggtgacaaacagagcgattgtatacctattcgttggacttgtaccgctcaacgttacgagtctaacgactttatactacatcatctggttgaacacagcaaa

SEQ ID NO: 22697 - DNA, 643 bp, synthetic construct
  source 1..643: mol_type = other DNA
tgaccgtaacttagaagtaacacacaccgatcaacagtaagcatggcacaccagccatgttttgatcaagcacttctgttatcccggactgagtatcaatagactgctcacgcggttgaaggagaaaacgttcgttacccggccaactacttcgaaaaacctagtaacaccatggaagttgcagagtgtttcgctcagcactaccccagtgtagatcaggtcgatgagtcaccgcattccccacgggcgaccgtggcggtggctgcgttggcggcctgcctatggggaaacccataggacgctctaatacagacatggtgcgaagagtctattgagctagttggtagtcctccggcccctgaatgcggctaatcctaactgcggagcacacaccctcaagccagggggcagtgtgtcgtaacgggcaactctgcagcggaaccgactactttgggtgtccgtgtttccccttactcttgtattggctgcttatggtgacaattttggaattgttgccatatagctattggattggccatccggtgacaaacagagcgattgtatacctattcgttggacttgtaccgctcaacgttacgagtctaacgactttatactacatcatctggttgaacacagcaaa

SEQ ID NO: 22698 - DNA, 593 bp, synthetic construct
  source 1..593: mol_type = other DNA
ccagccatgttttgatcaagcacttctgttatcccggactgagtatcaatagactgctcacgcggttgaaggagaaaacgttcgttacccggccaactacttcgaaaaacctagtaacaccatggaagttgcagagtgtttcgctcagcactaccccagtgtagatcaggtcgatgagtcaccgcattccccacgggcgaccgtggcggtggctgcgttggcggcctgcctatggggaaacccataggacgctctaatacagacatggtgcgaagagtctattgagctagttggtagtcctccggcccctgaatgcggctaatcctaactgcggagcacacaccctcaagccagggggcagtgtgtcgtaacgggcaactctgcagcggaaccgactactttgggtgtccgtgtttccccttactcttgtattggctgcttatggtgacaattttggaattgttgccatatagctattggattggccatccggtgacaaacagagcgattgtatacctattcgttggacttgtaccgctcaacgttacgagtctaacgactttatactacatcatctggttgaacacagcaaa

SEQ ID NO: 22699 - DNA, 543 bp, synthetic construct
  source 1..543: mol_type = other DNA
agactgctcacgcggttgaaggagaaaacgttcgttacccggccaactacttcgaaaaacctagtaacaccatggaagttgcagagtgtttcgctcagcactaccccagtgtagatcaggtcgatgagtcaccgcattccccacgggcgaccgtggcggtggctgcgttggcggcctgcctatggggaaacccataggacgctctaatacagacatggtgcgaagagtctattgagctagttggtagtcctccggcccctgaatgcggctaatcctaactgcggagcacacaccctcaagccagggggcagtgtgtcgtaacgggcaactctgcagcggaaccgactactttgggtgtccgtgtttccccttactcttgtattggctgcttatggtgacaattttggaattgttgccatatagctattggattggccatccggtgacaaacagagcgattgtatacctattcgttggacttgtaccgctcaacgttacgagtctaacgactttatactacatcatctggttgaacacagcaaa

SEQ ID NO: 22700 - DNA, 693 bp, synthetic construct
  source 1..693: mol_type = other DNA
cactctggtatcacggtaccttagtgcgcctgttttatatcccccacccccacttgaaacttagaagcaaaacatactgaccaatagttgacatggcaagccagccgtgccttggtcaagcacctctgtttccccggaccgagtatcaatagactgctagcgcggttgaaggagaaagcgttcgttacccgactaactacttcgaaaaacctagtagcatcatgaaagttgcagagtgtttcgctcagcacaaccccagtgtagatcaggccgatgagtcaccgcattcctcacgggtgaccgtggcggtggctgcgctggcggcctgcctgtggggcaacccacaggacgctctaatacagacatggtgcgaagagtctattgagctagttagtagtcctccggcccctgaatgcggctaatcctaactgcggagcacgtgcctctaatccaagaggtagcgtgtcgtaacgggcaactctgcagcggaaccgactactttgggtgtccgtgtttccttttatttttatactggctgcttatggtgacaattgagagattgttaccatatagctattggattggccatccggtgactaatagagctattgtatacctctttattggttacgttccattaaaccgcaaggaattaaggaccctcaattacatcttgcttttgaattcagcaaa

SEQ ID NO: 22701 - DNA, 643 bp, synthetic construct
  source 1..643: mol_type = other DNA
cacttgaaacttagaagcaaaacatactgaccaatagttgacatggcaagccagccgtgccttggtcaagcacctctgtttccccggaccgagtatcaatagactgctagcgcggttgaaggagaaagcgttcgttacccgactaactacttcgaaaaacctagtagcatcatgaaagttgcagagtgtttcgctcagcacaaccccagtgtagatcaggccgatgagtcaccgcattcctcacgggtgaccgtggcggtggctgcgctggcggcctgcctgtggggcaacccacaggacgctctaatacagacatggtgcgaagagtctattgagctagttagtagtcctccggcccctgaatgcggctaatcctaactgcggagcacgtgcctctaatccaagaggtagcgtgtcgtaacgggcaactctgcagcggaaccgactactttgggtgtccgtgtttccttttatttttatactggctgcttatggtgacaattgagagattgttaccatatagctattggattggccatccggtgactaatagagctattgtatacctctttattggttacgttccattaaaccgcaaggaattaaggaccctcaattacatcttgcttttgaattcagcaaa

SEQ ID NO: 22702 - DNA, 593 bp, synthetic construct
  source 1..593: mol_type = other DNA
ccagccgtgccttggtcaagcacctctgtttccccggaccgagtatcaatagactgctagcgcggttgaaggagaaagcgttcgttacccgactaactacttcgaaaaacctagtagcatcatgaaagttgcagagtgtttcgctcagcacaaccccagtgtagatcaggccgatgagtcaccgcattcctcacgggtgaccgtggcggtggctgcgctggcggcctgcctgtggggcaacccacaggacgctctaatacagacatggtgcgaagagtctattgagctagttagtagtcctccggcccctgaatgcggctaatcctaactgcggagcacgtgcctctaatccaagaggtagcgtgtcgtaacgggcaactctgcagcggaaccgactactttgggtgtccgtgtttccttttatttttatactggctgcttatggtgacaattgagagattgttaccatatagctattggattggccatccggtgactaatagagctattgtatacctctttattggttacgttccattaaaccgcaaggaattaaggaccctcaattacatcttgcttttgaattcagcaaa

SEQ ID NO: 22703 - DNA, 543 bp, synthetic construct
  source 1..543: mol_type = other DNA
agactgctagcgcggttgaaggagaaagcgttcgttacccgactaactacttcgaaaaacctagtagcatcatgaaagttgcagagtgtttcgctcagcacaaccccagtgtagatcaggccgatgagtcaccgcattcctcacgggtgaccgtggcggtggctgcgctggcggcctgcctgtggggcaacccacaggacgctctaatacagacatggtgcgaagagtctattgagctagttagtagtcctccggcccctgaatgcggctaatcctaactgcggagcacgtgcctctaatccaagaggtagcgtgtcgtaacgggcaactctgcagcggaaccgactactttgggtgtccgtgtttccttttatttttatactggctgcttatggtgacaattgagagattgttaccatatagctattggattggccatccggtgactaatagagctattgtatacctctttattggttacgttccattaaaccgcaaggaattaaggaccctcaattacatcttgcttttgaattcagcaaa

SEQ ID NO: 22704 - DNA, 693 bp, synthetic construct
  source 1..693: mol_type = other DNA
tacactggtatcacggtacctttgtgcgcctgtttgactcaccttccccaaacgcaacttagaagcataacttaaatggtcattaggcggctcagtatgccaactgagtctcgatcaagcacttctgttaccccggactgagtaccaataggctgctcacgcggctgaaagggaaaccgttcgttacccgaccaactacttcgagaaacctagtaccaccatgaaagttgcgcggcgtttcgctccgcacaaccccagtgtagatcaggccgatgagtcaccgcaaaccccacgggcgaccgtggcggtggctgcgctggcggcctgcccatgggacaacccatgggacgccacaatactgacatgatgcgaagagtctattgagctagttggtagtcctccggcccctgaatgcggctaatcccaactgtggagcagatacccacgcaccagtgggcagtctgtcgtaatgggcaactctacagcggaaccgactactttgggtgtccgtgtttctttttattcctacgctggctacttatggtgacaattgagagactgtaaccatattgctatcgggttggccacctggtgaagaataaaacagttgctcactcgtttgtcagtcttgcaccgtcgtgccacaaagtcttaactgcccctcaacatcgtcataatactaaatacgctgaa

SEQ ID NO: 22705 - DNA, 643 bp, synthetic construct
  source 1..643: mol_type = other DNA
aacgcaacttagaagcataacttaaatggtcattaggcggctcagtatgccaactgagtctcgatcaagcacttctgttaccccggactgagtaccaataggctgctcacgcggctgaaagggaaaccgttcgttacccgaccaactacttcgagaaacctagtaccaccatgaaagttgcgcggcgtttcgctccgcacaaccccagtgtagatcaggccgatgagtcaccgcaaaccccacgggcgaccgtggcggtggctgcgctggcggcctgcccatgggacaacccatgggacgccacaatactgacatgatgcgaagagtctattgagctagttggtagtcctccggcccctgaatgcggctaatcccaactgtggagcagatacccacgcaccagtgggcagtctgtcgtaatgggcaactctacagcggaaccgactactttgggtgtccgtgtttctttttattcctacgctggctacttatggtgacaattgagagactgtaaccatattgctatcgggttggccacctggtgaagaataaaacagttgctcactcgtttgtcagtcttgcaccgtcgtgccacaaagtcttaactgcccctcaacatcgtcataatactaaatacgctgaa

SEQ ID NO: 22706 - DNA, 593 bp, synthetic construct
  source 1..593: mol_type = other DNA
caactgagtctcgatcaagcacttctgttaccccggactgagtaccaataggctgctcacgcggctgaaagggaaaccgttcgttacccgaccaactacttcgagaaacctagtaccaccatgaaagttgcgcggcgtttcgctccgcacaaccccagtgtagatcaggccgatgagtcaccgcaaaccccacgggcgaccgtggcggtggctgcgctggcggcctgcccatgggacaacccatgggacgccacaatactgacatgatgcgaagagtctattgagctagttggtagtcctccggcccctgaatgcggctaatcccaactgtggagcagatacccacgcaccagtgggcagtctgtcgtaatgggcaactctacagcggaaccgactactttgggtgtccgtgtttctttttattcctacgctggctacttatggtgacaattgagagactgtaaccatattgctatcgggttggccacctggtgaagaataaaacagttgctcactcgtttgtcagtcttgcaccgtcgtgccacaaagtcttaactgcccctcaacatcgtcataatactaaatacgctgaa

SEQ ID NO: 22707 - DNA, 543 bp, synthetic construct
  source 1..543: mol_type = other DNA
ggctgctcacgcggctgaaagggaaaccgttcgttacccgaccaactacttcgagaaacctagtaccaccatgaaagttgcgcggcgtttcgctccgcacaaccccagtgtagatcaggccgatgagtcaccgcaaaccccacgggcgaccgtggcggtggctgcgctggcggcctgcccatgggacaacccatgggacgccacaatactgacatgatgcgaagagtctattgagctagttggtagtcctccggcccctgaatgcggctaatcccaactgtggagcagatacccacgcaccagtgggcagtctgtcgtaatgggcaactctacagcggaaccgactactttgggtgtccgtgtttctttttattcctacgctggctacttatggtgacaattgagagactgtaaccatattgctatcgggttggccacctggtgaagaataaaacagttgctcactcgtttgtcagtcttgcaccgtcgtgccacaaagtcttaactgcccctcaacatcgtcataatactaaatacgctgaa

SEQ ID NO: 22708 - DNA, 693 bp, synthetic construct
  source 1..693: mol_type = other DNA
cacactggtatcacggtacctttgtgcgcctgtttgacttaccctccccaaacgcaacttagaagcacaacttaaatggtcaatagacggctcagtatgccaactgagtctcgatcaagcacttctgttaccccggactgagtaccaataggctgctcacgcggctgaaggggaaaccgttcgttacccgactaactacttcgagaaacctagtaccaccatgaaagttgcgcagcgtttcgctccgcacaaccccagtgtagatcaggccgatgagtcaccgcaaaccccacgggcgaccgtggcggtggctgcgctggcggcctgcccatggggcaactcatgggatgcttcaatactgacatggtgcgaagagtctattgagctagttggtagtcctccggcccctgaatgcggctaatcctaactgcggagcagatacccacgcaccagtgggcagtctgtcgtaatgggcaactctgcagcggaaccgactactttgggtgtccgtgtttccttttatccttatactggctacttatggtgacaattgagagattgtaaccatattgctattggattggccacccggcgacgaatagaacagttgcttacctgtttgttagtctcgtgtcactgaactgcaaggccttaaacaccctttaatttcatcataacgctcaatacgttaaa

SEQ ID NO: 22709 - DNA, 643 bp, synthetic construct
  source 1..643: mol_type = other DNA
aacgcaacttagaagcacaacttaaatggtcaatagacggctcagtatgccaactgagtctcgatcaagcacttctgttaccccggactgagtaccaataggctgctcacgcggctgaaggggaaaccgttcgttacccgactaactacttcgagaaacctagtaccaccatgaaagttgcgcagcgtttcgctccgcacaaccccagtgtagatcaggccgatgagtcaccgcaaaccccacgggcgaccgtggcggtggctgcgctggcggcctgcccatggggcaactcatgggatgcttcaatactgacatggtgcgaagagtctattgagctagttggtagtcctccggcccctgaatgcggctaatcctaactgcggagcagatacccacgcaccagtgggcagtctgtcgtaatgggcaactctgcagcggaaccgactactttgggtgtccgtgtttccttttatccttatactggctacttatggtgacaattgagagattgtaaccatattgctattggattggccacccggcgacgaatagaacagttgcttacctgtttgttagtctcgtgtcactgaactgcaaggccttaaacaccctttaatttcatcataacgctcaatacgttaaa

SEQ ID NO: 22710 - DNA, 593 bp, synthetic construct
  source 1..593: mol_type = other DNA
caactgagtctcgatcaagcacttctgttaccccggactgagtaccaataggctgctcacgcggctgaaggggaaaccgttcgttacccgactaactacttcgagaaacctagtaccaccatgaaagttgcgcagcgtttcgctccgcacaaccccagtgtagatcaggccgatgagtcaccgcaaaccccacgggcgaccgtggcggtggctgcgctggcggcctgcccatggggcaactcatgggatgcttcaatactgacatggtgcgaagagtctattgagctagttggtagtcctccggcccctgaatgcggctaatcctaactgcggagcagatacccacgcaccagtgggcagtctgtcgtaatgggcaactctgcagcggaaccgactactttgggtgtccgtgtttccttttatccttatactggctacttatggtgacaattgagagattgtaaccatattgctattggattggccacccggcgacgaatagaacagttgcttacctgtttgttagtctcgtgtcactgaactgcaaggccttaaacaccctttaatttcatcataacgctcaatacgttaaa

SEQ ID NO: 22711 - DNA, 543 bp, synthetic construct
  source 1..543: mol_type = other DNA
ggctgctcacgcggctgaaggggaaaccgttcgttacccgactaactacttcgagaaacctagtaccaccatgaaagttgcgcagcgtttcgctccgcacaaccccagtgtagatcaggccgatgagtcaccgcaaaccccacgggcgaccgtggcggtggctgcgctggcggcctgcccatggggcaactcatgggatgcttcaatactgacatggtgcgaagagtctattgagctagttggtagtcctccggcccctgaatgcggctaatcctaactgcggagcagatacccacgcaccagtgggcagtctgtcgtaatgggcaactctgcagcggaaccgactactttgggtgtccgtgtttccttttatccttatactggctacttatggtgacaattgagagattgtaaccatattgctattggattggccacccggcgacgaatagaacagttgcttacctgtttgttagtctcgtgtcactgaactgcaaggccttaaacaccctttaatttcatcataacgctcaatacgttaaa

SEQ ID NO: 22712 - DNA, 693 bp, synthetic construct
  source 1..693: mol_type = other DNA
cactctggtattgcggtacctttgtgcgcctgttttacccaccctcccccaacgtaacttagaagcctgacatatacggtcacaagccagcccagtacgccaactgggtaccgaccaagcacttctgttaccccggactgagtatcaataagctgccaaagcggctgaaggagaaaacgttcgttacccggccaattacttcgagaaacccagtaacaccatgaaagttgcgtagcgtttcattcagcacaatcccagtgtagatcaggtcgatgagtcaccgcattccccacaggcgactgtggcggtggctgcgttggcggcctgcccatggggcaaacccatgggacgcttcaatactgacatggtgcgaagagtctattgagctaattggtagtcctccggcccctgaatgcggctaatcctaactgcggagcaggcactcgcagaccagcgagcagcttgtcgtaatgggcaactccgcagcggaaccgactactttgggtgtccgtgtttcctatttcctttacactggctgcttatggtgacaattgagaaattgttaccatatagctattggagtggccatccggtgactaacagagcaataatatatttgtttgttggctttgtgccacttaatttgaaggttgttaagacgctcaatctgatactacttctaaataaagcaaa

SEQ ID NO: 22713 - DNA, 643 bp, synthetic construct
  source 1..643: mol_type = other DNA
aacgtaacttagaagcctgacatatacggtcacaagccagcccagtacgccaactgggtaccgaccaagcacttctgttaccccggactgagtatcaataagctgccaaagcggctgaaggagaaaacgttcgttacccggccaattacttcgagaaacccagtaacaccatgaaagttgcgtagcgtttcattcagcacaatcccagtgtagatcaggtcgatgagtcaccgcattccccacaggcgactgtggcggtggctgcgttggcggcctgcccatggggcaaacccatgggacgcttcaatactgacatggtgcgaagagtctattgagctaattggtagtcctccggcccctgaatgcggctaatcctaactgcggagcaggcactcgcagaccagcgagcagcttgtcgtaatgggcaactccgcagcggaaccgactactttgggtgtccgtgtttcctatttcctttacactggctgcttatggtgacaattgagaaattgttaccatatagctattggagtggccatccggtgactaacagagcaataatatatttgtttgttggctttgtgccacttaatttgaaggttgttaagacgctcaatctgatactacttctaaataaagcaaa

SEQ ID NO: 22714 - DNA, 593 bp, synthetic construct
  source 1..593: mol_type = other DNA
caactgggtaccgaccaagcacttctgttaccccggactgagtatcaataagctgccaaagcggctgaaggagaaaacgttcgttacccggccaattacttcgagaaacccagtaacaccatgaaagttgcgtagcgtttcattcagcacaatcccagtgtagatcaggtcgatgagtcaccgcattccccacaggcgactgtggcggtggctgcgttggcggcctgcccatggggcaaacccatgggacgcttcaatactgacatggtgcgaagagtctattgagctaattggtagtcctccggcccctgaatgcggctaatcctaactgcggagcaggcactcgcagaccagcgagcagcttgtcgtaatgggcaactccgcagcggaaccgactactttgggtgtccgtgtttcctatttcctttacactggctgcttatggtgacaattgagaaattgttaccatatagctattggagtggccatccggtgactaacagagcaataatatatttgtttgttggctttgtgccacttaatttgaaggttgttaagacgctcaatctgatactacttctaaataaagcaaa

SEQ ID NO: 22715 - DNA, 543 bp, synthetic construct
  source 1..543: mol_type = other DNA
agctgccaaagcggctgaaggagaaaacgttcgttacccggccaattacttcgagaaacccagtaacaccatgaaagttgcgtagcgtttcattcagcacaatcccagtgtagatcaggtcgatgagtcaccgcattccccacaggcgactgtggcggtggctgcgttggcggcctgcccatggggcaaacccatgggacgcttcaatactgacatggtgcgaagagtctattgagctaattggtagtcctccggcccctgaatgcggctaatcctaactgcggagcaggcactcgcagaccagcgagcagcttgtcgtaatgggcaactccgcagcggaaccgactactttgggtgtccgtgtttcctatttcctttacactggctgcttatggtgacaattgagaaattgttaccatatagctattggagtggccatccggtgactaacagagcaataatatatttgtttgttggctttgtgccacttaatttgaaggttgttaagacgctcaatctgatactacttctaaataaagcaaa

SEQ ID NO: 22716 - DNA, 693 bp, synthetic construct
  source 1..693: mol_type = other DNA
cacactggtatcacggtacctttgtgcgcctgttttatactcccccccctaaggaaactttagaagcaaagcaattgtgatcaatagtgggtatggcacaccagtcatatcttgatcaagcacttctgttcccccggacttagtaccaatagactgctcaagcggttgaaggggaaaacgttcgttatccggccaactacttcgagaaacctagtagcaccatgaaagttgcggagtgtttcgctcagcacttcccccgtgtagatcaggctgatgagtcaccgtattccccacgggcgaccgtgacggtggctgcgttggcggcctgcccatggggtaacccatgggacgctctaaaacagacacggtgcgaagagtctattgagctagttggtagtcctccggcccctgaatgcggccaatcctaactgcggagcacatactcccaatccagggagcagtgtgtcgtaatgggtaactctgcagcggaaccgactactttgggtgtccgtgtttccttttattctcacattgactgcttatggtgacaattgaaagattgttaccatatagctattggattggtcatccggtgagcaatagagctattgtttatcaatttgttggatttgtaccactcaacttttctgttttgagaacactcaactacatcttactgctaaacacatcaaa

SEQ ID NO: 22717 - DNA, 643 bp, synthetic construct
  source 1..643: mol_type = other DNA
aaggaaactttagaagcaaagcaattgtgatcaatagtgggtatggcacaccagtcatatcttgatcaagcacttctgttcccccggacttagtaccaatagactgctcaagcggttgaaggggaaaacgttcgttatccggccaactacttcgagaaacctagtagcaccatgaaagttgcggagtgtttcgctcagcacttcccccgtgtagatcaggctgatgagtcaccgtattccccacgggcgaccgtgacggtggctgcgttggcggcctgcccatggggtaacccatgggacgctctaaaacagacacggtgcgaagagtctattgagctagttggtagtcctccggcccctgaatgcggccaatcctaactgcggagcacatactcccaatccagggagcagtgtgtcgtaatgggtaactctgcagcggaaccgactactttgggtgtccgtgtttccttttattctcacattgactgcttatggtgacaattgaaagattgttaccatatagctattggattggtcatccggtgagcaatagagctattgtttatcaatttgttggatttgtaccactcaacttttctgttttgagaacactcaactacatcttactgctaaacacatcaaa

SEQ ID NO: 22718 - DNA, 593 bp, synthetic construct
  source 1..593: mol_type = other DNA
ccagtcatatcttgatcaagcacttctgttcccccggacttagtaccaatagactgctcaagcggttgaaggggaaaacgttcgttatccggccaactacttcgagaaacctagtagcaccatgaaagttgcggagtgtttcgctcagcacttcccccgtgtagatcaggctgatgagtcaccgtattccccacgggcgaccgtgacggtggctgcgttggcggcctgcccatggggtaacccatgggacgctctaaaacagacacggtgcgaagagtctattgagctagttggtagtcctccggcccctgaatgcggccaatcctaactgcggagcacatactcccaatccagggagcagtgtgtcgtaatgggtaactctgcagcggaaccgactactttgggtgtccgtgtttccttttattctcacattgactgcttatggtgacaattgaaagattgttaccatatagctattggattggtcatccggtgagcaatagagctattgtttatcaatttgttggatttgtaccactcaacttttctgttttgagaacactcaactacatcttactgctaaacacatcaaa

SEQ ID NO: 22719 - DNA, 543 bp, synthetic construct
  source 1..543: mol_type = other DNA
agactgctcaagcggttgaaggggaaaacgttcgttatccggccaactacttcgagaaacctagtagcaccatgaaagttgcggagtgtttcgctcagcacttcccccgtgtagatcaggctgatgagtcaccgtattccccacgggcgaccgtgacggtggctgcgttggcggcctgcccatggggtaacccatgggacgctctaaaacagacacggtgcgaagagtctattgagctagttggtagtcctccggcccctgaatgcggccaatcctaactgcggagcacatactcccaatccagggagcagtgtgtcgtaatgggtaactctgcagcggaaccgactactttgggtgtccgtgtttccttttattctcacattgactgcttatggtgacaattgaaagattgttaccatatagctattggattggtcatccggtgagcaatagagctattgtttatcaatttgttggatttgtaccactcaacttttctgttttgagaacactcaactacatcttactgctaaacacatcaaa

SEQ ID NO: 22720 - DNA, 693 bp, synthetic construct
  source 1..693: mol_type = other DNA
cacactggtatcccggtacctttgtgcgcctgttttatacaccccaaaccccaatgtaaattagaagaaaataacaccgatcaatagtgggtgtggcacaacagccacatcatgatcaagcactactgttcccccggactgagtatcaataagctgctcgcgcggctgaaggagaaaacgttcgttatccggccaattacttcgagaaacctagtaccaccatgaaggttgcgcagtgtttcgctccacacaaccccagtgtagatcaggtcgatgagtcaccgcattccccacaggcgactgtggcggtggctgcgctggcggcctgcccatggggtgacccatgggacgcttcaatactgacatggtgtgaagagtctattgagctaattggtagtcctccggcccctgaatgcggctaatcctaactgcggagcagatacccacgcaccagtgggtagtctgtcgtaacgggtaactctgcagtggaaccgactactttgggtgtccgtgtttccttttattctcacattggctgcttatggtgacaattgaaagattgttaccatatagctactggattggccatccggtgacaaacagagcaattgtgttcctcttcgatgggttcatacctctcaacaagatcagctttcgaactttgtgctacatcatcaagctaaacacaacaaa

SEQ ID NO: 22721 - DNA, 643 bp, synthetic construct
  source 1..643: mol_type = other DNA
ccaatgtaaattagaagaaaataacaccgatcaatagtgggtgtggcacaacagccacatcatgatcaagcactactgttcccccggactgagtatcaataagctgctcgcgcggctgaaggagaaaacgttcgttatccggccaattacttcgagaaacctagtaccaccatgaaggttgcgcagtgtttcgctccacacaaccccagtgtagatcaggtcgatgagtcaccgcattccccacaggcgactgtggcggtggctgcgctggcggcctgcccatggggtgacccatgggacgcttcaatactgacatggtgtgaagagtctattgagctaattggtagtcctccggcccctgaatgcggctaatcctaactgcggagcagatacccacgcaccagtgggtagtctgtcgtaacgggtaactctgcagtggaaccgactactttgggtgtccgtgtttccttttattctcacattggctgcttatggtgacaattgaaagattgttaccatatagctactggattggccatccggtgacaaacagagcaattgtgttcctcttcgatgggttcatacctctcaacaagatcagctttcgaactttgtgctacatcatcaagctaaacacaacaaa

SEQ ID NO: 22722 - DNA, 593 bp, synthetic construct
  source 1..593: mol_type = other DNA
acagccacatcatgatcaagcactactgttcccccggactgagtatcaataagctgctcgcgcggctgaaggagaaaacgttcgttatccggccaattacttcgagaaacctagtaccaccatgaaggttgcgcagtgtttcgctccacacaaccccagtgtagatcaggtcgatgagtcaccgcattccccacaggcgactgtggcggtggctgcgctggcggcctgcccatggggtgacccatgggacgcttcaatactgacatggtgtgaagagtctattgagctaattggtagtcctccggcccctgaatgcggctaatcctaactgcggagcagatacccacgcaccagtgggtagtctgtcgtaacgggtaactctgcagtggaaccgactactttgggtgtccgtgtttccttttattctcacattggctgcttatggtgacaattgaaagattgttaccatatagctactggattggccatccggtgacaaacagagcaattgtgttcctcttcgatgggttcatacctctcaacaagatcagctttcgaactttgtgctacatcatcaagctaaacacaacaaa

SEQ ID NO: 22723 - DNA, 543 bp, synthetic construct
  source 1..543: mol_type = other DNA
aagctgctcgcgcggctgaaggagaaaacgttcgttatccggccaattacttcgagaaacctagtaccaccatgaaggttgcgcagtgtttcgctccacacaaccccagtgtagatcaggtcgatgagtcaccgcattccccacaggcgactgtggcggtggctgcgctggcggcctgcccatggggtgacccatgggacgcttcaatactgacatggtgtgaagagtctattgagctaattggtagtcctccggcccctgaatgcggctaatcctaactgcggagcagatacccacgcaccagtgggtagtctgtcgtaacgggtaactctgcagtggaaccgactactttgggtgtccgtgtttccttttattctcacattggctgcttatggtgacaattgaaagattgttaccatatagctactggattggccatccggtgacaaacagagcaattgtgttcctcttcgatgggttcatacctctcaacaagatcagctttcgaactttgtgctacatcatcaagctaaacacaacaaa

SEQ ID NO: 22724 - DNA, 693 bp, synthetic construct
  source 1..693: mol_type = other DNA
cacactggtatcacggtacccttgtgcgcctgttttatccaccccccccttaacgtaacttagaagcataaatcaaatggtcaatagataacccagtatgccaactgggtcccgaccaagtacttctgttaccccggactgagtatcaataagctgcttacgtggctgaaggagaaaacgttcgttacccgaccaattacttcgagaaacctagtaacaccatgaaggttgcgcagtgtttcgctcaacacaaccccagtgtagatcaggtcgatgagtcaccgcgttccccacaggcgaccgtggcggtggctgcgttggcggcctgctcatggggcaacccatgagacgcttcaatactgacatggtgcgaagagtctattgagctaactggtagtcctccggcccctgaatgcggctaatcctaactgcggagcaggcgctcgcaaaccagtgagtagcctgtcgtaacgggtaactctgcagcggaaccgactactttgggtgtccgtgtttccttttattcttatattggctgcttatggtgacaattgagagattgttaccatatagctattggattggccatccggtgtctaacagagcaatcatttacctctttgttggttacgtaccattaaatcttaaggtcgtagcaacgcttaagtttatcctacttctcaacaaagcaaa

SEQ ID NO: 22725 - DNA, 643 bp, synthetic construct
  source 1..643: mol_type = other DNA
taacgtaacttagaagcataaatcaaatggtcaatagataacccagtatgccaactgggtcccgaccaagtacttctgttaccccggactgagtatcaataagctgcttacgtggctgaaggagaaaacgttcgttacccgaccaattacttcgagaaacctagtaacaccatgaaggttgcgcagtgtttcgctcaacacaaccccagtgtagatcaggtcgatgagtcaccgcgttccccacaggcgaccgtggcggtggctgcgttggcggcctgctcatggggcaacccatgagacgcttcaatactgacatggtgcgaagagtctattgagctaactggtagtcctccggcccctgaatgcggctaatcctaactgcggagcaggcgctcgcaaaccagtgagtagcctgtcgtaacgggtaactctgcagcggaaccgactactttgggtgtccgtgtttccttttattcttatattggctgcttatggtgacaattgagagattgttaccatatagctattggattggccatccggtgtctaacagagcaatcatttacctctttgttggttacgtaccattaaatcttaaggtcgtagcaacgcttaagtttatcctacttctcaacaaagcaaa

SEQ ID NO: 22726 - DNA, 593 bp, synthetic construct
  source 1..593: mol_type = other DNA
ccaactgggtcccgaccaagtacttctgttaccccggactgagtatcaataagctgcttacgtggctgaaggagaaaacgttcgttacccgaccaattacttcgagaaacctagtaacaccatgaaggttgcgcagtgtttcgctcaacacaaccccagtgtagatcaggtcgatgagtcaccgcgttccccacaggcgaccgtggcggtggctgcgttggcggcctgctcatggggcaacccatgagacgcttcaatactgacatggtgcgaagagtctattgagctaactggtagtcctccggcccctgaatgcggctaatcctaactgcggagcaggcgctcgcaaaccagtgagtagcctgtcgtaacgggtaactctgcagcggaaccgactactttgggtgtccgtgtttccttttattcttatattggctgcttatggtgacaattgagagattgttaccatatagctattggattggccatccggtgtctaacagagcaatcatttacctctttgttggttacgtaccattaaatcttaaggtcgtagcaacgcttaagtttatcctacttctcaacaaagcaaa

SEQ ID NO: 22727 - DNA, 543 bp, synthetic construct
  source 1..543: mol_type = other DNA
aagctgcttacgtggctgaaggagaaaacgttcgttacccgaccaattacttcgagaaacctagtaacaccatgaaggttgcgcagtgtttcgctcaacacaaccccagtgtagatcaggtcgatgagtcaccgcgttccccacaggcgaccgtggcggtggctgcgttggcggcctgctcatggggcaacccatgagacgcttcaatactgacatggtgcgaagagtctattgagctaactggtagtcctccggcccctgaatgcggctaatcctaactgcggagcaggcgctcgcaaaccagtgagtagcctgtcgtaacgggtaactctgcagcggaaccgactactttgggtgtccgtgtttccttttattcttatattggctgcttatggtgacaattgagagattgttaccatatagctattggattggccatccggtgtctaacagagcaatcatttacctctttgttggttacgtaccattaaatcttaaggtcgtagcaacgcttaagtttatcctacttctcaacaaagcaaa

SEQ ID NO: 22728 - DNA, 693 bp, synthetic construct
  source 1..693: mol_type = other DNA
cactctggtatcacggtacctttgtgcgcctgttttatatccctttcccttaattggaacttagaagttacacacaccgatcaacagcaggcgtggcatgccagctacgtcttgatcaagcacttctgtttccccggaccgagtatcaatagactgctcacgcggttgaaggagaaagtgttcgttacccggctaactacttcgagaaacccagtagcatcatgaaagttgcgaggtgtttcgctcagcacttccccagtgtagatcaggtcgatgagtcaccgcattccccacgggcgaccgtggcggtggctgcgttggcggcctgcctacggggcaacccgtaggacgcttcaatacagacatggtgcgaagagtcaattgagctagttagtattcctccggcccctgaatgcggctaatcctaactgcggagcacataccctcaatccagggggcattgtgtcgtaacgggtaactctgcagcggaaccgactactttgggtgtccgtgtttccttttgttcttatactggctgcttatggtgacaattgaaagattgttgccatatagctattggattggccatccattgtctaatagagctgttatatacctctttgttggttttgtaccgctcaatctaaaagaagttaagacactacaacttattatacagctgaacacagcaaa

SEQ ID NO: 22729 - DNA, 643 bp, synthetic construct
  source 1..643: mol_type = other DNA
taattggaacttagaagttacacacaccgatcaacagcaggcgtggcatgccagctacgtcttgatcaagcacttctgtttccccggaccgagtatcaatagactgctcacgcggttgaaggagaaagtgttcgttacccggctaactacttcgagaaacccagtagcatcatgaaagttgcgaggtgtttcgctcagcacttccccagtgtagatcaggtcgatgagtcaccgcattccccacgggcgaccgtggcggtggctgcgttggcggcctgcctacggggcaacccgtaggacgcttcaatacagacatggtgcgaagagtcaattgagctagttagtattcctccggcccctgaatgcggctaatcctaactgcggagcacataccctcaatccagggggcattgtgtcgtaacgggtaactctgcagcggaaccgactactttgggtgtccgtgtttccttttgttcttatactggctgcttatggtgacaattgaaagattgttgccatatagctattggattggccatccattgtctaatagagctgttatatacctctttgttggttttgtaccgctcaatctaaaagaagttaagacactacaacttattatacagctgaacacagcaaa

SEQ ID NO: 22730 - DNA, 593 bp, synthetic construct
  source 1..593: mol_type = other DNA
ccagctacgtcttgatcaagcacttctgtttccccggaccgagtatcaatagactgctcacgcggttgaaggagaaagtgttcgttacccggctaactacttcgagaaacccagtagcatcatgaaagttgcgaggtgtttcgctcagcacttccccagtgtagatcaggtcgatgagtcaccgcattccccacgggcgaccgtggcggtggctgcgttggcggcctgcctacggggcaacccgtaggacgcttcaatacagacatggtgcgaagagtcaattgagctagttagtattcctccggcccctgaatgcggctaatcctaactgcggagcacataccctcaatccagggggcattgtgtcgtaacgggtaactctgcagcggaaccgactactttgggtgtccgtgtttccttttgttcttatactggctgcttatggtgacaattgaaagattgttgccatatagctattggattggccatccattgtctaatagagctgttatatacctctttgttggttttgtaccgctcaatctaaaagaagttaagacactacaacttattatacagctgaacacagcaaa

SEQ ID NO: 22731 - DNA, 694 bp, synthetic construct
  source 1..694: mol_type = other DNA
gtctggtcccggaccaccgttactccattcagcttcttcggaacctgttcggaggaattaaacgggcacccatactccccccaccccccttttgtaactaagtatgtgtgctcgtgatcttgactcccacggaacggaccgatccgttggtgaacaaacagctaggtccacatcctcccttcccctgggagggcccccgccctcccacatcctccccccagcctgacgtatcacaggctgtgtgaagcccccgcgaaagctgctcacgtggcaattgtgggtccccccttcatcaagacaccaggtctttcctccttaaggctagccccggcgtgtgaattcacgttgggcaactagtggtgtcactgtgcgctcccaatctcggccgcggagtgctgttccccaagccaaacccctggcccttcactatgtgcctggcaagcatatctgagaaggtgttccgctgtggctgccaacctggtgacaggtgccccagtgtgcgtaaccttcttccgtctccggacggtagtgattggttaagatttggtgtaaggttcatgtgccaacgccctgtgcgggatgaaacctctactgccctaggaatgccaggcaggtaccccacctccgggtgggatctgagcctgggctaattgtctacgggtagtttcatttccaatccttttatgtcggagtc

SEQ ID NO: 22732 - DNA, 644 bp, synthetic construct
  source 1..644: mol_type = other DNA
ggaggaattaaacgggcacccatactccccccaccccccttttgtaactaagtatgtgtgctcgtgatcttgactcccacggaacggaccgatccgttggtgaacaaacagctaggtccacatcctcccttcccctgggagggcccccgccctcccacatcctccccccagcctgacgtatcacaggctgtgtgaagcccccgcgaaagctgctcacgtggcaattgtgggtccccccttcatcaagacaccaggtctttcctccttaaggctagccccggcgtgtgaattcacgttgggcaactagtggtgtcactgtgcgctcccaatctcggccgcggagtgctgttccccaagccaaacccctggcccttcactatgtgcctggcaagcatatctgagaaggtgttccgctgtggctgccaacctggtgacaggtgccccagtgtgcgtaaccttcttccgtctccggacggtagtgattggttaagatttggtgtaaggttcatgtgccaacgccctgtgcgggatgaaacctctactgccctaggaatgccaggcaggtaccccacctccgggtgggatctgagcctgggctaattgtctacgggtagtttcatttccaatccttttatgtcggagtc

SEQ ID NO: 22733 - DNA, 594 bp, synthetic construct
  source 1..594: mol_type = other DNA
agtatgtgtgctcgtgatcttgactcccacggaacggaccgatccgttggtgaacaaacagctaggtccacatcctcccttcccctgggagggcccccgccctcccacatcctccccccagcctgacgtatcacaggctgtgtgaagcccccgcgaaagctgctcacgtggcaattgtgggtccccccttcatcaagacaccaggtctttcctccttaaggctagccccggcgtgtgaattcacgttgggcaactagtggtgtcactgtgcgctcccaatctcggccgcggagtgctgttccccaagccaaacccctggcccttcactatgtgcctggcaagcatatctgagaaggtgttccgctgtggctgccaacctggtgacaggtgccccagtgtgcgtaaccttcttccgtctccggacggtagtgattggttaagatttggtgtaaggttcatgtgccaacgccctgtgcgggatgaaacctctactgccctaggaatgccaggcaggtaccccacctccgggtgggatctgagcctgggctaattgtctacgggtagtttcatttccaatccttttatgtcggagtc

SEQ ID NO: 22734 - DNA, 544 bp, synthetic construct
  source 1..544: mol_type = other DNA
tgaacaaacagctaggtccacatcctcccttcccctgggagggcccccgccctcccacatcctccccccagcctgacgtatcacaggctgtgtgaagcccccgcgaaagctgctcacgtggcaattgtgggtccccccttcatcaagacaccaggtctttcctccttaaggctagccccggcgtgtgaattcacgttgggcaactagtggtgtcactgtgcgctcccaatctcggccgcggagtgctgttccccaagccaaacccctggcccttcactatgtgcctggcaagcatatctgagaaggtgttccgctgtggctgccaacctggtgacaggtgccccagtgtgcgtaaccttcttccgtctccggacggtagtgattggttaagatttggtgtaaggttcatgtgccaacgccctgtgcgggatgaaacctctactgccctaggaatgccaggcaggtaccccacctccgggtgggatctgagcctgggctaattgtctacgggtagtttcatttccaatccttttatgtcggagtc

SEQ ID NO: 22735 - DNA, 694 bp, synthetic construct
  source 1..694: mol_type = other DNA
cactctggtactgaggtacctttgtgcgcctgttttaactcccttcccctgaagtaacttagaagcaataaactaacgatcaacagtgggcatgacataccagtcatgtctcgatcaagcacttctgtttccccggactgagtatcaataggctgctcgcgcggctgaaagagaaaacgttcgttacccggccagctacttcgagaagcttagtaccatcatgaacgaagcagagcgtttcgctcagcacaatcccagtgtagatcaggctgatgagtcactgcgacccccatgggcgaccatggcagtggctgcgttggcggcctgcccatggagaaatccatgggacgctctaattctgacatggtgcgaagagcctattgagctagctggtagtcctccggcccctgaatgcggctaatcctaactgcggagcacgcacccacaaaccagtgggcagtgtgtcgtaacgggtaactctgcagcggaaccgactactttgggtgtccgtgtttccttttattcttatattggctgcttatggtgacaatcaaagagttgttaccatatagctattggattggccatccggtgtgcaacagagcaattgtttacctatttattgggtttgtaccactaacgttgaagtctgtgaccacactcaactttatcctgaacctcaatacagtaaaac

SEQ ID NO: 22736 - DNA, 644 bp, synthetic construct
  source 1..644: mol_type = other DNA
gaagtaacttagaagcaataaactaacgatcaacagtgggcatgacataccagtcatgtctcgatcaagcacttctgtttccccggactgagtatcaataggctgctcgcgcggctgaaagagaaaacgttcgttacccggccagctacttcgagaagcttagtaccatcatgaacgaagcagagcgtttcgctcagcacaatcccagtgtagatcaggctgatgagtcactgcgacccccatgggcgaccatggcagtggctgcgttggcggcctgcccatggagaaatccatgggacgctctaattctgacatggtgcgaagagcctattgagctagctggtagtcctccggcccctgaatgcggctaatcctaactgcggagcacgcacccacaaaccagtgggcagtgtgtcgtaacgggtaactctgcagcggaaccgactactttgggtgtccgtgtttccttttattcttatattggctgcttatggtgacaatcaaagagttgttaccatatagctattggattggccatccggtgtgcaacagagcaattgtttacctatttattgggtttgtaccactaacgttgaagtctgtgaccacactcaactttatcctgaacctcaatacagtaaaac

SEQ ID NO: 22737 - DNA, 594 bp, synthetic construct
  source 1..594: mol_type = other DNA
cagtcatgtctcgatcaagcacttctgtttccccggactgagtatcaataggctgctcgcgcggctgaaagagaaaacgttcgttacccggccagctacttcgagaagcttagtaccatcatgaacgaagcagagcgtttcgctcagcacaatcccagtgtagatcaggctgatgagtcactgcgacccccatgggcgaccatggcagtggctgcgttggcggcctgcccatggagaaatccatgggacgctctaattctgacatggtgcgaagagcctattgagctagctggtagtcctccggcccctgaatgcggctaatcctaactgcggagcacgcacccacaaaccagtgggcagtgtgtcgtaacgggtaactctgcagcggaaccgactactttgggtgtccgtgtttccttttattcttatattggctgcttatggtgacaatcaaagagttgttaccatatagctattggattggccatccggtgtgcaacagagcaattgtttacctatttattgggtttgtaccactaacgttgaagtctgtgaccacactcaactttatcctgaacctcaatacagtaaaac

SEQ ID NO: 22738 - DNA, 544 bp, synthetic construct
  source 1..544: mol_type = other DNA
ggctgctcgcgcggctgaaagagaaaacgttcgttacccggccagctacttcgagaagcttagtaccatcatgaacgaagcagagcgtttcgctcagcacaatcccagtgtagatcaggctgatgagtcactgcgacccccatgggcgaccatggcagtggctgcgttggcggcctgcccatggagaaatccatgggacgctctaattctgacatggtgcgaagagcctattgagctagctggtagtcctccggcccctgaatgcggctaatcctaactgcggagcacgcacccacaaaccagtgggcagtgtgtcgtaacgggtaactctgcagcggaaccgactactttgggtgtccgtgtttccttttattcttatattggctgcttatggtgacaatcaaagagttgttaccatatagctattggattggccatccggtgtgcaacagagcaattgtttacctatttattgggtttgtaccactaacgttgaagtctgtgaccacactcaactttatcctgaacctcaatacagtaaaac

SEQ ID NO: 22739 - DNA, 694 bp, synthetic construct
  source 1..694: mol_type = other DNA
cactctggtacttaggtacctttgtgcgcctgttttatctcccttcccccgaagtaacttagaagctgtgagctaacgatcaacagtaggtgtgacataccagtcatatcttgatcaagcacttctgtttccccggactgagtatcaataggctgctcgcgcggctgaaagagaaaacgttcgtcacccggccaactacttcgagaagcttagtaccaccatgaacgaggcagagtgtttcgctcggcacaaccccagtgtagatcaggctgatgagtcactgcaatccccatgggcgaccatggcagtggctgcgttggcggcctgcccatggagaaatccatgggacgctctaattctgacatggtgcgaagagcctattgagctagctggtagtcctccggcccctgaatgcggctaatcctaactgcggagcacacacccacaagccagtgggcagtgtgtcgtaacgggcaactctgcagcggaaccgactactttgggtgtccgtgtttccttttattcttgtattggctgcttatggtgacaatcaaagagttgttaccatatagctattggattggccatccggtgtgcaacagagcaattatttacctatttattggttttgtaccattgacactgaagtctgtgattacccttaattttattttgaccctcaacacagtcaaac

SEQ ID NO: 22740 - DNA, 644 bp, synthetic construct
  source 1..644: mol_type = other DNA
gaagtaacttagaagctgtgagctaacgatcaacagtaggtgtgacataccagtcatatcttgatcaagcacttctgtttccccggactgagtatcaataggctgctcgcgcggctgaaagagaaaacgttcgtcacccggccaactacttcgagaagcttagtaccaccatgaacgaggcagagtgtttcgctcggcacaaccccagtgtagatcaggctgatgagtcactgcaatccccatgggcgaccatggcagtggctgcgttggcggcctgcccatggagaaatccatgggacgctctaattctgacatggtgcgaagagcctattgagctagctggtagtcctccggcccctgaatgcggctaatcctaactgcggagcacacacccacaagccagtgggcagtgtgtcgtaacgggcaactctgcagcggaaccgactactttgggtgtccgtgtttccttttattcttgtattggctgcttatggtgacaatcaaagagttgttaccatatagctattggattggccatccggtgtgcaacagagcaattatttacctatttattggttttgtaccattgacactgaagtctgtgattacccttaattttattttgaccctcaacacagtcaaac

SEQ ID NO: 22741 - DNA, 594 bp, synthetic construct
  source 1..594: mol_type = other DNA
cagtcatatcttgatcaagcacttctgtttccccggactgagtatcaataggctgctcgcgcggctgaaagagaaaacgttcgtcacccggccaactacttcgagaagcttagtaccaccatgaacgaggcagagtgtttcgctcggcacaaccccagtgtagatcaggctgatgagtcactgcaatccccatgggcgaccatggcagtggctgcgttggcggcctgcccatggagaaatccatgggacgctctaattctgacatggtgcgaagagcctattgagctagctggtagtcctccggcccctgaatgcggctaatcctaactgcggagcacacacccacaagccagtgggcagtgtgtcgtaacgggcaactctgcagcggaaccgactactttgggtgtccgtgtttccttttattcttgtattggctgcttatggtgacaatcaaagagttgttaccatatagctattggattggccatccggtgtgcaacagagcaattatttacctatttattggttttgtaccattgacactgaagtctgtgattacccttaattttattttgaccctcaacacagtcaaac

SEQ ID NO: 22742 - DNA, 544 bp, synthetic construct
  source 1..544: mol_type = other DNA
ggctgctcgcgcggctgaaagagaaaacgttcgtcacccggccaactacttcgagaagcttagtaccaccatgaacgaggcagagtgtttcgctcggcacaaccccagtgtagatcaggctgatgagtcactgcaatccccatgggcgaccatggcagtggctgcgttggcggcctgcccatggagaaatccatgggacgctctaattctgacatggtgcgaagagcctattgagctagctggtagtcctccggcccctgaatgcggctaatcctaactgcggagcacacacccacaagccagtgggcagtgtgtcgtaacgggcaactctgcagcggaaccgactactttgggtgtccgtgtttccttttattcttgtattggctgcttatggtgacaatcaaagagttgttaccatatagctattggattggccatccggtgtgcaacagagcaattatttacctatttattggttttgtaccattgacactgaagtctgtgattacccttaattttattttgaccctcaacacagtcaaac

SEQ ID NO: 22743 - DNA, 694 bp, synthetic construct
  source 1..694: mol_type = other DNA
cactctggtaccgtggtacctttgtgcgcctgttttatacccccttccccgtttgaacattagaagtaacgcacctcgatcagtagcaggcgcggcgcaccagccgtgtcttgatcaagcacttctgtttccccggaccgagtatcaatagactgctcacgcggttgaaggagaaaacgttcgttatccggctaactacttcgagaaacttagtagcaccatggaagttgcagagtgtttcgctcagcactccccccccagtgtagatcaggctgatggatcaccgcgttcctcacgggtgaccgtggcggtggtcgcgttggcggcctgcccatggggcaacccatgggacgctctaatatggacatggtgtgaagagtctattgagctagttagtagtcctccggcccctgaatgcggctaatcctaactgcggagcacgtgtccccaacccaggggatagcgtgtcgtaacgggtaactctgcagcggaaccgactactttgggtgtccgtgtttcctttattcttatcctggctgcttatggtgacaattgagagattgttaccatatagctattggattggccatccggtgtctaacagagctataatatatctttttgttgggttcgtacccctcaattttgaggttgttctcacattaaagtacatcttggtgttaaatatcagaag

SEQ ID NO: 22744 - DNA, 644 bp, synthetic construct
  source 1..644: mol_type = other DNA
gtttgaacattagaagtaacgcacctcgatcagtagcaggcgcggcgcaccagccgtgtcttgatcaagcacttctgtttccccggaccgagtatcaatagactgctcacgcggttgaaggagaaaacgttcgttatccggctaactacttcgagaaacttagtagcaccatggaagttgcagagtgtttcgctcagcactccccccccagtgtagatcaggctgatggatcaccgcgttcctcacgggtgaccgtggcggtggtcgcgttggcggcctgcccatggggcaacccatgggacgctctaatatggacatggtgtgaagagtctattgagctagttagtagtcctccggcccctgaatgcggctaatcctaactgcggagcacgtgtccccaacccaggggatagcgtgtcgtaacgggtaactctgcagcggaaccgactactttgggtgtccgtgtttcctttattcttatcctggctgcttatggtgacaattgagagattgttaccatatagctattggattggccatccggtgtctaacagagctataatatatctttttgttgggttcgtacccctcaattttgaggttgttctcacattaaagtacatcttggtgttaaatatcagaag

SEQ ID NO: 22745 - DNA, 594 bp, synthetic construct
  source 1..594: mol_type = other DNA
cagccgtgtcttgatcaagcacttctgtttccccggaccgagtatcaatagactgctcacgcggttgaaggagaaaacgttcgttatccggctaactacttcgagaaacttagtagcaccatggaagttgcagagtgtttcgctcagcactccccccccagtgtagatcaggctgatggatcaccgcgttcctcacgggtgaccgtggcggtggtcgcgttggcggcctgcccatggggcaacccatgggacgctctaatatggacatggtgtgaagagtctattgagctagttagtagtcctccggcccctgaatgcggctaatcctaactgcggagcacgtgtccccaacccaggggatagcgtgtcgtaacgggtaactctgcagcggaaccgactactttgggtgtccgtgtttcctttattcttatcctggctgcttatggtgacaattgagagattgttaccatatagctattggattggccatccggtgtctaacagagctataatatatctttttgttgggttcgtacccctcaattttgaggttgttctcacattaaagtacatcttggtgttaaatatcagaag

SEQ ID NO: 22746 - DNA, 544 bp, synthetic construct
  source 1..544: mol_type = other DNA
gactgctcacgcggttgaaggagaaaacgttcgttatccggctaactacttcgagaaacttagtagcaccatggaagttgcagagtgtttcgctcagcactccccccccagtgtagatcaggctgatggatcaccgcgttcctcacgggtgaccgtggcggtggtcgcgttggcggcctgcccatggggcaacccatgggacgctctaatatggacatggtgtgaagagtctattgagctagttagtagtcctccggcccctgaatgcggctaatcctaactgcggagcacgtgtccccaacccaggggatagcgtgtcgtaacgggtaactctgcagcggaaccgactactttgggtgtccgtgtttcctttattcttatcctggctgcttatggtgacaattgagagattgttaccatatagctattggattggccatccggtgtctaacagagctataatatatctttttgttgggttcgtacccctcaattttgaggttgttctcacattaaagtacatcttggtgttaaatatcagaag

SEQ ID NO: 22747 - DNA, 694 bp, synthetic construct
  source 1..694: mol_type = other DNA
cacactgattttgcgggatctttgtgcgcctgttttataacccctccctaaacggcaatttagaagttctgcacatccacgaccagtagtaagcgtgacgcgccagtcacgtcttggtcaagtacttctgtatccccggactgagtatcaatagactgctcacgcggttgaaggagaaaacgttcgttatccggctaactacttcgagaaacctagtaacaccgtgaaagttgcggagtgtttcgctcagcacttcccccgtgtagatcaggccgatgagtcactgtaaaccccacgggcgaccgtgacagtggctgcgttggcggcctgcccatgaggcaactcatgggacgctctaatacagacatggtgtgaagagtctattgagctagttagtagtcctccggcccctgaatgcggctaatcctaactgcggagcacgcaccctcaacccagggggcggcgtgtcgtaatgggtaactctgcagcggaaccgactactttgggtgtccgtgtttccttttattccttattggctgcttatggtgacaattgaaaagttgttaccatatagctattggattggccatccggtatctaatagagctattgtttacctgttcattggatacgtccctcttagtcttaaggtcattcaaactcttgattacatattactccttaaccacaagaa

SEQ ID NO: 22748 - DNA, 644 bp, synthetic construct
  source 1..644: mol_type = other DNA
aacggcaatttagaagttctgcacatccacgaccagtagtaagcgtgacgcgccagtcacgtcttggtcaagtacttctgtatccccggactgagtatcaatagactgctcacgcggttgaaggagaaaacgttcgttatccggctaactacttcgagaaacctagtaacaccgtgaaagttgcggagtgtttcgctcagcacttcccccgtgtagatcaggccgatgagtcactgtaaaccccacgggcgaccgtgacagtggctgcgttggcggcctgcccatgaggcaactcatgggacgctctaatacagacatggtgtgaagagtctattgagctagttagtagtcctccggcccctgaatgcggctaatcctaactgcggagcacgcaccctcaacccagggggcggcgtgtcgtaatgggtaactctgcagcggaaccgactactttgggtgtccgtgtttccttttattccttattggctgcttatggtgacaattgaaaagttgttaccatatagctattggattggccatccggtatctaatagagctattgtttacctgttcattggatacgtccctcttagtcttaaggtcattcaaactcttgattacatattactccttaaccacaagaa

SEQ ID NO: 22749 - DNA, 594 bp, synthetic construct
  source 1..594: mol_type = other DNA
cgccagtcacgtcttggtcaagtacttctgtatccccggactgagtatcaatagactgctcacgcggttgaaggagaaaacgttcgttatccggctaactacttcgagaaacctagtaacaccgtgaaagttgcggagtgtttcgctcagcacttcccccgtgtagatcaggccgatgagtcactgtaaaccccacgggcgaccgtgacagtggctgcgttggcggcctgcccatgaggcaactcatgggacgctctaatacagacatggtgtgaagagtctattgagctagttagtagtcctccggcccctgaatgcggctaatcctaactgcggagcacgcaccctcaacccagggggcggcgtgtcgtaatgggtaactctgcagcggaaccgactactttgggtgtccgtgtttccttttattccttattggctgcttatggtgacaattgaaaagttgttaccatatagctattggattggccatccggtatctaatagagctattgtttacctgttcattggatacgtccctcttagtcttaaggtcattcaaactcttgattacatattactccttaaccacaagaa

SEQ ID NO: 22750 - DNA, 544 bp, synthetic construct
  source 1..544: mol_type = other DNA
atagactgctcacgcggttgaaggagaaaacgttcgttatccggctaactacttcgagaaacctagtaacaccgtgaaagttgcggagtgtttcgctcagcacttcccccgtgtagatcaggccgatgagtcactgtaaaccccacgggcgaccgtgacagtggctgcgttggcggcctgcccatgaggcaactcatgggacgctctaatacagacatggtgtgaagagtctattgagctagttagtagtcctccggcccctgaatgcggctaatcctaactgcggagcacgcaccctcaacccagggggcggcgtgtcgtaatgggtaactctgcagcggaaccgactactttgggtgtccgtgtttccttttattccttattggctgcttatggtgacaattgaaaagttgttaccatatagctattggattggccatccggtatctaatagagctattgtttacctgttcattggatacgtccctcttagtcttaaggtcattcaaactcttgattacatattactccttaaccacaagaa

SEQ ID NO: 22751 - DNA, 694 bp, synthetic construct
  source 1..694: mol_type = other DNA
cactctggcactaaggtacctttgtgcgcctgtttttacttccctttcccaaagaaacttagaagttgtgtaccaatgatcaatagcaggtgtgacgtacaaataacatcttgatcaatcacttctgtttccccggaccgagtatcaataggctgctcgcgcggctgaaggagaaaacgttcgttacccgaccagctatttcgagaagcttagtaccaccatgaacgaggcagagtgtttcgttcagcacaaccccagtgtagatcaggctgatgagtcactgcaacccccatgggcgaccatggcagtggctgcgttggcggcctgcccatggagaaatccatgggacgctctaattctgacatggtgtgaagagcctattgagctagctggtagtcctccggcccctgaatgcggctaatcctaactgcggagcacatgctcacgagccagtgggtggtgtgtcgtaatgggcaactctgcagcggaaccgactactttgggtgtccgtgtttccttttattcttatgttggctgcttatggtgacaatcaaagaattgttaccatatagctattggattggccatccggtgtgcaacagagcaattgtttatctatttattggtttcgtaccactatcactgaagtctgtgaccactctcgaattcattttgaccctcaactcaatcaaac

SEQ ID NO: 22752 - DNA, 644 bp, synthetic construct
  source 1..644: mol_type = other DNA
aaagaaacttagaagttgtgtaccaatgatcaatagcaggtgtgacgtacaaataacatcttgatcaatcacttctgtttccccggaccgagtatcaataggctgctcgcgcggctgaaggagaaaacgttcgttacccgaccagctatttcgagaagcttagtaccaccatgaacgaggcagagtgtttcgttcagcacaaccccagtgtagatcaggctgatgagtcactgcaacccccatgggcgaccatggcagtggctgcgttggcggcctgcccatggagaaatccatgggacgctctaattctgacatggtgtgaagagcctattgagctagctggtagtcctccggcccctgaatgcggctaatcctaactgcggagcacatgctcacgagccagtgggtggtgtgtcgtaatgggcaactctgcagcggaaccgactactttgggtgtccgtgtttccttttattcttatgttggctgcttatggtgacaatcaaagaattgttaccatatagctattggattggccatccggtgtgcaacagagcaattgtttatctatttattggtttcgtaccactatcactgaagtctgtgaccactctcgaattcattttgaccctcaactcaatcaaac

SEQ ID NO: 22753 - DNA, 594 bp, synthetic construct
  source 1..594: mol_type = other DNA
aaataacatcttgatcaatcacttctgtttccccggaccgagtatcaataggctgctcgcgcggctgaaggagaaaacgttcgttacccgaccagctatttcgagaagcttagtaccaccatgaacgaggcagagtgtttcgttcagcacaaccccagtgtagatcaggctgatgagtcactgcaacccccatgggcgaccatggcagtggctgcgttggcggcctgcccatggagaaatccatgggacgctctaattctgacatggtgtgaagagcctattgagctagctggtagtcctccggcccctgaatgcggctaatcctaactgcggagcacatgctcacgagccagtgggtggtgtgtcgtaatgggcaactctgcagcggaaccgactactttgggtgtccgtgtttccttttattcttatgttggctgcttatggtgacaatcaaagaattgttaccatatagctattggattggccatccggtgtgcaacagagcaattgtttatctatttattggtttcgtaccactatcactgaagtctgtgaccactctcgaattcattttgaccctcaactcaatcaaac

SEQ ID NO: 22754 - DNA, 544 bp, synthetic construct
  source 1..544: mol_type = other DNA
ggctgctcgcgcggctgaaggagaaaacgttcgttacccgaccagctatttcgagaagcttagtaccaccatgaacgaggcagagtgtttcgttcagcacaaccccagtgtagatcaggctgatgagtcactgcaacccccatgggcgaccatggcagtggctgcgttggcggcctgcccatggagaaatccatgggacgctctaattctgacatggtgtgaagagcctattgagctagctggtagtcctccggcccctgaatgcggctaatcctaactgcggagcacatgctcacgagccagtgggtggtgtgtcgtaatgggcaactctgcagcggaaccgactactttgggtgtccgtgtttccttttattcttatgttggctgcttatggtgacaatcaaagaattgttaccatatagctattggattggccatccggtgtgcaacagagcaattgtttatctatttattggtttcgtaccactatcactgaagtctgtgaccactctcgaattcattttgaccctcaactcaatcaaac

SEQ ID NO: 22755 - DNA, 694 bp, synthetic construct
  source 1..694: mol_type = other DNA
gtacaccggtatcacggtacccttgtacgcctgttttatactccctaccccgtaacttagaagcatcaactcaagttcaatagtaggggtacaatccagtaccaccacgaacaagcacttctgtttccccggtgatattgtatagactgtgcccacggttgaagacaatagatccgttatccgcttttatacttcgagaagcccagtaccaccttggaatcttcgatgcgttgcgatcagcactcgaacccggagtgtagcttaggtcgatgagtctggacgctcctcaccggcgacggtggtccagactgcgttggcggcctacctgtggcccaaagtcacaggacgctagttgtgaacaaggtgtgaagagcctattgagctataaaagagtcctccggcccctgaatgcggctaatcccaaccacggagcaggtgatcacaaaccagtgactagcctgtcgtaacgcgcaagtctgtggcggaaccgactactttgggtgtccgtgtttccttttatttcatttatggctgcttatggtgacaatcatagattgttatcataaagcgaattggattggccatccggtgaaaatcaagcacatcatttatctgtttgttggatttacacctttagtttcttactccccgcgccttattcatattgtgttgttgattagacagtggtattacc

SEQ ID NO: 22756 - DNA, 644 bp, synthetic construct
  source 1..644: mol_type = other DNA
cgtaacttagaagcatcaactcaagttcaatagtaggggtacaatccagtaccaccacgaacaagcacttctgtttccccggtgatattgtatagactgtgcccacggttgaagacaatagatccgttatccgcttttatacttcgagaagcccagtaccaccttggaatcttcgatgcgttgcgatcagcactcgaacccggagtgtagcttaggtcgatgagtctggacgctcctcaccggcgacggtggtccagactgcgttggcggcctacctgtggcccaaagtcacaggacgctagttgtgaacaaggtgtgaagagcctattgagctataaaagagtcctccggcccctgaatgcggctaatcccaaccacggagcaggtgatcacaaaccagtgactagcctgtcgtaacgcgcaagtctgtggcggaaccgactactttgggtgtccgtgtttccttttatttcatttatggctgcttatggtgacaatcatagattgttatcataaagcgaattggattggccatccggtgaaaatcaagcacatcatttatctgtttgttggatttacacctttagtttcttactccccgcgccttattcatattgtgttgttgattagacagtggtattacc

SEQ ID NO: 22757 - DNA, 594 bp, synthetic construct
  source 1..594: mol_type = other DNA
accaccacgaacaagcacttctgtttccccggtgatattgtatagactgtgcccacggttgaagacaatagatccgttatccgcttttatacttcgagaagcccagtaccaccttggaatcttcgatgcgttgcgatcagcactcgaacccggagtgtagcttaggtcgatgagtctggacgctcctcaccggcgacggtggtccagactgcgttggcggcctacctgtggcccaaagtcacaggacgctagttgtgaacaaggtgtgaagagcctattgagctataaaagagtcctccggcccctgaatgcggctaatcccaaccacggagcaggtgatcacaaaccagtgactagcctgtcgtaacgcgcaagtctgtggcggaaccgactactttgggtgtccgtgtttccttttatttcatttatggctgcttatggtgacaatcatagattgttatcataaagcgaattggattggccatccggtgaaaatcaagcacatcatttatctgtttgttggatttacacctttagtttcttactccccgcgccttattcatattgtgttgttgattagacagtggtattacc

SEQ ID NO: 22758 - DNA, 544 bp, synthetic construct
  source 1..544: mol_type = other DNA
gcccacggttgaagacaatagatccgttatccgcttttatacttcgagaagcccagtaccaccttggaatcttcgatgcgttgcgatcagcactcgaacccggagtgtagcttaggtcgatgagtctggacgctcctcaccggcgacggtggtccagactgcgttggcggcctacctgtggcccaaagtcacaggacgctagttgtgaacaaggtgtgaagagcctattgagctataaaagagtcctccggcccctgaatgcggctaatcccaaccacggagcaggtgatcacaaaccagtgactagcctgtcgtaacgcgcaagtctgtggcggaaccgactactttgggtgtccgtgtttccttttatttcatttatggctgcttatggtgacaatcatagattgttatcataaagcgaattggattggccatccggtgaaaatcaagcacatcatttatctgtttgttggatttacacctttagtttcttactccccgcgccttattcatattgtgttgttgattagacagtggtattacc

SEQ ID NO: 22759 - DNA, 694 bp, synthetic construct
  source 1..694: mol_type = other DNA
gtacaccggtatcacggtacccttgtacgcctgttttatactccccgcccgtaacttagaagcaataactcaagttcaacagcagggggtacaaaccagtacctccacgaacaagcacttctgtttccccggtgacattgtatagactgtacccacggttgaaaacaatagatccgttatccgcttttgtacttcgagaagcccagtaccgtcttggaatcttcgatgcgttgcgctcagcactcgaacccggagtgtagcttaggtcgatgagtctggacagtcctcaccggcgacggtggtccaggctgcgttggcggcctacctgtggcccaaagccacaggacgctagttgtgaacaaggtgcgaagagcctattgagctacagaagagtcctccggcccctgaatgcggctaatcccaaccatggagcaggtgatcacgaaccagtgattagcctgtcgtaatgcgcaagtctgtggcggaaccgactactttgggtgtccgtgtttccttttatttcatttatggctgcttatggtgacaatcatagattgttgtcataaagcgaattggattggccatccggtgaaagtcaaacacattgtttatttgtttgttggcttcacgcctttaacttatcacaccttaaacctcattcacattaccttgttgatcagacagtggtatcacc

SEQ ID NO: 22760 - DNA, 644 bp, synthetic construct
  source 1..644: mol_type = other DNA
gtaacttagaagcaataactcaagttcaacagcagggggtacaaaccagtacctccacgaacaagcacttctgtttccccggtgacattgtatagactgtacccacggttgaaaacaatagatccgttatccgcttttgtacttcgagaagcccagtaccgtcttggaatcttcgatgcgttgcgctcagcactcgaacccggagtgtagcttaggtcgatgagtctggacagtcctcaccggcgacggtggtccaggctgcgttggcggcctacctgtggcccaaagccacaggacgctagttgtgaacaaggtgcgaagagcctattgagctacagaagagtcctccggcccctgaatgcggctaatcccaaccatggagcaggtgatcacgaaccagtgattagcctgtcgtaatgcgcaagtctgtggcggaaccgactactttgggtgtccgtgtttccttttatttcatttatggctgcttatggtgacaatcatagattgttgtcataaagcgaattggattggccatccggtgaaagtcaaacacattgtttatttgtttgttggcttcacgcctttaacttatcacaccttaaacctcattcacattaccttgttgatcagacagtggtatcacc

SEQ ID NO: 22761 - DNA, 594 bp, synthetic construct
  source 1..594: mol_type = other DNA
acctccacgaacaagcacttctgtttccccggtgacattgtatagactgtacccacggttgaaaacaatagatccgttatccgcttttgtacttcgagaagcccagtaccgtcttggaatcttcgatgcgttgcgctcagcactcgaacccggagtgtagcttaggtcgatgagtctggacagtcctcaccggcgacggtggtccaggctgcgttggcggcctacctgtggcccaaagccacaggacgctagttgtgaacaaggtgcgaagagcctattgagctacagaagagtcctccggcccctgaatgcggctaatcccaaccatggagcaggtgatcacgaaccagtgattagcctgtcgtaatgcgcaagtctgtggcggaaccgactactttgggtgtccgtgtttccttttatttcatttatggctgcttatggtgacaatcatagattgttgtcataaagcgaattggattggccatccggtgaaagtcaaacacattgtttatttgtttgttggcttcacgcctttaacttatcacaccttaaacctcattcacattaccttgttgatcagacagtggtatcacc

SEQ ID NO: 22762 - DNA, 544 bp, synthetic construct
  source 1..544: mol_type = other DNA
acccacggttgaaaacaatagatccgttatccgcttttgtacttcgagaagcccagtaccgtcttggaatcttcgatgcgttgcgctcagcactcgaacccggagtgtagcttaggtcgatgagtctggacagtcctcaccggcgacggtggtccaggctgcgttggcggcctacctgtggcccaaagccacaggacgctagttgtgaacaaggtgcgaagagcctattgagctacagaagagtcctccggcccctgaatgcggctaatcccaaccatggagcaggtgatcacgaaccagtgattagcctgtcgtaatgcgcaagtctgtggcggaaccgactactttgggtgtccgtgtttccttttatttcatttatggctgcttatggtgacaatcatagattgttgtcataaagcgaattggattggccatccggtgaaagtcaaacacattgtttatttgtttgttggcttcacgcctttaacttatcacaccttaaacctcattcacattaccttgttgatcagacagtggtatcacc

SEQ ID NO: 22763 - DNA, 694 bp, synthetic construct
  source 1..694: mol_type = other DNA
gtactccggtattgcggtacccttgtacgcctgttttacactcccttccccgtaacttagacgcaataaaccaagttcactaggaggggtgcaaaccagcaccaccacgaacaagcacttctgtttccccggtgacattgtatagactgtatccacggttgaaaacgattgatccgttatccgctcttgtacttcgagaagcctagtatcatcttggaatcttcgacgcgttgcgctcagcattcaaccccagaatgtagcttaggtcgatgagtctggacattcctcaccggtgacggtggtccaggctgcgttggcggcctacctgtgacccaaagtcacaggacgctagttgtgaacaaggtgtgaagagcctattgagctacaagagagtcctccggcccctgaatgcggctaatcctaaccacggagcaagtgctcacgaaccagtgagtggcttgtcgtaacgagcaattctgtggcggaaccgactactttgggtgtccgtgtttcctttttaactttaaatggctgcttatggtgacaatcattgattgttatcataagccgaattggattggccatccggtgaaaatcaagttgatcatttatttgtttgttggattcactccattaactcatttttcaattgacctaatacgtattgtattattagttagaaacatacatcaca

SEQ ID NO: 22764 - DNA, 644 bp, synthetic construct
  source 1..644: mol_type = other DNA
cgtaacttagacgcaataaaccaagttcactaggaggggtgcaaaccagcaccaccacgaacaagcacttctgtttccccggtgacattgtatagactgtatccacggttgaaaacgattgatccgttatccgctcttgtacttcgagaagcctagtatcatcttggaatcttcgacgcgttgcgctcagcattcaaccccagaatgtagcttaggtcgatgagtctggacattcctcaccggtgacggtggtccaggctgcgttggcggcctacctgtgacccaaagtcacaggacgctagttgtgaacaaggtgtgaagagcctattgagctacaagagagtcctccggcccctgaatgcggctaatcctaaccacggagcaagtgctcacgaaccagtgagtggcttgtcgtaacgagcaattctgtggcggaaccgactactttgggtgtccgtgtttcctttttaactttaaatggctgcttatggtgacaatcattgattgttatcataagccgaattggattggccatccggtgaaaatcaagttgatcatttatttgtttgttggattcactccattaactcatttttcaattgacctaatacgtattgtattattagttagaaacatacatcaca

SEQ ID NO: 22765 - DNA, 594 bp, synthetic construct
  source 1..594: mol_type = other DNA
accaccacgaacaagcacttctgtttccccggtgacattgtatagactgtatccacggttgaaaacgattgatccgttatccgctcttgtacttcgagaagcctagtatcatcttggaatcttcgacgcgttgcgctcagcattcaaccccagaatgtagcttaggtcgatgagtctggacattcctcaccggtgacggtggtccaggctgcgttggcggcctacctgtgacccaaagtcacaggacgctagttgtgaacaaggtgtgaagagcctattgagctacaagagagtcctccggcccctgaatgcggctaatcctaaccacggagcaagtgctcacgaaccagtgagtggcttgtcgtaacgagcaattctgtggcggaaccgactactttgggtgtccgtgtttcctttttaactttaaatggctgcttatggtgacaatcattgattgttatcataagccgaattggattggccatccggtgaaaatcaagttgatcatttatttgtttgttggattcactccattaactcatttttcaattgacctaatacgtattgtattattagttagaaacatacatcaca

SEQ ID NO: 22766 - DNA, 544 bp, synthetic construct
  source 1..544: mol_type = other DNA
atccacggttgaaaacgattgatccgttatccgctcttgtacttcgagaagcctagtatcatcttggaatcttcgacgcgttgcgctcagcattcaaccccagaatgtagcttaggtcgatgagtctggacattcctcaccggtgacggtggtccaggctgcgttggcggcctacctgtgacccaaagtcacaggacgctagttgtgaacaaggtgtgaagagcctattgagctacaagagagtcctccggcccctgaatgcggctaatcctaaccacggagcaagtgctcacgaaccagtgagtggcttgtcgtaacgagcaattctgtggcggaaccgactactttgggtgtccgtgtttcctttttaactttaaatggctgcttatggtgacaatcattgattgttatcataagccgaattggattggccatccggtgaaaatcaagttgatcatttatttgtttgttggattcactccattaactcatttttcaattgacctaatacgtattgtattattagttagaaacatacatcaca

SEQ ID NO: 22767 - DNA, 694 bp, synthetic construct
  source 1..694: mol_type = other DNA
gtacaccggtatcacggtacccttgtacgcctgttttatactcccttccccgtaacttagaagccacaaaccaagttcgataggagggggtacaaaccagtaccaccgtgaacaagcacttctgtttccccggtgatgtcacatagactgtccccacggttgaaagtgattgatccgttacccgccttggtacttcgagaaacctagtatcatcttggaatcaatgacgcgttgcgctcagcactcaaacccggagtgtagcttaggctgatgagtctggacgtccctcactggcgacagtggtccaggctgcgctggcggcctacctgtggtggaagccacaggacgctaattgtgaacaaggtgtgaagagtctattgagctaccatggagtcctccggcccctgaatgcggctaatcccaaccacggagcaagtattcacaaaccagtgaaatgcttgtcgtaacgcgaaagtctgtggcggaaccgactactttgggtgtccgtgtttccttttattctttatatggctgcttatggtgacaatcatagattgttatcataaagcgcattggattggccatccggtgaaaatcaagcaaatcatttacttatttgttggatttactccaatcacaccatttacattgcatttaattactcttgtgttgacaatcagaagatactaccaca

SEQ ID NO: 22768 - DNA, 644 bp, synthetic construct
  source 1..644: mol_type = other DNA
cgtaacttagaagccacaaaccaagttcgataggagggggtacaaaccagtaccaccgtgaacaagcacttctgtttccccggtgatgtcacatagactgtccccacggttgaaagtgattgatccgttacccgccttggtacttcgagaaacctagtatcatcttggaatcaatgacgcgttgcgctcagcactcaaacccggagtgtagcttaggctgatgagtctggacgtccctcactggcgacagtggtccaggctgcgctggcggcctacctgtggtggaagccacaggacgctaattgtgaacaaggtgtgaagagtctattgagctaccatggagtcctccggcccctgaatgcggctaatcccaaccacggagcaagtattcacaaaccagtgaaatgcttgtcgtaacgcgaaagtctgtggcggaaccgactactttgggtgtccgtgtttccttttattctttatatggctgcttatggtgacaatcatagattgttatcataaagcgcattggattggccatccggtgaaaatcaagcaaatcatttacttatttgttggatttactccaatcacaccatttacattgcatttaattactcttgtgttgacaatcagaagatactaccaca

SEQ ID NO: 22769 - DNA, 594 bp, synthetic construct
  source 1..594: mol_type = other DNA
taccaccgtgaacaagcacttctgtttccccggtgatgtcacatagactgtccccacggttgaaagtgattgatccgttacccgccttggtacttcgagaaacctagtatcatcttggaatcaatgacgcgttgcgctcagcactcaaacccggagtgtagcttaggctgatgagtctggacgtccctcactggcgacagtggtccaggctgcgctggcggcctacctgtggtggaagccacaggacgctaattgtgaacaaggtgtgaagagtctattgagctaccatggagtcctccggcccctgaatgcggctaatcccaaccacggagcaagtattcacaaaccagtgaaatgcttgtcgtaacgcgaaagtctgtggcggaaccgactactttgggtgtccgtgtttccttttattctttatatggctgcttatggtgacaatcatagattgttatcataaagcgcattggattggccatccggtgaaaatcaagcaaatcatttacttatttgttggatttactccaatcacaccatttacattgcatttaattactcttgtgttgacaatcagaagatactaccaca

SEQ ID NO: 22770 - DNA, 544 bp, synthetic construct
  source 1..544: mol_type = other DNA
tccccacggttgaaagtgattgatccgttacccgccttggtacttcgagaaacctagtatcatcttggaatcaatgacgcgttgcgctcagcactcaaacccggagtgtagcttaggctgatgagtctggacgtccctcactggcgacagtggtccaggctgcgctggcggcctacctgtggtggaagccacaggacgctaattgtgaacaaggtgtgaagagtctattgagctaccatggagtcctccggcccctgaatgcggctaatcccaaccacggagcaagtattcacaaaccagtgaaatgcttgtcgtaacgcgaaagtctgtggcggaaccgactactttgggtgtccgtgtttccttttattctttatatggctgcttatggtgacaatcatagattgttatcataaagcgcattggattggccatccggtgaaaatcaagcaaatcatttacttatttgttggatttactccaatcacaccatttacattgcatttaattactcttgtgttgacaatcagaagatactaccaca

SEQ ID NO: 22771 - DNA, 694 bp, synthetic construct
  source 1..694: mol_type = other DNA
gtactctggtatcacggtacctttgtacgcctgttttataccccttccccaagtaaccttagaagcaactcaacaagttcaatagagggggtacaaaccagtaccaccacgaacaagcacttctgtttccccggtgattttgcataggctgtacccacggccaaaagtgaatgatccgttatccgcttgagtacttcgagaagcttagtaccaccttggaatcttcgatgcgttgcgctcagcactctaccccgagtgtagcttaggctgatgagtctgggcattccccaccggcgacggtggcccaggctgcgttggcggcctacccatggctaacgccatgggacgctagttgtgaacaaggtgtgaagagcctattgagctactcaagagtcctccggcccctgaatgcggctaatcctaaccatggagcaagtgccctcaacccagagggtggcttgtcgtaacgcgcaagtccgtggcggaaccgactactttgggtgtccgtgtttccttttatcttatatatggctgcttatggtgacaatcatagattgttatcataaagcgaattggattggccatccggtgaagtataaacatattatttacctgtttgtcggattcaccccgctcactttatacacacccaatatagtatctattgtactgctactgaggcactaccaccgca

SEQ ID NO: 22772 - DNA, 644 bp, synthetic construct
  source 1..644: mol_type = other DNA
aagtaaccttagaagcaactcaacaagttcaatagagggggtacaaaccagtaccaccacgaacaagcacttctgtttccccggtgattttgcataggctgtacccacggccaaaagtgaatgatccgttatccgcttgagtacttcgagaagcttagtaccaccttggaatcttcgatgcgttgcgctcagcactctaccccgagtgtagcttaggctgatgagtctgggcattccccaccggcgacggtggcccaggctgcgttggcggcctacccatggctaacgccatgggacgctagttgtgaacaaggtgtgaagagcctattgagctactcaagagtcctccggcccctgaatgcggctaatcctaaccatggagcaagtgccctcaacccagagggtggcttgtcgtaacgcgcaagtccgtggcggaaccgactactttgggtgtccgtgtttccttttatcttatatatggctgcttatggtgacaatcatagattgttatcataaagcgaattggattggccatccggtgaagtataaacatattatttacctgtttgtcggattcaccccgctcactttatacacacccaatatagtatctattgtactgctactgaggcactaccaccgca

SEQ ID NO: 22773 - DNA, 594 bp, synthetic construct
  source 1..594: mol_type = other DNA
gtaccaccacgaacaagcacttctgtttccccggtgattttgcataggctgtacccacggccaaaagtgaatgatccgttatccgcttgagtacttcgagaagcttagtaccaccttggaatcttcgatgcgttgcgctcagcactctaccccgagtgtagcttaggctgatgagtctgggcattccccaccggcgacggtggcccaggctgcgttggcggcctacccatggctaacgccatgggacgctagttgtgaacaaggtgtgaagagcctattgagctactcaagagtcctccggcccctgaatgcggctaatcctaaccatggagcaagtgccctcaacccagagggtggcttgtcgtaacgcgcaagtccgtggcggaaccgactactttgggtgtccgtgtttccttttatcttatatatggctgcttatggtgacaatcatagattgttatcataaagcgaattggattggccatccggtgaagtataaacatattatttacctgtttgtcggattcaccccgctcactttatacacacccaatatagtatctattgtactgctactgaggcactaccaccgca

SEQ ID NO: 22774 - DNA, 544 bp, synthetic construct
  source 1..544: mol_type = other DNA
gtacccacggccaaaagtgaatgatccgttatccgcttgagtacttcgagaagcttagtaccaccttggaatcttcgatgcgttgcgctcagcactctaccccgagtgtagcttaggctgatgagtctgggcattccccaccggcgacggtggcccaggctgcgttggcggcctacccatggctaacgccatgggacgctagttgtgaacaaggtgtgaagagcctattgagctactcaagagtcctccggcccctgaatgcggctaatcctaaccatggagcaagtgccctcaacccagagggtggcttgtcgtaacgcgcaagtccgtggcggaaccgactactttgggtgtccgtgtttccttttatcttatatatggctgcttatggtgacaatcatagattgttatcataaagcgaattggattggccatccggtgaagtataaacatattatttacctgtttgtcggattcaccccgctcactttatacacacccaatatagtatctattgtactgctactgaggcactaccaccgca

SEQ ID NO: 22775 - DNA, 694 bp, synthetic construct
  source 1..694: mol_type = other DNA
actctggtattatggtaccttagtgcgcctgttttatacaccccttccccaaatgtaatttagatgcatgtaaacaaaggccaatagcaggcgcagcataccagctgtgtctcggtcaagcacttctgttaccccggactgagtatcaataggctactcacgtggctgaaggagaaaacgttcgttatccggccaattacttcgagaaacctagtaataccatgaaggttgcgaagtgtttcgctcagcacaaccccagtgtagatcaggtcgatgagtcaccgcattccccacgggtgaccgtggcggtggctgcgctggcggcctgcccatgggattacccatgggacgcttcaatattgacatggtgtgaagagtctattgagctaattggtattcctccggcccctgaatgcggctaatcccaactgcggagcaggtacccacatgccagtgggcagcctgtcgtaatgggcaactctgcagcggaaccgactactttgggtgtccgtgtttctctttattcttatactggctgcttatggtgacaattgagaaattgttgccatatagctattggattggccatccggtgacaaatagagcaattgtgcatccatttgttggttttatactaactcaatctcaaagttttaactaccctcaatctcattatatcattcaatacagcaaa

SEQ ID NO: 22776 - DNA, 644 bp, synthetic construct
  source 1..644: mol_type = other DNA
aaatgtaatttagatgcatgtaaacaaaggccaatagcaggcgcagcataccagctgtgtctcggtcaagcacttctgttaccccggactgagtatcaataggctactcacgtggctgaaggagaaaacgttcgttatccggccaattacttcgagaaacctagtaataccatgaaggttgcgaagtgtttcgctcagcacaaccccagtgtagatcaggtcgatgagtcaccgcattccccacgggtgaccgtggcggtggctgcgctggcggcctgcccatgggattacccatgggacgcttcaatattgacatggtgtgaagagtctattgagctaattggtattcctccggcccctgaatgcggctaatcccaactgcggagcaggtacccacatgccagtgggcagcctgtcgtaatgggcaactctgcagcggaaccgactactttgggtgtccgtgtttctctttattcttatactggctgcttatggtgacaattgagaaattgttgccatatagctattggattggccatccggtgacaaatagagcaattgtgcatccatttgttggttttatactaactcaatctcaaagttttaactaccctcaatctcattatatcattcaatacagcaaa

SEQ ID NO: 22777 - DNA, 594 bp, synthetic construct
  source 1..594: mol_type = other DNA
ccagctgtgtctcggtcaagcacttctgttaccccggactgagtatcaataggctactcacgtggctgaaggagaaaacgttcgttatccggccaattacttcgagaaacctagtaataccatgaaggttgcgaagtgtttcgctcagcacaaccccagtgtagatcaggtcgatgagtcaccgcattccccacgggtgaccgtggcggtggctgcgctggcggcctgcccatgggattacccatgggacgcttcaatattgacatggtgtgaagagtctattgagctaattggtattcctccggcccctgaatgcggctaatcccaactgcggagcaggtacccacatgccagtgggcagcctgtcgtaatgggcaactctgcagcggaaccgactactttgggtgtccgtgtttctctttattcttatactggctgcttatggtgacaattgagaaattgttgccatatagctattggattggccatccggtgacaaatagagcaattgtgcatccatttgttggttttatactaactcaatctcaaagttttaactaccctcaatctcattatatcattcaatacagcaaa

SEQ ID NO: 22778 - DNA, 544 bp, synthetic construct
  source 1..544: mol_type = other DNA
aggctactcacgtggctgaaggagaaaacgttcgttatccggccaattacttcgagaaacctagtaataccatgaaggttgcgaagtgtttcgctcagcacaaccccagtgtagatcaggtcgatgagtcaccgcattccccacgggtgaccgtggcggtggctgcgctggcggcctgcccatgggattacccatgggacgcttcaatattgacatggtgtgaagagtctattgagctaattggtattcctccggcccctgaatgcggctaatcccaactgcggagcaggtacccacatgccagtgggcagcctgtcgtaatgggcaactctgcagcggaaccgactactttgggtgtccgtgtttctctttattcttatactggctgcttatggtgacaattgagaaattgttgccatatagctattggattggccatccggtgacaaatagagcaattgtgcatccatttgttggttttatactaactcaatctcaaagttttaactaccctcaatctcattatatcattcaatacagcaaa

SEQ ID NO: 22779 - DNA, 694 bp, synthetic construct
  source 1..694: mol_type = other DNA
cactctggtatcacggtacctttgtgcgcctgttttatctaccctccctaaaaatgtaatttagaagcatgatccgaacggtcattaggtagctcagtgcaccaactgagcccagaccaagcacttctgttaccccggactgagtatcaataggctgctcgcgcggctgaaggagaaaacgttcgttatccggccaattacttcgagaaacccagtaccactatgaaagttgcgcagcgtttcgttccgcacaaccccagtgtagatcaggtcgatgagtcaccgcgttccccacgggcgaccgtggcggtggctgcgttggcggcctgctcatggggcaacccatgagacgcttcaatactgacatggtgcgaagagtctattgagctaattggtagccctccggcccctgaatgcggctaatcccaactgcggagcagatacccacaaaccagtgggcagtctgtcgtaatgggtaactctgcagcggaaccgactactttgggtgtccgtgtttccttttgttcttacactggctgcttatggtgacaattgagagattgttgccatatagctattggattggccatccggtgactaacagagcaattgtttacttatttgttggttttataccgttagattacaaagtcctaaacaccctgaatctcattataacacttaattcagcaaa

SEQ ID NO: 22780 - DNA, 644 bp, synthetic construct
  source 1..644: mol_type = other DNA
aaaatgtaatttagaagcatgatccgaacggtcattaggtagctcagtgcaccaactgagcccagaccaagcacttctgttaccccggactgagtatcaataggctgctcgcgcggctgaaggagaaaacgttcgttatccggccaattacttcgagaaacccagtaccactatgaaagttgcgcagcgtttcgttccgcacaaccccagtgtagatcaggtcgatgagtcaccgcgttccccacgggcgaccgtggcggtggctgcgttggcggcctgctcatggggcaacccatgagacgcttcaatactgacatggtgcgaagagtctattgagctaattggtagccctccggcccctgaatgcggctaatcccaactgcggagcagatacccacaaaccagtgggcagtctgtcgtaatgggtaactctgcagcggaaccgactactttgggtgtccgtgtttccttttgttcttacactggctgcttatggtgacaattgagagattgttgccatatagctattggattggccatccggtgactaacagagcaattgtttacttatttgttggttttataccgttagattacaaagtcctaaacaccctgaatctcattataacacttaattcagcaaa

SEQ ID NO: 22781 - DNA, 594 bp, synthetic construct
  source 1..594: mol_type = other DNA
accaactgagcccagaccaagcacttctgttaccccggactgagtatcaataggctgctcgcgcggctgaaggagaaaacgttcgttatccggccaattacttcgagaaacccagtaccactatgaaagttgcgcagcgtttcgttccgcacaaccccagtgtagatcaggtcgatgagtcaccgcgttccccacgggcgaccgtggcggtggctgcgttggcggcctgctcatggggcaacccatgagacgcttcaatactgacatggtgcgaagagtctattgagctaattggtagccctccggcccctgaatgcggctaatcccaactgcggagcagatacccacaaaccagtgggcagtctgtcgtaatgggtaactctgcagcggaaccgactactttgggtgtccgtgtttccttttgttcttacactggctgcttatggtgacaattgagagattgttgccatatagctattggattggccatccggtgactaacagagcaattgtttacttatttgttggttttataccgttagattacaaagtcctaaacaccctgaatctcattataacacttaattcagcaaa

SEQ ID NO: 22782 - DNA, 544 bp, synthetic construct
  source 1..544: mol_type = other DNA
taggctgctcgcgcggctgaaggagaaaacgttcgttatccggccaattacttcgagaaacccagtaccactatgaaagttgcgcagcgtttcgttccgcacaaccccagtgtagatcaggtcgatgagtcaccgcgttccccacgggcgaccgtggcggtggctgcgttggcggcctgctcatggggcaacccatgagacgcttcaatactgacatggtgcgaagagtctattgagctaattggtagccctccggcccctgaatgcggctaatcccaactgcggagcagatacccacaaaccagtgggcagtctgtcgtaatgggtaactctgcagcggaaccgactactttgggtgtccgtgtttccttttgttcttacactggctgcttatggtgacaattgagagattgttgccatatagctattggattggccatccggtgactaacagagcaattgtttacttatttgttggttttataccgttagattacaaagtcctaaacaccctgaatctcattataacacttaattcagcaaa

SEQ ID NO: 22783 - DNA, 694 bp, synthetic construct
  source 1..694: mol_type = other DNA
gcactttggtatcacggtacctttgtgcgcctgttttataacccttcccccccacagaaacttagaagcaccacacaccgatcaatagaaagcgtggcgcaccagccatgtcttgatcaagcacttctgtttccccggaccgagtatcaatagactgctcgcgcggtcgaaggagaaaacgtccgttatccggctgactacttcgagaaacccagtaacaccatggaaattgcggagtgtttcgatcagcacatccccagtgtagatcaggtcgatgagtcaccgcattccccacgggtgaccgtggcggtggctgcgttggcggcctgcctacggggcatcccgtaggacgcttcaaaatggacatggtgcgaagagtctattgagctagtcagtagtcctccggcccctgaatgcggctaatcctaactgcggagcgcgcgcctccaacccagggggtagcgcgtcgtaacgggtaactctgcagcggaaccgactactttgggtgtccgtgtttctttttatcattacattggctgcttatggtgacaattgaaaggttgttaccatatagctattggattggccacccggtgtctaatagagcgattgtgtacctttttgttgggtttgtgccactttgtaaaacagcctatcagactttgtgctttatagtcaaactaaatacagcaaa

SEQ ID NO: 22784 - DNA, 644 bp, synthetic construct
  source 1..644: mol_type = other DNA
cccacagaaacttagaagcaccacacaccgatcaatagaaagcgtggcgcaccagccatgtcttgatcaagcacttctgtttccccggaccgagtatcaatagactgctcgcgcggtcgaaggagaaaacgtccgttatccggctgactacttcgagaaacccagtaacaccatggaaattgcggagtgtttcgatcagcacatccccagtgtagatcaggtcgatgagtcaccgcattccccacgggtgaccgtggcggtggctgcgttggcggcctgcctacggggcatcccgtaggacgcttcaaaatggacatggtgcgaagagtctattgagctagtcagtagtcctccggcccctgaatgcggctaatcctaactgcggagcgcgcgcctccaacccagggggtagcgcgtcgtaacgggtaactctgcagcggaaccgactactttgggtgtccgtgtttctttttatcattacattggctgcttatggtgacaattgaaaggttgttaccatatagctattggattggccacccggtgtctaatagagcgattgtgtacctttttgttgggtttgtgccactttgtaaaacagcctatcagactttgtgctttatagtcaaactaaatacagcaaa

SEQ ID NO: 22785 - DNA, 594 bp, synthetic construct
  source 1..594: mol_type = other DNA
accagccatgtcttgatcaagcacttctgtttccccggaccgagtatcaatagactgctcgcgcggtcgaaggagaaaacgtccgttatccggctgactacttcgagaaacccagtaacaccatggaaattgcggagtgtttcgatcagcacatccccagtgtagatcaggtcgatgagtcaccgcattccccacgggtgaccgtggcggtggctgcgttggcggcctgcctacggggcatcccgtaggacgcttcaaaatggacatggtgcgaagagtctattgagctagtcagtagtcctccggcccctgaatgcggctaatcctaactgcggagcgcgcgcctccaacccagggggtagcgcgtcgtaacgggtaactctgcagcggaaccgactactttgggtgtccgtgtttctttttatcattacattggctgcttatggtgacaattgaaaggttgttaccatatagctattggattggccacccggtgtctaatagagcgattgtgtacctttttgttgggtttgtgccactttgtaaaacagcctatcagactttgtgctttatagtcaaactaaatacagcaaa

SEQ ID NO: 22786 - DNA, 544 bp, synthetic construct
  source 1..544: mol_type = other DNA
tagactgctcgcgcggtcgaaggagaaaacgtccgttatccggctgactacttcgagaaacccagtaacaccatggaaattgcggagtgtttcgatcagcacatccccagtgtagatcaggtcgatgagtcaccgcattccccacgggtgaccgtggcggtggctgcgttggcggcctgcctacggggcatcccgtaggacgcttcaaaatggacatggtgcgaagagtctattgagctagtcagtagtcctccggcccctgaatgcggctaatcctaactgcggagcgcgcgcctccaacccagggggtagcgcgtcgtaacgggtaactctgcagcggaaccgactactttgggtgtccgtgtttctttttatcattacattggctgcttatggtgacaattgaaaggttgttaccatatagctattggattggccacccggtgtctaatagagcgattgtgtacctttttgttgggtttgtgccactttgtaaaacagcctatcagactttgtgctttatagtcaaactaaatacagcaaa

SEQ ID NO: 22787 - DNA, 694 bp, synthetic construct
  source 1..694: mol_type = other DNA
cacactggtattacggtacctttgtgcgcctgttttatataccccccccaagtgcaacttagaagcaagacatgaccggtcagcaggtgattcagtaaaccaactgagtcttgaccaagcacttctgtttccccggaccgagtatcaataggctgcttacgcggctgaaggagaaagtgttcgttacccggccaattacttcgagaagcctagtaccaccatggaggttgcgcggcgtttcgctccgcacacccccagtgtagatcaggccgatgagccaccgcattccccacgggtgaccgtggcggtggctgcgttggcggcctgcccatggggtaacctatgggacgcttcaatactgacatggtgcgaagagcctattgagctaattggtagtcctccggcccctgaatgcggctaatcctaactgcggagcaggtacccacataccagtgggcagcctgtcgtaacgggtaactctgcagcggaaccgactactttgggtgaccgtgtttccttttattttttcctattggctgcttatggtgacaatcgaggaattgttgccatatagctattggattggccatccggtgtcaaatagagcgattatttacctgtttgttggatttgtaccactgaactttaaggcgctcatcactctcaactatattttatcccttaacgcaacaaa

SEQ ID NO: 22788 - DNA, 644 bp, synthetic construct
  source 1..644: mol_type = other DNA
agtgcaacttagaagcaagacatgaccggtcagcaggtgattcagtaaaccaactgagtcttgaccaagcacttctgtttccccggaccgagtatcaataggctgcttacgcggctgaaggagaaagtgttcgttacccggccaattacttcgagaagcctagtaccaccatggaggttgcgcggcgtttcgctccgcacacccccagtgtagatcaggccgatgagccaccgcattccccacgggtgaccgtggcggtggctgcgttggcggcctgcccatggggtaacctatgggacgcttcaatactgacatggtgcgaagagcctattgagctaattggtagtcctccggcccctgaatgcggctaatcctaactgcggagcaggtacccacataccagtgggcagcctgtcgtaacgggtaactctgcagcggaaccgactactttgggtgaccgtgtttccttttattttttcctattggctgcttatggtgacaatcgaggaattgttgccatatagctattggattggccatccggtgtcaaatagagcgattatttacctgtttgttggatttgtaccactgaactttaaggcgctcatcactctcaactatattttatcccttaacgcaacaaa

SEQ ID NO: 22789 - DNA, 594 bp, synthetic construct
  source 1..594: mol_type = other DNA
caactgagtcttgaccaagcacttctgtttccccggaccgagtatcaataggctgcttacgcggctgaaggagaaagtgttcgttacccggccaattacttcgagaagcctagtaccaccatggaggttgcgcggcgtttcgctccgcacacccccagtgtagatcaggccgatgagccaccgcattccccacgggtgaccgtggcggtggctgcgttggcggcctgcccatggggtaacctatgggacgcttcaatactgacatggtgcgaagagcctattgagctaattggtagtcctccggcccctgaatgcggctaatcctaactgcggagcaggtacccacataccagtgggcagcctgtcgtaacgggtaactctgcagcggaaccgactactttgggtgaccgtgtttccttttattttttcctattggctgcttatggtgacaatcgaggaattgttgccatatagctattggattggccatccggtgtcaaatagagcgattatttacctgtttgttggatttgtaccactgaactttaaggcgctcatcactctcaactatattttatcccttaacgcaacaaa

SEQ ID NO: 22790 - DNA, 544 bp, synthetic construct
  source 1..544: mol_type = other DNA
ggctgcttacgcggctgaaggagaaagtgttcgttacccggccaattacttcgagaagcctagtaccaccatggaggttgcgcggcgtttcgctccgcacacccccagtgtagatcaggccgatgagccaccgcattccccacgggtgaccgtggcggtggctgcgttggcggcctgcccatggggtaacctatgggacgcttcaatactgacatggtgcgaagagcctattgagctaattggtagtcctccggcccctgaatgcggctaatcctaactgcggagcaggtacccacataccagtgggcagcctgtcgtaacgggtaactctgcagcggaaccgactactttgggtgaccgtgtttccttttattttttcctattggctgcttatggtgacaatcgaggaattgttgccatatagctattggattggccatccggtgtcaaatagagcgattatttacctgtttgttggatttgtaccactgaactttaaggcgctcatcactctcaactatattttatcccttaacgcaacaaa

SEQ ID NO: 22791 - DNA, 694 bp, synthetic construct
  source 1..694: mol_type = other DNA
cacactggtatcacggtacccttgtgcgcctgttttatccaccccttcccacagtaacttagaagcacaccatgtatacggtcaataggcggctcagtacaccaactgggccacgaccaagcacttctgttaccccggactgagtatcaataagctgctcacgcggctgaaggagaaaacgttcgttacccggccaattacttcgagaaacccagtaccaccatgaaggttgcgcagcgtttcgttccgcacaaccccagtgtagatcaggtcgatgagtcaccgcgttcctcacgggtgaccgtggcggtggctgcgttggcggcctgcccatggggcaacccatgggacgcttcaatactgacatggtgcgaagagtctattgagctaattggtagtcctccggcccctgaatgcggctaatcctaactgcggagcagatacccacaaaccagtgggcagtctgtcgtaacgggcaactctgcagcggaaccgactactttgggtgtccgtgtttccttttatccttacactggctgcttatggtgacaattgagaaattgttaccatatagctattggattggccatccggtgacaaacagagcagttgtttacctatttgttggtttcgtaccgctgaaccttaaagttctaaagaccctcaattttatcttagcacttaacacagcaaa

SEQ ID NO: 22792 - DNA, 644 bp, synthetic construct
  source 1..644: mol_type = other DNA
acagtaacttagaagcacaccatgtatacggtcaataggcggctcagtacaccaactgggccacgaccaagcacttctgttaccccggactgagtatcaataagctgctcacgcggctgaaggagaaaacgttcgttacccggccaattacttcgagaaacccagtaccaccatgaaggttgcgcagcgtttcgttccgcacaaccccagtgtagatcaggtcgatgagtcaccgcgttcctcacgggtgaccgtggcggtggctgcgttggcggcctgcccatggggcaacccatgggacgcttcaatactgacatggtgcgaagagtctattgagctaattggtagtcctccggcccctgaatgcggctaatcctaactgcggagcagatacccacaaaccagtgggcagtctgtcgtaacgggcaactctgcagcggaaccgactactttgggtgtccgtgtttccttttatccttacactggctgcttatggtgacaattgagaaattgttaccatatagctattggattggccatccggtgacaaacagagcagttgtttacctatttgttggtttcgtaccgctgaaccttaaagttctaaagaccctcaattttatcttagcacttaacacagcaaa

SEQ ID NO: 22793 - DNA, 594 bp, synthetic construct
  source 1..594: mol_type = other DNA
accaactgggccacgaccaagcacttctgttaccccggactgagtatcaataagctgctcacgcggctgaaggagaaaacgttcgttacccggccaattacttcgagaaacccagtaccaccatgaaggttgcgcagcgtttcgttccgcacaaccccagtgtagatcaggtcgatgagtcaccgcgttcctcacgggtgaccgtggcggtggctgcgttggcggcctgcccatggggcaacccatgggacgcttcaatactgacatggtgcgaagagtctattgagctaattggtagtcctccggcccctgaatgcggctaatcctaactgcggagcagatacccacaaaccagtgggcagtctgtcgtaacgggcaactctgcagcggaaccgactactttgggtgtccgtgtttccttttatccttacactggctgcttatggtgacaattgagaaattgttaccatatagctattggattggccatccggtgacaaacagagcagttgtttacctatttgttggtttcgtaccgctgaaccttaaagttctaaagaccctcaattttatcttagcacttaacacagcaaa

SEQ ID NO: 22794 - DNA, 544 bp, synthetic construct
  source 1..544: mol_type = other DNA
taagctgctcacgcggctgaaggagaaaacgttcgttacccggccaattacttcgagaaacccagtaccaccatgaaggttgcgcagcgtttcgttccgcacaaccccagtgtagatcaggtcgatgagtcaccgcgttcctcacgggtgaccgtggcggtggctgcgttggcggcctgcccatggggcaacccatgggacgcttcaatactgacatggtgcgaagagtctattgagctaattggtagtcctccggcccctgaatgcggctaatcctaactgcggagcagatacccacaaaccagtgggcagtctgtcgtaacgggcaactctgcagcggaaccgactactttgggtgtccgtgtttccttttatccttacactggctgcttatggtgacaattgagaaattgttaccatatagctattggattggccatccggtgacaaacagagcagttgtttacctatttgttggtttcgtaccgctgaaccttaaagttctaaagaccctcaattttatcttagcacttaacacagcaaa

SEQ ID NO: 22795 - DNA, 694 bp, synthetic construct
  source 1..694: mol_type = other DNA
gtacaccggtattacggtacccttgtacgcctgttttatactcccttccccgcaacttagaagttaaacaaaccaagttcaatagaagggggtgcaaaccagtaccaccacgaacaagcacttctgtttccccggtgacgtcatataggttgtaaccacggccaaaagtgactgatccgttatccgctcttgtacttcgagaagcccagtaccatcttgggatcttcgatgcgttgcgctcagcactcgaacccggagtgtagcttaggccgatgagtctggacattccccaccggtgacggtggtccaggctgcgttggcggcctacctgtggtccaagccacaggacgctagatgtgaacaaggtgtgaagagcctattgagctacaagggaatcctccggcccctgaatgcggctaatcctaactacggagcagacggtcacaaaccagtgaatggtctgtcgtaatgcgcaagtctgtagcggaaccgactactttgggtgtccgtgtttccttttatctttttaatggctgcttatggtgacaatcctagattgttatcataaagcgatttggattggccatccagtgatatttgaaaccattactgtattgcctgctaaggctattttaaagacttaataaacacaacttcattcaactcaattacaccaactaacaactgtctcata

SEQ ID NO: 22796 - DNA, 644 bp, synthetic construct
  source 1..644: mol_type = other DNA
cgcaacttagaagttaaacaaaccaagttcaatagaagggggtgcaaaccagtaccaccacgaacaagcacttctgtttccccggtgacgtcatataggttgtaaccacggccaaaagtgactgatccgttatccgctcttgtacttcgagaagcccagtaccatcttgggatcttcgatgcgttgcgctcagcactcgaacccggagtgtagcttaggccgatgagtctggacattccccaccggtgacggtggtccaggctgcgttggcggcctacctgtggtccaagccacaggacgctagatgtgaacaaggtgtgaagagcctattgagctacaagggaatcctccggcccctgaatgcggctaatcctaactacggagcagacggtcacaaaccagtgaatggtctgtcgtaatgcgcaagtctgtagcggaaccgactactttgggtgtccgtgtttccttttatctttttaatggctgcttatggtgacaatcctagattgttatcataaagcgatttggattggccatccagtgatatttgaaaccattactgtattgcctgctaaggctattttaaagacttaataaacacaacttcattcaactcaattacaccaactaacaactgtctcata

SEQ ID NO: 22797 - DNA, 594 bp, synthetic construct
  source 1..594: mol_type = other DNA
agtaccaccacgaacaagcacttctgtttccccggtgacgtcatataggttgtaaccacggccaaaagtgactgatccgttatccgctcttgtacttcgagaagcccagtaccatcttgggatcttcgatgcgttgcgctcagcactcgaacccggagtgtagcttaggccgatgagtctggacattccccaccggtgacggtggtccaggctgcgttggcggcctacctgtggtccaagccacaggacgctagatgtgaacaaggtgtgaagagcctattgagctacaagggaatcctccggcccctgaatgcggctaatcctaactacggagcagacggtcacaaaccagtgaatggtctgtcgtaatgcgcaagtctgtagcggaaccgactactttgggtgtccgtgtttccttttatctttttaatggctgcttatggtgacaatcctagattgttatcataaagcgatttggattggccatccagtgatatttgaaaccattactgtattgcctgctaaggctattttaaagacttaataaacacaacttcattcaactcaattacaccaactaacaactgtctcata

SEQ ID NO: 22798 - DNA, 544 bp, synthetic construct
  source 1..544: mol_type = other DNA
tgtaaccacggccaaaagtgactgatccgttatccgctcttgtacttcgagaagcccagtaccatcttgggatcttcgatgcgttgcgctcagcactcgaacccggagtgtagcttaggccgatgagtctggacattccccaccggtgacggtggtccaggctgcgttggcggcctacctgtggtccaagccacaggacgctagatgtgaacaaggtgtgaagagcctattgagctacaagggaatcctccggcccctgaatgcggctaatcctaactacggagcagacggtcacaaaccagtgaatggtctgtcgtaatgcgcaagtctgtagcggaaccgactactttgggtgtccgtgtttccttttatctttttaatggctgcttatggtgacaatcctagattgttatcataaagcgatttggattggccatccagtgatatttgaaaccattactgtattgcctgctaaggctattttaaagacttaataaacacaacttcattcaactcaattacaccaactaacaactgtctcata

SEQ ID NO: 22799 - DNA, 694 bp, synthetic construct
  source 1..694: mol_type = other DNA
gcactctggtattacggtacctttgtgcgcctgttttacatccctcccccagatgcaacttagaagcagtacaccaagaccaatagtaggcatggcataccagccatgtgtcggtcaagcacttctgttcccccgggctgagtatcaataaactgctcacgtggttgaaggagaaagcgcccgttacccggctaactacttcgagaagcctattaacaccatgaaagttgcggagtgtttcgctcagcacgatcccggtgtagatcaggccgatgagtcaccgcgttccccacaggtgactgtggcggtggctgcgttggcggcctgcccatggggcaacccatgggacgcttcaatatggacatggtgtgaagagcccattgagctagttagtagtcctccggcccctgaatgcggctaatcccaactgcggagcacagcgcccccgctccagggggtagtgtgtcgtaacgggcaactctgcagcggaaccgactactttgggtgtccgtgtttccttttttccttttcattggctgcttatggtgacaattgaaagattgttaccatatagctattggattggccatccagtgtcaagcagagctataatttaccaatttatagggtttgtcccgttggatctgaaagctttaaaaacccttaacttggtactactattaaacagtgtaaa

SEQ ID NO: 22800 - DNA, 644 bp, synthetic construct
  source 1..644: mol_type = other DNA
agatgcaacttagaagcagtacaccaagaccaatagtaggcatggcataccagccatgtgtcggtcaagcacttctgttcccccgggctgagtatcaataaactgctcacgtggttgaaggagaaagcgcccgttacccggctaactacttcgagaagcctattaacaccatgaaagttgcggagtgtttcgctcagcacgatcccggtgtagatcaggccgatgagtcaccgcgttccccacaggtgactgtggcggtggctgcgttggcggcctgcccatggggcaacccatgggacgcttcaatatggacatggtgtgaagagcccattgagctagttagtagtcctccggcccctgaatgcggctaatcccaactgcggagcacagcgcccccgctccagggggtagtgtgtcgtaacgggcaactctgcagcggaaccgactactttgggtgtccgtgtttccttttttccttttcattggctgcttatggtgacaattgaaagattgttaccatatagctattggattggccatccagtgtcaagcagagctataatttaccaatttatagggtttgtcccgttggatctgaaagctttaaaaacccttaacttggtactactattaaacagtgtaaa

SEQ ID NO: 22801 - DNA, 594 bp, synthetic construct
  source 1..594: mol_type = other DNA
cagccatgtgtcggtcaagcacttctgttcccccgggctgagtatcaataaactgctcacgtggttgaaggagaaagcgcccgttacccggctaactacttcgagaagcctattaacaccatgaaagttgcggagtgtttcgctcagcacgatcccggtgtagatcaggccgatgagtcaccgcgttccccacaggtgactgtggcggtggctgcgttggcggcctgcccatggggcaacccatgggacgcttcaatatggacatggtgtgaagagcccattgagctagttagtagtcctccggcccctgaatgcggctaatcccaactgcggagcacagcgcccccgctccagggggtagtgtgtcgtaacgggcaactctgcagcggaaccgactactttgggtgtccgtgtttccttttttccttttcattggctgcttatggtgacaattgaaagattgttaccatatagctattggattggccatccagtgtcaagcagagctataatttaccaatttatagggtttgtcccgttggatctgaaagctttaaaaacccttaacttggtactactattaaacagtgtaaa

SEQ ID NO: 22802 - DNA, 544 bp, synthetic construct
  source 1..544: mol_type = other DNA
aactgctcacgtggttgaaggagaaagcgcccgttacccggctaactacttcgagaagcctattaacaccatgaaagttgcggagtgtttcgctcagcacgatcccggtgtagatcaggccgatgagtcaccgcgttccccacaggtgactgtggcggtggctgcgttggcggcctgcccatggggcaacccatgggacgcttcaatatggacatggtgtgaagagcccattgagctagttagtagtcctccggcccctgaatgcggctaatcccaactgcggagcacagcgcccccgctccagggggtagtgtgtcgtaacgggcaactctgcagcggaaccgactactttgggtgtccgtgtttccttttttccttttcattggctgcttatggtgacaattgaaagattgttaccatatagctattggattggccatccagtgtcaagcagagctataatttaccaatttatagggtttgtcccgttggatctgaaagctttaaaaacccttaacttggtactactattaaacagtgtaaa

SEQ ID NO: 22803 - DNA, 694 bp, synthetic construct
  source 1..694: mol_type = other DNA
gcactctggtatcacggtacctttgtgcgcctgttttatagcccctcccttagataggaatttagaagcactgcacaccgatcaatagcaggcgcggcacgccagccacgtcttgatcaagcacttctgtttccccggaccgagtatcaatagactgttaacgcggtcgaaggagaaaacgttcgttatccggccaactacttcgagaaacctagtaacgccatggaagttgcggagtgtttcgctcagcacatccccagtgtagatcaggtcgatgagtcaccgcatccctcacgggtgaccgtggcggtggctgcgttggcggcctgcctacggggcaacccgtaggacgcttcaatatggacatggtgcgaagagtatattgagctagttggtagtcctccggcccctgaatgcggctaatcctaactgcggagcgctcgcccccaatccagggggtcgtgcgtcgtaacgggtaactctgcagcggaaccgactactttgggtgtccgtgtttccttttatctttatcacggctgcttatggtgacaattgaaagattgttaccatatagctattggattggccatcctgtgtctaacagagcaatcatatatctttttgttggatttgtgccacttgataaaataagttaccagactttgtgttttatcatcagactaaacacaacaaa

SEQ ID NO: 22804 - DNA, 644 bp, synthetic construct
  source 1..644: mol_type = other DNA
tagataggaatttagaagcactgcacaccgatcaatagcaggcgcggcacgccagccacgtcttgatcaagcacttctgtttccccggaccgagtatcaatagactgttaacgcggtcgaaggagaaaacgttcgttatccggccaactacttcgagaaacctagtaacgccatggaagttgcggagtgtttcgctcagcacatccccagtgtagatcaggtcgatgagtcaccgcatccctcacgggtgaccgtggcggtggctgcgttggcggcctgcctacggggcaacccgtaggacgcttcaatatggacatggtgcgaagagtatattgagctagttggtagtcctccggcccctgaatgcggctaatcctaactgcggagcgctcgcccccaatccagggggtcgtgcgtcgtaacgggtaactctgcagcggaaccgactactttgggtgtccgtgtttccttttatctttatcacggctgcttatggtgacaattgaaagattgttaccatatagctattggattggccatcctgtgtctaacagagcaatcatatatctttttgttggatttgtgccacttgataaaataagttaccagactttgtgttttatcatcagactaaacacaacaaa

SEQ ID NO: 22805 - DNA, 594 bp, synthetic construct
  source 1..594: mol_type = other DNA
gccagccacgtcttgatcaagcacttctgtttccccggaccgagtatcaatagactgttaacgcggtcgaaggagaaaacgttcgttatccggccaactacttcgagaaacctagtaacgccatggaagttgcggagtgtttcgctcagcacatccccagtgtagatcaggtcgatgagtcaccgcatccctcacgggtgaccgtggcggtggctgcgttggcggcctgcctacggggcaacccgtaggacgcttcaatatggacatggtgcgaagagtatattgagctagttggtagtcctccggcccctgaatgcggctaatcctaactgcggagcgctcgcccccaatccagggggtcgtgcgtcgtaacgggtaactctgcagcggaaccgactactttgggtgtccgtgtttccttttatctttatcacggctgcttatggtgacaattgaaagattgttaccatatagctattggattggccatcctgtgtctaacagagcaatcatatatctttttgttggatttgtgccacttgataaaataagttaccagactttgtgttttatcatcagactaaacacaacaaa

SEQ ID NO: 22806 - DNA, 544 bp, synthetic construct
  source 1..544: mol_type = other DNA
tagactgttaacgcggtcgaaggagaaaacgttcgttatccggccaactacttcgagaaacctagtaacgccatggaagttgcggagtgtttcgctcagcacatccccagtgtagatcaggtcgatgagtcaccgcatccctcacgggtgaccgtggcggtggctgcgttggcggcctgcctacggggcaacccgtaggacgcttcaatatggacatggtgcgaagagtatattgagctagttggtagtcctccggcccctgaatgcggctaatcctaactgcggagcgctcgcccccaatccagggggtcgtgcgtcgtaacgggtaactctgcagcggaaccgactactttgggtgtccgtgtttccttttatctttatcacggctgcttatggtgacaattgaaagattgttaccatatagctattggattggccatcctgtgtctaacagagcaatcatatatctttttgttggatttgtgccacttgataaaataagttaccagactttgtgttttatcatcagactaaacacaacaaa

SEQ ID NO: 22807 - DNA, 694 bp, synthetic construct
  source 1..694: mol_type = other DNA
cacactggtatcacggtacccttgtgcgcctgttttatcaacccctccccacattgaaacttagaagtaacacacaccgatcaatagtgggcgtggcaaaccagctacgtcgtgatcaagtatttctgtttccccggactgagtatcaatagactgctcgcgcggttgaaggagaaaacgttcgttacccggctaactacttcgagaaacctagtaatgccatgaaaattgcgtagcgtttcgttcagcacaaccccagtgtagatcaggtcgatgagtcactgcattcctcacgggcgaccgtggcagtggctgcgttggcggcctgcctatagggtaacctataggacgctacaatatggacatggtgtgaagagtctattgagctagttagtagtcctccggcccctgaatgcggctaatcctaactgcggagcgcgtgtttccaatccaggaagtggcgcgtcgtaatgggcaactctgcagcggaaccgactactttgggtgtccgtgtttctcttttatccttacactggctgcttatggtgacaattgaagaattgttaccatatagctattggattggccatccggtgtctaatagagcaattgtatacctctttgttggatttataccattaaacagaacaagttaccagaccctgtgctttattgttaaactaaacacgacgaa

SEQ ID NO: 22808 - DNA, 644 bp, synthetic construct
  source 1..644: mol_type = other DNA
acattgaaacttagaagtaacacacaccgatcaatagtgggcgtggcaaaccagctacgtcgtgatcaagtatttctgtttccccggactgagtatcaatagactgctcgcgcggttgaaggagaaaacgttcgttacccggctaactacttcgagaaacctagtaatgccatgaaaattgcgtagcgtttcgttcagcacaaccccagtgtagatcaggtcgatgagtcactgcattcctcacgggcgaccgtggcagtggctgcgttggcggcctgcctatagggtaacctataggacgctacaatatggacatggtgtgaagagtctattgagctagttagtagtcctccggcccctgaatgcggctaatcctaactgcggagcgcgtgtttccaatccaggaagtggcgcgtcgtaatgggcaactctgcagcggaaccgactactttgggtgtccgtgtttctcttttatccttacactggctgcttatggtgacaattgaagaattgttaccatatagctattggattggccatccggtgtctaatagagcaattgtatacctctttgttggatttataccattaaacagaacaagttaccagaccctgtgctttattgttaaactaaacacgacgaa

SEQ ID NO: 22809 - DNA, 594 bp, synthetic construct
  source 1..594: mol_type = other DNA
ccagctacgtcgtgatcaagtatttctgtttccccggactgagtatcaatagactgctcgcgcggttgaaggagaaaacgttcgttacccggctaactacttcgagaaacctagtaatgccatgaaaattgcgtagcgtttcgttcagcacaaccccagtgtagatcaggtcgatgagtcactgcattcctcacgggcgaccgtggcagtggctgcgttggcggcctgcctatagggtaacctataggacgctacaatatggacatggtgtgaagagtctattgagctagttagtagtcctccggcccctgaatgcggctaatcctaactgcggagcgcgtgtttccaatccaggaagtggcgcgtcgtaatgggcaactctgcagcggaaccgactactttgggtgtccgtgtttctcttttatccttacactggctgcttatggtgacaattgaagaattgttaccatatagctattggattggccatccggtgtctaatagagcaattgtatacctctttgttggatttataccattaaacagaacaagttaccagaccctgtgctttattgttaaactaaacacgacgaa

SEQ ID NO: 22810 - DNA, 544 bp, synthetic construct
  source 1..544: mol_type = other DNA
agactgctcgcgcggttgaaggagaaaacgttcgttacccggctaactacttcgagaaacctagtaatgccatgaaaattgcgtagcgtttcgttcagcacaaccccagtgtagatcaggtcgatgagtcactgcattcctcacgggcgaccgtggcagtggctgcgttggcggcctgcctatagggtaacctataggacgctacaatatggacatggtgtgaagagtctattgagctagttagtagtcctccggcccctgaatgcggctaatcctaactgcggagcgcgtgtttccaatccaggaagtggcgcgtcgtaatgggcaactctgcagcggaaccgactactttgggtgtccgtgtttctcttttatccttacactggctgcttatggtgacaattgaagaattgttaccatatagctattggattggccatccggtgtctaatagagcaattgtatacctctttgttggatttataccattaaacagaacaagttaccagaccctgtgctttattgttaaactaaacacgacgaa

SEQ ID NO: 22811 - DNA, 694 bp, synthetic construct
  source 1..694: mol_type = other DNA
gcactctggtattacggtacccttgtgcgcctgttttatatcccttccccaaggtaaacgttagaagcaatgcactcccgatcaatagaaggtgcgacgcgccagtcgtatctcgatcaagcacttctgtttccccggaccgagtatcaatagactgctagcgcggttgaaggagaaaacgttcgttacccgactaactacttcgagaagcccagtagcgccatgaaagttgcagagtgtttcgctcagcacttcccccgtgtagatcaggccgatgagtcaccgcaatccccacgggcgaccgtggcggtggctgcgttggcggcctgcctatggggaaacccataggacgctcaaatacagacatggtgcgaagagtctattgagctagttagtactcctccggcccctgaatgcggctaatcctaactgcggagcaagtactcacaatccagtgggcagcttgtcgtaacgggtaactctgcagcggaaccgactactttgggtgtccgtgtttccttttattcctacattggctgcttatggtgacaatcaaagagttgttaccatatagctattggattggccatccggtgactaataaagcaattatatttctttttgttgggtttgtaccccttaatacaaccagcttcaccacattgtgttacatcattagactgaacaaggcaaa

SEQ ID NO: 22812 - DNA, 644 bp, synthetic construct
  source 1..644: mol_type = other DNA
aaggtaaacgttagaagcaatgcactcccgatcaatagaaggtgcgacgcgccagtcgtatctcgatcaagcacttctgtttccccggaccgagtatcaatagactgctagcgcggttgaaggagaaaacgttcgttacccgactaactacttcgagaagcccagtagcgccatgaaagttgcagagtgtttcgctcagcacttcccccgtgtagatcaggccgatgagtcaccgcaatccccacgggcgaccgtggcggtggctgcgttggcggcctgcctatggggaaacccataggacgctcaaatacagacatggtgcgaagagtctattgagctagttagtactcctccggcccctgaatgcggctaatcctaactgcggagcaagtactcacaatccagtgggcagcttgtcgtaacgggtaactctgcagcggaaccgactactttgggtgtccgtgtttccttttattcctacattggctgcttatggtgacaatcaaagagttgttaccatatagctattggattggccatccggtgactaataaagcaattatatttctttttgttgggtttgtaccccttaatacaaccagcttcaccacattgtgttacatcattagactgaacaaggcaaa

SEQ ID NO: 22813 - DNA, 594 bp, synthetic construct
  source 1..594: mol_type = other DNA
gccagtcgtatctcgatcaagcacttctgtttccccggaccgagtatcaatagactgctagcgcggttgaaggagaaaacgttcgttacccgactaactacttcgagaagcccagtagcgccatgaaagttgcagagtgtttcgctcagcacttcccccgtgtagatcaggccgatgagtcaccgcaatccccacgggcgaccgtggcggtggctgcgttggcggcctgcctatggggaaacccataggacgctcaaatacagacatggtgcgaagagtctattgagctagttagtactcctccggcccctgaatgcggctaatcctaactgcggagcaagtactcacaatccagtgggcagcttgtcgtaacgggtaactctgcagcggaaccgactactttgggtgtccgtgtttccttttattcctacattggctgcttatggtgacaatcaaagagttgttaccatatagctattggattggccatccggtgactaataaagcaattatatttctttttgttgggtttgtaccccttaatacaaccagcttcaccacattgtgttacatcattagactgaacaaggcaaa

SEQ ID NO: 22814 - DNA, 544 bp, synthetic construct
  source 1..544: mol_type = other DNA
tagactgctagcgcggttgaaggagaaaacgttcgttacccgactaactacttcgagaagcccagtagcgccatgaaagttgcagagtgtttcgctcagcacttcccccgtgtagatcaggccgatgagtcaccgcaatccccacgggcgaccgtggcggtggctgcgttggcggcctgcctatggggaaacccataggacgctcaaatacagacatggtgcgaagagtctattgagctagttagtactcctccggcccctgaatgcggctaatcctaactgcggagcaagtactcacaatccagtgggcagcttgtcgtaacgggtaactctgcagcggaaccgactactttgggtgtccgtgtttccttttattcctacattggctgcttatggtgacaatcaaagagttgttaccatatagctattggattggccatccggtgactaataaagcaattatatttctttttgttgggtttgtaccccttaatacaaccagcttcaccacattgtgttacatcattagactgaacaaggcaaa

SEQ ID NO: 22815 - DNA, 694 bp, synthetic construct
  source 1..694: mol_type = other DNA
cacactggtatcacggtacttttgtgcgcctgttttatctacccccacccccagcgtaacttagaagcacatttcacacggtcaataggtgactcagcatgccagctgagttttggccaagcacttctgttaccccggaccgagtatcaataagctactcacgtggctgaaggagaaagcgttcgttaaccggccaattacttcgagaaacctagtatcaccatgaaggttgcgtggcgtttcgctccgcacaaccccagtgtagatcaggtcgatgagttaccgcgtccctcacgggcgaccgtggcggtagctgcgctggcggcctgcccatggggcaacccatgggacgcttcaatactgacatggtgtgaagagtctattgagctaattggtagtcctccggcccctgaatgcggctaatcctaactgcggagcagatacccacacgccagtgggcagtctgtcgtaatgggcaactctgcagcggaaccgactactttgggtgtccgtgtttccttttactcttatattggctgcttatggtgacaattaaaagattgttaccatatagctattggattggccatccagtgtctaatagagcgatcatttacctttttcttgggtttgttccactcaactataaagcacttgtaacgctcaaatatattataaacctcaacacaacaaa

SEQ ID NO: 22816 - DNA, 644 bp, synthetic construct
  source 1..644: mol_type = other DNA
ccagcgtaacttagaagcacatttcacacggtcaataggtgactcagcatgccagctgagttttggccaagcacttctgttaccccggaccgagtatcaataagctactcacgtggctgaaggagaaagcgttcgttaaccggccaattacttcgagaaacctagtatcaccatgaaggttgcgtggcgtttcgctccgcacaaccccagtgtagatcaggtcgatgagttaccgcgtccctcacgggcgaccgtggcggtagctgcgctggcggcctgcccatggggcaacccatgggacgcttcaatactgacatggtgtgaagagtctattgagctaattggtagtcctccggcccctgaatgcggctaatcctaactgcggagcagatacccacacgccagtgggcagtctgtcgtaatgggcaactctgcagcggaaccgactactttgggtgtccgtgtttccttttactcttatattggctgcttatggtgacaattaaaagattgttaccatatagctattggattggccatccagtgtctaatagagcgatcatttacctttttcttgggtttgttccactcaactataaagcacttgtaacgctcaaatatattataaacctcaacacaacaaa

SEQ ID NO: 22817 - DNA, 594 bp, synthetic construct
  source 1..594: mol_type = other DNA
gccagctgagttttggccaagcacttctgttaccccggaccgagtatcaataagctactcacgtggctgaaggagaaagcgttcgttaaccggccaattacttcgagaaacctagtatcaccatgaaggttgcgtggcgtttcgctccgcacaaccccagtgtagatcaggtcgatgagttaccgcgtccctcacgggcgaccgtggcggtagctgcgctggcggcctgcccatggggcaacccatgggacgcttcaatactgacatggtgtgaagagtctattgagctaattggtagtcctccggcccctgaatgcggctaatcctaactgcggagcagatacccacacgccagtgggcagtctgtcgtaatgggcaactctgcagcggaaccgactactttgggtgtccgtgtttccttttactcttatattggctgcttatggtgacaattaaaagattgttaccatatagctattggattggccatccagtgtctaatagagcgatcatttacctttttcttgggtttgttccactcaactataaagcacttgtaacgctcaaatatattataaacctcaacacaacaaa

SEQ ID NO: 22818 - DNA, 544 bp, synthetic construct
  source 1..544: mol_type = other DNA
taagctactcacgtggctgaaggagaaagcgttcgttaaccggccaattacttcgagaaacctagtatcaccatgaaggttgcgtggcgtttcgctccgcacaaccccagtgtagatcaggtcgatgagttaccgcgtccctcacgggcgaccgtggcggtagctgcgctggcggcctgcccatggggcaacccatgggacgcttcaatactgacatggtgtgaagagtctattgagctaattggtagtcctccggcccctgaatgcggctaatcctaactgcggagcagatacccacacgccagtgggcagtctgtcgtaatgggcaactctgcagcggaaccgactactttgggtgtccgtgtttccttttactcttatattggctgcttatggtgacaattaaaagattgttaccatatagctattggattggccatccagtgtctaatagagcgatcatttacctttttcttgggtttgttccactcaactataaagcacttgtaacgctcaaatatattataaacctcaacacaacaaa

SEQ ID NO: 22819 - DNA, 695 bp, synthetic construct
  source 1..695: mol_type = other DNA
cactctggtatcacggtacctttgtgcgcctgttttatatccctttccccatgtaacttagaagttattaaacaaagttcaatagaagggggtacaaaccagtgccaccacgaacaagcacttctgtttccccggtgaagctgtatagactgtctccacggttgaaaatggcagatccgttacccgctttggtacttcgagaaacctagtatcaccttggaatcttcgatgcgttgcgctcagcactcaaccccagagtgtagcttaggtcgatgagtctggacgatcctcactggtgacagtggtccaggctgcgttggcggcctacctgtggtgaaaaccacaggacgctagttgtgaacaaggtgtgaagagtctattgagctaccaaagagtcctccggcccctgaatgcggctaatcctaaccacggagcaagtgccttcaaaccagtaggtagcttgtcgtaacgcgcaagtctgtggcggaaccgactactttgggtgtccgtgtttccttttattttatcatggctgcttatggtgacaatctaagattgttatcatatagctattggattggccatccggtgactaacagagatctcatatacctttttgttggttttactaaattaaatattaccacgttcaagacacttctccttatcatacaactaaatagtgagaagagaaa

SEQ ID NO: 22820 - DNA, 645 bp, synthetic construct
  source 1..645: mol_type = other DNA
atgtaacttagaagttattaaacaaagttcaatagaagggggtacaaaccagtgccaccacgaacaagcacttctgtttccccggtgaagctgtatagactgtctccacggttgaaaatggcagatccgttacccgctttggtacttcgagaaacctagtatcaccttggaatcttcgatgcgttgcgctcagcactcaaccccagagtgtagcttaggtcgatgagtctggacgatcctcactggtgacagtggtccaggctgcgttggcggcctacctgtggtgaaaaccacaggacgctagttgtgaacaaggtgtgaagagtctattgagctaccaaagagtcctccggcccctgaatgcggctaatcctaaccacggagcaagtgccttcaaaccagtaggtagcttgtcgtaacgcgcaagtctgtggcggaaccgactactttgggtgtccgtgtttccttttattttatcatggctgcttatggtgacaatctaagattgttatcatatagctattggattggccatccggtgactaacagagatctcatatacctttttgttggttttactaaattaaatattaccacgttcaagacacttctccttatcatacaactaaatagtgagaagagaaa

SEQ ID NO: 22821 - DNA, 595 bp, synthetic construct
  source 1..595: mol_type = other DNA
agtgccaccacgaacaagcacttctgtttccccggtgaagctgtatagactgtctccacggttgaaaatggcagatccgttacccgctttggtacttcgagaaacctagtatcaccttggaatcttcgatgcgttgcgctcagcactcaaccccagagtgtagcttaggtcgatgagtctggacgatcctcactggtgacagtggtccaggctgcgttggcggcctacctgtggtgaaaaccacaggacgctagttgtgaacaaggtgtgaagagtctattgagctaccaaagagtcctccggcccctgaatgcggctaatcctaaccacggagcaagtgccttcaaaccagtaggtagcttgtcgtaacgcgcaagtctgtggcggaaccgactactttgggtgtccgtgtttccttttattttatcatggctgcttatggtgacaatctaagattgttatcatatagctattggattggccatccggtgactaacagagatctcatatacctttttgttggttttactaaattaaatattaccacgttcaagacacttctccttatcatacaactaaatagtgagaagagaaa

SEQ ID NO: 22822 - DNA, 545 bp, synthetic construct
  source 1..545: mol_type = other DNA
tgtctccacggttgaaaatggcagatccgttacccgctttggtacttcgagaaacctagtatcaccttggaatcttcgatgcgttgcgctcagcactcaaccccagagtgtagcttaggtcgatgagtctggacgatcctcactggtgacagtggtccaggctgcgttggcggcctacctgtggtgaaaaccacaggacgctagttgtgaacaaggtgtgaagagtctattgagctaccaaagagtcctccggcccctgaatgcggctaatcctaaccacggagcaagtgccttcaaaccagtaggtagcttgtcgtaacgcgcaagtctgtggcggaaccgactactttgggtgtccgtgtttccttttattttatcatggctgcttatggtgacaatctaagattgttatcatatagctattggattggccatccggtgactaacagagatctcatatacctttttgttggttttactaaattaaatattaccacgttcaagacacttctccttatcatacaactaaatagtgagaagagaaa

SEQ ID NO: 22823 - DNA, 695 bp, synthetic construct
  source 1..695: mol_type = other DNA
cacactgatttcacggaatctttgtgcgcctgttttatatccctcccccaatacagtaacttagaagttagaaacctacacgaccaatagcaggcgtgacgcaccagtcatgtcttggtcaaacacttctgtttccccggactgagtatcaataagccgctcacgcggctgaaggagaaaacgttcgttatccggctaactacttcgagaaacctagtagcaccgtgaaagttgcagagtgtttcgctcagcactttccccgtgtagatcaggtcgatgagtcactgcatcccccacgggcgaccgtggcagtggctgcgttggcggcctgcctatggggcaacccatgggacgctctaatacagacatggtgtgaagagtctattgagctagttagtagtcctccggcccctgaatgcggctaatcctaactgcggagcacgcaccctcaatccagggggcggcgtgtcgtaacgggtaactctgcagcggaaccgactactttgggtgtccgtgtttccttttatcacttactggctgcttatggtgacaatcaaagaattgttaccatatagcttttggattggccatccggtgtctaacagagctattgtttacctgtttgttggatacattcctctcaactacaaagttcttcaaactctcaactttatattgctccttaatcataagaa

SEQ ID NO: 22824 - DNA, 645 bp, synthetic construct
  source 1..645: mol_type = other DNA
atacagtaacttagaagttagaaacctacacgaccaatagcaggcgtgacgcaccagtcatgtcttggtcaaacacttctgtttccccggactgagtatcaataagccgctcacgcggctgaaggagaaaacgttcgttatccggctaactacttcgagaaacctagtagcaccgtgaaagttgcagagtgtttcgctcagcactttccccgtgtagatcaggtcgatgagtcactgcatcccccacgggcgaccgtggcagtggctgcgttggcggcctgcctatggggcaacccatgggacgctctaatacagacatggtgtgaagagtctattgagctagttagtagtcctccggcccctgaatgcggctaatcctaactgcggagcacgcaccctcaatccagggggcggcgtgtcgtaacgggtaactctgcagcggaaccgactactttgggtgtccgtgtttccttttatcacttactggctgcttatggtgacaatcaaagaattgttaccatatagcttttggattggccatccggtgtctaacagagctattgtttacctgtttgttggatacattcctctcaactacaaagttcttcaaactctcaactttatattgctccttaatcataagaa

SEQ ID NO: 22825 - DNA, 595 bp, synthetic construct
  source 1..595: mol_type = other DNA
gcaccagtcatgtcttggtcaaacacttctgtttccccggactgagtatcaataagccgctcacgcggctgaaggagaaaacgttcgttatccggctaactacttcgagaaacctagtagcaccgtgaaagttgcagagtgtttcgctcagcactttccccgtgtagatcaggtcgatgagtcactgcatcccccacgggcgaccgtggcagtggctgcgttggcggcctgcctatggggcaacccatgggacgctctaatacagacatggtgtgaagagtctattgagctagttagtagtcctccggcccctgaatgcggctaatcctaactgcggagcacgcaccctcaatccagggggcggcgtgtcgtaacgggtaactctgcagcggaaccgactactttgggtgtccgtgtttccttttatcacttactggctgcttatggtgacaatcaaagaattgttaccatatagcttttggattggccatccggtgtctaacagagctattgtttacctgtttgttggatacattcctctcaactacaaagttcttcaaactctcaactttatattgctccttaatcataagaa

SEQ ID NO: 22826 - DNA, 545 bp, synthetic construct
  source 1..545: mol_type = other DNA
aataagccgctcacgcggctgaaggagaaaacgttcgttatccggctaactacttcgagaaacctagtagcaccgtgaaagttgcagagtgtttcgctcagcactttccccgtgtagatcaggtcgatgagtcactgcatcccccacgggcgaccgtggcagtggctgcgttggcggcctgcctatggggcaacccatgggacgctctaatacagacatggtgtgaagagtctattgagctagttagtagtcctccggcccctgaatgcggctaatcctaactgcggagcacgcaccctcaatccagggggcggcgtgtcgtaacgggtaactctgcagcggaaccgactactttgggtgtccgtgtttccttttatcacttactggctgcttatggtgacaatcaaagaattgttaccatatagcttttggattggccatccggtgtctaacagagctattgtttacctgtttgttggatacattcctctcaactacaaagttcttcaaactctcaactttatattgctccttaatcataagaa

SEQ ID NO: 22827 - DNA, 695 bp, synthetic construct
  source 1..695: mol_type = other DNA
cactctgattttgcgggatctttgtgcgcctgttttataatcccttccctaagcagtaacttagaagttctacacaatcaggaccaacagtcagcgtggcacgccagccacgttttggtcaagcacctctgtttccccggactgagtatcaatagactgctcacgcggttgaaggagaaaacgttcgttacccggctaactacttcgagaaacctaatagcaccatgaaagttgcggagtgtttcgctcagcacttcccccgtgtagatcaggtcgatgagtcactgtaaaccccacgggcgaccgtgacagtggctgcgttggcggcctgcccatggggtaacccatgggacgctctaatacggacatggtgtgaagagtctattgagctagttagtagtcctccggcccctgaatgcggctaatcctaactgcggagcatgcgccctcaacccagggggtggcatgtcgtaatgggcaactctgcagcggaaccgactactttgggtgtccgtgtttccttttattcctcattggctgcttatggtgacaattgaaaggttgttaccatatagctattggattggccatccggtgtctaacagagctattgtttacctattcattgggtttgtccctcttaatcttaagaccatccaaactcttgattacatattgctcctcaattgtagaag

SEQ ID NO: 22828 - DNA, 645 bp, synthetic construct
  source 1..645: mol_type = other DNA
aagcagtaacttagaagttctacacaatcaggaccaacagtcagcgtggcacgccagccacgttttggtcaagcacctctgtttccccggactgagtatcaatagactgctcacgcggttgaaggagaaaacgttcgttacccggctaactacttcgagaaacctaatagcaccatgaaagttgcggagtgtttcgctcagcacttcccccgtgtagatcaggtcgatgagtcactgtaaaccccacgggcgaccgtgacagtggctgcgttggcggcctgcccatggggtaacccatgggacgctctaatacggacatggtgtgaagagtctattgagctagttagtagtcctccggcccctgaatgcggctaatcctaactgcggagcatgcgccctcaacccagggggtggcatgtcgtaatgggcaactctgcagcggaaccgactactttgggtgtccgtgtttccttttattcctcattggctgcttatggtgacaattgaaaggttgttaccatatagctattggattggccatccggtgtctaacagagctattgtttacctattcattgggtttgtccctcttaatcttaagaccatccaaactcttgattacatattgctcctcaattgtagaag

SEQ ID NO: 22829 - DNA, 595 bp, synthetic construct
  source 1..595: mol_type = other DNA
acgccagccacgttttggtcaagcacctctgtttccccggactgagtatcaatagactgctcacgcggttgaaggagaaaacgttcgttacccggctaactacttcgagaaacctaatagcaccatgaaagttgcggagtgtttcgctcagcacttcccccgtgtagatcaggtcgatgagtcactgtaaaccccacgggcgaccgtgacagtggctgcgttggcggcctgcccatggggtaacccatgggacgctctaatacggacatggtgtgaagagtctattgagctagttagtagtcctccggcccctgaatgcggctaatcctaactgcggagcatgcgccctcaacccagggggtggcatgtcgtaatgggcaactctgcagcggaaccgactactttgggtgtccgtgtttccttttattcctcattggctgcttatggtgacaattgaaaggttgttaccatatagctattggattggccatccggtgtctaacagagctattgtttacctattcattgggtttgtccctcttaatcttaagaccatccaaactcttgattacatattgctcctcaattgtagaag

SEQ ID NO: 22830 - DNA, 545 bp, synthetic construct
  source 1..545: mol_type = other DNA
aatagactgctcacgcggttgaaggagaaaacgttcgttacccggctaactacttcgagaaacctaatagcaccatgaaagttgcggagtgtttcgctcagcacttcccccgtgtagatcaggtcgatgagtcactgtaaaccccacgggcgaccgtgacagtggctgcgttggcggcctgcccatggggtaacccatgggacgctctaatacggacatggtgtgaagagtctattgagctagttagtagtcctccggcccctgaatgcggctaatcctaactgcggagcatgcgccctcaacccagggggtggcatgtcgtaatgggcaactctgcagcggaaccgactactttgggtgtccgtgtttccttttattcctcattggctgcttatggtgacaattgaaaggttgttaccatatagctattggattggccatccggtgtctaacagagctattgtttacctattcattgggtttgtccctcttaatcttaagaccatccaaactcttgattacatattgctcctcaattgtagaag

SEQ ID NO: 22831 - DNA, 695 bp, synthetic construct
  source 1..695: mol_type = other DNA
cactctggtactacggtacctttgtgtgcctgttttaagcccctaccccccactcgtaacttagaaggcttctcacactcgatcaatagtaggtgtggcacgccagtcacaccgtgatcaagcacttctgttaccccggtctgagtaccaataagctgctaacgcggctgaaggggaaaacgatcgttatccggctaactacttcgagaaacccagtaccaccatgaacgttgcagggtgtttcgctcggcacaaccccagtgtagatcaggtcgatgagtcaccgtattccccacgggcgaccgtggcggtggctgcgttggcggcctgcccatggggtgacccatgggacgctctaatactgacatggtgcgaagagtctattgagctagttagtagtcctccggcccctgaatgcggctaatcctaactgcggagcacatacccttaatccaaagggcagtgtgtcgtaacgggcaactctgcagcggaaccgactactttgggtgtccgtgtttccttttattcttacattggctgcttatggtgacaattgaaaagttgttaccatatagctattggattggccatccggtgacaaatagagctattgtatatctttttgttggttacgtaccccttaattacaaagtggtttcaactttgaaatacatcctaacactaaattgtagaaa

SEQ ID NO: 22832 - DNA, 645 bp, synthetic construct
  source 1..645: mol_type = other DNA
cactcgtaacttagaaggcttctcacactcgatcaatagtaggtgtggcacgccagtcacaccgtgatcaagcacttctgttaccccggtctgagtaccaataagctgctaacgcggctgaaggggaaaacgatcgttatccggctaactacttcgagaaacccagtaccaccatgaacgttgcagggtgtttcgctcggcacaaccccagtgtagatcaggtcgatgagtcaccgtattccccacgggcgaccgtggcggtggctgcgttggcggcctgcccatggggtgacccatgggacgctctaatactgacatggtgcgaagagtctattgagctagttagtagtcctccggcccctgaatgcggctaatcctaactgcggagcacatacccttaatccaaagggcagtgtgtcgtaacgggcaactctgcagcggaaccgactactttgggtgtccgtgtttccttttattcttacattggctgcttatggtgacaattgaaaagttgttaccatatagctattggattggccatccggtgacaaatagagctattgtatatctttttgttggttacgtaccccttaattacaaagtggtttcaactttgaaatacatcctaacactaaattgtagaaa

SEQ ID NO: 22833 - DNA, 595 bp, synthetic construct
  source 1..595: mol_type = other DNA
cgccagtcacaccgtgatcaagcacttctgttaccccggtctgagtaccaataagctgctaacgcggctgaaggggaaaacgatcgttatccggctaactacttcgagaaacccagtaccaccatgaacgttgcagggtgtttcgctcggcacaaccccagtgtagatcaggtcgatgagtcaccgtattccccacgggcgaccgtggcggtggctgcgttggcggcctgcccatggggtgacccatgggacgctctaatactgacatggtgcgaagagtctattgagctagttagtagtcctccggcccctgaatgcggctaatcctaactgcggagcacatacccttaatccaaagggcagtgtgtcgtaacgggcaactctgcagcggaaccgactactttgggtgtccgtgtttccttttattcttacattggctgcttatggtgacaattgaaaagttgttaccatatagctattggattggccatccggtgacaaatagagctattgtatatctttttgttggttacgtaccccttaattacaaagtggtttcaactttgaaatacatcctaacactaaattgtagaaa

SEQ ID NO: 22834 - DNA, 545 bp, synthetic construct
  source 1..545: mol_type = other DNA
ataagctgctaacgcggctgaaggggaaaacgatcgttatccggctaactacttcgagaaacccagtaccaccatgaacgttgcagggtgtttcgctcggcacaaccccagtgtagatcaggtcgatgagtcaccgtattccccacgggcgaccgtggcggtggctgcgttggcggcctgcccatggggtgacccatgggacgctctaatactgacatggtgcgaagagtctattgagctagttagtagtcctccggcccctgaatgcggctaatcctaactgcggagcacatacccttaatccaaagggcagtgtgtcgtaacgggcaactctgcagcggaaccgactactttgggtgtccgtgtttccttttattcttacattggctgcttatggtgacaattgaaaagttgttaccatatagctattggattggccatccggtgacaaatagagctattgtatatctttttgttggttacgtaccccttaattacaaagtggtttcaactttgaaatacatcctaacactaaattgtagaaa

SEQ ID NO: 22835 - DNA, 695 bp, synthetic construct
  source 1..695: mol_type = other DNA
gtacaccggtatcacggtacccttgtacgcctgttttatacccccttcccccgtaacttagaagctacacaccaagttcaatagaagggggtacaaaccagtaccaccgcgaacaagcacttctgtttccccggtgaagttgcatagactgtgcccacggttgaaagcgaccgatccgttacccgccttggtacttcgagaaacccagtaccactttggaatcaatgatgcgttgcgctcagcgctcgaacccggagcgtagcttaggctgatgagtctggacattccccactggtgacagtggtccaggctgcgttggcggcctacctgtggtgaaagccacaggacgctagttgtgaacaaggtgcgaagagtctattgagctaccatggagtcctccggcccctgaatgcggctaatcccaaccacggagcaggcactcacaagccagtgagacgcttgtcgtaatgcgaaagtctgtggcggaaccgactactttgggtgtccgtgtttccttttattctttgtatggctgcttatggtgacaatcgaagattgttatcataaagcaagttggattggccatccggtgagaattaaaagcattatttacttgcttattggattcactccaatcacatcatttactccacatctaatcaatcttgtgttgatactcagaaggtgttatcaaa

SEQ ID NO: 22836 - DNA, 645 bp, synthetic construct
  source 1..645: mol_type = other DNA
ccgtaacttagaagctacacaccaagttcaatagaagggggtacaaaccagtaccaccgcgaacaagcacttctgtttccccggtgaagttgcatagactgtgcccacggttgaaagcgaccgatccgttacccgccttggtacttcgagaaacccagtaccactttggaatcaatgatgcgttgcgctcagcgctcgaacccggagcgtagcttaggctgatgagtctggacattccccactggtgacagtggtccaggctgcgttggcggcctacctgtggtgaaagccacaggacgctagttgtgaacaaggtgcgaagagtctattgagctaccatggagtcctccggcccctgaatgcggctaatcccaaccacggagcaggcactcacaagccagtgagacgcttgtcgtaatgcgaaagtctgtggcggaaccgactactttgggtgtccgtgtttccttttattctttgtatggctgcttatggtgacaatcgaagattgttatcataaagcaagttggattggccatccggtgagaattaaaagcattatttacttgcttattggattcactccaatcacatcatttactccacatctaatcaatcttgtgttgatactcagaaggtgttatcaaa

SEQ ID NO: 22837 - DNA, 595 bp, synthetic construct
  source 1..595: mol_type = other DNA
gtaccaccgcgaacaagcacttctgtttccccggtgaagttgcatagactgtgcccacggttgaaagcgaccgatccgttacccgccttggtacttcgagaaacccagtaccactttggaatcaatgatgcgttgcgctcagcgctcgaacccggagcgtagcttaggctgatgagtctggacattccccactggtgacagtggtccaggctgcgttggcggcctacctgtggtgaaagccacaggacgctagttgtgaacaaggtgcgaagagtctattgagctaccatggagtcctccggcccctgaatgcggctaatcccaaccacggagcaggcactcacaagccagtgagacgcttgtcgtaatgcgaaagtctgtggcggaaccgactactttgggtgtccgtgtttccttttattctttgtatggctgcttatggtgacaatcgaagattgttatcataaagcaagttggattggccatccggtgagaattaaaagcattatttacttgcttattggattcactccaatcacatcatttactccacatctaatcaatcttgtgttgatactcagaaggtgttatcaaa

SEQ ID NO: 22838 - DNA, 545 bp, synthetic construct
  source 1..545: mol_type = other DNA
gtgcccacggttgaaagcgaccgatccgttacccgccttggtacttcgagaaacccagtaccactttggaatcaatgatgcgttgcgctcagcgctcgaacccggagcgtagcttaggctgatgagtctggacattccccactggtgacagtggtccaggctgcgttggcggcctacctgtggtgaaagccacaggacgctagttgtgaacaaggtgcgaagagtctattgagctaccatggagtcctccggcccctgaatgcggctaatcccaaccacggagcaggcactcacaagccagtgagacgcttgtcgtaatgcgaaagtctgtggcggaaccgactactttgggtgtccgtgtttccttttattctttgtatggctgcttatggtgacaatcgaagattgttatcataaagcaagttggattggccatccggtgagaattaaaagcattatttacttgcttattggattcactccaatcacatcatttactccacatctaatcaatcttgtgttgatactcagaaggtgttatcaaa

SEQ ID NO: 22839 - DNA, 695 bp, synthetic construct
  source 1..695: mol_type = other DNA
gtacactggtattacggtacccttgtacgcctgttttacaccccttcccccgtaacttagaagctttaaacccaagttcaatagtaggtggtacaacccagtaccaccacgaacaagcacttctgttatcccggtgagattgcataagctgtccccacggctaaaagcgattgatccgttacccgctcttgtacttcgagaagcctagtaaaaccttggaatcttcgacgcgttgcgttcgacactcaaccccagagtgtagcttaggctgatgagtctggacattcctcaccggcgacggtggtccaggctgcgttggcggcctacctgtggcctaaagccacaggacgctagttgtgaacaaggtgtgaagagcctattgagctacaagggagtcctccggcccctgaatgcggctaatcccaaccacggagcaggtggttgcaatccagcaactggcctgtcgtaacgcgcaagtctgtggcggaaccgactactttgggtgtccgtgtttccttttattttttaatggctgcttatggtgacaatcacagattgttgtcataaagcgaattggattggccatccagtgagagttaagataattatctacttgtttattggatttgttcctataaccgcccatacaccttgcttgattgaagtgatcctgtcaataagacatcactattaca

SEQ ID NO: 22840 - DNA, 645 bp, synthetic construct
  source 1..645: mol_type = other DNA
cgtaacttagaagctttaaacccaagttcaatagtaggtggtacaacccagtaccaccacgaacaagcacttctgttatcccggtgagattgcataagctgtccccacggctaaaagcgattgatccgttacccgctcttgtacttcgagaagcctagtaaaaccttggaatcttcgacgcgttgcgttcgacactcaaccccagagtgtagcttaggctgatgagtctggacattcctcaccggcgacggtggtccaggctgcgttggcggcctacctgtggcctaaagccacaggacgctagttgtgaacaaggtgtgaagagcctattgagctacaagggagtcctccggcccctgaatgcggctaatcccaaccacggagcaggtggttgcaatccagcaactggcctgtcgtaacgcgcaagtctgtggcggaaccgactactttgggtgtccgtgtttccttttattttttaatggctgcttatggtgacaatcacagattgttgtcataaagcgaattggattggccatccagtgagagttaagataattatctacttgtttattggatttgttcctataaccgcccatacaccttgcttgattgaagtgatcctgtcaataagacatcactattaca

SEQ ID NO: 22841 - DNA, 595 bp, synthetic construct
  source 1..595: mol_type = other DNA
gtaccaccacgaacaagcacttctgttatcccggtgagattgcataagctgtccccacggctaaaagcgattgatccgttacccgctcttgtacttcgagaagcctagtaaaaccttggaatcttcgacgcgttgcgttcgacactcaaccccagagtgtagcttaggctgatgagtctggacattcctcaccggcgacggtggtccaggctgcgttggcggcctacctgtggcctaaagccacaggacgctagttgtgaacaaggtgtgaagagcctattgagctacaagggagtcctccggcccctgaatgcggctaatcccaaccacggagcaggtggttgcaatccagcaactggcctgtcgtaacgcgcaagtctgtggcggaaccgactactttgggtgtccgtgtttccttttattttttaatggctgcttatggtgacaatcacagattgttgtcataaagcgaattggattggccatccagtgagagttaagataattatctacttgtttattggatttgttcctataaccgcccatacaccttgcttgattgaagtgatcctgtcaataagacatcactattaca

SEQ ID NO: 22842 - DNA, 545 bp, synthetic construct
  source 1..545: mol_type = other DNA
gtccccacggctaaaagcgattgatccgttacccgctcttgtacttcgagaagcctagtaaaaccttggaatcttcgacgcgttgcgttcgacactcaaccccagagtgtagcttaggctgatgagtctggacattcctcaccggcgacggtggtccaggctgcgttggcggcctacctgtggcctaaagccacaggacgctagttgtgaacaaggtgtgaagagcctattgagctacaagggagtcctccggcccctgaatgcggctaatcccaaccacggagcaggtggttgcaatccagcaactggcctgtcgtaacgcgcaagtctgtggcggaaccgactactttgggtgtccgtgtttccttttattttttaatggctgcttatggtgacaatcacagattgttgtcataaagcgaattggattggccatccagtgagagttaagataattatctacttgtttattggatttgttcctataaccgcccatacaccttgcttgattgaagtgatcctgtcaataagacatcactattaca

SEQ ID NO: 22843 - DNA, 695 bp, synthetic construct
  source 1..695: mol_type = other DNA
gtactccggtattgcggtacccttgtacgcctgttttacactcccttccccggtaacttagaagtaaacaaaccaagttcaatagaagggggtacaaaccagtaccaccacgaacaagcacttctgtttccccggtgacgttgtatagactgtacccacggttgaaaacaactgatccgttatccgctcttgtacttcgagaagcccagtatcaccttggaatcttcgatgcgttgcgctcagcactcaaccccagagtgtagcttaggtcgatgagtctggacaatcctcaccggcgacggtggtccaggctgcgttggcggcctacctgtggcccaaagccacaggacgctagttgtgaacaaggtgtgaagagcctattgagctacgagagagtcctccggcccctgaatgcggctaatcccaaccacggagcaggtgatcacaagccagtgattagcctgtcgtaacgcgcaagtctgtggcggaaccgactactttgggtgtccgtgtttcctttattttattatggctgcttatggtgacaatcacagattgttatcataaagcgacttggattggccatccagtgaaaataaaacacatcatttacctgattgttggatttactccgctgactatctactcaccaggtcttattaaggttattctgttgattaggtcacaatttcaca

SEQ ID NO: 22844 - DNA, 645 bp, synthetic construct
  source 1..645: mol_type = other DNA
cggtaacttagaagtaaacaaaccaagttcaatagaagggggtacaaaccagtaccaccacgaacaagcacttctgtttccccggtgacgttgtatagactgtacccacggttgaaaacaactgatccgttatccgctcttgtacttcgagaagcccagtatcaccttggaatcttcgatgcgttgcgctcagcactcaaccccagagtgtagcttaggtcgatgagtctggacaatcctcaccggcgacggtggtccaggctgcgttggcggcctacctgtggcccaaagccacaggacgctagttgtgaacaaggtgtgaagagcctattgagctacgagagagtcctccggcccctgaatgcggctaatcccaaccacggagcaggtgatcacaagccagtgattagcctgtcgtaacgcgcaagtctgtggcggaaccgactactttgggtgtccgtgtttcctttattttattatggctgcttatggtgacaatcacagattgttatcataaagcgacttggattggccatccagtgaaaataaaacacatcatttacctgattgttggatttactccgctgactatctactcaccaggtcttattaaggttattctgttgattaggtcacaatttcaca

SEQ ID NO: 22845 - DNA, 595 bp, synthetic construct
  source 1..595: mol_type = other DNA
agtaccaccacgaacaagcacttctgtttccccggtgacgttgtatagactgtacccacggttgaaaacaactgatccgttatccgctcttgtacttcgagaagcccagtatcaccttggaatcttcgatgcgttgcgctcagcactcaaccccagagtgtagcttaggtcgatgagtctggacaatcctcaccggcgacggtggtccaggctgcgttggcggcctacctgtggcccaaagccacaggacgctagttgtgaacaaggtgtgaagagcctattgagctacgagagagtcctccggcccctgaatgcggctaatcccaaccacggagcaggtgatcacaagccagtgattagcctgtcgtaacgcgcaagtctgtggcggaaccgactactttgggtgtccgtgtttcctttattttattatggctgcttatggtgacaatcacagattgttatcataaagcgacttggattggccatccagtgaaaataaaacacatcatttacctgattgttggatttactccgctgactatctactcaccaggtcttattaaggttattctgttgattaggtcacaatttcaca

SEQ ID NO: 22846 - DNA, 545 bp, synthetic construct
  source 1..545: mol_type = other DNA
tgtacccacggttgaaaacaactgatccgttatccgctcttgtacttcgagaagcccagtatcaccttggaatcttcgatgcgttgcgctcagcactcaaccccagagtgtagcttaggtcgatgagtctggacaatcctcaccggcgacggtggtccaggctgcgttggcggcctacctgtggcccaaagccacaggacgctagttgtgaacaaggtgtgaagagcctattgagctacgagagagtcctccggcccctgaatgcggctaatcccaaccacggagcaggtgatcacaagccagtgattagcctgtcgtaacgcgcaagtctgtggcggaaccgactactttgggtgtccgtgtttcctttattttattatggctgcttatggtgacaatcacagattgttatcataaagcgacttggattggccatccagtgaaaataaaacacatcatttacctgattgttggatttactccgctgactatctactcaccaggtcttattaaggttattctgttgattaggtcacaatttcaca

SEQ ID NO: 22847 - DNA, 695 bp, synthetic construct
  source 1..695: mol_type = other DNA
gtactccggtattacggtacccttgtacgcctgttttgtatccccttcccccgcaacttagaagttataaaccaagttcaatagaagggggtacaagccagtaccaccacgaacaagcacttctgtttccccggtgatgttgtatagactgctaacgcggttgaaaacagctgatccgttatccgcttgtgtacttcgagaagcctagtatcatcttggaatcttcgatgcgttgcgttcagcgctctaccccagagcgtagcttaggctgatgagtctgggcattccccaccggcgacggtggcccaggctgcgttggcggcctacctatggctaacgccataggacgctagttgtgaacaaggtgtgaagagcctattgagctacacaagagtcctccggcccctgaatgcggctaatcctaaccatggagcaagtgatcacaatccagtgatattcttgtcgtaacgcgcaagtccgtggcggaaccgactactttgggtgtccgtgtttccttttacttttatcatggctgcttatggtgacaatcattgattgttatcataaagcgaattggattggccatccggtgaaagtgagacttatcatctacttgtttgttggattcactccattgaacacattcactcccagtatcatttcaatagtaatcagaattagacagttgtatcaca

SEQ ID NO: 22848 - DNA, 645 bp, synthetic construct
  source 1..645: mol_type = other DNA
ccgcaacttagaagttataaaccaagttcaatagaagggggtacaagccagtaccaccacgaacaagcacttctgtttccccggtgatgttgtatagactgctaacgcggttgaaaacagctgatccgttatccgcttgtgtacttcgagaagcctagtatcatcttggaatcttcgatgcgttgcgttcagcgctctaccccagagcgtagcttaggctgatgagtctgggcattccccaccggcgacggtggcccaggctgcgttggcggcctacctatggctaacgccataggacgctagttgtgaacaaggtgtgaagagcctattgagctacacaagagtcctccggcccctgaatgcggctaatcctaaccatggagcaagtgatcacaatccagtgatattcttgtcgtaacgcgcaagtccgtggcggaaccgactactttgggtgtccgtgtttccttttacttttatcatggctgcttatggtgacaatcattgattgttatcataaagcgaattggattggccatccggtgaaagtgagacttatcatctacttgtttgttggattcactccattgaacacattcactcccagtatcatttcaatagtaatcagaattagacagttgtatcaca

SEQ ID NO: 22849 - DNA, 595 bp, synthetic construct
  source 1..595: mol_type = other DNA
gtaccaccacgaacaagcacttctgtttccccggtgatgttgtatagactgctaacgcggttgaaaacagctgatccgttatccgcttgtgtacttcgagaagcctagtatcatcttggaatcttcgatgcgttgcgttcagcgctctaccccagagcgtagcttaggctgatgagtctgggcattccccaccggcgacggtggcccaggctgcgttggcggcctacctatggctaacgccataggacgctagttgtgaacaaggtgtgaagagcctattgagctacacaagagtcctccggcccctgaatgcggctaatcctaaccatggagcaagtgatcacaatccagtgatattcttgtcgtaacgcgcaagtccgtggcggaaccgactactttgggtgtccgtgtttccttttacttttatcatggctgcttatggtgacaatcattgattgttatcataaagcgaattggattggccatccggtgaaagtgagacttatcatctacttgtttgttggattcactccattgaacacattcactcccagtatcatttcaatagtaatcagaattagacagttgtatcaca

SEQ ID NO: 22850 - DNA, 545 bp, synthetic construct
  source 1..545: mol_type = other DNA
gctaacgcggttgaaaacagctgatccgttatccgcttgtgtacttcgagaagcctagtatcatcttggaatcttcgatgcgttgcgttcagcgctctaccccagagcgtagcttaggctgatgagtctgggcattccccaccggcgacggtggcccaggctgcgttggcggcctacctatggctaacgccataggacgctagttgtgaacaaggtgtgaagagcctattgagctacacaagagtcctccggcccctgaatgcggctaatcctaaccatggagcaagtgatcacaatccagtgatattcttgtcgtaacgcgcaagtccgtggcggaaccgactactttgggtgtccgtgtttccttttacttttatcatggctgcttatggtgacaatcattgattgttatcataaagcgaattggattggccatccggtgaaagtgagacttatcatctacttgtttgttggattcactccattgaacacattcactcccagtatcatttcaatagtaatcagaattagacagttgtatcaca

SEQ ID NO: 22851 - DNA, 695 bp, synthetic construct
  source 1..695: mol_type = other DNA
gtactccggtattacggtacccttgtacgcctgttttaaatccccttccccgtaacttagaagcttaaaccaataagttcaatagaagggggtacaaaccagtaccaccacgaacaagcacttctgtttccccggtgcggtggtatagactgtacccacggttaaaaaccaccaatccgttatccgctctggtacttcgagaagcctagtaccaccttggaatctttgacgcgttgcgctcaacactcaaccccagagtgtagcttaggctgatgagtctgggcagtccccaccggtgacggtggcccaggctgcgttggcggcctacccatggctaatgccatgggacgctagaagtgaacaaggtgtgaagagcctattgagctactagagagtcctccggcccctgaatgcggctaatcccaaccacggatcaagtgcgcgcaacccagtgcgtagcttgtcgtaatgcgcaagtctgtggcggaaccgactactttgggtgtccgtgtttccttttattcttattatggctgcttatggtgacaatcttagattgttatcatatagcaattggattggccatccagtgagagtgagagatatcatatacctatttgtagcttttactccacttagcacgaacacagttactttgattagaattgtgctattgatcagattgacacatcact

SEQ ID NO: 22852 - DNA, 645 bp, synthetic construct
  source 1..645: mol_type = other DNA
cgtaacttagaagcttaaaccaataagttcaatagaagggggtacaaaccagtaccaccacgaacaagcacttctgtttccccggtgcggtggtatagactgtacccacggttaaaaaccaccaatccgttatccgctctggtacttcgagaagcctagtaccaccttggaatctttgacgcgttgcgctcaacactcaaccccagagtgtagcttaggctgatgagtctgggcagtccccaccggtgacggtggcccaggctgcgttggcggcctacccatggctaatgccatgggacgctagaagtgaacaaggtgtgaagagcctattgagctactagagagtcctccggcccctgaatgcggctaatcccaaccacggatcaagtgcgcgcaacccagtgcgtagcttgtcgtaatgcgcaagtctgtggcggaaccgactactttgggtgtccgtgtttccttttattcttattatggctgcttatggtgacaatcttagattgttatcatatagcaattggattggccatccagtgagagtgagagatatcatatacctatttgtagcttttactccacttagcacgaacacagttactttgattagaattgtgctattgatcagattgacacatcact

SEQ ID NO: 22853 - DNA, 595 bp, synthetic construct
  source 1..595: mol_type = other DNA
agtaccaccacgaacaagcacttctgtttccccggtgcggtggtatagactgtacccacggttaaaaaccaccaatccgttatccgctctggtacttcgagaagcctagtaccaccttggaatctttgacgcgttgcgctcaacactcaaccccagagtgtagcttaggctgatgagtctgggcagtccccaccggtgacggtggcccaggctgcgttggcggcctacccatggctaatgccatgggacgctagaagtgaacaaggtgtgaagagcctattgagctactagagagtcctccggcccctgaatgcggctaatcccaaccacggatcaagtgcgcgcaacccagtgcgtagcttgtcgtaatgcgcaagtctgtggcggaaccgactactttgggtgtccgtgtttccttttattcttattatggctgcttatggtgacaatcttagattgttatcatatagcaattggattggccatccagtgagagtgagagatatcatatacctatttgtagcttttactccacttagcacgaacacagttactttgattagaattgtgctattgatcagattgacacatcact

SEQ ID NO: 22854 - DNA, 545 bp, synthetic construct
  source 1..545: mol_type = other DNA
tgtacccacggttaaaaaccaccaatccgttatccgctctggtacttcgagaagcctagtaccaccttggaatctttgacgcgttgcgctcaacactcaaccccagagtgtagcttaggctgatgagtctgggcagtccccaccggtgacggtggcccaggctgcgttggcggcctacccatggctaatgccatgggacgctagaagtgaacaaggtgtgaagagcctattgagctactagagagtcctccggcccctgaatgcggctaatcccaaccacggatcaagtgcgcgcaacccagtgcgtagcttgtcgtaatgcgcaagtctgtggcggaaccgactactttgggtgtccgtgtttccttttattcttattatggctgcttatggtgacaatcttagattgttatcatatagcaattggattggccatccagtgagagtgagagatatcatatacctatttgtagcttttactccacttagcacgaacacagttactttgattagaattgtgctattgatcagattgacacatcact

SEQ ID NO: 22855 - DNA, 695 bp, synthetic construct
  source 1..695: mol_type = other DNA
gtactctggtatcacggtacctttgtacgcctgttttatatcccttcccccgtaacttagaagctttgtaccaacaagttcaatagaaggggtacaaaccagtaccaccacgaacaagcacttctgtttccccggtgcgatgacatagactgtacccacggtcaaaagtcaccaatccgttacccgctttggtacttcgagacgcctagtattgccttggaattctcgatgcgttgcgctcaacactcgaccctggagtgtagcttaggctgatgagtctgggcattccccaccggtgacggtggcccaggctgcgttggcggcctacccatagctattgctatgggatgctagagttgaacaaggtgtgaagagccaattgagctactaaagagtcctccggcccctgaatgcggctaatcccaaccacggatcaagtgcgtgcaacccagcacgtagcttgtcgtaatgcgcaagtctgtggcggaaccgactactttgggtgtccgtgtttccttttatttttatcatggctgcttatggtgacaatcttggattgttatcatatagcgattggattggccatccggtgagaataaaagatattgtttatctgtttgtggcttttactccattaaacaaaaacacactttccttaattaaagtggtactattgatcagatcagcataccaca

SEQ ID NO: 22856 - DNA, 645 bp, synthetic construct
  source 1..645: mol_type = other DNA
cgtaacttagaagctttgtaccaacaagttcaatagaaggggtacaaaccagtaccaccacgaacaagcacttctgtttccccggtgcgatgacatagactgtacccacggtcaaaagtcaccaatccgttacccgctttggtacttcgagacgcctagtattgccttggaattctcgatgcgttgcgctcaacactcgaccctggagtgtagcttaggctgatgagtctgggcattccccaccggtgacggtggcccaggctgcgttggcggcctacccatagctattgctatgggatgctagagttgaacaaggtgtgaagagccaattgagctactaaagagtcctccggcccctgaatgcggctaatcccaaccacggatcaagtgcgtgcaacccagcacgtagcttgtcgtaatgcgcaagtctgtggcggaaccgactactttgggtgtccgtgtttccttttatttttatcatggctgcttatggtgacaatcttggattgttatcatatagcgattggattggccatccggtgagaataaaagatattgtttatctgtttgtggcttttactccattaaacaaaaacacactttccttaattaaagtggtactattgatcagatcagcataccaca

SEQ ID NO: 22857 - DNA, 595 bp, synthetic construct
  source 1..595: mol_type = other DNA
agtaccaccacgaacaagcacttctgtttccccggtgcgatgacatagactgtacccacggtcaaaagtcaccaatccgttacccgctttggtacttcgagacgcctagtattgccttggaattctcgatgcgttgcgctcaacactcgaccctggagtgtagcttaggctgatgagtctgggcattccccaccggtgacggtggcccaggctgcgttggcggcctacccatagctattgctatgggatgctagagttgaacaaggtgtgaagagccaattgagctactaaagagtcctccggcccctgaatgcggctaatcccaaccacggatcaagtgcgtgcaacccagcacgtagcttgtcgtaatgcgcaagtctgtggcggaaccgactactttgggtgtccgtgtttccttttatttttatcatggctgcttatggtgacaatcttggattgttatcatatagcgattggattggccatccggtgagaataaaagatattgtttatctgtttgtggcttttactccattaaacaaaaacacactttccttaattaaagtggtactattgatcagatcagcataccaca

SEQ ID NO: 22858 - DNA, 545 bp, synthetic construct
  source 1..545: mol_type = other DNA
tgtacccacggtcaaaagtcaccaatccgttacccgctttggtacttcgagacgcctagtattgccttggaattctcgatgcgttgcgctcaacactcgaccctggagtgtagcttaggctgatgagtctgggcattccccaccggtgacggtggcccaggctgcgttggcggcctacccatagctattgctatgggatgctagagttgaacaaggtgtgaagagccaattgagctactaaagagtcctccggcccctgaatgcggctaatcccaaccacggatcaagtgcgtgcaacccagcacgtagcttgtcgtaatgcgcaagtctgtggcggaaccgactactttgggtgtccgtgtttccttttatttttatcatggctgcttatggtgacaatcttggattgttatcatatagcgattggattggccatccggtgagaataaaagatattgtttatctgtttgtggcttttactccattaaacaaaaacacactttccttaattaaagtggtactattgatcagatcagcataccaca

SEQ ID NO: 22859 - DNA, 695 bp, synthetic construct
  source 1..695: mol_type = other DNA
gcactctggtattgcggtacctttgtgcgcctgttttatatccccgcccctacgtaactttagaagcaatacacagtgttcattaggaggggcacaaaccagtgtccttaagaacaagcacttctgtttccccggtgacctcgtataggctgtacccacggctaaaaacgagcgattcgttacccgcttaggtacttcgagaagcctagtaccgccttggaatcttcgacgcgttgcgctcagcactctaccccgagtgtagcttaggctgatgagtctgggcattccccaccggtgacggtggcccaggctgcgttggcggcctacccatggcctgcgccatgggacgctagttgtgaacaaggtgtgaagagcctattgagctacctaagaatcctccggcccctgaatgcggctaatcctaaccacggagcaagcaccctcaatccagggggtggcttgtcgtaacgcgcaagtctgtggcggaaccgactactttgggtgtccgtgtttccctttatttttattgtggctgcttatggtgacaatctttgattgccatcataaagcgaattggattggccatccggtgaaagttgaacacaccattcatctatttgttggattcacctcgttgactcagtttacacccaatttggtacatatagtgatagtgattagagaaaaataccaca

SEQ ID NO: 22860 - DNA, 645 bp, synthetic construct
  source 1..645: mol_type = other DNA
tacgtaactttagaagcaatacacagtgttcattaggaggggcacaaaccagtgtccttaagaacaagcacttctgtttccccggtgacctcgtataggctgtacccacggctaaaaacgagcgattcgttacccgcttaggtacttcgagaagcctagtaccgccttggaatcttcgacgcgttgcgctcagcactctaccccgagtgtagcttaggctgatgagtctgggcattccccaccggtgacggtggcccaggctgcgttggcggcctacccatggcctgcgccatgggacgctagttgtgaacaaggtgtgaagagcctattgagctacctaagaatcctccggcccctgaatgcggctaatcctaaccacggagcaagcaccctcaatccagggggtggcttgtcgtaacgcgcaagtctgtggcggaaccgactactttgggtgtccgtgtttccctttatttttattgtggctgcttatggtgacaatctttgattgccatcataaagcgaattggattggccatccggtgaaagttgaacacaccattcatctatttgttggattcacctcgttgactcagtttacacccaatttggtacatatagtgatagtgattagagaaaaataccaca

SEQ ID NO: 22861 - DNA, 595 bp, synthetic construct
  source 1..595: mol_type = other DNA
agtgtccttaagaacaagcacttctgtttccccggtgacctcgtataggctgtacccacggctaaaaacgagcgattcgttacccgcttaggtacttcgagaagcctagtaccgccttggaatcttcgacgcgttgcgctcagcactctaccccgagtgtagcttaggctgatgagtctgggcattccccaccggtgacggtggcccaggctgcgttggcggcctacccatggcctgcgccatgggacgctagttgtgaacaaggtgtgaagagcctattgagctacctaagaatcctccggcccctgaatgcggctaatcctaaccacggagcaagcaccctcaatccagggggtggcttgtcgtaacgcgcaagtctgtggcggaaccgactactttgggtgtccgtgtttccctttatttttattgtggctgcttatggtgacaatctttgattgccatcataaagcgaattggattggccatccggtgaaagttgaacacaccattcatctatttgttggattcacctcgttgactcagtttacacccaatttggtacatatagtgatagtgattagagaaaaataccaca

SEQ ID NO: 22862 - DNA, 545 bp, synthetic construct
  source 1..545: mol_type = other DNA
tgtacccacggctaaaaacgagcgattcgttacccgcttaggtacttcgagaagcctagtaccgccttggaatcttcgacgcgttgcgctcagcactctaccccgagtgtagcttaggctgatgagtctgggcattccccaccggtgacggtggcccaggctgcgttggcggcctacccatggcctgcgccatgggacgctagttgtgaacaaggtgtgaagagcctattgagctacctaagaatcctccggcccctgaatgcggctaatcctaaccacggagcaagcaccctcaatccagggggtggcttgtcgtaacgcgcaagtctgtggcggaaccgactactttgggtgtccgtgtttccctttatttttattgtggctgcttatggtgacaatctttgattgccatcataaagcgaattggattggccatccggtgaaagttgaacacaccattcatctatttgttggattcacctcgttgactcagtttacacccaatttggtacatatagtgatagtgattagagaaaaataccaca

SEQ ID NO: 22863 - DNA, 695 bp, synthetic construct
  source 1..695: mol_type = other DNA
gtactctggtattacggtacctttgtacgcctgttttatatcccctccccccagtaacttagaaacaaaaaacccaagttcaataggagggggtacaaaccagtaccaccacgaacaagcacttctgttttccccggtgaggttgtatagactgtccccacggtcgaaaatgactgatccgttacccgctcctgtacttcgagaagcccagtaacatcttggaatcttcgatgcgttgcgctcagcactcaaccccagagtgtagcttaggtcgatgagtctggacgctccccaccggcgacggtggtccaggctgcgttggcggcctacctgtggtccaaagccacaggacgttagttgtgaacaaggtgtgaagagcctattgagctacaagagagtcctccggcccctgaatgcggctaatcccaaccatggagcagatgattgcaaaccagcaattggtctgtcgtaatgcgtaagtctgtggcggaaccgactactttgggtgtccgtgtttcctttttactctttaatggctgcttatggtgacaatcacggattgttatcataaagcgaattggattggccatccggtgagaatcagaacgattatttcttcctcgtggatttgtaccaataacaccttacacaccgcacttaatcagagttatattgtgtgagatttcattaccata

SEQ ID NO: 22864 - DNA, 645 bp, synthetic construct
  source 1..645: mol_type = other DNA
ccagtaacttagaaacaaaaaacccaagttcaataggagggggtacaaaccagtaccaccacgaacaagcacttctgttttccccggtgaggttgtatagactgtccccacggtcgaaaatgactgatccgttacccgctcctgtacttcgagaagcccagtaacatcttggaatcttcgatgcgttgcgctcagcactcaaccccagagtgtagcttaggtcgatgagtctggacgctccccaccggcgacggtggtccaggctgcgttggcggcctacctgtggtccaaagccacaggacgttagttgtgaacaaggtgtgaagagcctattgagctacaagagagtcctccggcccctgaatgcggctaatcccaaccatggagcagatgattgcaaaccagcaattggtctgtcgtaatgcgtaagtctgtggcggaaccgactactttgggtgtccgtgtttcctttttactctttaatggctgcttatggtgacaatcacggattgttatcataaagcgaattggattggccatccggtgagaatcagaacgattatttcttcctcgtggatttgtaccaataacaccttacacaccgcacttaatcagagttatattgtgtgagatttcattaccata

SEQ ID NO: 22865 - DNA, 595 bp, synthetic construct
  source 1..595: mol_type = other DNA
cagtaccaccacgaacaagcacttctgttttccccggtgaggttgtatagactgtccccacggtcgaaaatgactgatccgttacccgctcctgtacttcgagaagcccagtaacatcttggaatcttcgatgcgttgcgctcagcactcaaccccagagtgtagcttaggtcgatgagtctggacgctccccaccggcgacggtggtccaggctgcgttggcggcctacctgtggtccaaagccacaggacgttagttgtgaacaaggtgtgaagagcctattgagctacaagagagtcctccggcccctgaatgcggctaatcccaaccatggagcagatgattgcaaaccagcaattggtctgtcgtaatgcgtaagtctgtggcggaaccgactactttgggtgtccgtgtttcctttttactctttaatggctgcttatggtgacaatcacggattgttatcataaagcgaattggattggccatccggtgagaatcagaacgattatttcttcctcgtggatttgtaccaataacaccttacacaccgcacttaatcagagttatattgtgtgagatttcattaccata

SEQ ID NO: 22866 - DNA, 545 bp, synthetic construct
  source 1..545: mol_type = other DNA
actgtccccacggtcgaaaatgactgatccgttacccgctcctgtacttcgagaagcccagtaacatcttggaatcttcgatgcgttgcgctcagcactcaaccccagagtgtagcttaggtcgatgagtctggacgctccccaccggcgacggtggtccaggctgcgttggcggcctacctgtggtccaaagccacaggacgttagttgtgaacaaggtgtgaagagcctattgagctacaagagagtcctccggcccctgaatgcggctaatcccaaccatggagcagatgattgcaaaccagcaattggtctgtcgtaatgcgtaagtctgtggcggaaccgactactttgggtgtccgtgtttcctttttactctttaatggctgcttatggtgacaatcacggattgttatcataaagcgaattggattggccatccggtgagaatcagaacgattatttcttcctcgtggatttgtaccaataacaccttacacaccgcacttaatcagagttatattgtgtgagatttcattaccata

SEQ ID NO: 22867 - DNA, 695 bp, synthetic construct
  source 1..695: mol_type = other DNA
gcactctggtatcacggtacctttgtgcgcctgttttatgtccccgcccccatgtaactttagaagcaatacacggtgttcattaggaggggcacaagccagtgttcctatgaacaagcacttctgtttccccggtgacctcgtataggctgtgcccacggctaaaaacgtgcgatccgttacccgcttgggtacttcgagaagcccagtaccaccttggaatcttcgacgcgttgcgctcagcactctaccccgagtgtagcttaggctgatgagtctgggcattccccactggtgacagtggcccaggctgcgttggcggcctacccattgctcgcgcaatgggacgctagatgtgaacaaggtgtgaagagcctattgagctgcctaagagtcctccggcccctgaatgcggctaatcctaaccacggagcaagcgccttcaacccagggggtggcttgtcgtaacgcgcaagtctgtggcggaaccgactactttgggtgtccgtgtttccctttgtttttattatggctgcttatggtgacaatcattgattgccatcataaagcgaattggattggccatccggtggaagttacatacatcatccatctatttgttggatttgcttcactaacacagttcacaatcaacttggtatatataataatagtgattagagaaaaataccata

SEQ ID NO: 22868 - DNA, 645 bp, synthetic construct
  source 1..645: mol_type = other DNA
catgtaactttagaagcaatacacggtgttcattaggaggggcacaagccagtgttcctatgaacaagcacttctgtttccccggtgacctcgtataggctgtgcccacggctaaaaacgtgcgatccgttacccgcttgggtacttcgagaagcccagtaccaccttggaatcttcgacgcgttgcgctcagcactctaccccgagtgtagcttaggctgatgagtctgggcattccccactggtgacagtggcccaggctgcgttggcggcctacccattgctcgcgcaatgggacgctagatgtgaacaaggtgtgaagagcctattgagctgcctaagagtcctccggcccctgaatgcggctaatcctaaccacggagcaagcgccttcaacccagggggtggcttgtcgtaacgcgcaagtctgtggcggaaccgactactttgggtgtccgtgtttccctttgtttttattatggctgcttatggtgacaatcattgattgccatcataaagcgaattggattggccatccggtggaagttacatacatcatccatctatttgttggatttgcttcactaacacagttcacaatcaacttggtatatataataatagtgattagagaaaaataccata

SEQ ID NO: 22869 - DNA, 595 bp, synthetic construct
  source 1..595: mol_type = other DNA
agtgttcctatgaacaagcacttctgtttccccggtgacctcgtataggctgtgcccacggctaaaaacgtgcgatccgttacccgcttgggtacttcgagaagcccagtaccaccttggaatcttcgacgcgttgcgctcagcactctaccccgagtgtagcttaggctgatgagtctgggcattccccactggtgacagtggcccaggctgcgttggcggcctacccattgctcgcgcaatgggacgctagatgtgaacaaggtgtgaagagcctattgagctgcctaagagtcctccggcccctgaatgcggctaatcctaaccacggagcaagcgccttcaacccagggggtggcttgtcgtaacgcgcaagtctgtggcggaaccgactactttgggtgtccgtgtttccctttgtttttattatggctgcttatggtgacaatcattgattgccatcataaagcgaattggattggccatccggtggaagttacatacatcatccatctatttgttggatttgcttcactaacacagttcacaatcaacttggtatatataataatagtgattagagaaaaataccata

SEQ ID NO: 22870 - DNA, 545 bp, synthetic construct
  source 1..545: mol_type = other DNA
tgtgcccacggctaaaaacgtgcgatccgttacccgcttgggtacttcgagaagcccagtaccaccttggaatcttcgacgcgttgcgctcagcactctaccccgagtgtagcttaggctgatgagtctgggcattccccactggtgacagtggcccaggctgcgttggcggcctacccattgctcgcgcaatgggacgctagatgtgaacaaggtgtgaagagcctattgagctgcctaagagtcctccggcccctgaatgcggctaatcctaaccacggagcaagcgccttcaacccagggggtggcttgtcgtaacgcgcaagtctgtggcggaaccgactactttgggtgtccgtgtttccctttgtttttattatggctgcttatggtgacaatcattgattgccatcataaagcgaattggattggccatccggtggaagttacatacatcatccatctatttgttggatttgcttcactaacacagttcacaatcaacttggtatatataataatagtgattagagaaaaataccata

SEQ ID NO: 22871 - DNA, 695 bp, synthetic construct
  source 1..695: mol_type = other DNA
gtactctggtatctcggtacctttgtacgcctgttttatacccccttccccatgtaactttagaagcaattcaacaagttcaatagagggggtacaaaccagtaccaccacgaacaagcacttctgtttccccggtgattttacataagctgtgcccacggctgaaagtgaatgatccgttacccgcttgagtacttcgagaagcctagtatcgccttggaatcttcgatgcgttgcgctcagcactctaccccgagtgtagcttaggctgatgagtctgggcattccccaccggtgacggtggcccaggctgcgttggcggcctacccatggctaacgccatgggacgctagttgtgaacaaggtgtgaagagcctattgagctacttaagagtcctccggcccctgaatgcggctaatcccaaccacggagcaggcgccaccaatccaggaggtagcctgtcgtaacgcgtaagtctgtggcggaaccgactactttgggtgtccgtgtttccttttatctctttaatggctgcttatggtgacaatcatagattgttatcataaagcgaattggattggccatccggtgaagtgtaaacacattatttatttgttcattggatttactccattcacccgatttactccaaatataatacatattgtattgttgataagacgttgctactaca

SEQ ID NO: 22872 - DNA, 645 bp, synthetic construct
  source 1..645: mol_type = other DNA
catgtaactttagaagcaattcaacaagttcaatagagggggtacaaaccagtaccaccacgaacaagcacttctgtttccccggtgattttacataagctgtgcccacggctgaaagtgaatgatccgttacccgcttgagtacttcgagaagcctagtatcgccttggaatcttcgatgcgttgcgctcagcactctaccccgagtgtagcttaggctgatgagtctgggcattccccaccggtgacggtggcccaggctgcgttggcggcctacccatggctaacgccatgggacgctagttgtgaacaaggtgtgaagagcctattgagctacttaagagtcctccggcccctgaatgcggctaatcccaaccacggagcaggcgccaccaatccaggaggtagcctgtcgtaacgcgtaagtctgtggcggaaccgactactttgggtgtccgtgtttccttttatctctttaatggctgcttatggtgacaatcatagattgttatcataaagcgaattggattggccatccggtgaagtgtaaacacattatttatttgttcattggatttactccattcacccgatttactccaaatataatacatattgtattgttgataagacgttgctactaca

SEQ ID NO: 22873 - DNA, 595 bp, synthetic construct
  source 1..595: mol_type = other DNA
agtaccaccacgaacaagcacttctgtttccccggtgattttacataagctgtgcccacggctgaaagtgaatgatccgttacccgcttgagtacttcgagaagcctagtatcgccttggaatcttcgatgcgttgcgctcagcactctaccccgagtgtagcttaggctgatgagtctgggcattccccaccggtgacggtggcccaggctgcgttggcggcctacccatggctaacgccatgggacgctagttgtgaacaaggtgtgaagagcctattgagctacttaagagtcctccggcccctgaatgcggctaatcccaaccacggagcaggcgccaccaatccaggaggtagcctgtcgtaacgcgtaagtctgtggcggaaccgactactttgggtgtccgtgtttccttttatctctttaatggctgcttatggtgacaatcatagattgttatcataaagcgaattggattggccatccggtgaagtgtaaacacattatttatttgttcattggatttactccattcacccgatttactccaaatataatacatattgtattgttgataagacgttgctactaca

SEQ ID NO: 22874 - DNA, 545 bp, synthetic construct
  source 1..545: mol_type = other DNA
tgtgcccacggctgaaagtgaatgatccgttacccgcttgagtacttcgagaagcctagtatcgccttggaatcttcgatgcgttgcgctcagcactctaccccgagtgtagcttaggctgatgagtctgggcattccccaccggtgacggtggcccaggctgcgttggcggcctacccatggctaacgccatgggacgctagttgtgaacaaggtgtgaagagcctattgagctacttaagagtcctccggcccctgaatgcggctaatcccaaccacggagcaggcgccaccaatccaggaggtagcctgtcgtaacgcgtaagtctgtggcggaaccgactactttgggtgtccgtgtttccttttatctctttaatggctgcttatggtgacaatcatagattgttatcataaagcgaattggattggccatccggtgaagtgtaaacacattatttatttgttcattggatttactccattcacccgatttactccaaatataatacatattgtattgttgataagacgttgctactaca

SEQ ID NO: 22875 - DNA, 695 bp, synthetic construct
  source 1..695: mol_type = other DNA
gcactccggtattacggtacccttgtgcgcctgtttttatactcccttccccgtaacttagaagcacaaaaccaagttcaatagaagggggtacaaaccagtaccaccacgaacaagcacttctgtttccccggtgacgttgtatagactgctcacgcggttgaaagcgacgaatccgttatccgcttgtgtacttcgagaagcctagtaccaccttggaatcttcgacgcgttgcgctcggcactctaccccagagtgtagcttaggctgatgagtctgggcattcctcatcggcgacgatggcccaggctgcgttggcggcctacctatggctaacgccataggacgctagttgtgaacaaggtgtgaagagcctattgagctacacaagagtcctccggcccctgaatgcggctaatcctaaccatggagcaggagatcacaaaccagtggtattcctgtcgtaatgcgcaagtccgtggcggaaccgactactttgggtgtccgtgtttccttttatttttatcatggctgcttatggtgacaatcattgattgttatcataaagcgaattggattggccatccggtgaaaataagatttattatttacttgtttgttggattcactccgctaaacacattcactccaggtatcatctctatagtgattgaaattaggcaattacatcaca

SEQ ID NO: 22876 - DNA, 645 bp, synthetic construct
  source 1..645: mol_type = other DNA
ccgtaacttagaagcacaaaaccaagttcaatagaagggggtacaaaccagtaccaccacgaacaagcacttctgtttccccggtgacgttgtatagactgctcacgcggttgaaagcgacgaatccgttatccgcttgtgtacttcgagaagcctagtaccaccttggaatcttcgacgcgttgcgctcggcactctaccccagagtgtagcttaggctgatgagtctgggcattcctcatcggcgacgatggcccaggctgcgttggcggcctacctatggctaacgccataggacgctagttgtgaacaaggtgtgaagagcctattgagctacacaagagtcctccggcccctgaatgcggctaatcctaaccatggagcaggagatcacaaaccagtggtattcctgtcgtaatgcgcaagtccgtggcggaaccgactactttgggtgtccgtgtttccttttatttttatcatggctgcttatggtgacaatcattgattgttatcataaagcgaattggattggccatccggtgaaaataagatttattatttacttgtttgttggattcactccgctaaacacattcactccaggtatcatctctatagtgattgaaattaggcaattacatcaca

SEQ ID NO: 22877 - DNA, 595 bp, synthetic construct
  source 1..595: mol_type = other DNA
gtaccaccacgaacaagcacttctgtttccccggtgacgttgtatagactgctcacgcggttgaaagcgacgaatccgttatccgcttgtgtacttcgagaagcctagtaccaccttggaatcttcgacgcgttgcgctcggcactctaccccagagtgtagcttaggctgatgagtctgggcattcctcatcggcgacgatggcccaggctgcgttggcggcctacctatggctaacgccataggacgctagttgtgaacaaggtgtgaagagcctattgagctacacaagagtcctccggcccctgaatgcggctaatcctaaccatggagcaggagatcacaaaccagtggtattcctgtcgtaatgcgcaagtccgtggcggaaccgactactttgggtgtccgtgtttccttttatttttatcatggctgcttatggtgacaatcattgattgttatcataaagcgaattggattggccatccggtgaaaataagatttattatttacttgtttgttggattcactccgctaaacacattcactccaggtatcatctctatagtgattgaaattaggcaattacatcaca

SEQ ID NO: 22878 - DNA, 545 bp, synthetic construct
  source 1..545: mol_type = other DNA
gctcacgcggttgaaagcgacgaatccgttatccgcttgtgtacttcgagaagcctagtaccaccttggaatcttcgacgcgttgcgctcggcactctaccccagagtgtagcttaggctgatgagtctgggcattcctcatcggcgacgatggcccaggctgcgttggcggcctacctatggctaacgccataggacgctagttgtgaacaaggtgtgaagagcctattgagctacacaagagtcctccggcccctgaatgcggctaatcctaaccatggagcaggagatcacaaaccagtggtattcctgtcgtaatgcgcaagtccgtggcggaaccgactactttgggtgtccgtgtttccttttatttttatcatggctgcttatggtgacaatcattgattgttatcataaagcgaattggattggccatccggtgaaaataagatttattatttacttgtttgttggattcactccgctaaacacattcactccaggtatcatctctatagtgattgaaattaggcaattacatcaca

SEQ ID NO: 22879 - DNA, 695 bp, synthetic construct
  source 1..695: mol_type = other DNA
gtactctggtatcacggtacctttgtacgcctgttttacatcccctcccccacgtaactttagaagcaattcaacaagttcaatagagggggtacaaaccagtatcaccacgaacaagcacttctgtttccccggtgattttacataagctgtgcccacggctgaaagtgaatgatccgttacccgctcgagtacttcgaaaagcctagtatcgctttgggatcttcgacgcgttgcgctcagcactctaccccgagtgtagcttaggctgatgagtctgggcattccccatcggcgacgatggcccaggctgcgttggcggcctacccatggctaacgccatgggacgctagttgtgaacaaggtgtgaagagcctattgagctactcgagagtcctccggcccctgaatgcggctaatcccaaccacggatcaggtgcctccaacccaggaggtggcctgtcgtaacgcgcaagtctgtggcggaaccgactactttgggtgtccgtgtttccttttatcttttaaatggctgcttatggtgacaatcatagattgttatcataaagcgaattggattggccatccggtgaaatacaaacacattatttacttgtttgttggatttactccgctcacacagcttactcctaagataatatttattgtattgctggtaaggagacactattata

SEQ ID NO: 22880 - DNA, 645 bp, synthetic construct
  source 1..645: mol_type = other DNA
cacgtaactttagaagcaattcaacaagttcaatagagggggtacaaaccagtatcaccacgaacaagcacttctgtttccccggtgattttacataagctgtgcccacggctgaaagtgaatgatccgttacccgctcgagtacttcgaaaagcctagtatcgctttgggatcttcgacgcgttgcgctcagcactctaccccgagtgtagcttaggctgatgagtctgggcattccccatcggcgacgatggcccaggctgcgttggcggcctacccatggctaacgccatgggacgctagttgtgaacaaggtgtgaagagcctattgagctactcgagagtcctccggcccctgaatgcggctaatcccaaccacggatcaggtgcctccaacccaggaggtggcctgtcgtaacgcgcaagtctgtggcggaaccgactactttgggtgtccgtgtttccttttatcttttaaatggctgcttatggtgacaatcatagattgttatcataaagcgaattggattggccatccggtgaaatacaaacacattatttacttgtttgttggatttactccgctcacacagcttactcctaagataatatttattgtattgctggtaaggagacactattata

SEQ ID NO: 22881 - DNA, 595 bp, synthetic construct
  source 1..595: mol_type = other DNA
agtatcaccacgaacaagcacttctgtttccccggtgattttacataagctgtgcccacggctgaaagtgaatgatccgttacccgctcgagtacttcgaaaagcctagtatcgctttgggatcttcgacgcgttgcgctcagcactctaccccgagtgtagcttaggctgatgagtctgggcattccccatcggcgacgatggcccaggctgcgttggcggcctacccatggctaacgccatgggacgctagttgtgaacaaggtgtgaagagcctattgagctactcgagagtcctccggcccctgaatgcggctaatcccaaccacggatcaggtgcctccaacccaggaggtggcctgtcgtaacgcgcaagtctgtggcggaaccgactactttgggtgtccgtgtttccttttatcttttaaatggctgcttatggtgacaatcatagattgttatcataaagcgaattggattggccatccggtgaaatacaaacacattatttacttgtttgttggatttactccgctcacacagcttactcctaagataatatttattgtattgctggtaaggagacactattata

SEQ ID NO: 22882 - DNA, 545 bp, synthetic construct
  source 1..545: mol_type = other DNA
tgtgcccacggctgaaagtgaatgatccgttacccgctcgagtacttcgaaaagcctagtatcgctttgggatcttcgacgcgttgcgctcagcactctaccccgagtgtagcttaggctgatgagtctgggcattccccatcggcgacgatggcccaggctgcgttggcggcctacccatggctaacgccatgggacgctagttgtgaacaaggtgtgaagagcctattgagctactcgagagtcctccggcccctgaatgcggctaatcccaaccacggatcaggtgcctccaacccaggaggtggcctgtcgtaacgcgcaagtctgtggcggaaccgactactttgggtgtccgtgtttccttttatcttttaaatggctgcttatggtgacaatcatagattgttatcataaagcgaattggattggccatccggtgaaatacaaacacattatttacttgtttgttggatttactccgctcacacagcttactcctaagataatatttattgtattgctggtaaggagacactattata

SEQ ID NO: 22883 - DNA, 695 bp, synthetic construct
  source 1..695: mol_type = other DNA
gcactctggtattgcggtaccttagtgcgcctgttttatatacccatcccccaaacgtgatttagatgcatgttaacgaagaccaatagtaagcgcagcacaccagctgtgttccggtcaagcacttctgttaccccggactgagtatcaataagctactcacgtggctgaaggagaaaacgttcgttacccggccaattacttcgagaaacccagtaacaccatgaaggttgcgcagtgtttcgctccgcacaaccccagtgtagatcaggtcgatgagtcaccgcattccccacgggtgaccgtggcggtggctgcactggcggcctgcccatggggtaacccatgggacgcttcaatactgacatggtgcgaagagtctattgagctaattggtagtcctccggcccctgaatgcggctaatcctaactgcggagcagatacccacacgccagtgggcagtctgtcgtaacgggcaactctgcagcggaaccgactactttgggtgtccgtgtttctctttatccttatactggctgcttatggtgacaattgggagattgttaccatatagctattggattggccatccagtgacaaatagagcaatcgtgtatttgtttgttggtttcgtaccattaaattacaaggtcataaacaccctcaatcttattatagcattcaatacaacaaa

SEQ ID NO: 22884 - DNA, 645 bp, synthetic construct
  source 1..645: mol_type = other DNA
ccaaacgtgatttagatgcatgttaacgaagaccaatagtaagcgcagcacaccagctgtgttccggtcaagcacttctgttaccccggactgagtatcaataagctactcacgtggctgaaggagaaaacgttcgttacccggccaattacttcgagaaacccagtaacaccatgaaggttgcgcagtgtttcgctccgcacaaccccagtgtagatcaggtcgatgagtcaccgcattccccacgggtgaccgtggcggtggctgcactggcggcctgcccatggggtaacccatgggacgcttcaatactgacatggtgcgaagagtctattgagctaattggtagtcctccggcccctgaatgcggctaatcctaactgcggagcagatacccacacgccagtgggcagtctgtcgtaacgggcaactctgcagcggaaccgactactttgggtgtccgtgtttctctttatccttatactggctgcttatggtgacaattgggagattgttaccatatagctattggattggccatccagtgacaaatagagcaatcgtgtatttgtttgttggtttcgtaccattaaattacaaggtcataaacaccctcaatcttattatagcattcaatacaacaaa

SEQ ID NO: 22885 - DNA, 595 bp, synthetic construct
  source 1..595: mol_type = other DNA
caccagctgtgttccggtcaagcacttctgttaccccggactgagtatcaataagctactcacgtggctgaaggagaaaacgttcgttacccggccaattacttcgagaaacccagtaacaccatgaaggttgcgcagtgtttcgctccgcacaaccccagtgtagatcaggtcgatgagtcaccgcattccccacgggtgaccgtggcggtggctgcactggcggcctgcccatggggtaacccatgggacgcttcaatactgacatggtgcgaagagtctattgagctaattggtagtcctccggcccctgaatgcggctaatcctaactgcggagcagatacccacacgccagtgggcagtctgtcgtaacgggcaactctgcagcggaaccgactactttgggtgtccgtgtttctctttatccttatactggctgcttatggtgacaattgggagattgttaccatatagctattggattggccatccagtgacaaatagagcaatcgtgtatttgtttgttggtttcgtaccattaaattacaaggtcataaacaccctcaatcttattatagcattcaatacaacaaa

SEQ ID NO: 22886 - DNA, 545 bp, synthetic construct
  source 1..545: mol_type = other DNA
ataagctactcacgtggctgaaggagaaaacgttcgttacccggccaattacttcgagaaacccagtaacaccatgaaggttgcgcagtgtttcgctccgcacaaccccagtgtagatcaggtcgatgagtcaccgcattccccacgggtgaccgtggcggtggctgcactggcggcctgcccatggggtaacccatgggacgcttcaatactgacatggtgcgaagagtctattgagctaattggtagtcctccggcccctgaatgcggctaatcctaactgcggagcagatacccacacgccagtgggcagtctgtcgtaacgggcaactctgcagcggaaccgactactttgggtgtccgtgtttctctttatccttatactggctgcttatggtgacaattgggagattgttaccatatagctattggattggccatccagtgacaaatagagcaatcgtgtatttgtttgttggtttcgtaccattaaattacaaggtcataaacaccctcaatcttattatagcattcaatacaacaaa

SEQ ID NO: 22887 - DNA, 695 bp, synthetic construct
  source 1..695: mol_type = other DNA
gcacactggtatcacggtacctttgtgcgcctgttttatccaccctttccccgaacgaaacttagaagtttgaattaaacggtcaataggaaacccagtacaccaactgggctgtgaccaagcacttctgtgaccccggaccgagtatcaataagctactcacgtggctgaaggagaaaacgttcgttacccggccaattacttcgagaaacttagtaccaccatgaaagttgcgcagcgtttcgctccgcacgaccccagtgtagatcaggctgatgagtcaccgcgtaccccacgggtgaccgtggcggtggctgcgttggcggcctgcccttggggcaacccaagggacgcttcaatactgacatggtgcgaagagtctattgagctaattggtagtcctccggcccctgaatgcggctaatcccaactgcggagcagatacccacataccagtgggcagtctgtcgtaatgggcaactctgcagcggaaccgactactttgggtgtccgtgtttcctttatttcttacactggctgcttatggtgacaattgagagattgttgccatatagctattggattggccatccggtgtctaatagagcaattatctacctttttgttggatttattccacttaactataaagcactcaaaacacttatatacattgtagatctcaacacagcaaa

SEQ ID NO: 22888 - DNA, 645 bp, synthetic construct
  source 1..645: mol_type = other DNA
ccgaacgaaacttagaagtttgaattaaacggtcaataggaaacccagtacaccaactgggctgtgaccaagcacttctgtgaccccggaccgagtatcaataagctactcacgtggctgaaggagaaaacgttcgttacccggccaattacttcgagaaacttagtaccaccatgaaagttgcgcagcgtttcgctccgcacgaccccagtgtagatcaggctgatgagtcaccgcgtaccccacgggtgaccgtggcggtggctgcgttggcggcctgcccttggggcaacccaagggacgcttcaatactgacatggtgcgaagagtctattgagctaattggtagtcctccggcccctgaatgcggctaatcccaactgcggagcagatacccacataccagtgggcagtctgtcgtaatgggcaactctgcagcggaaccgactactttgggtgtccgtgtttcctttatttcttacactggctgcttatggtgacaattgagagattgttgccatatagctattggattggccatccggtgtctaatagagcaattatctacctttttgttggatttattccacttaactataaagcactcaaaacacttatatacattgtagatctcaacacagcaaa

SEQ ID NO: 22889 - DNA, 595 bp, synthetic construct
  source 1..595: mol_type = other DNA
caccaactgggctgtgaccaagcacttctgtgaccccggaccgagtatcaataagctactcacgtggctgaaggagaaaacgttcgttacccggccaattacttcgagaaacttagtaccaccatgaaagttgcgcagcgtttcgctccgcacgaccccagtgtagatcaggctgatgagtcaccgcgtaccccacgggtgaccgtggcggtggctgcgttggcggcctgcccttggggcaacccaagggacgcttcaatactgacatggtgcgaagagtctattgagctaattggtagtcctccggcccctgaatgcggctaatcccaactgcggagcagatacccacataccagtgggcagtctgtcgtaatgggcaactctgcagcggaaccgactactttgggtgtccgtgtttcctttatttcttacactggctgcttatggtgacaattgagagattgttgccatatagctattggattggccatccggtgtctaatagagcaattatctacctttttgttggatttattccacttaactataaagcactcaaaacacttatatacattgtagatctcaacacagcaaa

SEQ ID NO: 22890 - DNA, 545 bp, synthetic construct
  source 1..545: mol_type = other DNA
ataagctactcacgtggctgaaggagaaaacgttcgttacccggccaattacttcgagaaacttagtaccaccatgaaagttgcgcagcgtttcgctccgcacgaccccagtgtagatcaggctgatgagtcaccgcgtaccccacgggtgaccgtggcggtggctgcgttggcggcctgcccttggggcaacccaagggacgcttcaatactgacatggtgcgaagagtctattgagctaattggtagtcctccggcccctgaatgcggctaatcccaactgcggagcagatacccacataccagtgggcagtctgtcgtaatgggcaactctgcagcggaaccgactactttgggtgtccgtgtttcctttatttcttacactggctgcttatggtgacaattgagagattgttgccatatagctattggattggccatccggtgtctaatagagcaattatctacctttttgttggatttattccacttaactataaagcactcaaaacacttatatacattgtagatctcaacacagcaaa

SEQ ID NO: 22891 - DNA, 695 bp, synthetic construct
  source 1..695: mol_type = other DNA
gcacactggtatcacggtacctttgtgcgcctgttttatacacccccccctacatcgtaatttagaagtccaagccaaacggtcaatagacaacccagtatgccaactgggtcccgaccaagcacttctgttgccccggaccgagtatcaataagctgcttgcgcggctgaaggagaaagcgttcgttacccggccaattacttcgagaaacccagtaacaccatggaagttgcgtggcgtttcgctccgcacaaccccagtgtagatcaggtcgatgagtcaccgcaaccctcacgggcgaccgtggcggtggctgcgttggcggcctgcccatgggacaacccatgggacgcttcaataccgacatggtgcgaagagtctattgagctaattggtattcctccggcccctgaatgcggctaatcctaactgcggagcagacacccacatgccagtgggcagtctgtcgtaacgggaaactctgcagcggaaccgactactttgggtgaccgtgtttcctattatccttattctggctgcttatggtgacaattgaaagattgttaccatatagctattggattggccatccggtgtctaatagagctattatatacctctttgttggatttataccacttaacaaagtaaactaccagactctgtgctatatcattggattgaacacggtgaa

SEQ ID NO: 22892 - DNA, 645 bp, synthetic construct
  source 1..645: mol_type = other DNA
tacatcgtaatttagaagtccaagccaaacggtcaatagacaacccagtatgccaactgggtcccgaccaagcacttctgttgccccggaccgagtatcaataagctgcttgcgcggctgaaggagaaagcgttcgttacccggccaattacttcgagaaacccagtaacaccatggaagttgcgtggcgtttcgctccgcacaaccccagtgtagatcaggtcgatgagtcaccgcaaccctcacgggcgaccgtggcggtggctgcgttggcggcctgcccatgggacaacccatgggacgcttcaataccgacatggtgcgaagagtctattgagctaattggtattcctccggcccctgaatgcggctaatcctaactgcggagcagacacccacatgccagtgggcagtctgtcgtaacgggaaactctgcagcggaaccgactactttgggtgaccgtgtttcctattatccttattctggctgcttatggtgacaattgaaagattgttaccatatagctattggattggccatccggtgtctaatagagctattatatacctctttgttggatttataccacttaacaaagtaaactaccagactctgtgctatatcattggattgaacacggtgaa

SEQ ID NO: 22893 - DNA, 595 bp, synthetic construct
  source 1..595: mol_type = other DNA
tgccaactgggtcccgaccaagcacttctgttgccccggaccgagtatcaataagctgcttgcgcggctgaaggagaaagcgttcgttacccggccaattacttcgagaaacccagtaacaccatggaagttgcgtggcgtttcgctccgcacaaccccagtgtagatcaggtcgatgagtcaccgcaaccctcacgggcgaccgtggcggtggctgcgttggcggcctgcccatgggacaacccatgggacgcttcaataccgacatggtgcgaagagtctattgagctaattggtattcctccggcccctgaatgcggctaatcctaactgcggagcagacacccacatgccagtgggcagtctgtcgtaacgggaaactctgcagcggaaccgactactttgggtgaccgtgtttcctattatccttattctggctgcttatggtgacaattgaaagattgttaccatatagctattggattggccatccggtgtctaatagagctattatatacctctttgttggatttataccacttaacaaagtaaactaccagactctgtgctatatcattggattgaacacggtgaa

SEQ ID NO: 22894 - DNA, 545 bp, synthetic construct
  source 1..545: mol_type = other DNA
ataagctgcttgcgcggctgaaggagaaagcgttcgttacccggccaattacttcgagaaacccagtaacaccatggaagttgcgtggcgtttcgctccgcacaaccccagtgtagatcaggtcgatgagtcaccgcaaccctcacgggcgaccgtggcggtggctgcgttggcggcctgcccatgggacaacccatgggacgcttcaataccgacatggtgcgaagagtctattgagctaattggtattcctccggcccctgaatgcggctaatcctaactgcggagcagacacccacatgccagtgggcagtctgtcgtaacgggaaactctgcagcggaaccgactactttgggtgaccgtgtttcctattatccttattctggctgcttatggtgacaattgaaagattgttaccatatagctattggattggccatccggtgtctaatagagctattatatacctctttgttggatttataccacttaacaaagtaaactaccagactctgtgctatatcattggattgaacacggtgaa

SEQ ID NO: 22895 - DNA, 695 bp, synthetic construct
  source 1..695: mol_type = other DNA
agcacactggtattacggtacctttgtgcgcctgttttatccaccccctccccaatgtaacgtagaagcacaaaccaagtggtcaatagatggctcagtacaccaactgggcttagaccaagcacttctgttaccccggactgagtatcaataggctgctcacgcggctgaaggagaaaacgttcgttacccgaccaactacttcgagaagcctagtaccatcatgaaggatgcgcagtgtttcgttcagcacaaccccagtgtagatcaggccgatgagtcaccgcaatccccacgggtgaccgtggcggtggctgcgctggcggcctgcccatggggcaacctatgggacgcttcaatttcgacatggtgcgaagagcctattgagctagttggtagtcctccggcccctgaatgcggctaatcccaactgcggagcagacacccacaaaccagtgggcagtttgtcgtaacgggcaactctgcagcggaaccgactactttgggtgtccgtgtttccttttatctatatattggctgcttatggtgacaattgagggattgttgccatatagctattggattggccatccggtaacaaacagagctattatttacctttttgttggcttcgtgccgttgaactttaaagttattaaaaccatatacttcatcttgacactcaacacagcaaa

SEQ ID NO: 22896 - DNA, 645 bp, synthetic construct
  source 1..645: mol_type = other DNA
cccaatgtaacgtagaagcacaaaccaagtggtcaatagatggctcagtacaccaactgggcttagaccaagcacttctgttaccccggactgagtatcaataggctgctcacgcggctgaaggagaaaacgttcgttacccgaccaactacttcgagaagcctagtaccatcatgaaggatgcgcagtgtttcgttcagcacaaccccagtgtagatcaggccgatgagtcaccgcaatccccacgggtgaccgtggcggtggctgcgctggcggcctgcccatggggcaacctatgggacgcttcaatttcgacatggtgcgaagagcctattgagctagttggtagtcctccggcccctgaatgcggctaatcccaactgcggagcagacacccacaaaccagtgggcagtttgtcgtaacgggcaactctgcagcggaaccgactactttgggtgtccgtgtttccttttatctatatattggctgcttatggtgacaattgagggattgttgccatatagctattggattggccatccggtaacaaacagagctattatttacctttttgttggcttcgtgccgttgaactttaaagttattaaaaccatatacttcatcttgacactcaacacagcaaa

SEQ ID NO: 22897 - DNA, 595 bp, synthetic construct
  source 1..595: mol_type = other DNA
caccaactgggcttagaccaagcacttctgttaccccggactgagtatcaataggctgctcacgcggctgaaggagaaaacgttcgttacccgaccaactacttcgagaagcctagtaccatcatgaaggatgcgcagtgtttcgttcagcacaaccccagtgtagatcaggccgatgagtcaccgcaatccccacgggtgaccgtggcggtggctgcgctggcggcctgcccatggggcaacctatgggacgcttcaatttcgacatggtgcgaagagcctattgagctagttggtagtcctccggcccctgaatgcggctaatcccaactgcggagcagacacccacaaaccagtgggcagtttgtcgtaacgggcaactctgcagcggaaccgactactttgggtgtccgtgtttccttttatctatatattggctgcttatggtgacaattgagggattgttgccatatagctattggattggccatccggtaacaaacagagctattatttacctttttgttggcttcgtgccgttgaactttaaagttattaaaaccatatacttcatcttgacactcaacacagcaaa

SEQ ID NO: 22898 - DNA, 545 bp, synthetic construct
  source 1..545: mol_type = other DNA
ataggctgctcacgcggctgaaggagaaaacgttcgttacccgaccaactacttcgagaagcctagtaccatcatgaaggatgcgcagtgtttcgttcagcacaaccccagtgtagatcaggccgatgagtcaccgcaatccccacgggtgaccgtggcggtggctgcgctggcggcctgcccatggggcaacctatgggacgcttcaatttcgacatggtgcgaagagcctattgagctagttggtagtcctccggcccctgaatgcggctaatcccaactgcggagcagacacccacaaaccagtgggcagtttgtcgtaacgggcaactctgcagcggaaccgactactttgggtgtccgtgtttccttttatctatatattggctgcttatggtgacaattgagggattgttgccatatagctattggattggccatccggtaacaaacagagctattatttacctttttgttggcttcgtgccgttgaactttaaagttattaaaaccatatacttcatcttgacactcaacacagcaaa

SEQ ID NO: 22899 - DNA, 695 bp, synthetic construct
  source 1..695: mol_type = other DNA
agcacactggtattgcggtacccttgtgcgcctgttttatccaccctccccaaccgtaatttagaagcacgaacaacgtggtcaacaggcaacccagtataccaactgggtctcgaccaagcacttctgtcaccccggactgagtatcaataagctgctcgcgtggctgaaggagaaaacgttcgttacccggccaattacttcgagaaacctagtatcaccatggaagttgcgcagtgtttcgctccgcacaaccccagtgtagatcaggtcgatgagtcaccgcaaccctcacgggtgaccgtggcggtggctgcgctggcggcctgcccatggggcaacccatgggacgcttcaatactgacatggtgcgaagagtctattgagctaattggtaatcctccggcccctgaatgcggctaatcctaactgcggagcagatatccacacaccagtggacagtctgtcgtaatgggcaactctgcagcggaaccgactactttgggtgtccgtgtttccttttattctttttattggctgcttatggtgacaattgagagattgttaccatatagctattggattggccatccggtgagcaacaggtcaattgtattcctctttgttggatttgtgccattaaactataataactacaacaccctgctttacattatccatttaaacacacagaa

SEQ ID NO: 22900 - DNA, 645 bp, synthetic construct
  source 1..645: mol_type = other DNA
caaccgtaatttagaagcacgaacaacgtggtcaacaggcaacccagtataccaactgggtctcgaccaagcacttctgtcaccccggactgagtatcaataagctgctcgcgtggctgaaggagaaaacgttcgttacccggccaattacttcgagaaacctagtatcaccatggaagttgcgcagtgtttcgctccgcacaaccccagtgtagatcaggtcgatgagtcaccgcaaccctcacgggtgaccgtggcggtggctgcgctggcggcctgcccatggggcaacccatgggacgcttcaatactgacatggtgcgaagagtctattgagctaattggtaatcctccggcccctgaatgcggctaatcctaactgcggagcagatatccacacaccagtggacagtctgtcgtaatgggcaactctgcagcggaaccgactactttgggtgtccgtgtttccttttattctttttattggctgcttatggtgacaattgagagattgttaccatatagctattggattggccatccggtgagcaacaggtcaattgtattcctctttgttggatttgtgccattaaactataataactacaacaccctgctttacattatccatttaaacacacagaa

SEQ ID NO: 22901 - DNA, 595 bp, synthetic construct
  source 1..595: mol_type = other DNA
accaactgggtctcgaccaagcacttctgtcaccccggactgagtatcaataagctgctcgcgtggctgaaggagaaaacgttcgttacccggccaattacttcgagaaacctagtatcaccatggaagttgcgcagtgtttcgctccgcacaaccccagtgtagatcaggtcgatgagtcaccgcaaccctcacgggtgaccgtggcggtggctgcgctggcggcctgcccatggggcaacccatgggacgcttcaatactgacatggtgcgaagagtctattgagctaattggtaatcctccggcccctgaatgcggctaatcctaactgcggagcagatatccacacaccagtggacagtctgtcgtaatgggcaactctgcagcggaaccgactactttgggtgtccgtgtttccttttattctttttattggctgcttatggtgacaattgagagattgttaccatatagctattggattggccatccggtgagcaacaggtcaattgtattcctctttgttggatttgtgccattaaactataataactacaacaccctgctttacattatccatttaaacacacagaa

SEQ ID NO: 22902 - DNA, 545 bp, synthetic construct
  source 1..545: mol_type = other DNA
taagctgctcgcgtggctgaaggagaaaacgttcgttacccggccaattacttcgagaaacctagtatcaccatggaagttgcgcagtgtttcgctccgcacaaccccagtgtagatcaggtcgatgagtcaccgcaaccctcacgggtgaccgtggcggtggctgcgctggcggcctgcccatggggcaacccatgggacgcttcaatactgacatggtgcgaagagtctattgagctaattggtaatcctccggcccctgaatgcggctaatcctaactgcggagcagatatccacacaccagtggacagtctgtcgtaatgggcaactctgcagcggaaccgactactttgggtgtccgtgtttccttttattctttttattggctgcttatggtgacaattgagagattgttaccatatagctattggattggccatccggtgagcaacaggtcaattgtattcctctttgttggatttgtgccattaaactataataactacaacaccctgctttacattatccatttaaacacacagaa

SEQ ID NO: 22903 - DNA, 695 bp, synthetic construct
  source 1..695: mol_type = other DNA
ggtatcacggtacccttgtacgcctgttttatactccctttcccccgcaacttagaagattatgagaatccacgttcaacaggaagggggtacaaaccagtaccaccacgaacaagcacttctgtttccccggtgaggttgtatagactgtacccacggttgaagacgactgatccgttacccgctctagtacttcgagaagcttagtaacaccttggaatcatcgatgcgttgcgttcaacactcaaccccagagtgtagcttaggctgatgagtctggacaatcctcaccggtgacggtggtccaggctgcgctggcggcctacctgtggtccaaaaccacaggacgctagatgtgaacaaggtgcgaagagcctattgagctactagagagtcctccggcccctgaatgcggctaatcccaaccacgaagcaagtgctcacgatccagtgagtggcttgtcgtaacgcgtaagttcgtggcggaaccgactactttgggtgtccgtgtttcctttttaactttatatggctgcttatggtgacaatcattgattgttatcataaagcgatttggattggccatccagtgagagcgagaacaactacttatttgctcgttggatttgctccttcgacaagctacattttagatatcattctcattgtattcttgatcagaaagcaatatcata

SEQ ID NO: 22904 - DNA, 645 bp, synthetic construct
  source 1..645: mol_type = other DNA
cttagaagattatgagaatccacgttcaacaggaagggggtacaaaccagtaccaccacgaacaagcacttctgtttccccggtgaggttgtatagactgtacccacggttgaagacgactgatccgttacccgctctagtacttcgagaagcttagtaacaccttggaatcatcgatgcgttgcgttcaacactcaaccccagagtgtagcttaggctgatgagtctggacaatcctcaccggtgacggtggtccaggctgcgctggcggcctacctgtggtccaaaaccacaggacgctagatgtgaacaaggtgcgaagagcctattgagctactagagagtcctccggcccctgaatgcggctaatcccaaccacgaagcaagtgctcacgatccagtgagtggcttgtcgtaacgcgtaagttcgtggcggaaccgactactttgggtgtccgtgtttcctttttaactttatatggctgcttatggtgacaatcattgattgttatcataaagcgatttggattggccatccagtgagagcgagaacaactacttatttgctcgttggatttgctccttcgacaagctacattttagatatcattctcattgtattcttgatcagaaagcaatatcata

SEQ ID NO: 22905 - DNA, 595 bp, synthetic construct
  source 1..595: mol_type = other DNA
taccaccacgaacaagcacttctgtttccccggtgaggttgtatagactgtacccacggttgaagacgactgatccgttacccgctctagtacttcgagaagcttagtaacaccttggaatcatcgatgcgttgcgttcaacactcaaccccagagtgtagcttaggctgatgagtctggacaatcctcaccggtgacggtggtccaggctgcgctggcggcctacctgtggtccaaaaccacaggacgctagatgtgaacaaggtgcgaagagcctattgagctactagagagtcctccggcccctgaatgcggctaatcccaaccacgaagcaagtgctcacgatccagtgagtggcttgtcgtaacgcgtaagttcgtggcggaaccgactactttgggtgtccgtgtttcctttttaactttatatggctgcttatggtgacaatcattgattgttatcataaagcgatttggattggccatccagtgagagcgagaacaactacttatttgctcgttggatttgctccttcgacaagctacattttagatatcattctcattgtattcttgatcagaaagcaatatcata

SEQ ID NO: 22906 - DNA, 545 bp, synthetic construct
  source 1..545: mol_type = other DNA
tacccacggttgaagacgactgatccgttacccgctctagtacttcgagaagcttagtaacaccttggaatcatcgatgcgttgcgttcaacactcaaccccagagtgtagcttaggctgatgagtctggacaatcctcaccggtgacggtggtccaggctgcgctggcggcctacctgtggtccaaaaccacaggacgctagatgtgaacaaggtgcgaagagcctattgagctactagagagtcctccggcccctgaatgcggctaatcccaaccacgaagcaagtgctcacgatccagtgagtggcttgtcgtaacgcgtaagttcgtggcggaaccgactactttgggtgtccgtgtttcctttttaactttatatggctgcttatggtgacaatcattgattgttatcataaagcgatttggattggccatccagtgagagcgagaacaactacttatttgctcgttggatttgctccttcgacaagctacattttagatatcattctcattgtattcttgatcagaaagcaatatcata

SEQ ID NO: 22907 - DNA, 696 bp, synthetic construct
  source 1..696: mol_type = other DNA
gcactctgattccacggaatccttgtgcgcctgttttatatcccctccccaagttgcaacttagaagcattgcactacaatgatcagtagcaggcgtggcgctccagccatgtctcgatcaagcacttctgtttccccggaccgagtatcaatagactgctaacgcggttgaaggagaaaacgttcgttatccggctaactacttcgagaaacctagtagcaccatcgaagctgcggggcgtttcgctcagcacttcccccgtgtagatcaggtcgatgagtcactgcaatcctcacgggcgaccgtggcagtggctgcgttggcggcctgcctatggggcaacccataggacgcttcaaagtggacatggtgtgaagagtctattgagctagttagtagtcctccggcccctgaatgcggctaatcctaactgcggagcacataccttcaatccaggaggtagtgtgtcgtaacgggcaactctgcagcggaaccgactactttgggtgtccgtgtttccttttattctcttattggctgcttatggtgacaattgaagaattgttaccatatagctattggattggccatccagtgtctaacagagcaattgtgtacttatttgttggttttgttcctttgtctcacacgtcccttagtactttgtattacattataaaactgaattcggagag

SEQ ID NO: 22908 - DNA, 646 bp, synthetic construct
  source 1..646: mol_type = other DNA
aagttgcaacttagaagcattgcactacaatgatcagtagcaggcgtggcgctccagccatgtctcgatcaagcacttctgtttccccggaccgagtatcaatagactgctaacgcggttgaaggagaaaacgttcgttatccggctaactacttcgagaaacctagtagcaccatcgaagctgcggggcgtttcgctcagcacttcccccgtgtagatcaggtcgatgagtcactgcaatcctcacgggcgaccgtggcagtggctgcgttggcggcctgcctatggggcaacccataggacgcttcaaagtggacatggtgtgaagagtctattgagctagttagtagtcctccggcccctgaatgcggctaatcctaactgcggagcacataccttcaatccaggaggtagtgtgtcgtaacgggcaactctgcagcggaaccgactactttgggtgtccgtgtttccttttattctcttattggctgcttatggtgacaattgaagaattgttaccatatagctattggattggccatccagtgtctaacagagcaattgtgtacttatttgttggttttgttcctttgtctcacacgtcccttagtactttgtattacattataaaactgaattcggagag

SEQ ID NO: 22909 - DNA, 596 bp, synthetic construct
  source 1..596: mol_type = other DNA
gctccagccatgtctcgatcaagcacttctgtttccccggaccgagtatcaatagactgctaacgcggttgaaggagaaaacgttcgttatccggctaactacttcgagaaacctagtagcaccatcgaagctgcggggcgtttcgctcagcacttcccccgtgtagatcaggtcgatgagtcactgcaatcctcacgggcgaccgtggcagtggctgcgttggcggcctgcctatggggcaacccataggacgcttcaaagtggacatggtgtgaagagtctattgagctagttagtagtcctccggcccctgaatgcggctaatcctaactgcggagcacataccttcaatccaggaggtagtgtgtcgtaacgggcaactctgcagcggaaccgactactttgggtgtccgtgtttccttttattctcttattggctgcttatggtgacaattgaagaattgttaccatatagctattggattggccatccagtgtctaacagagcaattgtgtacttatttgttggttttgttcctttgtctcacacgtcccttagtactttgtattacattataaaactgaattcggagag

SEQ ID NO: 22910 - DNA, 546 bp, synthetic construct
  source 1..546: mol_type = other DNA
aatagactgctaacgcggttgaaggagaaaacgttcgttatccggctaactacttcgagaaacctagtagcaccatcgaagctgcggggcgtttcgctcagcacttcccccgtgtagatcaggtcgatgagtcactgcaatcctcacgggcgaccgtggcagtggctgcgttggcggcctgcctatggggcaacccataggacgcttcaaagtggacatggtgtgaagagtctattgagctagttagtagtcctccggcccctgaatgcggctaatcctaactgcggagcacataccttcaatccaggaggtagtgtgtcgtaacgggcaactctgcagcggaaccgactactttgggtgtccgtgtttccttttattctcttattggctgcttatggtgacaattgaagaattgttaccatatagctattggattggccatccagtgtctaacagagcaattgtgtacttatttgttggttttgttcctttgtctcacacgtcccttagtactttgtattacattataaaactgaattcggagag

SEQ ID NO: 22911 - DNA, 696 bp, synthetic construct
  source 1..696: mol_type = other DNA
caagcactctggtacctcggtacctttgtgcgcctgttttacaccccccccctagtgaaacttagaagcagcaaaccacgatcaatagcaggcataacgctccagttatgtcttgatcaagcacttctgtttccccggactgagtatcaatagactgctcgcgcggttgaaggagaaaacgttcgttatccggctaactacttcggaaaacctagtaacaccatgaaagttgcggagagcttcgttcagcactcccccagtgtagatcaggtcgatgagtcaccgcattccccacgggcgaccgtggcggtggctgcgttggcggcctgcccatggggtaacccatggggcgctctaatacggacatggtgtgaagagtctactgagctagttagtagtcctccggcccctgaatgcggctaatcccaactgcggagcacacgcccacaagccagcgggtagtgtgtcgtaacgggtaactctgcagcggaaccgactactttgggtgtccgtgtttccttttatctttatattggctgcttatggtgacaattaaagaattgttaccatatagctattggattggccatccggtgtgtaatagagcaattatttacctatttattggttttgtaccattaaccttgaattctgtgaccacccttaattatattttgacccttaacacagctaaac

SEQ ID NO: 22912 - DNA, 646 bp, synthetic construct
  source 1..646: mol_type = other DNA
cctagtgaaacttagaagcagcaaaccacgatcaatagcaggcataacgctccagttatgtcttgatcaagcacttctgtttccccggactgagtatcaatagactgctcgcgcggttgaaggagaaaacgttcgttatccggctaactacttcggaaaacctagtaacaccatgaaagttgcggagagcttcgttcagcactcccccagtgtagatcaggtcgatgagtcaccgcattccccacgggcgaccgtggcggtggctgcgttggcggcctgcccatggggtaacccatggggcgctctaatacggacatggtgtgaagagtctactgagctagttagtagtcctccggcccctgaatgcggctaatcccaactgcggagcacacgcccacaagccagcgggtagtgtgtcgtaacgggtaactctgcagcggaaccgactactttgggtgtccgtgtttccttttatctttatattggctgcttatggtgacaattaaagaattgttaccatatagctattggattggccatccggtgtgtaatagagcaattatttacctatttattggttttgtaccattaaccttgaattctgtgaccacccttaattatattttgacccttaacacagctaaac

SEQ ID NO: 22913 - DNA, 596 bp, synthetic construct
  source 1..596: mol_type = other DNA
tccagttatgtcttgatcaagcacttctgtttccccggactgagtatcaatagactgctcgcgcggttgaaggagaaaacgttcgttatccggctaactacttcggaaaacctagtaacaccatgaaagttgcggagagcttcgttcagcactcccccagtgtagatcaggtcgatgagtcaccgcattccccacgggcgaccgtggcggtggctgcgttggcggcctgcccatggggtaacccatggggcgctctaatacggacatggtgtgaagagtctactgagctagttagtagtcctccggcccctgaatgcggctaatcccaactgcggagcacacgcccacaagccagcgggtagtgtgtcgtaacgggtaactctgcagcggaaccgactactttgggtgtccgtgtttccttttatctttatattggctgcttatggtgacaattaaagaattgttaccatatagctattggattggccatccggtgtgtaatagagcaattatttacctatttattggttttgtaccattaaccttgaattctgtgaccacccttaattatattttgacccttaacacagctaaac

SEQ ID NO: 22914 - DNA, 696 bp, synthetic construct
  source 1..696: mol_type = other DNA
cactctggttccacggaacctttgtgcgcctgttttatacccctccccaacttgtaacgtagaagcagtacctaatatcgatcaatagtaggtgtggcgcaccagccatatcttgatcaagcacttctgtctccccggaccgagtatcaatagactgctcacgcggttgaaggagaaagcgttcgttacccggctaactacttcgagaaacctagtagcaccatggaagctgcggagtgtttcgctcagcacttcccccgtgtagatcaggtcgatgagtcactgcaatcctcacgggtgaccgtggcagtggctgcgttggcggcctgcctgtggggcaacccacaggacgctctaatgtggacatggtgcgaagagtctattgagctagttagtagtcctccggcccctgaatgcggctaatcctaactgcggagcgcatgccctcaatccagagggtagtgcgtcgtaacgggcaactctgcagcggaaccgactactttgggtgtccgtgtttccttttactcttatattggctgcttatggtgacaattacggaattgttaccatatagctattggattggccatccggtgtgcaatagagctatcatttacctatttgttggatttgtaccactgtcattaaagtccataaccacactcaattatatactcactctcaatataactaaac

SEQ ID NO: 22915 - DNA, 646 bp, synthetic construct
  source 1..646: mol_type = other DNA
cttgtaacgtagaagcagtacctaatatcgatcaatagtaggtgtggcgcaccagccatatcttgatcaagcacttctgtctccccggaccgagtatcaatagactgctcacgcggttgaaggagaaagcgttcgttacccggctaactacttcgagaaacctagtagcaccatggaagctgcggagtgtttcgctcagcacttcccccgtgtagatcaggtcgatgagtcactgcaatcctcacgggtgaccgtggcagtggctgcgttggcggcctgcctgtggggcaacccacaggacgctctaatgtggacatggtgcgaagagtctattgagctagttagtagtcctccggcccctgaatgcggctaatcctaactgcggagcgcatgccctcaatccagagggtagtgcgtcgtaacgggcaactctgcagcggaaccgactactttgggtgtccgtgtttccttttactcttatattggctgcttatggtgacaattacggaattgttaccatatagctattggattggccatccggtgtgcaatagagctatcatttacctatttgttggatttgtaccactgtcattaaagtccataaccacactcaattatatactcactctcaatataactaaac

SEQ ID NO: 22916 - DNA, 596 bp, synthetic construct
  source 1..596: mol_type = other DNA
accagccatatcttgatcaagcacttctgtctccccggaccgagtatcaatagactgctcacgcggttgaaggagaaagcgttcgttacccggctaactacttcgagaaacctagtagcaccatggaagctgcggagtgtttcgctcagcacttcccccgtgtagatcaggtcgatgagtcactgcaatcctcacgggtgaccgtggcagtggctgcgttggcggcctgcctgtggggcaacccacaggacgctctaatgtggacatggtgcgaagagtctattgagctagttagtagtcctccggcccctgaatgcggctaatcctaactgcggagcgcatgccctcaatccagagggtagtgcgtcgtaacgggcaactctgcagcggaaccgactactttgggtgtccgtgtttccttttactcttatattggctgcttatggtgacaattacggaattgttaccatatagctattggattggccatccggtgtgcaatagagctatcatttacctatttgttggatttgtaccactgtcattaaagtccataaccacactcaattatatactcactctcaatataactaaac

SEQ ID NO: 22917 - DNA, 696 bp, synthetic construct
  source 1..696: mol_type = other DNA
actctgattttacgaaatccttgtgcgcctgttttatatcccttccctaattcgaaacgtagaagcaatgcgcaccactgatcaatagtaggcgtaacgcgccagttacgtcatgatcaagcatatctgttcccccggactgagtatcaatagactgcttacgcggttgaaggagaaaacgttcgttatccggctaactacttcgagaagcccagtaacaccatggaagctgcagggtgtttcgctcagcacttcccccgtgtagatcaggtcgatgagccactgcaatccccacaggtgattgtggcagtggctgcgttggcggcctgcctatggggagacccataggacgctctaatgtggacatggtgcgaagagcctattgagctagttagtagtcctccggcccctgaatgcggctaatcctaactgcggagcacatgccttcaacccagagggtagtgtgtcgtaatgggcaactctgcagcggaaccgactactttgggtgtccgtgtttctttttattcttatattggctgcttatggtgacaattacagaattgttaccatatagctattggattggccatccggtgtgtaatagagctgttatatacctatttgttggctttgtaccactaactttaaaatctataactaccctcaactttatattaaccctcaatacagttgaac

SEQ ID NO: 22918 - DNA, 646 bp, synthetic construct
  source 1..646: mol_type = other DNA
ttcgaaacgtagaagcaatgcgcaccactgatcaatagtaggcgtaacgcgccagttacgtcatgatcaagcatatctgttcccccggactgagtatcaatagactgcttacgcggttgaaggagaaaacgttcgttatccggctaactacttcgagaagcccagtaacaccatggaagctgcagggtgtttcgctcagcacttcccccgtgtagatcaggtcgatgagccactgcaatccccacaggtgattgtggcagtggctgcgttggcggcctgcctatggggagacccataggacgctctaatgtggacatggtgcgaagagcctattgagctagttagtagtcctccggcccctgaatgcggctaatcctaactgcggagcacatgccttcaacccagagggtagtgtgtcgtaatgggcaactctgcagcggaaccgactactttgggtgtccgtgtttctttttattcttatattggctgcttatggtgacaattacagaattgttaccatatagctattggattggccatccggtgtgtaatagagctgttatatacctatttgttggctttgtaccactaactttaaaatctataactaccctcaactttatattaaccctcaatacagttgaac

SEQ ID NO: 22919 - DNA, 596 bp, synthetic construct
  source 1..596: mol_type = other DNA
gccagttacgtcatgatcaagcatatctgttcccccggactgagtatcaatagactgcttacgcggttgaaggagaaaacgttcgttatccggctaactacttcgagaagcccagtaacaccatggaagctgcagggtgtttcgctcagcacttcccccgtgtagatcaggtcgatgagccactgcaatccccacaggtgattgtggcagtggctgcgttggcggcctgcctatggggagacccataggacgctctaatgtggacatggtgcgaagagcctattgagctagttagtagtcctccggcccctgaatgcggctaatcctaactgcggagcacatgccttcaacccagagggtagtgtgtcgtaatgggcaactctgcagcggaaccgactactttgggtgtccgtgtttctttttattcttatattggctgcttatggtgacaattacagaattgttaccatatagctattggattggccatccggtgtgtaatagagctgttatatacctatttgttggctttgtaccactaactttaaaatctataactaccctcaactttatattaaccctcaatacagttgaac

SEQ ID NO: 22920 - DNA, 546 bp, synthetic construct
  source 1..546: mol_type = other DNA
tagactgcttacgcggttgaaggagaaaacgttcgttatccggctaactacttcgagaagcccagtaacaccatggaagctgcagggtgtttcgctcagcacttcccccgtgtagatcaggtcgatgagccactgcaatccccacaggtgattgtggcagtggctgcgttggcggcctgcctatggggagacccataggacgctctaatgtggacatggtgcgaagagcctattgagctagttagtagtcctccggcccctgaatgcggctaatcctaactgcggagcacatgccttcaacccagagggtagtgtgtcgtaatgggcaactctgcagcggaaccgactactttgggtgtccgtgtttctttttattcttatattggctgcttatggtgacaattacagaattgttaccatatagctattggattggccatccggtgtgtaatagagctgttatatacctatttgttggctttgtaccactaactttaaaatctataactaccctcaactttatattaaccctcaatacagttgaac

SEQ ID NO: 22921 - DNA, 696 bp, synthetic construct
  source 1..696: mol_type = other DNA
cacactgactttgcggagtctttgtgcgcctgttttataacccttcccccaagtagcaacttagaagtattgcacaaccgcggccagtagtgggcgtgacgcgccagtcacgtcttggtcaagcacttctgtatccccggactgagtatcaatagactgctcgcgcggttgaaggagaaaacgttcgttatccggctaactacttcgggaaacctagtagcaccttggaagttgcagagtgtttcgctcagcactttccccgtgtagatcaggtcgatgagccactgtaaaccccacgggcgaccgtgacagtggctgcgttggcggcctgcccatggggtaacccatgggacgctctaatacagacatggtgtgaagagtctactgagctagttagtagtcctccggcccctgaatgcggctaatcctaactgcggagcacacaccctcaatccagggggcggtgtgtcgtaatgggtaactctgcagcggaaccgactactttgggtgtccgtgtttccttttattcctttactggctgcttatggtgacaattgaaaagttgttaccatatagctattggattggccatccggtgtctaacagagctattgtctacttgtttattggatacgtccctcttaatctcaaggtcattcgaactcttgattatatattgctccttaattataggaa

SEQ ID NO: 22922 - DNA, 646 bp, synthetic construct
  source 1..646: mol_type = other DNA
aagtagcaacttagaagtattgcacaaccgcggccagtagtgggcgtgacgcgccagtcacgtcttggtcaagcacttctgtatccccggactgagtatcaatagactgctcgcgcggttgaaggagaaaacgttcgttatccggctaactacttcgggaaacctagtagcaccttggaagttgcagagtgtttcgctcagcactttccccgtgtagatcaggtcgatgagccactgtaaaccccacgggcgaccgtgacagtggctgcgttggcggcctgcccatggggtaacccatgggacgctctaatacagacatggtgtgaagagtctactgagctagttagtagtcctccggcccctgaatgcggctaatcctaactgcggagcacacaccctcaatccagggggcggtgtgtcgtaatgggtaactctgcagcggaaccgactactttgggtgtccgtgtttccttttattcctttactggctgcttatggtgacaattgaaaagttgttaccatatagctattggattggccatccggtgtctaacagagctattgtctacttgtttattggatacgtccctcttaatctcaaggtcattcgaactcttgattatatattgctccttaattataggaa

SEQ ID NO: 22923 - DNA, 596 bp, synthetic construct
  source 1..596: mol_type = other DNA
gcgccagtcacgtcttggtcaagcacttctgtatccccggactgagtatcaatagactgctcgcgcggttgaaggagaaaacgttcgttatccggctaactacttcgggaaacctagtagcaccttggaagttgcagagtgtttcgctcagcactttccccgtgtagatcaggtcgatgagccactgtaaaccccacgggcgaccgtgacagtggctgcgttggcggcctgcccatggggtaacccatgggacgctctaatacagacatggtgtgaagagtctactgagctagttagtagtcctccggcccctgaatgcggctaatcctaactgcggagcacacaccctcaatccagggggcggtgtgtcgtaatgggtaactctgcagcggaaccgactactttgggtgtccgtgtttccttttattcctttactggctgcttatggtgacaattgaaaagttgttaccatatagctattggattggccatccggtgtctaacagagctattgtctacttgtttattggatacgtccctcttaatctcaaggtcattcgaactcttgattatatattgctccttaattataggaa

SEQ ID NO: 22924 - DNA, 546 bp, synthetic construct
  source 1..546: mol_type = other DNA
aatagactgctcgcgcggttgaaggagaaaacgttcgttatccggctaactacttcgggaaacctagtagcaccttggaagttgcagagtgtttcgctcagcactttccccgtgtagatcaggtcgatgagccactgtaaaccccacgggcgaccgtgacagtggctgcgttggcggcctgcccatggggtaacccatgggacgctctaatacagacatggtgtgaagagtctactgagctagttagtagtcctccggcccctgaatgcggctaatcctaactgcggagcacacaccctcaatccagggggcggtgtgtcgtaatgggtaactctgcagcggaaccgactactttgggtgtccgtgtttccttttattcctttactggctgcttatggtgacaattgaaaagttgttaccatatagctattggattggccatccggtgtctaacagagctattgtctacttgtttattggatacgtccctcttaatctcaaggtcattcgaactcttgattatatattgctccttaattataggaa

SEQ ID NO: 22925 - DNA, 696 bp, synthetic construct
  source 1..696: mol_type = other DNA
gcactctgattccgcggaatctttgtgtgcctgttttatcacccttcccccaaacttgcaacttagaagcagcacttcactgaccaatagcaggcgtggcgcaccagccatgtctaggtcaagcacttctgtttccccggactgagtatcaataggctgctcacgcggctgaaggagaaaacgttcgtcatccggctaactacttcgagaaacctagtagcaccggtgaagctgcagagtgtttcgctcagcacttcccccgtgtagatcaggtcgatgagtcactgcactccccacgggcgaccgtggcagtggctgcgctggcggcctgcctatgggtcaacccataggacgctctaatgtggacacggtgcgaagagtctattgagctagttagtagtcctccggcccctgaatgcggctaatcctaactgcggagcacatgcccccgaaccagggggtggtgtgtcgtaacgggcaactctgcagcggaaccgactactttgggtgaccgtgtttccttttgttcttattatggctgcttatggtgacaattgaagaattgttaccatatagctattggattggccatccagtgtctaacagagctatcatatacctatttgttggattcgttctattgtcatacacatcactcaatacattacattttattgtgagattaaatacaagaaa

SEQ ID NO: 22926 - DNA, 646 bp, synthetic construct
  source 1..646: mol_type = other DNA
caaacttgcaacttagaagcagcacttcactgaccaatagcaggcgtggcgcaccagccatgtctaggtcaagcacttctgtttccccggactgagtatcaataggctgctcacgcggctgaaggagaaaacgttcgtcatccggctaactacttcgagaaacctagtagcaccggtgaagctgcagagtgtttcgctcagcacttcccccgtgtagatcaggtcgatgagtcactgcactccccacgggcgaccgtggcagtggctgcgctggcggcctgcctatgggtcaacccataggacgctctaatgtggacacggtgcgaagagtctattgagctagttagtagtcctccggcccctgaatgcggctaatcctaactgcggagcacatgcccccgaaccagggggtggtgtgtcgtaacgggcaactctgcagcggaaccgactactttgggtgaccgtgtttccttttgttcttattatggctgcttatggtgacaattgaagaattgttaccatatagctattggattggccatccagtgtctaacagagctatcatatacctatttgttggattcgttctattgtcatacacatcactcaatacattacattttattgtgagattaaatacaagaaa

SEQ ID NO: 22927 - DNA, 596 bp, synthetic construct
  source 1..596: mol_type = other DNA
gcaccagccatgtctaggtcaagcacttctgtttccccggactgagtatcaataggctgctcacgcggctgaaggagaaaacgttcgtcatccggctaactacttcgagaaacctagtagcaccggtgaagctgcagagtgtttcgctcagcacttcccccgtgtagatcaggtcgatgagtcactgcactccccacgggcgaccgtggcagtggctgcgctggcggcctgcctatgggtcaacccataggacgctctaatgtggacacggtgcgaagagtctattgagctagttagtagtcctccggcccctgaatgcggctaatcctaactgcggagcacatgcccccgaaccagggggtggtgtgtcgtaacgggcaactctgcagcggaaccgactactttgggtgaccgtgtttccttttgttcttattatggctgcttatggtgacaattgaagaattgttaccatatagctattggattggccatccagtgtctaacagagctatcatatacctatttgttggattcgttctattgtcatacacatcactcaatacattacattttattgtgagattaaatacaagaaa

SEQ ID NO: 22928 - DNA, 546 bp, synthetic construct
  source 1..546: mol_type = other DNA
aataggctgctcacgcggctgaaggagaaaacgttcgtcatccggctaactacttcgagaaacctagtagcaccggtgaagctgcagagtgtttcgctcagcacttcccccgtgtagatcaggtcgatgagtcactgcactccccacgggcgaccgtggcagtggctgcgctggcggcctgcctatgggtcaacccataggacgctctaatgtggacacggtgcgaagagtctattgagctagttagtagtcctccggcccctgaatgcggctaatcctaactgcggagcacatgcccccgaaccagggggtggtgtgtcgtaacgggcaactctgcagcggaaccgactactttgggtgaccgtgtttccttttgttcttattatggctgcttatggtgacaattgaagaattgttaccatatagctattggattggccatccagtgtctaacagagctatcatatacctatttgttggattcgttctattgtcatacacatcactcaatacattacattttattgtgagattaaatacaagaaa

SEQ ID NO: 22929 - DNA, 696 bp, synthetic construct
  source 1..696: mol_type = other DNA
gcactctgattctgcggaatctttgtgcgcctgttttatcaccctctccctaaattcgtaacttagaagcaacactctactgaccaatagcgggcgtggcgcaccagccatgtctaggtcaagcacttctgtctccccggactgagtatcaataggctgctcacgcggctgaaggagaaaacgttcgtcatccggctaactacttcgagaagcctagtagcaccgttgaaactgcagagtgtttcgctcagcactttccccgtgtagatcaggtcgatgagtcactgcactccccacgggcgaccgtggcagtggctgcgttggcggcctgcctatgggtcaacccataggacgctctaatgtagacacggtgcgaagagtctatcgagctagttagtagtcctccggcccctgaatgcggctaatcctaactgcggagcacatgcccccgagccagagggtggtgtgtcgtaacgggtaactctgcagcggaaccgactactttgggtgtccgtgtttccttttattcttgatatggctgcttatggtgacaattgaagaattgttaccatatagctattggattggccatccggtgtctaacagagctattgtatacctgtttgttggatttgttccattatcacaaacatcactcaacacactacacttcattgtgagattgaacgcaagaaa

SEQ ID NO: 22930 - DNA, 646 bp, synthetic construct
  source 1..646: mol_type = other DNA
taaattcgtaacttagaagcaacactctactgaccaatagcgggcgtggcgcaccagccatgtctaggtcaagcacttctgtctccccggactgagtatcaataggctgctcacgcggctgaaggagaaaacgttcgtcatccggctaactacttcgagaagcctagtagcaccgttgaaactgcagagtgtttcgctcagcactttccccgtgtagatcaggtcgatgagtcactgcactccccacgggcgaccgtggcagtggctgcgttggcggcctgcctatgggtcaacccataggacgctctaatgtagacacggtgcgaagagtctatcgagctagttagtagtcctccggcccctgaatgcggctaatcctaactgcggagcacatgcccccgagccagagggtggtgtgtcgtaacgggtaactctgcagcggaaccgactactttgggtgtccgtgtttccttttattcttgatatggctgcttatggtgacaattgaagaattgttaccatatagctattggattggccatccggtgtctaacagagctattgtatacctgtttgttggatttgttccattatcacaaacatcactcaacacactacacttcattgtgagattgaacgcaagaaa

SEQ ID NO: 22931 - DNA, 596 bp, synthetic construct
  source 1..596: mol_type = other DNA
gcaccagccatgtctaggtcaagcacttctgtctccccggactgagtatcaataggctgctcacgcggctgaaggagaaaacgttcgtcatccggctaactacttcgagaagcctagtagcaccgttgaaactgcagagtgtttcgctcagcactttccccgtgtagatcaggtcgatgagtcactgcactccccacgggcgaccgtggcagtggctgcgttggcggcctgcctatgggtcaacccataggacgctctaatgtagacacggtgcgaagagtctatcgagctagttagtagtcctccggcccctgaatgcggctaatcctaactgcggagcacatgcccccgagccagagggtggtgtgtcgtaacgggtaactctgcagcggaaccgactactttgggtgtccgtgtttccttttattcttgatatggctgcttatggtgacaattgaagaattgttaccatatagctattggattggccatccggtgtctaacagagctattgtatacctgtttgttggatttgttccattatcacaaacatcactcaacacactacacttcattgtgagattgaacgcaagaaa

SEQ ID NO: 22932 - DNA, 546 bp, synthetic construct
  source 1..546: mol_type = other DNA
aataggctgctcacgcggctgaaggagaaaacgttcgtcatccggctaactacttcgagaagcctagtagcaccgttgaaactgcagagtgtttcgctcagcactttccccgtgtagatcaggtcgatgagtcactgcactccccacgggcgaccgtggcagtggctgcgttggcggcctgcctatgggtcaacccataggacgctctaatgtagacacggtgcgaagagtctatcgagctagttagtagtcctccggcccctgaatgcggctaatcctaactgcggagcacatgcccccgagccagagggtggtgtgtcgtaacgggtaactctgcagcggaaccgactactttgggtgtccgtgtttccttttattcttgatatggctgcttatggtgacaattgaagaattgttaccatatagctattggattggccatccggtgtctaacagagctattgtatacctgtttgttggatttgttccattatcacaaacatcactcaacacactacacttcattgtgagattgaacgcaagaaa

SEQ ID NO: 22933 - DNA, 696 bp, synthetic construct
  source 1..696: mol_type = other DNA
gtactccggtatcacggtacccttgtacgcctgttttatacccccttccccgcaacttagaagctttaaattcaagttcaatagaaggtggtacaaaccagtatcgccacgaacaagcacttctgttgccccggtgaaattgcataagctgtccccacggctgaaggcgattgatccgttacccgctcttgtacttcgagaagcctagtaccaccttggaattttcgatgcgttgcgctcagcactcaaccccagagtgtagcttaggctgatgagtctggacataccccaccggcgacggtggtccaggctgcgttggcggcctacctgtggcccaaagccacaggacgctagttatgaacaaggtgtgaagagcctattgagctacaagagagtcctccggcccctgaatgcggctaatcctaaccacggatcaggcgattgcaacccagcaattagcctgtcgtaatgcgcaagtctgtggcggaaccgactactttgggtgtccgtgtttctttttattcttacattggctgcttatggtgacaatcttagattgttatcataaagcaagttggattggccatccggtgaaagtcaaagttactatctatttatctgttggattttaccctaagaccactcatttacctgacttaattagaataattatactacttggaaattactatcaca

SEQ ID NO: 22934 - DNA, 646 bp, synthetic construct
  source 1..646: mol_type = other DNA
cgcaacttagaagctttaaattcaagttcaatagaaggtggtacaaaccagtatcgccacgaacaagcacttctgttgccccggtgaaattgcataagctgtccccacggctgaaggcgattgatccgttacccgctcttgtacttcgagaagcctagtaccaccttggaattttcgatgcgttgcgctcagcactcaaccccagagtgtagcttaggctgatgagtctggacataccccaccggcgacggtggtccaggctgcgttggcggcctacctgtggcccaaagccacaggacgctagttatgaacaaggtgtgaagagcctattgagctacaagagagtcctccggcccctgaatgcggctaatcctaaccacggatcaggcgattgcaacccagcaattagcctgtcgtaatgcgcaagtctgtggcggaaccgactactttgggtgtccgtgtttctttttattcttacattggctgcttatggtgacaatcttagattgttatcataaagcaagttggattggccatccggtgaaagtcaaagttactatctatttatctgttggattttaccctaagaccactcatttacctgacttaattagaataattatactacttggaaattactatcaca

SEQ ID NO: 22935 - DNA, 596 bp, synthetic construct
  source 1..596: mol_type = other DNA
gtatcgccacgaacaagcacttctgttgccccggtgaaattgcataagctgtccccacggctgaaggcgattgatccgttacccgctcttgtacttcgagaagcctagtaccaccttggaattttcgatgcgttgcgctcagcactcaaccccagagtgtagcttaggctgatgagtctggacataccccaccggcgacggtggtccaggctgcgttggcggcctacctgtggcccaaagccacaggacgctagttatgaacaaggtgtgaagagcctattgagctacaagagagtcctccggcccctgaatgcggctaatcctaaccacggatcaggcgattgcaacccagcaattagcctgtcgtaatgcgcaagtctgtggcggaaccgactactttgggtgtccgtgtttctttttattcttacattggctgcttatggtgacaatcttagattgttatcataaagcaagttggattggccatccggtgaaagtcaaagttactatctatttatctgttggattttaccctaagaccactcatttacctgacttaattagaataattatactacttggaaattactatcaca

SEQ ID NO: 22936 - DNA, 546 bp, synthetic construct
  source 1..546: mol_type = other DNA
gtccccacggctgaaggcgattgatccgttacccgctcttgtacttcgagaagcctagtaccaccttggaattttcgatgcgttgcgctcagcactcaaccccagagtgtagcttaggctgatgagtctggacataccccaccggcgacggtggtccaggctgcgttggcggcctacctgtggcccaaagccacaggacgctagttatgaacaaggtgtgaagagcctattgagctacaagagagtcctccggcccctgaatgcggctaatcctaaccacggatcaggcgattgcaacccagcaattagcctgtcgtaatgcgcaagtctgtggcggaaccgactactttgggtgtccgtgtttctttttattcttacattggctgcttatggtgacaatcttagattgttatcataaagcaagttggattggccatccggtgaaagtcaaagttactatctatttatctgttggattttaccctaagaccactcatttacctgacttaattagaataattatactacttggaaattactatcaca

SEQ ID NO: 22937 - DNA, 696 bp, synthetic construct
  source 1..696: mol_type = other DNA
gtacaccggtatcacggtacccttgtacgcctgttttatattcccttccccgtaacttagaagcaataaactcaagttcaatagaagggggtgcaaaccagcaccaccacgaacaagcacttctgtttccccggtgagattgcatagactgtccccacggttgaaagcgattgatccgttaaccgctcttgtacttcgagaagcctagtaccatcctggaatctacgatgcgttgcgctcagcactcaatcccagagtgtagcttaggtcgatgagtctggatactccccaccggcgacggtgatccaggctgcgttggcggcctacctgtggtccaaagccacaggacgctagtagtgaacagggtgtgaagagcctattgagctacatgagagtcctccggcccctgaatgcggctaatcccaaccacggagcaggtggctacaacccagtaactggcctgtcgtaacgcgcaagtctgtggcggaaccgactactttgggtgtccgtgtttccttttatttttataatggctgcttatggtgacaatcattgattgttatcataaagcgacttggattggccatccagcgagaatcagatcgattatttatttgtttgttggattcaccaccttatctacatacacaccaaacttaattagaatcactttattgattaggtatcattatcacg

SEQ ID NO: 22938 - DNA, 646 bp, synthetic construct
  source 1..646: mol_type = other DNA
cgtaacttagaagcaataaactcaagttcaatagaagggggtgcaaaccagcaccaccacgaacaagcacttctgtttccccggtgagattgcatagactgtccccacggttgaaagcgattgatccgttaaccgctcttgtacttcgagaagcctagtaccatcctggaatctacgatgcgttgcgctcagcactcaatcccagagtgtagcttaggtcgatgagtctggatactccccaccggcgacggtgatccaggctgcgttggcggcctacctgtggtccaaagccacaggacgctagtagtgaacagggtgtgaagagcctattgagctacatgagagtcctccggcccctgaatgcggctaatcccaaccacggagcaggtggctacaacccagtaactggcctgtcgtaacgcgcaagtctgtggcggaaccgactactttgggtgtccgtgtttccttttatttttataatggctgcttatggtgacaatcattgattgttatcataaagcgacttggattggccatccagcgagaatcagatcgattatttatttgtttgttggattcaccaccttatctacatacacaccaaacttaattagaatcactttattgattaggtatcattatcacg

SEQ ID NO: 22939 - DNA, 596 bp, synthetic construct
  source 1..596: mol_type = other DNA
gcaccaccacgaacaagcacttctgtttccccggtgagattgcatagactgtccccacggttgaaagcgattgatccgttaaccgctcttgtacttcgagaagcctagtaccatcctggaatctacgatgcgttgcgctcagcactcaatcccagagtgtagcttaggtcgatgagtctggatactccccaccggcgacggtgatccaggctgcgttggcggcctacctgtggtccaaagccacaggacgctagtagtgaacagggtgtgaagagcctattgagctacatgagagtcctccggcccctgaatgcggctaatcccaaccacggagcaggtggctacaacccagtaactggcctgtcgtaacgcgcaagtctgtggcggaaccgactactttgggtgtccgtgtttccttttatttttataatggctgcttatggtgacaatcattgattgttatcataaagcgacttggattggccatccagcgagaatcagatcgattatttatttgtttgttggattcaccaccttatctacatacacaccaaacttaattagaatcactttattgattaggtatcattatcacg

SEQ ID NO: 22940 - DNA, 546 bp, synthetic construct
  source 1..546: mol_type = other DNA
gtccccacggttgaaagcgattgatccgttaaccgctcttgtacttcgagaagcctagtaccatcctggaatctacgatgcgttgcgctcagcactcaatcccagagtgtagcttaggtcgatgagtctggatactccccaccggcgacggtgatccaggctgcgttggcggcctacctgtggtccaaagccacaggacgctagtagtgaacagggtgtgaagagcctattgagctacatgagagtcctccggcccctgaatgcggctaatcccaaccacggagcaggtggctacaacccagtaactggcctgtcgtaacgcgcaagtctgtggcggaaccgactactttgggtgtccgtgtttccttttatttttataatggctgcttatggtgacaatcattgattgttatcataaagcgacttggattggccatccagcgagaatcagatcgattatttatttgtttgttggattcaccaccttatctacatacacaccaaacttaattagaatcactttattgattaggtatcattatcacg

SEQ ID NO: 22941 - DNA, 696 bp, synthetic construct
  source 1..696: mol_type = other DNA
gtactccggtatcacggtacccttgtacgcctgttttatactccctcccccgtaacttagaagcaatcaaatcaagttcaataggagggggtacaaaccagtaccaccacgaacgagcacttctgtttccccggtgaagttgcatagactgttaccacggttgaaagcgaccgatccgttatccgctcatgtacttcgagaagcctagtacctccttggaatcttcgatgcgttgcgctcagcactcaaccccggagtgtagcttaggctgatgagtctggacagccctcaccggcgacggtggtccaggctgcgttggcggcctacctgtggcccaaagccacaggacgctagttgtgaacaaggtgtgaagagcctattgagctacatgagagtcctccggcccctgaatgcggctaatcctaaccacggagcaggcgatcgcaaaccagcaattagcctgtcgtaacgcgaaagtctgtggcggaaccgactactttgggtgaccgtgtttctcttatttttattcatggctgcttatggtgacaatcatagattgttatcataaagcgagttggattggccatccggtaaaagtcaagtatatcatttacttgtttgtaggatttattcctttgaacgtccatttactcaatcttatcagagtcacattactagtaagatctcactatcaca

SEQ ID NO: 22942 - DNA, 646 bp, synthetic construct
  source 1..646: mol_type = other DNA
cgtaacttagaagcaatcaaatcaagttcaataggagggggtacaaaccagtaccaccacgaacgagcacttctgtttccccggtgaagttgcatagactgttaccacggttgaaagcgaccgatccgttatccgctcatgtacttcgagaagcctagtacctccttggaatcttcgatgcgttgcgctcagcactcaaccccggagtgtagcttaggctgatgagtctggacagccctcaccggcgacggtggtccaggctgcgttggcggcctacctgtggcccaaagccacaggacgctagttgtgaacaaggtgtgaagagcctattgagctacatgagagtcctccggcccctgaatgcggctaatcctaaccacggagcaggcgatcgcaaaccagcaattagcctgtcgtaacgcgaaagtctgtggcggaaccgactactttgggtgaccgtgtttctcttatttttattcatggctgcttatggtgacaatcatagattgttatcataaagcgagttggattggccatccggtaaaagtcaagtatatcatttacttgtttgtaggatttattcctttgaacgtccatttactcaatcttatcagagtcacattactagtaagatctcactatcaca

SEQ ID NO: 22943 - DNA, 596 bp, synthetic construct
  source 1..596: mol_type = other DNA
gtaccaccacgaacgagcacttctgtttccccggtgaagttgcatagactgttaccacggttgaaagcgaccgatccgttatccgctcatgtacttcgagaagcctagtacctccttggaatcttcgatgcgttgcgctcagcactcaaccccggagtgtagcttaggctgatgagtctggacagccctcaccggcgacggtggtccaggctgcgttggcggcctacctgtggcccaaagccacaggacgctagttgtgaacaaggtgtgaagagcctattgagctacatgagagtcctccggcccctgaatgcggctaatcctaaccacggagcaggcgatcgcaaaccagcaattagcctgtcgtaacgcgaaagtctgtggcggaaccgactactttgggtgaccgtgtttctcttatttttattcatggctgcttatggtgacaatcatagattgttatcataaagcgagttggattggccatccggtaaaagtcaagtatatcatttacttgtttgtaggatttattcctttgaacgtccatttactcaatcttatcagagtcacattactagtaagatctcactatcaca

SEQ ID NO: 22944 - DNA, 546 bp, synthetic construct
  source 1..546: mol_type = other DNA
gttaccacggttgaaagcgaccgatccgttatccgctcatgtacttcgagaagcctagtacctccttggaatcttcgatgcgttgcgctcagcactcaaccccggagtgtagcttaggctgatgagtctggacagccctcaccggcgacggtggtccaggctgcgttggcggcctacctgtggcccaaagccacaggacgctagttgtgaacaaggtgtgaagagcctattgagctacatgagagtcctccggcccctgaatgcggctaatcctaaccacggagcaggcgatcgcaaaccagcaattagcctgtcgtaacgcgaaagtctgtggcggaaccgactactttgggtgaccgtgtttctcttatttttattcatggctgcttatggtgacaatcatagattgttatcataaagcgagttggattggccatccggtaaaagtcaagtatatcatttacttgtttgtaggatttattcctttgaacgtccatttactcaatcttatcagagtcacattactagtaagatctcactatcaca

SEQ ID NO: 22945 - DNA, 696 bp, synthetic construct
  source 1..696: mol_type = other DNA
gtactccggtattacggtacccttgtacgcctgttttatacccccttcccccgcaacttagattcaaacaaacacaagttcaataggagggggtacaaaccagtaccaccacgaacaagcacttctgtttccccggtgaggttgtatagactgttaccacggttgaaagcgactgatccgttatccgccttagtacttcgagaagcctagtatcaccttggaatctccgatgcgttgcgctcagcaatgtacccccattgtagcttaggccgatgagtctgggcattccccaccggcgacggtggcccaggctgcgttggcggcctacctatggtgaaaaccataggacgctagttgtgaacaaggtgcgaagagcctattgagctactaaggagtcctccggcccctgaatgcggctaatcccaaccacggagcaggtagttgcaaaccagcaaccagcctgtcgtaatgcgcaagtctgtggcggaaccgactactttgggtgtccgtgtttccttttattcttataatggctgcttatggtgacaatcatagattgttatcataaagcgaattggattggccatccggtgagaatcagatcgatcatttacctgtttgtcggatttaccccattggcatcgcacacgagtgacctaatcagaatagtgttgttgataaggtactactatcaca

SEQ ID NO: 22946 - DNA, 646 bp, synthetic construct
  source 1..646: mol_type = other DNA
ccgcaacttagattcaaacaaacacaagttcaataggagggggtacaaaccagtaccaccacgaacaagcacttctgtttccccggtgaggttgtatagactgttaccacggttgaaagcgactgatccgttatccgccttagtacttcgagaagcctagtatcaccttggaatctccgatgcgttgcgctcagcaatgtacccccattgtagcttaggccgatgagtctgggcattccccaccggcgacggtggcccaggctgcgttggcggcctacctatggtgaaaaccataggacgctagttgtgaacaaggtgcgaagagcctattgagctactaaggagtcctccggcccctgaatgcggctaatcccaaccacggagcaggtagttgcaaaccagcaaccagcctgtcgtaatgcgcaagtctgtggcggaaccgactactttgggtgtccgtgtttccttttattcttataatggctgcttatggtgacaatcatagattgttatcataaagcgaattggattggccatccggtgagaatcagatcgatcatttacctgtttgtcggatttaccccattggcatcgcacacgagtgacctaatcagaatagtgttgttgataaggtactactatcaca

SEQ ID NO: 22947 - DNA, 596 bp, synthetic construct
  source 1..596: mol_type = other DNA
cagtaccaccacgaacaagcacttctgtttccccggtgaggttgtatagactgttaccacggttgaaagcgactgatccgttatccgccttagtacttcgagaagcctagtatcaccttggaatctccgatgcgttgcgctcagcaatgtacccccattgtagcttaggccgatgagtctgggcattccccaccggcgacggtggcccaggctgcgttggcggcctacctatggtgaaaaccataggacgctagttgtgaacaaggtgcgaagagcctattgagctactaaggagtcctccggcccctgaatgcggctaatcccaaccacggagcaggtagttgcaaaccagcaaccagcctgtcgtaatgcgcaagtctgtggcggaaccgactactttgggtgtccgtgtttccttttattcttataatggctgcttatggtgacaatcatagattgttatcataaagcgaattggattggccatccggtgagaatcagatcgatcatttacctgtttgtcggatttaccccattggcatcgcacacgagtgacctaatcagaatagtgttgttgataaggtactactatcaca

SEQ ID NO: 22948 - DNA, 546 bp, synthetic construct
  source 1..546: mol_type = other DNA
ctgttaccacggttgaaagcgactgatccgttatccgccttagtacttcgagaagcctagtatcaccttggaatctccgatgcgttgcgctcagcaatgtacccccattgtagcttaggccgatgagtctgggcattccccaccggcgacggtggcccaggctgcgttggcggcctacctatggtgaaaaccataggacgctagttgtgaacaaggtgcgaagagcctattgagctactaaggagtcctccggcccctgaatgcggctaatcccaaccacggagcaggtagttgcaaaccagcaaccagcctgtcgtaatgcgcaagtctgtggcggaaccgactactttgggtgtccgtgtttccttttattcttataatggctgcttatggtgacaatcatagattgttatcataaagcgaattggattggccatccggtgagaatcagatcgatcatttacctgtttgtcggatttaccccattggcatcgcacacgagtgacctaatcagaatagtgttgttgataaggtactactatcaca

SEQ ID NO: 22949 - DNA, 696 bp, synthetic construct
  source 1..696: mol_type = other DNA
gtactctggtactacggtacctttgtacgcctgttttatactccctcccccatgcaacattagaagcaattcacaaagttcaatagagggggtacaaaccagtaccaccacgaacaagcacttctgtttccccggtgatctcgtataggccgtacccacggctgaaaacaagtgatccgttatccgcttaggtacttcgagaaacctagtatcaccttgggatcttcgacgcgttgcactcagcactctaccccgagtgtagcttaggctgatgagtctgggcattccccaccggtgacggtggcccaggctgcgttggcggcctacccatggctaacgccatgggacgctagttgtgaacaaggtgtgaagagcctattgagctacctaagagtcctccggcccctgaatgcggctaatcccaaccacggagcaagtgccttcaatccagagggtggcttgtcgtaacgcgcaagtctgtggcggaaccgactactttgggtgtccgtgtttccttttatttttattacggctgcttatggtgacaatcattgattgccatcataaagcgagttggattggccatccggtgaaagttaagtatctcgtccacttatctgttggacttactccattaactcaactcacgcctgatttgatatctatagtgttattgatttggaaaaagctatcata

SEQ ID NO: 22950 - DNA, 646 bp, synthetic construct
  source 1..646: mol_type = other DNA
catgcaacattagaagcaattcacaaagttcaatagagggggtacaaaccagtaccaccacgaacaagcacttctgtttccccggtgatctcgtataggccgtacccacggctgaaaacaagtgatccgttatccgcttaggtacttcgagaaacctagtatcaccttgggatcttcgacgcgttgcactcagcactctaccccgagtgtagcttaggctgatgagtctgggcattccccaccggtgacggtggcccaggctgcgttggcggcctacccatggctaacgccatgggacgctagttgtgaacaaggtgtgaagagcctattgagctacctaagagtcctccggcccctgaatgcggctaatcccaaccacggagcaagtgccttcaatccagagggtggcttgtcgtaacgcgcaagtctgtggcggaaccgactactttgggtgtccgtgtttccttttatttttattacggctgcttatggtgacaatcattgattgccatcataaagcgagttggattggccatccggtgaaagttaagtatctcgtccacttatctgttggacttactccattaactcaactcacgcctgatttgatatctatagtgttattgatttggaaaaagctatcata

SEQ ID NO: 22951 - DNA, 596 bp, synthetic construct
  source 1..596: mol_type = other DNA
agtaccaccacgaacaagcacttctgtttccccggtgatctcgtataggccgtacccacggctgaaaacaagtgatccgttatccgcttaggtacttcgagaaacctagtatcaccttgggatcttcgacgcgttgcactcagcactctaccccgagtgtagcttaggctgatgagtctgggcattccccaccggtgacggtggcccaggctgcgttggcggcctacccatggctaacgccatgggacgctagttgtgaacaaggtgtgaagagcctattgagctacctaagagtcctccggcccctgaatgcggctaatcccaaccacggagcaagtgccttcaatccagagggtggcttgtcgtaacgcgcaagtctgtggcggaaccgactactttgggtgtccgtgtttccttttatttttattacggctgcttatggtgacaatcattgattgccatcataaagcgagttggattggccatccggtgaaagttaagtatctcgtccacttatctgttggacttactccattaactcaactcacgcctgatttgatatctatagtgttattgatttggaaaaagctatcata

SEQ ID NO: 22952 - DNA, 546 bp, synthetic construct
  source 1..546: mol_type = other DNA
cgtacccacggctgaaaacaagtgatccgttatccgcttaggtacttcgagaaacctagtatcaccttgggatcttcgacgcgttgcactcagcactctaccccgagtgtagcttaggctgatgagtctgggcattccccaccggtgacggtggcccaggctgcgttggcggcctacccatggctaacgccatgggacgctagttgtgaacaaggtgtgaagagcctattgagctacctaagagtcctccggcccctgaatgcggctaatcccaaccacggagcaagtgccttcaatccagagggtggcttgtcgtaacgcgcaagtctgtggcggaaccgactactttgggtgtccgtgtttccttttatttttattacggctgcttatggtgacaatcattgattgccatcataaagcgagttggattggccatccggtgaaagttaagtatctcgtccacttatctgttggacttactccattaactcaactcacgcctgatttgatatctatagtgttattgatttggaaaaagctatcata

SEQ ID NO: 22953 - DNA, 696 bp, synthetic construct
  source 1..696: mol_type = other DNA
gtactccggtatcacggtacccttgtacgcctgttttatactcccttccccgtaacttagaagtatacaaaccaagttcaatagaagggggtacaaaccagtaccaccacgaacaagcacttctgtttccccggtgaagttgcatagattgtccccacggtcgaaagcgactgatccgttatccgctcttgtacttcgggaagcctagtatcaccttcggatcttcgatgcgttgcgctcagcactcaaccccagagtgtagcttaggtcgatgagtctggacgaacctcactggtgacagtggtccaggctgcgttggcggcctacctgtggcccaaagccacaggacgctagttgtgaacaaggtgtgaagagcctactgagctacatgagagtcctccggcccctgaatgcggctaatcccaaccacggagcaggtggtcacaaaccagtggtttgcctgtcgtaacgcgaaagtctgtggcggaaccgactactttgggtgtccgtgtttccttttattcttattatggctgcttatggtgacaatcttagattgttatcataaagcgaattggattggccatccggggaaaattaagcatatcatacacttgtttgttggattcacccctctgattacacatactcttggcttgattaggattgttgcattgataagacactattgttgca

SEQ ID NO: 22954 - DNA, 646 bp, synthetic construct
  source 1..646: mol_type = other DNA
cgtaacttagaagtatacaaaccaagttcaatagaagggggtacaaaccagtaccaccacgaacaagcacttctgtttccccggtgaagttgcatagattgtccccacggtcgaaagcgactgatccgttatccgctcttgtacttcgggaagcctagtatcaccttcggatcttcgatgcgttgcgctcagcactcaaccccagagtgtagcttaggtcgatgagtctggacgaacctcactggtgacagtggtccaggctgcgttggcggcctacctgtggcccaaagccacaggacgctagttgtgaacaaggtgtgaagagcctactgagctacatgagagtcctccggcccctgaatgcggctaatcccaaccacggagcaggtggtcacaaaccagtggtttgcctgtcgtaacgcgaaagtctgtggcggaaccgactactttgggtgtccgtgtttccttttattcttattatggctgcttatggtgacaatcttagattgttatcataaagcgaattggattggccatccggggaaaattaagcatatcatacacttgtttgttggattcacccctctgattacacatactcttggcttgattaggattgttgcattgataagacactattgttgca

SEQ ID NO: 22955 - DNA, 596 bp, synthetic construct
  source 1..596: mol_type = other DNA
gtaccaccacgaacaagcacttctgtttccccggtgaagttgcatagattgtccccacggtcgaaagcgactgatccgttatccgctcttgtacttcgggaagcctagtatcaccttcggatcttcgatgcgttgcgctcagcactcaaccccagagtgtagcttaggtcgatgagtctggacgaacctcactggtgacagtggtccaggctgcgttggcggcctacctgtggcccaaagccacaggacgctagttgtgaacaaggtgtgaagagcctactgagctacatgagagtcctccggcccctgaatgcggctaatcccaaccacggagcaggtggtcacaaaccagtggtttgcctgtcgtaacgcgaaagtctgtggcggaaccgactactttgggtgtccgtgtttccttttattcttattatggctgcttatggtgacaatcttagattgttatcataaagcgaattggattggccatccggggaaaattaagcatatcatacacttgtttgttggattcacccctctgattacacatactcttggcttgattaggattgttgcattgataagacactattgttgca

SEQ ID NO: 22956 - DNA, 546 bp, synthetic construct
  source 1..546: mol_type = other DNA
gtccccacggtcgaaagcgactgatccgttatccgctcttgtacttcgggaagcctagtatcaccttcggatcttcgatgcgttgcgctcagcactcaaccccagagtgtagcttaggtcgatgagtctggacgaacctcactggtgacagtggtccaggctgcgttggcggcctacctgtggcccaaagccacaggacgctagttgtgaacaaggtgtgaagagcctactgagctacatgagagtcctccggcccctgaatgcggctaatcccaaccacggagcaggtggtcacaaaccagtggtttgcctgtcgtaacgcgaaagtctgtggcggaaccgactactttgggtgtccgtgtttccttttattcttattatggctgcttatggtgacaatcttagattgttatcataaagcgaattggattggccatccggggaaaattaagcatatcatacacttgtttgttggattcacccctctgattacacatactcttggcttgattaggattgttgcattgataagacactattgttgca

SEQ ID NO: 22957 - DNA, 696 bp, synthetic construct
  source 1..696: mol_type = other DNA
gtactccggtatcacggtacccttgtacgcctgttttatactcccttcccccgtaacttagaagaaataaaccaagttcaatagaagggggtacaaaccagtaccaccacgaacaagcacttctgtttccccggtgaagttgtataaactgtatccacggttgaaggcgactgatccgttatccgcttttgtacttcgagaagcctagtatcatcttggaatcttcgatgcgttgcgctcagcactcaaccccagagtgtagcttgggctgatgagtctggacacccctcaccggtgacggtggtccaggctgcgttggcggcctacctgtggcccaaagccacaggacgctagttgtgaacaaggtgtgaagagcctattgagctacgaaagagtcctccggcccctgaatgcggctaatcctaaccacggagcaagggtgcgcaaaccagtgcatgccttgtcgtaacgcgcaagtctgtggcggaaccgactactttgggtgtccgtgtttccttttattcttataatggctgcttatggtgacaatcatagattgttatcataaagcgaattggattggccatccggcgaaagtgaaatacattgtttatctttttgttggattcactccaaacacttccccttcttttaaactcatcactacggtcttgttgatcagagactcatatcaca

SEQ ID NO: 22958 - DNA, 646 bp, synthetic construct
  source 1..646: mol_type = other DNA
ccgtaacttagaagaaataaaccaagttcaatagaagggggtacaaaccagtaccaccacgaacaagcacttctgtttccccggtgaagttgtataaactgtatccacggttgaaggcgactgatccgttatccgcttttgtacttcgagaagcctagtatcatcttggaatcttcgatgcgttgcgctcagcactcaaccccagagtgtagcttgggctgatgagtctggacacccctcaccggtgacggtggtccaggctgcgttggcggcctacctgtggcccaaagccacaggacgctagttgtgaacaaggtgtgaagagcctattgagctacgaaagagtcctccggcccctgaatgcggctaatcctaaccacggagcaagggtgcgcaaaccagtgcatgccttgtcgtaacgcgcaagtctgtggcggaaccgactactttgggtgtccgtgtttccttttattcttataatggctgcttatggtgacaatcatagattgttatcataaagcgaattggattggccatccggcgaaagtgaaatacattgtttatctttttgttggattcactccaaacacttccccttcttttaaactcatcactacggtcttgttgatcagagactcatatcaca

SEQ ID NO: 22959 - DNA, 596 bp, synthetic construct
  source 1..596: mol_type = other DNA
gtaccaccacgaacaagcacttctgtttccccggtgaagttgtataaactgtatccacggttgaaggcgactgatccgttatccgcttttgtacttcgagaagcctagtatcatcttggaatcttcgatgcgttgcgctcagcactcaaccccagagtgtagcttgggctgatgagtctggacacccctcaccggtgacggtggtccaggctgcgttggcggcctacctgtggcccaaagccacaggacgctagttgtgaacaaggtgtgaagagcctattgagctacgaaagagtcctccggcccctgaatgcggctaatcctaaccacggagcaagggtgcgcaaaccagtgcatgccttgtcgtaacgcgcaagtctgtggcggaaccgactactttgggtgtccgtgtttccttttattcttataatggctgcttatggtgacaatcatagattgttatcataaagcgaattggattggccatccggcgaaagtgaaatacattgtttatctttttgttggattcactccaaacacttccccttcttttaaactcatcactacggtcttgttgatcagagactcatatcaca

SEQ ID NO: 22960 - DNA, 546 bp, synthetic construct
  source 1..546: mol_type = other DNA
gtatccacggttgaaggcgactgatccgttatccgcttttgtacttcgagaagcctagtatcatcttggaatcttcgatgcgttgcgctcagcactcaaccccagagtgtagcttgggctgatgagtctggacacccctcaccggtgacggtggtccaggctgcgttggcggcctacctgtggcccaaagccacaggacgctagttgtgaacaaggtgtgaagagcctattgagctacgaaagagtcctccggcccctgaatgcggctaatcctaaccacggagcaagggtgcgcaaaccagtgcatgccttgtcgtaacgcgcaagtctgtggcggaaccgactactttgggtgtccgtgtttccttttattcttataatggctgcttatggtgacaatcatagattgttatcataaagcgaattggattggccatccggcgaaagtgaaatacattgtttatctttttgttggattcactccaaacacttccccttcttttaaactcatcactacggtcttgttgatcagagactcatatcaca

SEQ ID NO: 22961 - DNA, 696 bp, synthetic construct
  source 1..696: mol_type = other DNA
gtactctggtatcatggtacccttgtacgcctgttttatactcccttaccccgtaacttagaagcaataaaccaagttcaatagaagggggtacaaaccagtaccaccgcgaacaagcacttctgttgccccggtgaagttgcatagactgtgcccacggttaaaagcgactgatccgttatccgctcttgtacttcgagaaacctagtatcatcttggaatcttcgatgcgttgcgctcaacactcgaccccagagtgtagcttaggtcgatgagtctggacactcctcactggtgacagtggtccaggctgcgttggcggcctacctgtggcccaaagccacaggacgctagtagtgaacaaggtgtgaagagtctattgagctacaagtgagtcctccggcccctgaatgcggctaatcccaaccacggagcaagtgctcacactccagtgagtagcttgtcgtaacgggtaactctgtggcggaaccgactactttgggtgtccgtgtttccttttattcttataatggctgcttatggtgacaatcatagattgttatcataaagcgaattggattggccatccggtgaaagtgaaatactttgcttaactttttgttggattcactccagtcactttcctttcttttaaactcatcaccacagtcttgttgttcagagactcatatcaca

SEQ ID NO: 22962 - DNA, 646 bp, synthetic construct
  source 1..646: mol_type = other DNA
ccgtaacttagaagcaataaaccaagttcaatagaagggggtacaaaccagtaccaccgcgaacaagcacttctgttgccccggtgaagttgcatagactgtgcccacggttaaaagcgactgatccgttatccgctcttgtacttcgagaaacctagtatcatcttggaatcttcgatgcgttgcgctcaacactcgaccccagagtgtagcttaggtcgatgagtctggacactcctcactggtgacagtggtccaggctgcgttggcggcctacctgtggcccaaagccacaggacgctagtagtgaacaaggtgtgaagagtctattgagctacaagtgagtcctccggcccctgaatgcggctaatcccaaccacggagcaagtgctcacactccagtgagtagcttgtcgtaacgggtaactctgtggcggaaccgactactttgggtgtccgtgtttccttttattcttataatggctgcttatggtgacaatcatagattgttatcataaagcgaattggattggccatccggtgaaagtgaaatactttgcttaactttttgttggattcactccagtcactttcctttcttttaaactcatcaccacagtcttgttgttcagagactcatatcaca

SEQ ID NO: 22963 - DNA, 596 bp, synthetic construct
  source 1..596: mol_type = other DNA
gtaccaccgcgaacaagcacttctgttgccccggtgaagttgcatagactgtgcccacggttaaaagcgactgatccgttatccgctcttgtacttcgagaaacctagtatcatcttggaatcttcgatgcgttgcgctcaacactcgaccccagagtgtagcttaggtcgatgagtctggacactcctcactggtgacagtggtccaggctgcgttggcggcctacctgtggcccaaagccacaggacgctagtagtgaacaaggtgtgaagagtctattgagctacaagtgagtcctccggcccctgaatgcggctaatcccaaccacggagcaagtgctcacactccagtgagtagcttgtcgtaacgggtaactctgtggcggaaccgactactttgggtgtccgtgtttccttttattcttataatggctgcttatggtgacaatcatagattgttatcataaagcgaattggattggccatccggtgaaagtgaaatactttgcttaactttttgttggattcactccagtcactttcctttcttttaaactcatcaccacagtcttgttgttcagagactcatatcaca

SEQ ID NO: 22964 - DNA, 546 bp, synthetic construct
  source 1..546: mol_type = other DNA
gtgcccacggttaaaagcgactgatccgttatccgctcttgtacttcgagaaacctagtatcatcttggaatcttcgatgcgttgcgctcaacactcgaccccagagtgtagcttaggtcgatgagtctggacactcctcactggtgacagtggtccaggctgcgttggcggcctacctgtggcccaaagccacaggacgctagtagtgaacaaggtgtgaagagtctattgagctacaagtgagtcctccggcccctgaatgcggctaatcccaaccacggagcaagtgctcacactccagtgagtagcttgtcgtaacgggtaactctgtggcggaaccgactactttgggtgtccgtgtttccttttattcttataatggctgcttatggtgacaatcatagattgttatcataaagcgaattggattggccatccggtgaaagtgaaatactttgcttaactttttgttggattcactccagtcactttcctttcttttaaactcatcaccacagtcttgttgttcagagactcatatcaca

SEQ ID NO: 22965 - DNA, 696 bp, synthetic construct
  source 1..696: mol_type = other DNA
gtactctggtattacggtacctttgtacgcctgttttatactccctccctcgtaacttagaagaaacaaatcaagttcaacaggagggggtacaaaccagtaccaccacgaacaagcacttctgtctccccggtgacgttgcatagactgtacccacggtcgaaagcgattgatccgttatccgctcttgtacttcgagaagcctagtatcatcttggaatcttcgatgcgttgcgctcagcactcaaccccagagtgtagcttaggtcgatgagtctggacgttccccaccggcgacggtggtccaggctgcgttggcggcctacctgtggcccaaagccacaggacgctagttgtgaacaaggtgtgaagagcctattgagctacaggagagtcctccggcccctgaatgcggctaatcccaaccacggagcaggggtgcataaaccaatgcataccttgtcgtaacgcgcaagtctgtggcggaaccgactactttgggtgtccgtgtttccttttattttttcattggctgcttatggtgacaatcatagattgttatcataaagcgacttggattggccatccggtgagagtgaaatacattgtttacttgttcattggatttactccactcaactctttcgcttacaaactcattacaacaactctgttgattgaaacaacaatactaca

SEQ ID NO: 22966 - DNA, 646 bp, synthetic construct
  source 1..646: mol_type = other DNA
cgtaacttagaagaaacaaatcaagttcaacaggagggggtacaaaccagtaccaccacgaacaagcacttctgtctccccggtgacgttgcatagactgtacccacggtcgaaagcgattgatccgttatccgctcttgtacttcgagaagcctagtatcatcttggaatcttcgatgcgttgcgctcagcactcaaccccagagtgtagcttaggtcgatgagtctggacgttccccaccggcgacggtggtccaggctgcgttggcggcctacctgtggcccaaagccacaggacgctagttgtgaacaaggtgtgaagagcctattgagctacaggagagtcctccggcccctgaatgcggctaatcccaaccacggagcaggggtgcataaaccaatgcataccttgtcgtaacgcgcaagtctgtggcggaaccgactactttgggtgtccgtgtttccttttattttttcattggctgcttatggtgacaatcatagattgttatcataaagcgacttggattggccatccggtgagagtgaaatacattgtttacttgttcattggatttactccactcaactctttcgcttacaaactcattacaacaactctgttgattgaaacaacaatactaca

SEQ ID NO: 22967 - DNA, 596 bp, synthetic construct
  source 1..596: mol_type = other DNA
taccaccacgaacaagcacttctgtctccccggtgacgttgcatagactgtacccacggtcgaaagcgattgatccgttatccgctcttgtacttcgagaagcctagtatcatcttggaatcttcgatgcgttgcgctcagcactcaaccccagagtgtagcttaggtcgatgagtctggacgttccccaccggcgacggtggtccaggctgcgttggcggcctacctgtggcccaaagccacaggacgctagttgtgaacaaggtgtgaagagcctattgagctacaggagagtcctccggcccctgaatgcggctaatcccaaccacggagcaggggtgcataaaccaatgcataccttgtcgtaacgcgcaagtctgtggcggaaccgactactttgggtgtccgtgtttccttttattttttcattggctgcttatggtgacaatcatagattgttatcataaagcgacttggattggccatccggtgagagtgaaatacattgtttacttgttcattggatttactccactcaactctttcgcttacaaactcattacaacaactctgttgattgaaacaacaatactaca

SEQ ID NO: 22968 - DNA, 546 bp, synthetic construct
  source 1..546: mol_type = other DNA
tacccacggtcgaaagcgattgatccgttatccgctcttgtacttcgagaagcctagtatcatcttggaatcttcgatgcgttgcgctcagcactcaaccccagagtgtagcttaggtcgatgagtctggacgttccccaccggcgacggtggtccaggctgcgttggcggcctacctgtggcccaaagccacaggacgctagttgtgaacaaggtgtgaagagcctattgagctacaggagagtcctccggcccctgaatgcggctaatcccaaccacggagcaggggtgcataaaccaatgcataccttgtcgtaacgcgcaagtctgtggcggaaccgactactttgggtgtccgtgtttccttttattttttcattggctgcttatggtgacaatcatagattgttatcataaagcgacttggattggccatccggtgagagtgaaatacattgtttacttgttcattggatttactccactcaactctttcgcttacaaactcattacaacaactctgttgattgaaacaacaatactaca

SEQ ID NO: 22969 - DNA, 696 bp, synthetic construct
  source 1..696: mol_type = other DNA
cacactggtatcaaggtacctttgtgcgcctgttttacaaaccctccccccccttgtaacaaacttagaagcaatgcacaccgatcaatagcgggcgcggcacgccagctgcgtcttgatcaagcacttctgtctccccggaccgagtatcaatagactgcttgcgtggttgaaggagaaagcgtccgttacccgaccaactacttcgagaagcccagtagcgccatggaagctgcgaagcgtttcgctcagcacacccccagtgtagatcaggtcgatgagtcaccgcattccccacgggcgaccgtggcggtggctgcgttggcggcctgcctacggggtaacccgtaggacgcttcaatgtagacatggtgcgaagagtcgattgagctagttggtaatcctccggcccctgaatgcggctaatcctaactgcggagcacgtgccttcaacccagagggtggcgtgtcgtaacgggcaactctgcagcggaaccgactactttgggtgtccgtgtttctttttattttgtactggctgcttatggtgacaattgaaggattgttaccatatagctattggattggccatccggtgcctaacagagcaattatttacctctttgttgggttcgtaccattcaataaggctaattaccaaatcttgtgttacatcctcagattgaacacatcgaa

SEQ ID NO: 22970 - DNA, 646 bp, synthetic construct
  source 1..646: mol_type = other DNA
cccttgtaacaaacttagaagcaatgcacaccgatcaatagcgggcgcggcacgccagctgcgtcttgatcaagcacttctgtctccccggaccgagtatcaatagactgcttgcgtggttgaaggagaaagcgtccgttacccgaccaactacttcgagaagcccagtagcgccatggaagctgcgaagcgtttcgctcagcacacccccagtgtagatcaggtcgatgagtcaccgcattccccacgggcgaccgtggcggtggctgcgttggcggcctgcctacggggtaacccgtaggacgcttcaatgtagacatggtgcgaagagtcgattgagctagttggtaatcctccggcccctgaatgcggctaatcctaactgcggagcacgtgccttcaacccagagggtggcgtgtcgtaacgggcaactctgcagcggaaccgactactttgggtgtccgtgtttctttttattttgtactggctgcttatggtgacaattgaaggattgttaccatatagctattggattggccatccggtgcctaacagagcaattatttacctctttgttgggttcgtaccattcaataaggctaattaccaaatcttgtgttacatcctcagattgaacacatcgaa

SEQ ID NO: 22971 - DNA, 596 bp, synthetic construct
  source 1..596: mol_type = other DNA
cacgccagctgcgtcttgatcaagcacttctgtctccccggaccgagtatcaatagactgcttgcgtggttgaaggagaaagcgtccgttacccgaccaactacttcgagaagcccagtagcgccatggaagctgcgaagcgtttcgctcagcacacccccagtgtagatcaggtcgatgagtcaccgcattccccacgggcgaccgtggcggtggctgcgttggcggcctgcctacggggtaacccgtaggacgcttcaatgtagacatggtgcgaagagtcgattgagctagttggtaatcctccggcccctgaatgcggctaatcctaactgcggagcacgtgccttcaacccagagggtggcgtgtcgtaacgggcaactctgcagcggaaccgactactttgggtgtccgtgtttctttttattttgtactggctgcttatggtgacaattgaaggattgttaccatatagctattggattggccatccggtgcctaacagagcaattatttacctctttgttgggttcgtaccattcaataaggctaattaccaaatcttgtgttacatcctcagattgaacacatcgaa

SEQ ID NO: 22972 - DNA, 546 bp, synthetic construct
  source 1..546: mol_type = other DNA
caatagactgcttgcgtggttgaaggagaaagcgtccgttacccgaccaactacttcgagaagcccagtagcgccatggaagctgcgaagcgtttcgctcagcacacccccagtgtagatcaggtcgatgagtcaccgcattccccacgggcgaccgtggcggtggctgcgttggcggcctgcctacggggtaacccgtaggacgcttcaatgtagacatggtgcgaagagtcgattgagctagttggtaatcctccggcccctgaatgcggctaatcctaactgcggagcacgtgccttcaacccagagggtggcgtgtcgtaacgggcaactctgcagcggaaccgactactttgggtgtccgtgtttctttttattttgtactggctgcttatggtgacaattgaaggattgttaccatatagctattggattggccatccggtgcctaacagagcaattatttacctctttgttgggttcgtaccattcaataaggctaattaccaaatcttgtgttacatcctcagattgaacacatcgaa

SEQ ID NO: 22973 - DNA, 697 bp, synthetic construct
  source 1..697: mol_type = other DNA
gcactctgattctacggaatctttgtgcgcctgttttacaacccttcccaaaatctgcaacttagaagttatgcacattattgatcaatagcaggcgtggcacaccagtcatgtcttgatcgagcacttctgtatccccggactgagtatcaatagactgctcacgtggtcgaaggagaaaacgttcgttatccggctaactacttcgagaagcctagtaacaccgttgaaactgcggagcgtttcgttcagcacttcccccgtgtagatcaggtcgatgagtcactgcttaccccacgggcgaccgtggcagtggctgcgttggcggcctgcctatggggcaacccataggacgctctaaagtggacatggtgcgaagagcctattgagctagttagtagtcctccggcccctgaatgcggctaatcctaactgcggagcgcatgccctcacgccagagggtggtgcgtcgtaacgggcaactctgcagcggaaccgactactttgggtgtccgtgtttctttttattctcattatggctgcttatggtgacaattaaggaattgttaccatatagctattggattggccatccggtgtgcaacagagctattatctacttatttgttggatacattccattaacacttaaatcccttaacacattgcaatacattctaacactgaacgcaagaaa

SEQ ID NO: 22974 - DNA, 647 bp, synthetic construct
  source 1..647: mol_type = other DNA
aaatctgcaacttagaagttatgcacattattgatcaatagcaggcgtggcacaccagtcatgtcttgatcgagcacttctgtatccccggactgagtatcaatagactgctcacgtggtcgaaggagaaaacgttcgttatccggctaactacttcgagaagcctagtaacaccgttgaaactgcggagcgtttcgttcagcacttcccccgtgtagatcaggtcgatgagtcactgcttaccccacgggcgaccgtggcagtggctgcgttggcggcctgcctatggggcaacccataggacgctctaaagtggacatggtgcgaagagcctattgagctagttagtagtcctccggcccctgaatgcggctaatcctaactgcggagcgcatgccctcacgccagagggtggtgcgtcgtaacgggcaactctgcagcggaaccgactactttgggtgtccgtgtttctttttattctcattatggctgcttatggtgacaattaaggaattgttaccatatagctattggattggccatccggtgtgcaacagagctattatctacttatttgttggatacattccattaacacttaaatcccttaacacattgcaatacattctaacactgaacgcaagaaa

SEQ ID NO: 22975 - DNA, 597 bp, synthetic construct
  source 1..597: mol_type = other DNA
cacaccagtcatgtcttgatcgagcacttctgtatccccggactgagtatcaatagactgctcacgtggtcgaaggagaaaacgttcgttatccggctaactacttcgagaagcctagtaacaccgttgaaactgcggagcgtttcgttcagcacttcccccgtgtagatcaggtcgatgagtcactgcttaccccacgggcgaccgtggcagtggctgcgttggcggcctgcctatggggcaacccataggacgctctaaagtggacatggtgcgaagagcctattgagctagttagtagtcctccggcccctgaatgcggctaatcctaactgcggagcgcatgccctcacgccagagggtggtgcgtcgtaacgggcaactctgcagcggaaccgactactttgggtgtccgtgtttctttttattctcattatggctgcttatggtgacaattaaggaattgttaccatatagctattggattggccatccggtgtgcaacagagctattatctacttatttgttggatacattccattaacacttaaatcccttaacacattgcaatacattctaacactgaacgcaagaaa

SEQ ID NO: 22976 - DNA, 547 bp, synthetic construct
  source 1..547: mol_type = other DNA
caatagactgctcacgtggtcgaaggagaaaacgttcgttatccggctaactacttcgagaagcctagtaacaccgttgaaactgcggagcgtttcgttcagcacttcccccgtgtagatcaggtcgatgagtcactgcttaccccacgggcgaccgtggcagtggctgcgttggcggcctgcctatggggcaacccataggacgctctaaagtggacatggtgcgaagagcctattgagctagttagtagtcctccggcccctgaatgcggctaatcctaactgcggagcgcatgccctcacgccagagggtggtgcgtcgtaacgggcaactctgcagcggaaccgactactttgggtgtccgtgtttctttttattctcattatggctgcttatggtgacaattaaggaattgttaccatatagctattggattggccatccggtgtgcaacagagctattatctacttatttgttggatacattccattaacacttaaatcccttaacacattgcaatacattctaacactgaacgcaagaaa

SEQ ID NO: 22977 - DNA, 697 bp, synthetic construct
  source 1..697: mol_type = other DNA
cactctgattccacggaatctttgtgcgcctgttttataacccccctccccacctcgcaacttagaagcaacgcgcatcactgatcaacagcaggcatggcgcgccagccatgtcttgatcaagcacttctgtttccccggactgagtatcaatagactgcttacgcggttgaaggagaaaacgttcgttacccggctaactacttcgagaaacttagtaacaccatcgaagctgcagggtgtttcgctcagcacttcccccgtgtagatcaggccgatgagtcaccgcaatccccacgggcgaccgtggcggtggctgcgttggcggcctgcctatggggcaacccataggacgccctaaagtggacatggtgcgaagagtctattgagctagttagtagtcctccggcccctgaatgcggctaatcctaactgcggagcacataccctcaagccagagggtggtgtgtcgtaacgggtaactctgcagcggaaccgactactttgggtgtccgtgtttccttttattcttactgtggctgcttatggtgacaattcaagagttgttaccatatagctattggattggccatccggtgtctaacagagctattgtgtacttatttgttgggtacgttccattatcttacacatcccttgacacattacattttattgtgaagctaaatacaagaag

SEQ ID NO: 22978 - DNA, 647 bp, synthetic construct
  source 1..647: mol_type = other DNA
cacctcgcaacttagaagcaacgcgcatcactgatcaacagcaggcatggcgcgccagccatgtcttgatcaagcacttctgtttccccggactgagtatcaatagactgcttacgcggttgaaggagaaaacgttcgttacccggctaactacttcgagaaacttagtaacaccatcgaagctgcagggtgtttcgctcagcacttcccccgtgtagatcaggccgatgagtcaccgcaatccccacgggcgaccgtggcggtggctgcgttggcggcctgcctatggggcaacccataggacgccctaaagtggacatggtgcgaagagtctattgagctagttagtagtcctccggcccctgaatgcggctaatcctaactgcggagcacataccctcaagccagagggtggtgtgtcgtaacgggtaactctgcagcggaaccgactactttgggtgtccgtgtttccttttattcttactgtggctgcttatggtgacaattcaagagttgttaccatatagctattggattggccatccggtgtctaacagagctattgtgtacttatttgttgggtacgttccattatcttacacatcccttgacacattacattttattgtgaagctaaatacaagaag

SEQ ID NO: 22979 - DNA, 597 bp, synthetic construct
  source 1..597: mol_type = other DNA
cgcgccagccatgtcttgatcaagcacttctgtttccccggactgagtatcaatagactgcttacgcggttgaaggagaaaacgttcgttacccggctaactacttcgagaaacttagtaacaccatcgaagctgcagggtgtttcgctcagcacttcccccgtgtagatcaggccgatgagtcaccgcaatccccacgggcgaccgtggcggtggctgcgttggcggcctgcctatggggcaacccataggacgccctaaagtggacatggtgcgaagagtctattgagctagttagtagtcctccggcccctgaatgcggctaatcctaactgcggagcacataccctcaagccagagggtggtgtgtcgtaacgggtaactctgcagcggaaccgactactttgggtgtccgtgtttccttttattcttactgtggctgcttatggtgacaattcaagagttgttaccatatagctattggattggccatccggtgtctaacagagctattgtgtacttatttgttgggtacgttccattatcttacacatcccttgacacattacattttattgtgaagctaaatacaagaag

SEQ ID NO: 22980 - DNA, 547 bp, synthetic construct
  source 1..547: mol_type = other DNA
caatagactgcttacgcggttgaaggagaaaacgttcgttacccggctaactacttcgagaaacttagtaacaccatcgaagctgcagggtgtttcgctcagcacttcccccgtgtagatcaggccgatgagtcaccgcaatccccacgggcgaccgtggcggtggctgcgttggcggcctgcctatggggcaacccataggacgccctaaagtggacatggtgcgaagagtctattgagctagttagtagtcctccggcccctgaatgcggctaatcctaactgcggagcacataccctcaagccagagggtggtgtgtcgtaacgggtaactctgcagcggaaccgactactttgggtgtccgtgtttccttttattcttactgtggctgcttatggtgacaattcaagagttgttaccatatagctattggattggccatccggtgtctaacagagctattgtgtacttatttgttgggtacgttccattatcttacacatcccttgacacattacattttattgtgaagctaaatacaagaag

SEQ ID NO: 22981 - DNA, 697 bp, synthetic construct
  source 1..697: mol_type = other DNA
gcactctggtactgcggtacctttgtgcgcctgttttatctccccagacccccgcaacgtcacattagaagatagacaatacgaccaatagtcagtggggcaacccagcctcactttggtcaagtacctctgtttccccgggcttagtaccaataggctgcttgcgcggctgaaggggaacgcgcccgttatccggctaactacttcgagaaacctagtaccaccatggaagttgccgagtgtttcgctcagcacaaccccagtgtagatcaggtcgatgagtcaccgtacaccccacgggcgaccgtgacggtggctgcgttggcggcctgcccatggtgcacaccatgggacgctctaatacagacatggtgcgaagagtctattgagctagttagtagtcctccggcccctgaatgcggctaatcctaactgtggagcatgcgctctcaacccagagagtagcgtgtcgtaacgggcaactctgcagcggaaccgactactttgggtgtccgtgtttccttttattcttatattggctgcttatggtgacaattgagagattgttaccatatagctattggattggccatccggtgtgcaatagagctattgtatattcttttgttggctttgtgccattagattatactgcaattgctactttaagatacatcttgtttctgaacacagcaaa

SEQ ID NO: 22982 - DNA, 647 bp, synthetic construct
  source 1..647: mol_type = other DNA
cccgcaacgtcacattagaagatagacaatacgaccaatagtcagtggggcaacccagcctcactttggtcaagtacctctgtttccccgggcttagtaccaataggctgcttgcgcggctgaaggggaacgcgcccgttatccggctaactacttcgagaaacctagtaccaccatggaagttgccgagtgtttcgctcagcacaaccccagtgtagatcaggtcgatgagtcaccgtacaccccacgggcgaccgtgacggtggctgcgttggcggcctgcccatggtgcacaccatgggacgctctaatacagacatggtgcgaagagtctattgagctagttagtagtcctccggcccctgaatgcggctaatcctaactgtggagcatgcgctctcaacccagagagtagcgtgtcgtaacgggcaactctgcagcggaaccgactactttgggtgtccgtgtttccttttattcttatattggctgcttatggtgacaattgagagattgttaccatatagctattggattggccatccggtgtgcaatagagctattgtatattcttttgttggctttgtgccattagattatactgcaattgctactttaagatacatcttgtttctgaacacagcaaa

SEQ ID NO: 22983 - DNA, 597 bp, synthetic construct
  source 1..597: mol_type = other DNA
caacccagcctcactttggtcaagtacctctgtttccccgggcttagtaccaataggctgcttgcgcggctgaaggggaacgcgcccgttatccggctaactacttcgagaaacctagtaccaccatggaagttgccgagtgtttcgctcagcacaaccccagtgtagatcaggtcgatgagtcaccgtacaccccacgggcgaccgtgacggtggctgcgttggcggcctgcccatggtgcacaccatgggacgctctaatacagacatggtgcgaagagtctattgagctagttagtagtcctccggcccctgaatgcggctaatcctaactgtggagcatgcgctctcaacccagagagtagcgtgtcgtaacgggcaactctgcagcggaaccgactactttgggtgtccgtgtttccttttattcttatattggctgcttatggtgacaattgagagattgttaccatatagctattggattggccatccggtgtgcaatagagctattgtatattcttttgttggctttgtgccattagattatactgcaattgctactttaagatacatcttgtttctgaacacagcaaa

SEQ ID NO: 22984 - DNA, 547 bp, synthetic construct
  source 1..547: mol_type = other DNA
caataggctgcttgcgcggctgaaggggaacgcgcccgttatccggctaactacttcgagaaacctagtaccaccatggaagttgccgagtgtttcgctcagcacaaccccagtgtagatcaggtcgatgagtcaccgtacaccccacgggcgaccgtgacggtggctgcgttggcggcctgcccatggtgcacaccatgggacgctctaatacagacatggtgcgaagagtctattgagctagttagtagtcctccggcccctgaatgcggctaatcctaactgtggagcatgcgctctcaacccagagagtagcgtgtcgtaacgggcaactctgcagcggaaccgactactttgggtgtccgtgtttccttttattcttatattggctgcttatggtgacaattgagagattgttaccatatagctattggattggccatccggtgtgcaatagagctattgtatattcttttgttggctttgtgccattagattatactgcaattgctactttaagatacatcttgtttctgaacacagcaaa

SEQ ID NO: 22985 - DNA, 697 bp, synthetic construct
  source 1..697: mol_type = other DNA
gcacactggtattacggtacccttgtgcgcctgttttatcctccctggcccccgtaataatgtattagaagtcttgcaacgtgaccaatagctagtaaagcaacccagctttacttgggtcaagtacttctgttaccccggacctagtaccaataggctgctcgcgcggctgaaggggaaaacgttcgttatccggctaactacttcgggaaacccagtaccatcatgaatgttgcggagtgtttcgctcagcactaccccagtgtagatcaggccgatgagtcaccgtacaccccacgggcgaccgtgacggtggctgcgttggcggcctgcccatggcacctgccatgggacgctctaatacggacatggtgtgaagagtctactgagctagttagtagtcctccggcccctgaatgcggctaatcctaactgcggagcacgcgcccccaatccagagggtagcgtgtcgtaatgggcaactctgcagcggaaccgactactttgggtgtccgtgtttccttttattcttacactggctgcttatggtgacaattgagagattgttgccatatagctattggattggccatccggtgagcaatagagcgattatctattcttttgttggatttgtgccattagattacactgccatcatcacactgaagtacattttattgttaaacacaacaaa

SEQ ID NO: 22986 - DNA, 647 bp, synthetic construct
  source 1..647: mol_type = other DNA
cccgtaataatgtattagaagtcttgcaacgtgaccaatagctagtaaagcaacccagctttacttgggtcaagtacttctgttaccccggacctagtaccaataggctgctcgcgcggctgaaggggaaaacgttcgttatccggctaactacttcgggaaacccagtaccatcatgaatgttgcggagtgtttcgctcagcactaccccagtgtagatcaggccgatgagtcaccgtacaccccacgggcgaccgtgacggtggctgcgttggcggcctgcccatggcacctgccatgggacgctctaatacggacatggtgtgaagagtctactgagctagttagtagtcctccggcccctgaatgcggctaatcctaactgcggagcacgcgcccccaatccagagggtagcgtgtcgtaatgggcaactctgcagcggaaccgactactttgggtgtccgtgtttccttttattcttacactggctgcttatggtgacaattgagagattgttgccatatagctattggattggccatccggtgagcaatagagcgattatctattcttttgttggatttgtgccattagattacactgccatcatcacactgaagtacattttattgttaaacacaacaaa

SEQ ID NO: 22987 - DNA, 597 bp, synthetic construct
  source 1..597: mol_type = other DNA
caacccagctttacttgggtcaagtacttctgttaccccggacctagtaccaataggctgctcgcgcggctgaaggggaaaacgttcgttatccggctaactacttcgggaaacccagtaccatcatgaatgttgcggagtgtttcgctcagcactaccccagtgtagatcaggccgatgagtcaccgtacaccccacgggcgaccgtgacggtggctgcgttggcggcctgcccatggcacctgccatgggacgctctaatacggacatggtgtgaagagtctactgagctagttagtagtcctccggcccctgaatgcggctaatcctaactgcggagcacgcgcccccaatccagagggtagcgtgtcgtaatgggcaactctgcagcggaaccgactactttgggtgtccgtgtttccttttattcttacactggctgcttatggtgacaattgagagattgttgccatatagctattggattggccatccggtgagcaatagagcgattatctattcttttgttggatttgtgccattagattacactgccatcatcacactgaagtacattttattgttaaacacaacaaa

SEQ ID NO: 22988 - DNA, 547 bp, synthetic construct
  source 1..547: mol_type = other DNA
caataggctgctcgcgcggctgaaggggaaaacgttcgttatccggctaactacttcgggaaacccagtaccatcatgaatgttgcggagtgtttcgctcagcactaccccagtgtagatcaggccgatgagtcaccgtacaccccacgggcgaccgtgacggtggctgcgttggcggcctgcccatggcacctgccatgggacgctctaatacggacatggtgtgaagagtctactgagctagttagtagtcctccggcccctgaatgcggctaatcctaactgcggagcacgcgcccccaatccagagggtagcgtgtcgtaatgggcaactctgcagcggaaccgactactttgggtgtccgtgtttccttttattcttacactggctgcttatggtgacaattgagagattgttgccatatagctattggattggccatccggtgagcaatagagcgattatctattcttttgttggatttgtgccattagattacactgccatcatcacactgaagtacattttattgttaaacacaacaaa

SEQ ID NO: 22989 - DNA, 697 bp, synthetic construct
  source 1..697: mol_type = other DNA
agcactctggtaccacggtacctttgtgcgcctgttttatctccccaaaccccgtaacgctacattagaagttaaacaatatgaccgatagtcagtggggcaacccagcctcactttggtcaagcacttctgttctcccgggcttagtaccaataagctgctcgcgcggctgaaggggaacgcgcccgttatccggctaactacttcgagaaacctagtaccaccatggaagttgcagagtgtttcgctcagcactaccccagtgtagatcaggctgatgagtcaccgtgcaccccacgggcgaccgtgacggtgactgcgttggcggcctgcccatggtgtataccatgggacgctctaatacagacatggtgcgaagagtctattgagctagttagtagtcctccggcccctgaatgcggctaatcctaactgcggagcacgcgctctcaacccagagagtagcgtgtcgtaacgggtaactctgcagcggaaccgactactttgggtgtccgtgtttctttttattcttacattggctgcttatggtgacaattgagagattgttaccatatagctattggattggccatccggtgtgtaacagagctatcatatattcttttgttggcttcgtgccactagattatactgcaattgttactttaaggtacatcttacttctgaatacggtaaa

SEQ ID NO: 22990 - DNA, 647 bp, synthetic construct
  source 1..647: mol_type = other DNA
cccgtaacgctacattagaagttaaacaatatgaccgatagtcagtggggcaacccagcctcactttggtcaagcacttctgttctcccgggcttagtaccaataagctgctcgcgcggctgaaggggaacgcgcccgttatccggctaactacttcgagaaacctagtaccaccatggaagttgcagagtgtttcgctcagcactaccccagtgtagatcaggctgatgagtcaccgtgcaccccacgggcgaccgtgacggtgactgcgttggcggcctgcccatggtgtataccatgggacgctctaatacagacatggtgcgaagagtctattgagctagttagtagtcctccggcccctgaatgcggctaatcctaactgcggagcacgcgctctcaacccagagagtagcgtgtcgtaacgggtaactctgcagcggaaccgactactttgggtgtccgtgtttctttttattcttacattggctgcttatggtgacaattgagagattgttaccatatagctattggattggccatccggtgtgtaacagagctatcatatattcttttgttggcttcgtgccactagattatactgcaattgttactttaaggtacatcttacttctgaatacggtaaa

SEQ ID NO: 22991 - DNA, 597 bp, synthetic construct
  source 1..597: mol_type = other DNA
caacccagcctcactttggtcaagcacttctgttctcccgggcttagtaccaataagctgctcgcgcggctgaaggggaacgcgcccgttatccggctaactacttcgagaaacctagtaccaccatggaagttgcagagtgtttcgctcagcactaccccagtgtagatcaggctgatgagtcaccgtgcaccccacgggcgaccgtgacggtgactgcgttggcggcctgcccatggtgtataccatgggacgctctaatacagacatggtgcgaagagtctattgagctagttagtagtcctccggcccctgaatgcggctaatcctaactgcggagcacgcgctctcaacccagagagtagcgtgtcgtaacgggtaactctgcagcggaaccgactactttgggtgtccgtgtttctttttattcttacattggctgcttatggtgacaattgagagattgttaccatatagctattggattggccatccggtgtgtaacagagctatcatatattcttttgttggcttcgtgccactagattatactgcaattgttactttaaggtacatcttacttctgaatacggtaaa

SEQ ID NO: 22992 - DNA, 547 bp, synthetic construct
  source 1..547: mol_type = other DNA
caataagctgctcgcgcggctgaaggggaacgcgcccgttatccggctaactacttcgagaaacctagtaccaccatggaagttgcagagtgtttcgctcagcactaccccagtgtagatcaggctgatgagtcaccgtgcaccccacgggcgaccgtgacggtgactgcgttggcggcctgcccatggtgtataccatgggacgctctaatacagacatggtgcgaagagtctattgagctagttagtagtcctccggcccctgaatgcggctaatcctaactgcggagcacgcgctctcaacccagagagtagcgtgtcgtaacgggtaactctgcagcggaaccgactactttgggtgtccgtgtttctttttattcttacattggctgcttatggtgacaattgagagattgttaccatatagctattggattggccatccggtgtgtaacagagctatcatatattcttttgttggcttcgtgccactagattatactgcaattgttactttaaggtacatcttacttctgaatacggtaaa

SEQ ID NO: 22993 - DNA, 697 bp, synthetic construct
  source 1..697: mol_type = other DNA
gcacactgattctacggaatctttgtgcgcctgttttatatccctcccctaaaatagtaatttagacgttgaacatttacacgaccaatagtgggcgtggcgcaccagtcacgtcttggtcaagcactcctgttcccccggaccgagtatcaataggctgctcacgtggctgaaggagaaagtgttcgttatccggctaactacttcgggaaacccagtaacaccatgaaagttgcagagtgtttcgttcagcacttcccccgtgtagatcaggctgatgagtcactgcaaaccccacgggcgaccgtggcagtggctgcgttggcggcctgcctatggggtaacccataggacgctctaatacagacatggtgcgaagagtctactgagctagttagtattcctccggcccctgaatgcggctaatcctaactgcggagcacatgccctcaatccagagggtggtgtgtcgtaatgggcaactctgcagcggaaccgactactttgggtgtccgtgtttccttttattcttatactggctgcttatggtgacaattgaaaagttgttaccatatagctattggattggccatccggtgaataacagagctttggtttatcagttcattgggttcgtgcccttatcatctacagcttacacaactttggtgtacttgttatatcttaatagtaagaa

SEQ ID NO: 22994 - DNA, 647 bp, synthetic construct
  source 1..647: mol_type = other DNA
aaaatagtaatttagacgttgaacatttacacgaccaatagtgggcgtggcgcaccagtcacgtcttggtcaagcactcctgttcccccggaccgagtatcaataggctgctcacgtggctgaaggagaaagtgttcgttatccggctaactacttcgggaaacccagtaacaccatgaaagttgcagagtgtttcgttcagcacttcccccgtgtagatcaggctgatgagtcactgcaaaccccacgggcgaccgtggcagtggctgcgttggcggcctgcctatggggtaacccataggacgctctaatacagacatggtgcgaagagtctactgagctagttagtattcctccggcccctgaatgcggctaatcctaactgcggagcacatgccctcaatccagagggtggtgtgtcgtaatgggcaactctgcagcggaaccgactactttgggtgtccgtgtttccttttattcttatactggctgcttatggtgacaattgaaaagttgttaccatatagctattggattggccatccggtgaataacagagctttggtttatcagttcattgggttcgtgcccttatcatctacagcttacacaactttggtgtacttgttatatcttaatagtaagaa

SEQ ID NO: 22995 - DNA, 597 bp, synthetic construct
  source 1..597: mol_type = other DNA
cgcaccagtcacgtcttggtcaagcactcctgttcccccggaccgagtatcaataggctgctcacgtggctgaaggagaaagtgttcgttatccggctaactacttcgggaaacccagtaacaccatgaaagttgcagagtgtttcgttcagcacttcccccgtgtagatcaggctgatgagtcactgcaaaccccacgggcgaccgtggcagtggctgcgttggcggcctgcctatggggtaacccataggacgctctaatacagacatggtgcgaagagtctactgagctagttagtattcctccggcccctgaatgcggctaatcctaactgcggagcacatgccctcaatccagagggtggtgtgtcgtaatgggcaactctgcagcggaaccgactactttgggtgtccgtgtttccttttattcttatactggctgcttatggtgacaattgaaaagttgttaccatatagctattggattggccatccggtgaataacagagctttggtttatcagttcattgggttcgtgcccttatcatctacagcttacacaactttggtgtacttgttatatcttaatagtaagaa

SEQ ID NO: 22996 - DNA, 547 bp, synthetic construct
  source 1..547: mol_type = other DNA
caataggctgctcacgtggctgaaggagaaagtgttcgttatccggctaactacttcgggaaacccagtaacaccatgaaagttgcagagtgtttcgttcagcacttcccccgtgtagatcaggctgatgagtcactgcaaaccccacgggcgaccgtggcagtggctgcgttggcggcctgcctatggggtaacccataggacgctctaatacagacatggtgcgaagagtctactgagctagttagtattcctccggcccctgaatgcggctaatcctaactgcggagcacatgccctcaatccagagggtggtgtgtcgtaatgggcaactctgcagcggaaccgactactttgggtgtccgtgtttccttttattcttatactggctgcttatggtgacaattgaaaagttgttaccatatagctattggattggccatccggtgaataacagagctttggtttatcagttcattgggttcgtgcccttatcatctacagcttacacaactttggtgtacttgttatatcttaatagtaagaa

SEQ ID NO: 22997 - DNA, 697 bp, synthetic construct
  source 1..697: mol_type = other DNA
cactctggttctccggaacctttgtgcgcctgttttgaaaccccctcccccaactcgaaacgtagaagtaatgtacactactgatcagtagcaggcgtggcgcaccagccatgtctcgatcaagcacttctgtttccccggactgagtatcaatagactgctcacgcggttgaaggtgaaaacgtccgttacccggctaactacttcgagaaacctagtagcaccatagaaactgcagagtgtttcgctcagcacttcccccgtgtagatcaggtcgatgagtcactgcaatccccacgggtgaccgtggcagtggctgcgttggcggcctgcctatggggcaacccataggacgctctaaggtggacatggtgtgaagagtctattgagctagttagtagtcctccggcccctgaatgcggctaatcctaactgtggagcgcatactcccaaaccagggagcagtgcgtcgtaacgggcaactccgcagcggaaccgactactttgggtgtccgtgtttccttttattcctatactggctgcttatggtgacaattgagagattgttaccatatagctattggattggccatccagtgtgtaatagagcaatcatttaccaatttgttggatttactccattaacccacacgtctctcaacacactacatttcatcttactactgaacactagaaa

SEQ ID NO: 22998 - DNA, 647 bp, synthetic construct
  source 1..647: mol_type = other DNA
caactcgaaacgtagaagtaatgtacactactgatcagtagcaggcgtggcgcaccagccatgtctcgatcaagcacttctgtttccccggactgagtatcaatagactgctcacgcggttgaaggtgaaaacgtccgttacccggctaactacttcgagaaacctagtagcaccatagaaactgcagagtgtttcgctcagcacttcccccgtgtagatcaggtcgatgagtcactgcaatccccacgggtgaccgtggcagtggctgcgttggcggcctgcctatggggcaacccataggacgctctaaggtggacatggtgtgaagagtctattgagctagttagtagtcctccggcccctgaatgcggctaatcctaactgtggagcgcatactcccaaaccagggagcagtgcgtcgtaacgggcaactccgcagcggaaccgactactttgggtgtccgtgtttccttttattcctatactggctgcttatggtgacaattgagagattgttaccatatagctattggattggccatccagtgtgtaatagagcaatcatttaccaatttgttggatttactccattaacccacacgtctctcaacacactacatttcatcttactactgaacactagaaa

SEQ ID NO: 22999 - DNA, 597 bp, synthetic construct
  source 1..597: mol_type = other DNA
cgcaccagccatgtctcgatcaagcacttctgtttccccggactgagtatcaatagactgctcacgcggttgaaggtgaaaacgtccgttacccggctaactacttcgagaaacctagtagcaccatagaaactgcagagtgtttcgctcagcacttcccccgtgtagatcaggtcgatgagtcactgcaatccccacgggtgaccgtggcagtggctgcgttggcggcctgcctatggggcaacccataggacgctctaaggtggacatggtgtgaagagtctattgagctagttagtagtcctccggcccctgaatgcggctaatcctaactgtggagcgcatactcccaaaccagggagcagtgcgtcgtaacgggcaactccgcagcggaaccgactactttgggtgtccgtgtttccttttattcctatactggctgcttatggtgacaattgagagattgttaccatatagctattggattggccatccagtgtgtaatagagcaatcatttaccaatttgttggatttactccattaacccacacgtctctcaacacactacatttcatcttactactgaacactagaaa

SEQ ID NO: 23000 - DNA, 547 bp, synthetic construct
  source 1..547: mol_type = other DNA
caatagactgctcacgcggttgaaggtgaaaacgtccgttacccggctaactacttcgagaaacctagtagcaccatagaaactgcagagtgtttcgctcagcacttcccccgtgtagatcaggtcgatgagtcactgcaatccccacgggtgaccgtggcagtggctgcgttggcggcctgcctatggggcaacccataggacgctctaaggtggacatggtgtgaagagtctattgagctagttagtagtcctccggcccctgaatgcggctaatcctaactgtggagcgcatactcccaaaccagggagcagtgcgtcgtaacgggcaactccgcagcggaaccgactactttgggtgtccgtgtttccttttattcctatactggctgcttatggtgacaattgagagattgttaccatatagctattggattggccatccagtgtgtaatagagcaatcatttaccaatttgttggatttactccattaacccacacgtctctcaacacactacatttcatcttactactgaacactagaaa

SEQ ID NO: 23001 - DNA, 697 bp, synthetic construct
  source 1..697: mol_type = other DNA
gtacaccggtattacggtacccttgtacgcctgttttatactccctacccctgcaacttagaagcaaataatccaagttcaatagtagggggtacaaaccagtaccaccacgaacaagcacttctgtttccccggtgatgttgtatagactgtacccacggttgaaaacaattgatccgttacccgctcttgtacttcgagaagcctagtatcatcttggaaccttcgatgcgttgcgctcagcactcaaccccagagtgtagcttgggtcgatgagtctggacaatccacaccggcgacggtggtccaggctgcgttggcggcctacctgtggcccaaagccacaggacgctagttgtgaacaaggtgtgaagagcctattgagctacaagagagtcctccggcccctgaatgcggctaatcccaaccacggagcaggtgatcacaacccagtgattagcctgtcgtaatgcgtaagtctgtggcggaaccgactactttgggtgaccgtgtttccttttatttttattgtggctgcttatggtgacaatcttagattgttatcataaagcgatttggattggccatccggtgaaagttaaacacattatttacttgtttgttggattcactccgttgtcctctcgcactacgtatattattaacgctgtgctattaattaggtcaatacatcaca

SEQ ID NO: 23002 - DNA, 647 bp, synthetic construct
  source 1..647: mol_type = other DNA
ctgcaacttagaagcaaataatccaagttcaatagtagggggtacaaaccagtaccaccacgaacaagcacttctgtttccccggtgatgttgtatagactgtacccacggttgaaaacaattgatccgttacccgctcttgtacttcgagaagcctagtatcatcttggaaccttcgatgcgttgcgctcagcactcaaccccagagtgtagcttgggtcgatgagtctggacaatccacaccggcgacggtggtccaggctgcgttggcggcctacctgtggcccaaagccacaggacgctagttgtgaacaaggtgtgaagagcctattgagctacaagagagtcctccggcccctgaatgcggctaatcccaaccacggagcaggtgatcacaacccagtgattagcctgtcgtaatgcgtaagtctgtggcggaaccgactactttgggtgaccgtgtttccttttatttttattgtggctgcttatggtgacaatcttagattgttatcataaagcgatttggattggccatccggtgaaagttaaacacattatttacttgtttgttggattcactccgttgtcctctcgcactacgtatattattaacgctgtgctattaattaggtcaatacatcaca

SEQ ID NO: 23003 - DNA, 597 bp, synthetic construct
  source 1..597: mol_type = other DNA
agtaccaccacgaacaagcacttctgtttccccggtgatgttgtatagactgtacccacggttgaaaacaattgatccgttacccgctcttgtacttcgagaagcctagtatcatcttggaaccttcgatgcgttgcgctcagcactcaaccccagagtgtagcttgggtcgatgagtctggacaatccacaccggcgacggtggtccaggctgcgttggcggcctacctgtggcccaaagccacaggacgctagttgtgaacaaggtgtgaagagcctattgagctacaagagagtcctccggcccctgaatgcggctaatcccaaccacggagcaggtgatcacaacccagtgattagcctgtcgtaatgcgtaagtctgtggcggaaccgactactttgggtgaccgtgtttccttttatttttattgtggctgcttatggtgacaatcttagattgttatcataaagcgatttggattggccatccggtgaaagttaaacacattatttacttgtttgttggattcactccgttgtcctctcgcactacgtatattattaacgctgtgctattaattaggtcaatacatcaca

SEQ ID NO: 23004 - DNA, 547 bp, synthetic construct
  source 1..547: mol_type = other DNA
tgtacccacggttgaaaacaattgatccgttacccgctcttgtacttcgagaagcctagtatcatcttggaaccttcgatgcgttgcgctcagcactcaaccccagagtgtagcttgggtcgatgagtctggacaatccacaccggcgacggtggtccaggctgcgttggcggcctacctgtggcccaaagccacaggacgctagttgtgaacaaggtgtgaagagcctattgagctacaagagagtcctccggcccctgaatgcggctaatcccaaccacggagcaggtgatcacaacccagtgattagcctgtcgtaatgcgtaagtctgtggcggaaccgactactttgggtgaccgtgtttccttttatttttattgtggctgcttatggtgacaatcttagattgttatcataaagcgatttggattggccatccggtgaaagttaaacacattatttacttgtttgttggattcactccgttgtcctctcgcactacgtatattattaacgctgtgctattaattaggtcaatacatcaca

SEQ ID NO: 23005 - DNA, 697 bp, synthetic construct
  source 1..697: mol_type = other DNA
gtacaccggtattacggtacccttgtacgcctgttttatacttccttcccccgtaacttagaagtttacaaaccaagttcaatagaagggggtacaaaccagtaccaccacgaacaagcacttctgtttccccggtgagtttgcatagactgtatccacggttgaaagtgaacgatccgttacccgctcttgtacttcgagaagcctagtaaccccttggaatcttcgatgcgttgcgctcagcactcaaacccagagtgtagcttaggtcgatgagtctggacactcctcaccggtgacggtggtccaggctgcgttggcggcctacctgtggtccaaagccacaggacgctagttgtgaacaaggtgtgaagagcctattgagctacttgagagtcctccggcccctgaatgcggctaatcctaaccatggatcaggtggtcacaatccagtgactggcctgtcgtaatgcgcaagtccgtggcggaaccgactactttgggtgtccgtgtttccttttattcttataatggctgcttatggtgacaatcatagattgttatcatatagcgaattggattggccatccggtgtgaacaaaacacttgattcacttgttggttgaatttgtttcattaattgaacacataccagagctcatttgattggcatttttgcttagacaattgtaccaca

SEQ ID NO: 23006 - DNA, 647 bp, synthetic construct
  source 1..647: mol_type = other DNA
ccgtaacttagaagtttacaaaccaagttcaatagaagggggtacaaaccagtaccaccacgaacaagcacttctgtttccccggtgagtttgcatagactgtatccacggttgaaagtgaacgatccgttacccgctcttgtacttcgagaagcctagtaaccccttggaatcttcgatgcgttgcgctcagcactcaaacccagagtgtagcttaggtcgatgagtctggacactcctcaccggtgacggtggtccaggctgcgttggcggcctacctgtggtccaaagccacaggacgctagttgtgaacaaggtgtgaagagcctattgagctacttgagagtcctccggcccctgaatgcggctaatcctaaccatggatcaggtggtcacaatccagtgactggcctgtcgtaatgcgcaagtccgtggcggaaccgactactttgggtgtccgtgtttccttttattcttataatggctgcttatggtgacaatcatagattgttatcatatagcgaattggattggccatccggtgtgaacaaaacacttgattcacttgttggttgaatttgtttcattaattgaacacataccagagctcatttgattggcatttttgcttagacaattgtaccaca

SEQ ID NO: 23007 - DNA, 597 bp, synthetic construct
  source 1..597: mol_type = other DNA
agtaccaccacgaacaagcacttctgtttccccggtgagtttgcatagactgtatccacggttgaaagtgaacgatccgttacccgctcttgtacttcgagaagcctagtaaccccttggaatcttcgatgcgttgcgctcagcactcaaacccagagtgtagcttaggtcgatgagtctggacactcctcaccggtgacggtggtccaggctgcgttggcggcctacctgtggtccaaagccacaggacgctagttgtgaacaaggtgtgaagagcctattgagctacttgagagtcctccggcccctgaatgcggctaatcctaaccatggatcaggtggtcacaatccagtgactggcctgtcgtaatgcgcaagtccgtggcggaaccgactactttgggtgtccgtgtttccttttattcttataatggctgcttatggtgacaatcatagattgttatcatatagcgaattggattggccatccggtgtgaacaaaacacttgattcacttgttggttgaatttgtttcattaattgaacacataccagagctcatttgattggcatttttgcttagacaattgtaccaca

SEQ ID NO: 23008 - DNA, 547 bp, synthetic construct
  source 1..547: mol_type = other DNA
tgtatccacggttgaaagtgaacgatccgttacccgctcttgtacttcgagaagcctagtaaccccttggaatcttcgatgcgttgcgctcagcactcaaacccagagtgtagcttaggtcgatgagtctggacactcctcaccggtgacggtggtccaggctgcgttggcggcctacctgtggtccaaagccacaggacgctagttgtgaacaaggtgtgaagagcctattgagctacttgagagtcctccggcccctgaatgcggctaatcctaaccatggatcaggtggtcacaatccagtgactggcctgtcgtaatgcgcaagtccgtggcggaaccgactactttgggtgtccgtgtttccttttattcttataatggctgcttatggtgacaatcatagattgttatcatatagcgaattggattggccatccggtgtgaacaaaacacttgattcacttgttggttgaatttgtttcattaattgaacacataccagagctcatttgattggcatttttgcttagacaattgtaccaca

SEQ ID NO: 23009 - DNA, 697 bp, synthetic construct
  source 1..697: mol_type = other DNA
gtacaccggtatcacggtacccttgtacgcctgttttatactcccttcccccagtaacttagaagtaataaaccaagttcaatagaagggggtacaaaccagtaccaccatgaacaagcacttctgttcccccggtgaggttgtatagactgtgcccacggttgaaagcgaccgatccgttatccgctcttgtacttcgagaagcctagtatcaccttggaatcttcgatgcattgcgttcagcacttgatcccggagtgtagcttaggccgatgagtctggacgttccccaccggtgacggtggtccaggctgcgttggcggcctacctgtggtccaaagccacaggacgctagttgtgaacaaggtgtgaagagcctattgagctacatgagagtcctccggcccctgaatgcggctaatcccaaccacggagcagatggttgcaatccagcggctagtctgtcgtaacgcgcaagtctgtggcggaaccgactactttgggtgtccgtgtttccttttatctttataatggctgcttatggtgacaatcattgattgttgccataaagcgacttggattggccatccggtgaaaatcagatcgattatctacttgtttattggattcacacccttatctatatacacgctaagtttgatcagagtcaccttgttaattagatattattaccacg

SEQ ID NO: 23010 - DNA, 647 bp, synthetic construct
  source 1..647: mol_type = other DNA
ccagtaacttagaagtaataaaccaagttcaatagaagggggtacaaaccagtaccaccatgaacaagcacttctgttcccccggtgaggttgtatagactgtgcccacggttgaaagcgaccgatccgttatccgctcttgtacttcgagaagcctagtatcaccttggaatcttcgatgcattgcgttcagcacttgatcccggagtgtagcttaggccgatgagtctggacgttccccaccggtgacggtggtccaggctgcgttggcggcctacctgtggtccaaagccacaggacgctagttgtgaacaaggtgtgaagagcctattgagctacatgagagtcctccggcccctgaatgcggctaatcccaaccacggagcagatggttgcaatccagcggctagtctgtcgtaacgcgcaagtctgtggcggaaccgactactttgggtgtccgtgtttccttttatctttataatggctgcttatggtgacaatcattgattgttgccataaagcgacttggattggccatccggtgaaaatcagatcgattatctacttgtttattggattcacacccttatctatatacacgctaagtttgatcagagtcaccttgttaattagatattattaccacg

SEQ ID NO: 23011 - DNA, 597 bp, synthetic construct
  source 1..597: mol_type = other DNA
agtaccaccatgaacaagcacttctgttcccccggtgaggttgtatagactgtgcccacggttgaaagcgaccgatccgttatccgctcttgtacttcgagaagcctagtatcaccttggaatcttcgatgcattgcgttcagcacttgatcccggagtgtagcttaggccgatgagtctggacgttccccaccggtgacggtggtccaggctgcgttggcggcctacctgtggtccaaagccacaggacgctagttgtgaacaaggtgtgaagagcctattgagctacatgagagtcctccggcccctgaatgcggctaatcccaaccacggagcagatggttgcaatccagcggctagtctgtcgtaacgcgcaagtctgtggcggaaccgactactttgggtgtccgtgtttccttttatctttataatggctgcttatggtgacaatcattgattgttgccataaagcgacttggattggccatccggtgaaaatcagatcgattatctacttgtttattggattcacacccttatctatatacacgctaagtttgatcagagtcaccttgttaattagatattattaccacg

SEQ ID NO: 23012 - DNA, 547 bp, synthetic construct
  source 1..547: mol_type = other DNA
tgtgcccacggttgaaagcgaccgatccgttatccgctcttgtacttcgagaagcctagtatcaccttggaatcttcgatgcattgcgttcagcacttgatcccggagtgtagcttaggccgatgagtctggacgttccccaccggtgacggtggtccaggctgcgttggcggcctacctgtggtccaaagccacaggacgctagttgtgaacaaggtgtgaagagcctattgagctacatgagagtcctccggcccctgaatgcggctaatcccaaccacggagcagatggttgcaatccagcggctagtctgtcgtaacgcgcaagtctgtggcggaaccgactactttgggtgtccgtgtttccttttatctttataatggctgcttatggtgacaatcattgattgttgccataaagcgacttggattggccatccggtgaaaatcagatcgattatctacttgtttattggattcacacccttatctatatacacgctaagtttgatcagagtcaccttgttaattagatattattaccacg

SEQ ID NO: 23013 - DNA, 697 bp, synthetic construct
  source 1..697: mol_type = other DNA
gtacactggtattacggtacctttgtacgcctgttttatgctcccttcccctgcaacttagaagattacaaaccaagttcaatagaagggggtgcaaaccagtaccaccacgaacaagcacttctgtttccccggtgaacttgtatagactgtacccacggtcgaaaacgagtgatccgttatccgctcttgtacttcgagaagcccagtaccttcttgggatcattgatgcgttgcgctcagcactcgaccccggagtgtagcttaggctgatgagtctggacatccctcaccggcgacggtggtccaggctgcgttggcggcctacctgtggtccaaagccacaggacgctaaatgtgaacaaggtgtgaagagcctattgagctacatgagagtcctccggcccctgaatgcggctaatcctaaccacggagcaggtggttgcaaaccagcaattggcctgtcgtaatgcgtaagtctgtggcggaaccgactactttgggtgtccgtgtttctctttatttttacaatggctgcttatggtgacaatcttagattgttgtcataaagcgaattggattggccatccggtgaagataaagcatatcatttatctatttattggattcactccattaaactcttggacttatcatttaatacaagtagtgttattgataagaagtgttcaccaca

SEQ ID NO: 23014 - DNA, 647 bp, synthetic construct
  source 1..647: mol_type = other DNA
ctgcaacttagaagattacaaaccaagttcaatagaagggggtgcaaaccagtaccaccacgaacaagcacttctgtttccccggtgaacttgtatagactgtacccacggtcgaaaacgagtgatccgttatccgctcttgtacttcgagaagcccagtaccttcttgggatcattgatgcgttgcgctcagcactcgaccccggagtgtagcttaggctgatgagtctggacatccctcaccggcgacggtggtccaggctgcgttggcggcctacctgtggtccaaagccacaggacgctaaatgtgaacaaggtgtgaagagcctattgagctacatgagagtcctccggcccctgaatgcggctaatcctaaccacggagcaggtggttgcaaaccagcaattggcctgtcgtaatgcgtaagtctgtggcggaaccgactactttgggtgtccgtgtttctctttatttttacaatggctgcttatggtgacaatcttagattgttgtcataaagcgaattggattggccatccggtgaagataaagcatatcatttatctatttattggattcactccattaaactcttggacttatcatttaatacaagtagtgttattgataagaagtgttcaccaca

SEQ ID NO: 23015 - DNA, 597 bp, synthetic construct
  source 1..597: mol_type = other DNA
agtaccaccacgaacaagcacttctgtttccccggtgaacttgtatagactgtacccacggtcgaaaacgagtgatccgttatccgctcttgtacttcgagaagcccagtaccttcttgggatcattgatgcgttgcgctcagcactcgaccccggagtgtagcttaggctgatgagtctggacatccctcaccggcgacggtggtccaggctgcgttggcggcctacctgtggtccaaagccacaggacgctaaatgtgaacaaggtgtgaagagcctattgagctacatgagagtcctccggcccctgaatgcggctaatcctaaccacggagcaggtggttgcaaaccagcaattggcctgtcgtaatgcgtaagtctgtggcggaaccgactactttgggtgtccgtgtttctctttatttttacaatggctgcttatggtgacaatcttagattgttgtcataaagcgaattggattggccatccggtgaagataaagcatatcatttatctatttattggattcactccattaaactcttggacttatcatttaatacaagtagtgttattgataagaagtgttcaccaca

SEQ ID NO: 23016 - DNA, 547 bp, synthetic construct
  source 1..547: mol_type = other DNA
tgtacccacggtcgaaaacgagtgatccgttatccgctcttgtacttcgagaagcccagtaccttcttgggatcattgatgcgttgcgctcagcactcgaccccggagtgtagcttaggctgatgagtctggacatccctcaccggcgacggtggtccaggctgcgttggcggcctacctgtggtccaaagccacaggacgctaaatgtgaacaaggtgtgaagagcctattgagctacatgagagtcctccggcccctgaatgcggctaatcctaaccacggagcaggtggttgcaaaccagcaattggcctgtcgtaatgcgtaagtctgtggcggaaccgactactttgggtgtccgtgtttctctttatttttacaatggctgcttatggtgacaatcttagattgttgtcataaagcgaattggattggccatccggtgaagataaagcatatcatttatctatttattggattcactccattaaactcttggacttatcatttaatacaagtagtgttattgataagaagtgttcaccaca

SEQ ID NO: 23017 - DNA, 697 bp, synthetic construct
  source 1..697: mol_type = other DNA
gtactccggtattacggtacccttgtacgcctgttttatacccccttcccccagaaacttagacgctatgaaaccaagttcaataggagggggcacgaaccagtgtcaccacgaacaagcacttctgtttccccggtgattttacataagctgtacccacggctgaaagtgaatgatccgttatccgcttgggtacttcgagaagcctagtaccacctttggatcttcgatgcgttgcgctcagcactctaccccgagtgtagcttaggtcgatgagtctgggcataccccaccggtgacggtggcccaggctgcgttggcggcctacccatggttaacaccatgggacgctagttgtgaacaaggtgtgaagagcctattgagctactcaagagtcctccggcccctgaatgcggctaatcctaaccatggagcaggtgctttcaatccagaaagtggcctgtcgtaatgcgtaagtccgtggcggaaccgactactttgggtgtccgtgtttccttttttacttttgtatggctgtttatggtgacaatcatagattgttatcataaagcgaattggattggccatccggtaaaaattaaacacatcatttatctatttgttggattcgctccaatcacttctaaaacacttcagttgatacgtgtagtattaataatcaggctattgtatcaca

SEQ ID NO: 23018 - DNA, 647 bp, synthetic construct
  source 1..647: mol_type = other DNA
ccagaaacttagacgctatgaaaccaagttcaataggagggggcacgaaccagtgtcaccacgaacaagcacttctgtttccccggtgattttacataagctgtacccacggctgaaagtgaatgatccgttatccgcttgggtacttcgagaagcctagtaccacctttggatcttcgatgcgttgcgctcagcactctaccccgagtgtagcttaggtcgatgagtctgggcataccccaccggtgacggtggcccaggctgcgttggcggcctacccatggttaacaccatgggacgctagttgtgaacaaggtgtgaagagcctattgagctactcaagagtcctccggcccctgaatgcggctaatcctaaccatggagcaggtgctttcaatccagaaagtggcctgtcgtaatgcgtaagtccgtggcggaaccgactactttgggtgtccgtgtttccttttttacttttgtatggctgtttatggtgacaatcatagattgttatcataaagcgaattggattggccatccggtaaaaattaaacacatcatttatctatttgttggattcgctccaatcacttctaaaacacttcagttgatacgtgtagtattaataatcaggctattgtatcaca

SEQ ID NO: 23019 - DNA, 597 bp, synthetic construct
  source 1..597: mol_type = other DNA
cagtgtcaccacgaacaagcacttctgtttccccggtgattttacataagctgtacccacggctgaaagtgaatgatccgttatccgcttgggtacttcgagaagcctagtaccacctttggatcttcgatgcgttgcgctcagcactctaccccgagtgtagcttaggtcgatgagtctgggcataccccaccggtgacggtggcccaggctgcgttggcggcctacccatggttaacaccatgggacgctagttgtgaacaaggtgtgaagagcctattgagctactcaagagtcctccggcccctgaatgcggctaatcctaaccatggagcaggtgctttcaatccagaaagtggcctgtcgtaatgcgtaagtccgtggcggaaccgactactttgggtgtccgtgtttccttttttacttttgtatggctgtttatggtgacaatcatagattgttatcataaagcgaattggattggccatccggtaaaaattaaacacatcatttatctatttgttggattcgctccaatcacttctaaaacacttcagttgatacgtgtagtattaataatcaggctattgtatcaca

SEQ ID NO: 23020 - DNA, 547 bp, synthetic construct
  source 1..547: mol_type = other DNA
ctgtacccacggctgaaagtgaatgatccgttatccgcttgggtacttcgagaagcctagtaccacctttggatcttcgatgcgttgcgctcagcactctaccccgagtgtagcttaggtcgatgagtctgggcataccccaccggtgacggtggcccaggctgcgttggcggcctacccatggttaacaccatgggacgctagttgtgaacaaggtgtgaagagcctattgagctactcaagagtcctccggcccctgaatgcggctaatcctaaccatggagcaggtgctttcaatccagaaagtggcctgtcgtaatgcgtaagtccgtggcggaaccgactactttgggtgtccgtgtttccttttttacttttgtatggctgtttatggtgacaatcatagattgttatcataaagcgaattggattggccatccggtaaaaattaaacacatcatttatctatttgttggattcgctccaatcacttctaaaacacttcagttgatacgtgtagtattaataatcaggctattgtatcaca

SEQ ID NO: 23021 - DNA, 697 bp, synthetic construct
  source 1..697: mol_type = other DNA
gtactccggtattgcggtacccttgtacgcctgttttatactcccttcccccgtaacttagaagcaatcaaacaaagttcaatagaagggggtacaaaccagtaccaccacgaacaagcacttctgtttccccggtgaagttgtatagactgtacccacggttaaaagcaattgatccgttacccgctcttgtacttcgagaagcctagtactaccttggaatcttcgatgcgttgcgctcaacactcaaccccagagtgtagcttgggctgatgagtctggacgttccccaccggcgacggtggtccaggctgcgttggcggcctacctgtggcccaaagccacaggacgctagttgtgaacaaggtgcgaagagcctattgagctacaagagagtcctccggcccctgaatgcggctaatcccaaccacggagcaggtagttgcaagccagcaatcgacctgtcgtaacgcgtaagtctgtggcggaaccgactactttgggtgtccgtgtttccttttaattttaaactggctgcttatggtgacaatcattgattgttatcataaagcgaattggattggccatccggtgagaatcagatccattatctacttgttcattggatttactccattgacaacatacacatacgaccttattagagtcaatttactattgagacatctccaccata

SEQ ID NO: 23022 - DNA, 647 bp, synthetic construct
  source 1..647: mol_type = other DNA
ccgtaacttagaagcaatcaaacaaagttcaatagaagggggtacaaaccagtaccaccacgaacaagcacttctgtttccccggtgaagttgtatagactgtacccacggttaaaagcaattgatccgttacccgctcttgtacttcgagaagcctagtactaccttggaatcttcgatgcgttgcgctcaacactcaaccccagagtgtagcttgggctgatgagtctggacgttccccaccggcgacggtggtccaggctgcgttggcggcctacctgtggcccaaagccacaggacgctagttgtgaacaaggtgcgaagagcctattgagctacaagagagtcctccggcccctgaatgcggctaatcccaaccacggagcaggtagttgcaagccagcaatcgacctgtcgtaacgcgtaagtctgtggcggaaccgactactttgggtgtccgtgtttccttttaattttaaactggctgcttatggtgacaatcattgattgttatcataaagcgaattggattggccatccggtgagaatcagatccattatctacttgttcattggatttactccattgacaacatacacatacgaccttattagagtcaatttactattgagacatctccaccata

SEQ ID NO: 23023 - DNA, 597 bp, synthetic construct
  source 1..597: mol_type = other DNA
agtaccaccacgaacaagcacttctgtttccccggtgaagttgtatagactgtacccacggttaaaagcaattgatccgttacccgctcttgtacttcgagaagcctagtactaccttggaatcttcgatgcgttgcgctcaacactcaaccccagagtgtagcttgggctgatgagtctggacgttccccaccggcgacggtggtccaggctgcgttggcggcctacctgtggcccaaagccacaggacgctagttgtgaacaaggtgcgaagagcctattgagctacaagagagtcctccggcccctgaatgcggctaatcccaaccacggagcaggtagttgcaagccagcaatcgacctgtcgtaacgcgtaagtctgtggcggaaccgactactttgggtgtccgtgtttccttttaattttaaactggctgcttatggtgacaatcattgattgttatcataaagcgaattggattggccatccggtgagaatcagatccattatctacttgttcattggatttactccattgacaacatacacatacgaccttattagagtcaatttactattgagacatctccaccata

SEQ ID NO: 23024 - DNA, 547 bp, synthetic construct
  source 1..547: mol_type = other DNA
tgtacccacggttaaaagcaattgatccgttacccgctcttgtacttcgagaagcctagtactaccttggaatcttcgatgcgttgcgctcaacactcaaccccagagtgtagcttgggctgatgagtctggacgttccccaccggcgacggtggtccaggctgcgttggcggcctacctgtggcccaaagccacaggacgctagttgtgaacaaggtgcgaagagcctattgagctacaagagagtcctccggcccctgaatgcggctaatcccaaccacggagcaggtagttgcaagccagcaatcgacctgtcgtaacgcgtaagtctgtggcggaaccgactactttgggtgtccgtgtttccttttaattttaaactggctgcttatggtgacaatcattgattgttatcataaagcgaattggattggccatccggtgagaatcagatccattatctacttgttcattggatttactccattgacaacatacacatacgaccttattagagtcaatttactattgagacatctccaccata

SEQ ID NO: 23025 - DNA, 697 bp, synthetic construct
  source 1..697: mol_type = other DNA
gtacactggtatcacggtacccttgtacgcctgttttatactcccttcccccgtaacttagaagccataaatccaagttcaacagaagggggcacaaaccagtgccaccacgaacaagcacttctgtctccccggtgaagttgcatagactgtaaccacggttaaaagcgattgatccgttatccgctcatgtacttcgagaagcctagtaccaccttggaaccttcgacgcgttgcgctcagcactcaaacccagagtgtagcttaggccgatgagtctggacgttccccaccggcgacggtggtccaggctgcgttggcggcctacctgtggctcaaagccacaggacgctagttgcgaacagggtgtgaagagcctattgagctacatgagattcctccggcccctgaatgcggctaatcctaaccgcggagcaggtagttgcaagccagcaactggcctgtcgtaacgcgtaagtctgcggcggaaccgactactttgggtgtccgtgtttcctttatttcttataatggctgcttatggtgacaatcatagattgttatcataaagcgaattggattggccatccagtgaaagtcagactgattatccttctgtttgttgggtttgttccactcaattcacacactttgcacttaatcagaattgtcttattgacacgacaatatcatcact

SEQ ID NO: 23026 - DNA, 647 bp, synthetic construct
  source 1..647: mol_type = other DNA
ccgtaacttagaagccataaatccaagttcaacagaagggggcacaaaccagtgccaccacgaacaagcacttctgtctccccggtgaagttgcatagactgtaaccacggttaaaagcgattgatccgttatccgctcatgtacttcgagaagcctagtaccaccttggaaccttcgacgcgttgcgctcagcactcaaacccagagtgtagcttaggccgatgagtctggacgttccccaccggcgacggtggtccaggctgcgttggcggcctacctgtggctcaaagccacaggacgctagttgcgaacagggtgtgaagagcctattgagctacatgagattcctccggcccctgaatgcggctaatcctaaccgcggagcaggtagttgcaagccagcaactggcctgtcgtaacgcgtaagtctgcggcggaaccgactactttgggtgtccgtgtttcctttatttcttataatggctgcttatggtgacaatcatagattgttatcataaagcgaattggattggccatccagtgaaagtcagactgattatccttctgtttgttgggtttgttccactcaattcacacactttgcacttaatcagaattgtcttattgacacgacaatatcatcact

SEQ ID NO: 23027 - DNA, 597 bp, synthetic construct
  source 1..597: mol_type = other DNA
agtgccaccacgaacaagcacttctgtctccccggtgaagttgcatagactgtaaccacggttaaaagcgattgatccgttatccgctcatgtacttcgagaagcctagtaccaccttggaaccttcgacgcgttgcgctcagcactcaaacccagagtgtagcttaggccgatgagtctggacgttccccaccggcgacggtggtccaggctgcgttggcggcctacctgtggctcaaagccacaggacgctagttgcgaacagggtgtgaagagcctattgagctacatgagattcctccggcccctgaatgcggctaatcctaaccgcggagcaggtagttgcaagccagcaactggcctgtcgtaacgcgtaagtctgcggcggaaccgactactttgggtgtccgtgtttcctttatttcttataatggctgcttatggtgacaatcatagattgttatcataaagcgaattggattggccatccagtgaaagtcagactgattatccttctgtttgttgggtttgttccactcaattcacacactttgcacttaatcagaattgtcttattgacacgacaatatcatcact

SEQ ID NO: 23028 - DNA, 547 bp, synthetic construct
  source 1..547: mol_type = other DNA
tgtaaccacggttaaaagcgattgatccgttatccgctcatgtacttcgagaagcctagtaccaccttggaaccttcgacgcgttgcgctcagcactcaaacccagagtgtagcttaggccgatgagtctggacgttccccaccggcgacggtggtccaggctgcgttggcggcctacctgtggctcaaagccacaggacgctagttgcgaacagggtgtgaagagcctattgagctacatgagattcctccggcccctgaatgcggctaatcctaaccgcggagcaggtagttgcaagccagcaactggcctgtcgtaacgcgtaagtctgcggcggaaccgactactttgggtgtccgtgtttcctttatttcttataatggctgcttatggtgacaatcatagattgttatcataaagcgaattggattggccatccagtgaaagtcagactgattatccttctgtttgttgggtttgttccactcaattcacacactttgcacttaatcagaattgtcttattgacacgacaatatcatcact

SEQ ID NO: 23029 - DNA, 697 bp, synthetic construct
  source 1..697: mol_type = other DNA
gtactctggtattacggtacctttgtacgcctgttttatactcccttcccctgtaacttagaagcaatctaacctagttcaataggagggggtacaaaccagtaccactacgaacaagcacttctgttaccccggtgaagttgtatagactgtgcccacggtcgaaaatgactgatccgttatccgctcatgtacttcgggaagcctagtaccatcttcggatcttcgatgcgttgcgctcagcactcgaccccagagtgtagcttaggtcgatgagtctggacaatcctcactggcgacagtggtccaggctgcgttggcggcctacctgtggtccaaagccacaggacgctagttgtgaacaaggtgtgaagagcctactgagctacttgagagtcctccggcccctgaatgcggctaatcccaaccacggagcaagtagttgcaaaccagcaaccagcttgtcgtaacgcgtaagtctgtggcggaaccgactactttgggtgtccgtgtttccttttatttttacactggctgcttatggtgacaatcatagattgttatcataaggcgaattggattggccacccggtgtaagtcagatcaattgtctactcgtttgttggatatactccaataacgcactacactcttgagcttaacagagttgttctgctggcgagaagttgctatcgca

SEQ ID NO: 23030 - DNA, 647 bp, synthetic construct
  source 1..647: mol_type = other DNA
ctgtaacttagaagcaatctaacctagttcaataggagggggtacaaaccagtaccactacgaacaagcacttctgttaccccggtgaagttgtatagactgtgcccacggtcgaaaatgactgatccgttatccgctcatgtacttcgggaagcctagtaccatcttcggatcttcgatgcgttgcgctcagcactcgaccccagagtgtagcttaggtcgatgagtctggacaatcctcactggcgacagtggtccaggctgcgttggcggcctacctgtggtccaaagccacaggacgctagttgtgaacaaggtgtgaagagcctactgagctacttgagagtcctccggcccctgaatgcggctaatcccaaccacggagcaagtagttgcaaaccagcaaccagcttgtcgtaacgcgtaagtctgtggcggaaccgactactttgggtgtccgtgtttccttttatttttacactggctgcttatggtgacaatcatagattgttatcataaggcgaattggattggccacccggtgtaagtcagatcaattgtctactcgtttgttggatatactccaataacgcactacactcttgagcttaacagagttgttctgctggcgagaagttgctatcgca

SEQ ID NO: 23031 - DNA, 597 bp, synthetic construct
  source 1..597: mol_type = other DNA
agtaccactacgaacaagcacttctgttaccccggtgaagttgtatagactgtgcccacggtcgaaaatgactgatccgttatccgctcatgtacttcgggaagcctagtaccatcttcggatcttcgatgcgttgcgctcagcactcgaccccagagtgtagcttaggtcgatgagtctggacaatcctcactggcgacagtggtccaggctgcgttggcggcctacctgtggtccaaagccacaggacgctagttgtgaacaaggtgtgaagagcctactgagctacttgagagtcctccggcccctgaatgcggctaatcccaaccacggagcaagtagttgcaaaccagcaaccagcttgtcgtaacgcgtaagtctgtggcggaaccgactactttgggtgtccgtgtttccttttatttttacactggctgcttatggtgacaatcatagattgttatcataaggcgaattggattggccacccggtgtaagtcagatcaattgtctactcgtttgttggatatactccaataacgcactacactcttgagcttaacagagttgttctgctggcgagaagttgctatcgca

SEQ ID NO: 23032 - DNA, 547 bp, synthetic construct
  source 1..547: mol_type = other DNA
tgtgcccacggtcgaaaatgactgatccgttatccgctcatgtacttcgggaagcctagtaccatcttcggatcttcgatgcgttgcgctcagcactcgaccccagagtgtagcttaggtcgatgagtctggacaatcctcactggcgacagtggtccaggctgcgttggcggcctacctgtggtccaaagccacaggacgctagttgtgaacaaggtgtgaagagcctactgagctacttgagagtcctccggcccctgaatgcggctaatcccaaccacggagcaagtagttgcaaaccagcaaccagcttgtcgtaacgcgtaagtctgtggcggaaccgactactttgggtgtccgtgtttccttttatttttacactggctgcttatggtgacaatcatagattgttatcataaggcgaattggattggccacccggtgtaagtcagatcaattgtctactcgtttgttggatatactccaataacgcactacactcttgagcttaacagagttgttctgctggcgagaagttgctatcgca

SEQ ID NO: 23033 - DNA, 697 bp, synthetic construct
  source 1..697: mol_type = other DNA
ctagtactctggtatcgcggtacctttgtacgcctgttttatacccctaccccatgtaactttagaagcagttcaacaagttcaatagggggggtgcaaaccagcaccaccacgaacaagcacttctgtaaccccggtgaccttgtataagctgtacccacggctgaaagcgagtgatccgttatccgcttaagtacttcgagaagcctagtatcaccttagaatcttcgatgcgttgcgctcagcactctatcccgagtgtagcttaggctgatgagtctgggcgttcctcaccggcgacggtggcccaggctgcgttggcggcctacccatggctaacgccatgggacgctagatgtgaacaaggtgtgaagagcctattgagctacttaagagtcctccggcccctgaatgcggctaatcccaaccacggagcaggtgccttcaacccagagggtggcctgtcgtaacgcgcaagtctgtggcggaaccgactactttgggtgtccgtgtttccttttatcttttatatggctgcttatggtgacaatcatagattgttatcataaagcgacttggattggccatccggtaaaatacaaacacatcatttacttgtttgttggatttactccactctcccaatttactcctagcataatatccattgttttgttaacaagacattactatcaca

SEQ ID NO: 23034 - DNA, 647 bp, synthetic construct
  source 1..647: mol_type = other DNA
cccatgtaactttagaagcagttcaacaagttcaatagggggggtgcaaaccagcaccaccacgaacaagcacttctgtaaccccggtgaccttgtataagctgtacccacggctgaaagcgagtgatccgttatccgcttaagtacttcgagaagcctagtatcaccttagaatcttcgatgcgttgcgctcagcactctatcccgagtgtagcttaggctgatgagtctgggcgttcctcaccggcgacggtggcccaggctgcgttggcggcctacccatggctaacgccatgggacgctagatgtgaacaaggtgtgaagagcctattgagctacttaagagtcctccggcccctgaatgcggctaatcccaaccacggagcaggtgccttcaacccagagggtggcctgtcgtaacgcgcaagtctgtggcggaaccgactactttgggtgtccgtgtttccttttatcttttatatggctgcttatggtgacaatcatagattgttatcataaagcgacttggattggccatccggtaaaatacaaacacatcatttacttgtttgttggatttactccactctcccaatttactcctagcataatatccattgttttgttaacaagacattactatcaca

SEQ ID NO: 23035 - DNA, 597 bp, synthetic construct
  source 1..597: mol_type = other DNA
ccagcaccaccacgaacaagcacttctgtaaccccggtgaccttgtataagctgtacccacggctgaaagcgagtgatccgttatccgcttaagtacttcgagaagcctagtatcaccttagaatcttcgatgcgttgcgctcagcactctatcccgagtgtagcttaggctgatgagtctgggcgttcctcaccggcgacggtggcccaggctgcgttggcggcctacccatggctaacgccatgggacgctagatgtgaacaaggtgtgaagagcctattgagctacttaagagtcctccggcccctgaatgcggctaatcccaaccacggagcaggtgccttcaacccagagggtggcctgtcgtaacgcgcaagtctgtggcggaaccgactactttgggtgtccgtgtttccttttatcttttatatggctgcttatggtgacaatcatagattgttatcataaagcgacttggattggccatccggtaaaatacaaacacatcatttacttgtttgttggatttactccactctcccaatttactcctagcataatatccattgttttgttaacaagacattactatcaca

SEQ ID NO: 23036 - DNA, 547 bp, synthetic construct
  source 1..547: mol_type = other DNA
gctgtacccacggctgaaagcgagtgatccgttatccgcttaagtacttcgagaagcctagtatcaccttagaatcttcgatgcgttgcgctcagcactctatcccgagtgtagcttaggctgatgagtctgggcgttcctcaccggcgacggtggcccaggctgcgttggcggcctacccatggctaacgccatgggacgctagatgtgaacaaggtgtgaagagcctattgagctacttaagagtcctccggcccctgaatgcggctaatcccaaccacggagcaggtgccttcaacccagagggtggcctgtcgtaacgcgcaagtctgtggcggaaccgactactttgggtgtccgtgtttccttttatcttttatatggctgcttatggtgacaatcatagattgttatcataaagcgacttggattggccatccggtaaaatacaaacacatcatttacttgtttgttggatttactccactctcccaatttactcctagcataatatccattgttttgttaacaagacattactatcaca

SEQ ID NO: 23037 - DNA, 697 bp, synthetic construct
  source 1..697: mol_type = other DNA
gtactctggtacccggtacccttgtacgcctgttttatatcccccttcccatgtaactttagaagcaattcactaagttcaacagggggggtgcaaaccagtaccaccacgaacaagcacttctgtttccccggtgatttcacataagctgtgcccacggccgaaagtggatgatccgttacccgcttgggtacttcgagaagcctagtatcaccttggaatcttcgacgcgttgcgttcagcgctctaacccgagtgtagcttaggctgatgagtctgggcgatccccaccggtgacggtggcccaggctgcgttggcggcctacccatggttaacgccatgggacgctagttttgaacaaggtgtgaagagcctattgagctactcaagagtcctccggcccctgaatgcggctaatcccaaccacggagcaagtgtcctcaaaccagagggtggcttgtcgtaacgcgcaagtctgtggcggaaccgactactttgggtgaccgtgtttccttttatttcatatttggctgcttatggtgacaatcacggattgttatcataaagcgaattggattggccatccggtgaaatacaagcacattatttacctttttgtcggattcattccaatagaatattcttcgccaaagttgatccaaataatcttagtgattagaagttattatttcagca

SEQ ID NO: 23038 - DNA, 647 bp, synthetic construct
  source 1..647: mol_type = other DNA
atgtaactttagaagcaattcactaagttcaacagggggggtgcaaaccagtaccaccacgaacaagcacttctgtttccccggtgatttcacataagctgtgcccacggccgaaagtggatgatccgttacccgcttgggtacttcgagaagcctagtatcaccttggaatcttcgacgcgttgcgttcagcgctctaacccgagtgtagcttaggctgatgagtctgggcgatccccaccggtgacggtggcccaggctgcgttggcggcctacccatggttaacgccatgggacgctagttttgaacaaggtgtgaagagcctattgagctactcaagagtcctccggcccctgaatgcggctaatcccaaccacggagcaagtgtcctcaaaccagagggtggcttgtcgtaacgcgcaagtctgtggcggaaccgactactttgggtgaccgtgtttccttttatttcatatttggctgcttatggtgacaatcacggattgttatcataaagcgaattggattggccatccggtgaaatacaagcacattatttacctttttgtcggattcattccaatagaatattcttcgccaaagttgatccaaataatcttagtgattagaagttattatttcagca

SEQ ID NO: 23039 - DNA, 597 bp, synthetic construct
  source 1..597: mol_type = other DNA
gtaccaccacgaacaagcacttctgtttccccggtgatttcacataagctgtgcccacggccgaaagtggatgatccgttacccgcttgggtacttcgagaagcctagtatcaccttggaatcttcgacgcgttgcgttcagcgctctaacccgagtgtagcttaggctgatgagtctgggcgatccccaccggtgacggtggcccaggctgcgttggcggcctacccatggttaacgccatgggacgctagttttgaacaaggtgtgaagagcctattgagctactcaagagtcctccggcccctgaatgcggctaatcccaaccacggagcaagtgtcctcaaaccagagggtggcttgtcgtaacgcgcaagtctgtggcggaaccgactactttgggtgaccgtgtttccttttatttcatatttggctgcttatggtgacaatcacggattgttatcataaagcgaattggattggccatccggtgaaatacaagcacattatttacctttttgtcggattcattccaatagaatattcttcgccaaagttgatccaaataatcttagtgattagaagttattatttcagca

SEQ ID NO: 23040 - DNA, 547 bp, synthetic construct
  source 1..547: mol_type = other DNA
gtgcccacggccgaaagtggatgatccgttacccgcttgggtacttcgagaagcctagtatcaccttggaatcttcgacgcgttgcgttcagcgctctaacccgagtgtagcttaggctgatgagtctgggcgatccccaccggtgacggtggcccaggctgcgttggcggcctacccatggttaacgccatgggacgctagttttgaacaaggtgtgaagagcctattgagctactcaagagtcctccggcccctgaatgcggctaatcccaaccacggagcaagtgtcctcaaaccagagggtggcttgtcgtaacgcgcaagtctgtggcggaaccgactactttgggtgaccgtgtttccttttatttcatatttggctgcttatggtgacaatcacggattgttatcataaagcgaattggattggccatccggtgaaatacaagcacattatttacctttttgtcggattcattccaatagaatattcttcgccaaagttgatccaaataatcttagtgattagaagttattatttcagca

SEQ ID NO: 23041 - DNA, 697 bp, synthetic construct
  source 1..697: mol_type = other DNA
gtactccggtattacggtacccttgtacgcctgttttatactcccttcccctgtaacttagaagcatacaaaccaagttcaatagaagggggtacaaaccagtaccaccacgaacaagcactcctgtttccccggtgacattgcatagactgtacccacggttgaaagcgatcgatccgttacccgctcctgtacttcgagaagcctagtatcatcttggaatcttcgatgcgttgcgctcagcactcaaccccagagtgtagcttaggctgatgagtctggacgtcccccaccggcgacggtggtccaggctgcgttggcggcctacctgtggcccaaagccacaggacgctagttgtgaacaaggtgtgaagagcctattgagctacaagagagtcctccggcccctgaatgcggctaatcctaaccacggagcaggcagttgcaaaccagcaaccggcctgtcgtaacgcgcaagtctgtggcggaaccgactactttgggtgtccgtgtttccttttatttttacaatggctgcttatggtgacaatcatagattgttatcataaagcgacttggattggccatccggtgaaagtaaaacacattgtttacttgtttgttggattcactccaattaacacttttacttacaaactcattacaacaactctattaattagagataagcatcaca

SEQ ID NO: 23042 - DNA, 647 bp, synthetic construct
  source 1..647: mol_type = other DNA
ctgtaacttagaagcatacaaaccaagttcaatagaagggggtacaaaccagtaccaccacgaacaagcactcctgtttccccggtgacattgcatagactgtacccacggttgaaagcgatcgatccgttacccgctcctgtacttcgagaagcctagtatcatcttggaatcttcgatgcgttgcgctcagcactcaaccccagagtgtagcttaggctgatgagtctggacgtcccccaccggcgacggtggtccaggctgcgttggcggcctacctgtggcccaaagccacaggacgctagttgtgaacaaggtgtgaagagcctattgagctacaagagagtcctccggcccctgaatgcggctaatcctaaccacggagcaggcagttgcaaaccagcaaccggcctgtcgtaacgcgcaagtctgtggcggaaccgactactttgggtgtccgtgtttccttttatttttacaatggctgcttatggtgacaatcatagattgttatcataaagcgacttggattggccatccggtgaaagtaaaacacattgtttacttgtttgttggattcactccaattaacacttttacttacaaactcattacaacaactctattaattagagataagcatcaca

SEQ ID NO: 23043 - DNA, 597 bp, synthetic construct
  source 1..597: mol_type = other DNA
agtaccaccacgaacaagcactcctgtttccccggtgacattgcatagactgtacccacggttgaaagcgatcgatccgttacccgctcctgtacttcgagaagcctagtatcatcttggaatcttcgatgcgttgcgctcagcactcaaccccagagtgtagcttaggctgatgagtctggacgtcccccaccggcgacggtggtccaggctgcgttggcggcctacctgtggcccaaagccacaggacgctagttgtgaacaaggtgtgaagagcctattgagctacaagagagtcctccggcccctgaatgcggctaatcctaaccacggagcaggcagttgcaaaccagcaaccggcctgtcgtaacgcgcaagtctgtggcggaaccgactactttgggtgtccgtgtttccttttatttttacaatggctgcttatggtgacaatcatagattgttatcataaagcgacttggattggccatccggtgaaagtaaaacacattgtttacttgtttgttggattcactccaattaacacttttacttacaaactcattacaacaactctattaattagagataagcatcaca

SEQ ID NO: 23044 - DNA, 547 bp, synthetic construct
  source 1..547: mol_type = other DNA
tgtacccacggttgaaagcgatcgatccgttacccgctcctgtacttcgagaagcctagtatcatcttggaatcttcgatgcgttgcgctcagcactcaaccccagagtgtagcttaggctgatgagtctggacgtcccccaccggcgacggtggtccaggctgcgttggcggcctacctgtggcccaaagccacaggacgctagttgtgaacaaggtgtgaagagcctattgagctacaagagagtcctccggcccctgaatgcggctaatcctaaccacggagcaggcagttgcaaaccagcaaccggcctgtcgtaacgcgcaagtctgtggcggaaccgactactttgggtgtccgtgtttccttttatttttacaatggctgcttatggtgacaatcatagattgttatcataaagcgacttggattggccatccggtgaaagtaaaacacattgtttacttgtttgttggattcactccaattaacacttttacttacaaactcattacaacaactctattaattagagataagcatcaca

SEQ ID NO: 23045 - DNA, 697 bp, synthetic construct
  source 1..697: mol_type = other DNA
gtacactggtattacggtacccttgtacgcctgttttatactcccttccccgtaacttagaagctatgtaatccaagttcaatagaagggggtacaaaccagtaccaccacgaacgagcacttctgtttccccggtgagattgtataagctgttcccacggccgaaaacgatcgatccgttacccgctcttgcacttcgagaagcctagtatcatcttgggatcttcgatgcgttgcgctcagcactctaccccagagtgtagcttaggtcgatgagtctggacattcctcaccggcgacggtggtccaggctgcgttggcggcctacctgtggtccaaagccacaggacgctagttgtaaacaaggtgtgaagagcctattgagctgcaagagagtcctccggcccctgaatgcggctaatcccaaccacggagcaggtggttgcaacccagtaactggcctgtcgtaacgcgtaagtctgtggcggaaccgactactttgggtgtccgtgtttccttttatttctataatggctgcttatggtgacaatcatagattgttatcataaagcgaattggattggccatccggtgagagttaagacaattatccacttgtttgttggatttacccctctgactaattacacactcaactttattaggattgtcattctagtgagatattaccatcaca

SEQ ID NO: 23046 - DNA, 647 bp, synthetic construct
  source 1..647: mol_type = other DNA
cgtaacttagaagctatgtaatccaagttcaatagaagggggtacaaaccagtaccaccacgaacgagcacttctgtttccccggtgagattgtataagctgttcccacggccgaaaacgatcgatccgttacccgctcttgcacttcgagaagcctagtatcatcttgggatcttcgatgcgttgcgctcagcactctaccccagagtgtagcttaggtcgatgagtctggacattcctcaccggcgacggtggtccaggctgcgttggcggcctacctgtggtccaaagccacaggacgctagttgtaaacaaggtgtgaagagcctattgagctgcaagagagtcctccggcccctgaatgcggctaatcccaaccacggagcaggtggttgcaacccagtaactggcctgtcgtaacgcgtaagtctgtggcggaaccgactactttgggtgtccgtgtttccttttatttctataatggctgcttatggtgacaatcatagattgttatcataaagcgaattggattggccatccggtgagagttaagacaattatccacttgtttgttggatttacccctctgactaattacacactcaactttattaggattgtcattctagtgagatattaccatcaca

SEQ ID NO: 23047 - DNA, 597 bp, synthetic construct
  source 1..597: mol_type = other DNA
agtaccaccacgaacgagcacttctgtttccccggtgagattgtataagctgttcccacggccgaaaacgatcgatccgttacccgctcttgcacttcgagaagcctagtatcatcttgggatcttcgatgcgttgcgctcagcactctaccccagagtgtagcttaggtcgatgagtctggacattcctcaccggcgacggtggtccaggctgcgttggcggcctacctgtggtccaaagccacaggacgctagttgtaaacaaggtgtgaagagcctattgagctgcaagagagtcctccggcccctgaatgcggctaatcccaaccacggagcaggtggttgcaacccagtaactggcctgtcgtaacgcgtaagtctgtggcggaaccgactactttgggtgtccgtgtttccttttatttctataatggctgcttatggtgacaatcatagattgttatcataaagcgaattggattggccatccggtgagagttaagacaattatccacttgtttgttggatttacccctctgactaattacacactcaactttattaggattgtcattctagtgagatattaccatcaca

SEQ ID NO: 23048 - DNA, 547 bp, synthetic construct
  source 1..547: mol_type = other DNA
tgttcccacggccgaaaacgatcgatccgttacccgctcttgcacttcgagaagcctagtatcatcttgggatcttcgatgcgttgcgctcagcactctaccccagagtgtagcttaggtcgatgagtctggacattcctcaccggcgacggtggtccaggctgcgttggcggcctacctgtggtccaaagccacaggacgctagttgtaaacaaggtgtgaagagcctattgagctgcaagagagtcctccggcccctgaatgcggctaatcccaaccacggagcaggtggttgcaacccagtaactggcctgtcgtaacgcgtaagtctgtggcggaaccgactactttgggtgtccgtgtttccttttatttctataatggctgcttatggtgacaatcatagattgttatcataaagcgaattggattggccatccggtgagagttaagacaattatccacttgtttgttggatttacccctctgactaattacacactcaactttattaggattgtcattctagtgagatattaccatcaca

SEQ ID NO: 23049 - DNA, 697 bp, synthetic construct
  source 1..697: mol_type = other DNA
gtactccggtatcacggtacccttgtacgcctgttttacactcccttcccccgtaacttagaagaaacaaacaaagttcaatagaagggggtacaaaccagtaccaccacgaacaagcacttctgtttccccggtgacgttgtatagactgtacccacggtcgaaaacgattgatccgttatccgcttttgtacttcgagaagcctagtatcatcttggaatcttcgatgcgttgcgctcagcactcaatcccagagtgtagcttaggtcgatgagtctggacgttcctcaccggcgacggtggtccaggctgcgttggcggcctacctgtggcccaaagccacaggacgctagttgtgaacaaggtgtgaagagcctattgagctacaagagagtcctccggcccctgaatgcggctaatcctaaccacggagcaagggtgtgtgagccaacacataccttgtcgtaatgcgtaagttcgtggcggaaccgactactttgggtgtccgtgtttccttttattcttgtattggctgcttatggtgacaatcatagattgttatcataaagcgacttggattggccatccagtggaagtgaaataccttgtctacctgtctgttggttttactccatttgactaattcacttacaagcttattgctataatttttattgactaaacaacaatactaca

SEQ ID NO: 23050 - DNA, 647 bp, synthetic construct
  source 1..647: mol_type = other DNA
ccgtaacttagaagaaacaaacaaagttcaatagaagggggtacaaaccagtaccaccacgaacaagcacttctgtttccccggtgacgttgtatagactgtacccacggtcgaaaacgattgatccgttatccgcttttgtacttcgagaagcctagtatcatcttggaatcttcgatgcgttgcgctcagcactcaatcccagagtgtagcttaggtcgatgagtctggacgttcctcaccggcgacggtggtccaggctgcgttggcggcctacctgtggcccaaagccacaggacgctagttgtgaacaaggtgtgaagagcctattgagctacaagagagtcctccggcccctgaatgcggctaatcctaaccacggagcaagggtgtgtgagccaacacataccttgtcgtaatgcgtaagttcgtggcggaaccgactactttgggtgtccgtgtttccttttattcttgtattggctgcttatggtgacaatcatagattgttatcataaagcgacttggattggccatccagtggaagtgaaataccttgtctacctgtctgttggttttactccatttgactaattcacttacaagcttattgctataatttttattgactaaacaacaatactaca

SEQ ID NO: 23051 - DNA, 597 bp, synthetic construct
  source 1..597: mol_type = other DNA
gtaccaccacgaacaagcacttctgtttccccggtgacgttgtatagactgtacccacggtcgaaaacgattgatccgttatccgcttttgtacttcgagaagcctagtatcatcttggaatcttcgatgcgttgcgctcagcactcaatcccagagtgtagcttaggtcgatgagtctggacgttcctcaccggcgacggtggtccaggctgcgttggcggcctacctgtggcccaaagccacaggacgctagttgtgaacaaggtgtgaagagcctattgagctacaagagagtcctccggcccctgaatgcggctaatcctaaccacggagcaagggtgtgtgagccaacacataccttgtcgtaatgcgtaagttcgtggcggaaccgactactttgggtgtccgtgtttccttttattcttgtattggctgcttatggtgacaatcatagattgttatcataaagcgacttggattggccatccagtggaagtgaaataccttgtctacctgtctgttggttttactccatttgactaattcacttacaagcttattgctataatttttattgactaaacaacaatactaca

SEQ ID NO: 23052 - DNA, 547 bp, synthetic construct
  source 1..547: mol_type = other DNA
gtacccacggtcgaaaacgattgatccgttatccgcttttgtacttcgagaagcctagtatcatcttggaatcttcgatgcgttgcgctcagcactcaatcccagagtgtagcttaggtcgatgagtctggacgttcctcaccggcgacggtggtccaggctgcgttggcggcctacctgtggcccaaagccacaggacgctagttgtgaacaaggtgtgaagagcctattgagctacaagagagtcctccggcccctgaatgcggctaatcctaaccacggagcaagggtgtgtgagccaacacataccttgtcgtaatgcgtaagttcgtggcggaaccgactactttgggtgtccgtgtttccttttattcttgtattggctgcttatggtgacaatcatagattgttatcataaagcgacttggattggccatccagtggaagtgaaataccttgtctacctgtctgttggttttactccatttgactaattcacttacaagcttattgctataatttttattgactaaacaacaatactaca

SEQ ID NO: 23053 - DNA, 697 bp, synthetic construct
  source 1..697: mol_type = other DNA
gtactctggtatcgcggtacctttgtacgcctgttttatactccccttccctgtaacttagaagcaaacaagccaagttcaatagaagggggtacaaaccagtaccaccacgaacaagcacttctgttaccccggtgaagttgtataaactgtccccacggttgaaaacgactgatccgttacccgcttttgtacttcgagaagcctagtaccatcttggaatcttcgatgcgttgcgctccgcactcaatcccagagtgtagcttaggtcgatgagtctggacagtcctcaccggcgacggtggtccaggctgcgttggcggcctacctgtggcccaaagccacaggacgctagttgtgaacaaggtgtgaagagcctattgagctacaaaagagtcctccggcccctgaatgcggctaatcctaaccatggagcaggtggttacaaaccagtaattgacctgtcgtaacgcgtaagtccgtggcggaaccgactactttgggtgtccgtgtttccttttatttttaatgcggctgcttatggtgacaatcattgattgttatcataaagcgaattggattggccatccggtgtgaataaaacttattgtctacttgtttgttggatacactccactaaacgcattcacccctagcattatttctatagtgatcaaaatcagacaattacattaca

SEQ ID NO: 23054 - DNA, 647 bp, synthetic construct
  source 1..647: mol_type = other DNA
ctgtaacttagaagcaaacaagccaagttcaatagaagggggtacaaaccagtaccaccacgaacaagcacttctgttaccccggtgaagttgtataaactgtccccacggttgaaaacgactgatccgttacccgcttttgtacttcgagaagcctagtaccatcttggaatcttcgatgcgttgcgctccgcactcaatcccagagtgtagcttaggtcgatgagtctggacagtcctcaccggcgacggtggtccaggctgcgttggcggcctacctgtggcccaaagccacaggacgctagttgtgaacaaggtgtgaagagcctattgagctacaaaagagtcctccggcccctgaatgcggctaatcctaaccatggagcaggtggttacaaaccagtaattgacctgtcgtaacgcgtaagtccgtggcggaaccgactactttgggtgtccgtgtttccttttatttttaatgcggctgcttatggtgacaatcattgattgttatcataaagcgaattggattggccatccggtgtgaataaaacttattgtctacttgtttgttggatacactccactaaacgcattcacccctagcattatttctatagtgatcaaaatcagacaattacattaca

SEQ ID NO: 23055 - DNA, 597 bp, synthetic construct
  source 1..597: mol_type = other DNA
agtaccaccacgaacaagcacttctgttaccccggtgaagttgtataaactgtccccacggttgaaaacgactgatccgttacccgcttttgtacttcgagaagcctagtaccatcttggaatcttcgatgcgttgcgctccgcactcaatcccagagtgtagcttaggtcgatgagtctggacagtcctcaccggcgacggtggtccaggctgcgttggcggcctacctgtggcccaaagccacaggacgctagttgtgaacaaggtgtgaagagcctattgagctacaaaagagtcctccggcccctgaatgcggctaatcctaaccatggagcaggtggttacaaaccagtaattgacctgtcgtaacgcgtaagtccgtggcggaaccgactactttgggtgtccgtgtttccttttatttttaatgcggctgcttatggtgacaatcattgattgttatcataaagcgaattggattggccatccggtgtgaataaaacttattgtctacttgtttgttggatacactccactaaacgcattcacccctagcattatttctatagtgatcaaaatcagacaattacattaca

SEQ ID NO: 23056 - DNA, 547 bp, synthetic construct
  source 1..547: mol_type = other DNA
tgtccccacggttgaaaacgactgatccgttacccgcttttgtacttcgagaagcctagtaccatcttggaatcttcgatgcgttgcgctccgcactcaatcccagagtgtagcttaggtcgatgagtctggacagtcctcaccggcgacggtggtccaggctgcgttggcggcctacctgtggcccaaagccacaggacgctagttgtgaacaaggtgtgaagagcctattgagctacaaaagagtcctccggcccctgaatgcggctaatcctaaccatggagcaggtggttacaaaccagtaattgacctgtcgtaacgcgtaagtccgtggcggaaccgactactttgggtgtccgtgtttccttttatttttaatgcggctgcttatggtgacaatcattgattgttatcataaagcgaattggattggccatccggtgtgaataaaacttattgtctacttgtttgttggatacactccactaaacgcattcacccctagcattatttctatagtgatcaaaatcagacaattacattaca

SEQ ID NO: 23057 - DNA, 697 bp, synthetic construct
  source 1..697: mol_type = other DNA
gcactctggtatcacggtacccttgtgcgcctgttttacaccccctccctgcaatttagaagcacaaaactaagttcaatagaagggggtacaaaccagtaccaccacgaacaagcacttctgtttccccggtgacattacatagactgctcacgcggttgaaagtgatcgatccgttacccgcttgtgtacttcgagaagcctagtatcactttgggatcttcgacgcgttgcgcccagcactcaaacccagggtgtagcttaggccgatgagtctggacgctcctcaccggcgacggtggtccaggctgcgttggcggcctacctatggctgacgccataggacgctagatgtgaacaaggtgtgaagagcctattgagctacgcaagagtcctccggcccctgaatgcggctaatcccaaccacggagcaggcggtcacaaaccagtgactggcttgtcgtaacgcgcaagtctgtggcggaaccgactactttgggtgtccgtgtttcctgttatctttattatggctgcttatggtgacaatcagagattgttaccataaagcgaattggattggccatccggtgtgtattgcattggatatacaactgtttactaaaattactgtgttatctctactttccatttaactggttaatcaggaacgatacgagaataaaacaacaacatcacg

SEQ ID NO: 23058 - DNA, 647 bp, synthetic construct
  source 1..647: mol_type = other DNA
gcaatttagaagcacaaaactaagttcaatagaagggggtacaaaccagtaccaccacgaacaagcacttctgtttccccggtgacattacatagactgctcacgcggttgaaagtgatcgatccgttacccgcttgtgtacttcgagaagcctagtatcactttgggatcttcgacgcgttgcgcccagcactcaaacccagggtgtagcttaggccgatgagtctggacgctcctcaccggcgacggtggtccaggctgcgttggcggcctacctatggctgacgccataggacgctagatgtgaacaaggtgtgaagagcctattgagctacgcaagagtcctccggcccctgaatgcggctaatcccaaccacggagcaggcggtcacaaaccagtgactggcttgtcgtaacgcgcaagtctgtggcggaaccgactactttgggtgtccgtgtttcctgttatctttattatggctgcttatggtgacaatcagagattgttaccataaagcgaattggattggccatccggtgtgtattgcattggatatacaactgtttactaaaattactgtgttatctctactttccatttaactggttaatcaggaacgatacgagaataaaacaacaacatcacg

SEQ ID NO: 23059 - DNA, 597 bp, synthetic construct
  source 1..597: mol_type = other DNA
accaccacgaacaagcacttctgtttccccggtgacattacatagactgctcacgcggttgaaagtgatcgatccgttacccgcttgtgtacttcgagaagcctagtatcactttgggatcttcgacgcgttgcgcccagcactcaaacccagggtgtagcttaggccgatgagtctggacgctcctcaccggcgacggtggtccaggctgcgttggcggcctacctatggctgacgccataggacgctagatgtgaacaaggtgtgaagagcctattgagctacgcaagagtcctccggcccctgaatgcggctaatcccaaccacggagcaggcggtcacaaaccagtgactggcttgtcgtaacgcgcaagtctgtggcggaaccgactactttgggtgtccgtgtttcctgttatctttattatggctgcttatggtgacaatcagagattgttaccataaagcgaattggattggccatccggtgtgtattgcattggatatacaactgtttactaaaattactgtgttatctctactttccatttaactggttaatcaggaacgatacgagaataaaacaacaacatcacg

SEQ ID NO: 23060 - DNA, 547 bp, synthetic construct
  source 1..547: mol_type = other DNA
tcacgcggttgaaagtgatcgatccgttacccgcttgtgtacttcgagaagcctagtatcactttgggatcttcgacgcgttgcgcccagcactcaaacccagggtgtagcttaggccgatgagtctggacgctcctcaccggcgacggtggtccaggctgcgttggcggcctacctatggctgacgccataggacgctagatgtgaacaaggtgtgaagagcctattgagctacgcaagagtcctccggcccctgaatgcggctaatcccaaccacggagcaggcggtcacaaaccagtgactggcttgtcgtaacgcgcaagtctgtggcggaaccgactactttgggtgtccgtgtttcctgttatctttattatggctgcttatggtgacaatcagagattgttaccataaagcgaattggattggccatccggtgtgtattgcattggatatacaactgtttactaaaattactgtgttatctctactttccatttaactggttaatcaggaacgatacgagaataaaacaacaacatcacg

SEQ ID NO: 23061 - DNA, 697 bp, synthetic construct
  source 1..697: mol_type = other DNA
ctagcacactggtatcacggtacccttgtgcgcctgttttatccaccccctccccaatgtaacatagaagcacaaactaagtggtcaatagacggctcagtgcaccaactgggtttagaccaagcacttctgttaccccggactgagtatcaataggctgctcacgcggctgaaggagaaaacgttcgttacccggccaactacttcgagaagcccagtaccaccatgaaggttgcgcagtgtttcgttcagcacaaccccagtgtagatcaggtcgatgagtcaccgcaatccccacgggcgaccgtggcggtggctgcgctggcggcctgcccatggggtgacccatgggacgcttcaattccgacatggtgcgaagagcctattgagctagttggtagtcctccggcccctgaatgcggctaatcccaactgcggagcaagcacccacaaaccagtgggctgtttgtcgtaacgggcaactctgcagcggaaccgactactttgggtgtccgtgtttccttttattcctacactggctgcttatggtgacaattgaaagattgttgccatatagctattggattggccatccggtaacaaacagagctattattcacttatttgttggctttgtgccgttgaatttcaaagttataaaaaccataacctccatcttgacactcaacacagcaaa

SEQ ID NO: 23062 - DNA, 647 bp, synthetic construct
  source 1..647: mol_type = other DNA
tccccaatgtaacatagaagcacaaactaagtggtcaatagacggctcagtgcaccaactgggtttagaccaagcacttctgttaccccggactgagtatcaataggctgctcacgcggctgaaggagaaaacgttcgttacccggccaactacttcgagaagcccagtaccaccatgaaggttgcgcagtgtttcgttcagcacaaccccagtgtagatcaggtcgatgagtcaccgcaatccccacgggcgaccgtggcggtggctgcgctggcggcctgcccatggggtgacccatgggacgcttcaattccgacatggtgcgaagagcctattgagctagttggtagtcctccggcccctgaatgcggctaatcccaactgcggagcaagcacccacaaaccagtgggctgtttgtcgtaacgggcaactctgcagcggaaccgactactttgggtgtccgtgtttccttttattcctacactggctgcttatggtgacaattgaaagattgttgccatatagctattggattggccatccggtaacaaacagagctattattcacttatttgttggctttgtgccgttgaatttcaaagttataaaaaccataacctccatcttgacactcaacacagcaaa

SEQ ID NO: 23063 - DNA, 597 bp, synthetic construct
  source 1..597: mol_type = other DNA
tgcaccaactgggtttagaccaagcacttctgttaccccggactgagtatcaataggctgctcacgcggctgaaggagaaaacgttcgttacccggccaactacttcgagaagcccagtaccaccatgaaggttgcgcagtgtttcgttcagcacaaccccagtgtagatcaggtcgatgagtcaccgcaatccccacgggcgaccgtggcggtggctgcgctggcggcctgcccatggggtgacccatgggacgcttcaattccgacatggtgcgaagagcctattgagctagttggtagtcctccggcccctgaatgcggctaatcccaactgcggagcaagcacccacaaaccagtgggctgtttgtcgtaacgggcaactctgcagcggaaccgactactttgggtgtccgtgtttccttttattcctacactggctgcttatggtgacaattgaaagattgttgccatatagctattggattggccatccggtaacaaacagagctattattcacttatttgttggctttgtgccgttgaatttcaaagttataaaaaccataacctccatcttgacactcaacacagcaaa

SEQ ID NO: 23064 - DNA, 547 bp, synthetic construct
  source 1..547: mol_type = other DNA
caataggctgctcacgcggctgaaggagaaaacgttcgttacccggccaactacttcgagaagcccagtaccaccatgaaggttgcgcagtgtttcgttcagcacaaccccagtgtagatcaggtcgatgagtcaccgcaatccccacgggcgaccgtggcggtggctgcgctggcggcctgcccatggggtgacccatgggacgcttcaattccgacatggtgcgaagagcctattgagctagttggtagtcctccggcccctgaatgcggctaatcccaactgcggagcaagcacccacaaaccagtgggctgtttgtcgtaacgggcaactctgcagcggaaccgactactttgggtgtccgtgtttccttttattcctacactggctgcttatggtgacaattgaaagattgttgccatatagctattggattggccatccggtaacaaacagagctattattcacttatttgttggctttgtgccgttgaatttcaaagttataaaaaccataacctccatcttgacactcaacacagcaaa

SEQ ID NO: 23065 - DNA, 698 bp, synthetic construct
  source 1..698: mol_type = other DNA
cactctggttctacggaacctttgtgcgcctgttttacgccccttcccccaatttgcaacttagaagcaatacacaacactggtcaacagtaggcatggcgcaccagccatgtcttgatcaagcacttctgtttccccggaccgagtatcaatagactgctcacgcggttgaaggagaaagcgtccgttatccggctaactacttcgagaaacttagtaacaccattgaagctgcagagtgtttcgctcggcacttcccccgtgtagatcaggtcgatgagtcactgcaatccccacgggtgaccgtggcagtggctgcgctggcggcctgcctatggggtaacccataggacgctctaatgcggacatggtgcgaagagtctattgagctagttagtggtcctccggcccctgaatgcggctaatcctaactgcggagcacatgccttcaatccagagggtagtgtgtcgtaatgggcaactctgcagcggaaccgactactttgggtgtccgtgtttccttttattcttatattggctgcttatggtgacaattacagaattgttaccatatagctattggattggccatccggtgtgcaatagagctattatatacctatttgttggctttgtgccactaaccttaaaatctataaccaccctcgactttatactaaccctcaatacagtcaaac

SEQ ID NO: 23066 - DNA, 648 bp, synthetic construct
  source 1..648: mol_type = other DNA
aatttgcaacttagaagcaatacacaacactggtcaacagtaggcatggcgcaccagccatgtcttgatcaagcacttctgtttccccggaccgagtatcaatagactgctcacgcggttgaaggagaaagcgtccgttatccggctaactacttcgagaaacttagtaacaccattgaagctgcagagtgtttcgctcggcacttcccccgtgtagatcaggtcgatgagtcactgcaatccccacgggtgaccgtggcagtggctgcgctggcggcctgcctatggggtaacccataggacgctctaatgcggacatggtgcgaagagtctattgagctagttagtggtcctccggcccctgaatgcggctaatcctaactgcggagcacatgccttcaatccagagggtagtgtgtcgtaatgggcaactctgcagcggaaccgactactttgggtgtccgtgtttccttttattcttatattggctgcttatggtgacaattacagaattgttaccatatagctattggattggccatccggtgtgcaatagagctattatatacctatttgttggctttgtgccactaaccttaaaatctataaccaccctcgactttatactaaccctcaatacagtcaaac

SEQ ID NO: 23067 - DNA, 598 bp, synthetic construct
  source 1..598: mol_type = other DNA
gcaccagccatgtcttgatcaagcacttctgtttccccggaccgagtatcaatagactgctcacgcggttgaaggagaaagcgtccgttatccggctaactacttcgagaaacttagtaacaccattgaagctgcagagtgtttcgctcggcacttcccccgtgtagatcaggtcgatgagtcactgcaatccccacgggtgaccgtggcagtggctgcgctggcggcctgcctatggggtaacccataggacgctctaatgcggacatggtgcgaagagtctattgagctagttagtggtcctccggcccctgaatgcggctaatcctaactgcggagcacatgccttcaatccagagggtagtgtgtcgtaatgggcaactctgcagcggaaccgactactttgggtgtccgtgtttccttttattcttatattggctgcttatggtgacaattacagaattgttaccatatagctattggattggccatccggtgtgcaatagagctattatatacctatttgttggctttgtgccactaaccttaaaatctataaccaccctcgactttatactaaccctcaatacagtcaaac

SEQ ID NO: 23068 - DNA, 548 bp, synthetic construct
  source 1..548: mol_type = other DNA
aatagactgctcacgcggttgaaggagaaagcgtccgttatccggctaactacttcgagaaacttagtaacaccattgaagctgcagagtgtttcgctcggcacttcccccgtgtagatcaggtcgatgagtcactgcaatccccacgggtgaccgtggcagtggctgcgctggcggcctgcctatggggtaacccataggacgctctaatgcggacatggtgcgaagagtctattgagctagttagtggtcctccggcccctgaatgcggctaatcctaactgcggagcacatgccttcaatccagagggtagtgtgtcgtaatgggcaactctgcagcggaaccgactactttgggtgtccgtgtttccttttattcttatattggctgcttatggtgacaattacagaattgttaccatatagctattggattggccatccggtgtgcaatagagctattatatacctatttgttggctttgtgccactaaccttaaaatctataaccaccctcgactttatactaaccctcaatacagtcaaac

SEQ ID NO: 23069 - DNA, 698 bp, synthetic construct
  source 1..698: mol_type = other DNA
agcactctgattccgcggaatctttgtgcgcctgttttataacccctcccccgatttgtaatttagaagtaatgcacaccactgatcaacagcaagcgtggcgcgccagccatgttcagatcaaatacttctgttttcccggactgagtatcaatagactgctcacgcggttgaaggagaaaacgttcgttacccggctaactacttcgagaaacctagtagcaccatcgaaactgcagagtgtttcgctcagcactttccccgtgtagatcaggtcgatgagtcactgcaatccccacgggcgaccgtggcagtggctgcgttggcggcctgcctatgggcttgcccataggacgctctaatgtggacatggtgtgaagagtctattgagctagttggtagtcctccggcccctgaatgcggctaatcctaactgcagagcgcataccctcaatccagggggtggtgcgtcgtaacgggcaactctgcagcggaaccgactactttgggtgtccgtgtttccttttattcttatattggctgcttatggtgacaattgagagattgttgccatatagctattggattggccatccagtgtctaacagagcaattgtatacttgtttgttggattcgttccactgtcatatacatccactaacaccttatactatattacaaaattgaacacaagaaa

SEQ ID NO: 23070 - DNA, 648 bp, synthetic construct
  source 1..648: mol_type = other DNA
ccgatttgtaatttagaagtaatgcacaccactgatcaacagcaagcgtggcgcgccagccatgttcagatcaaatacttctgttttcccggactgagtatcaatagactgctcacgcggttgaaggagaaaacgttcgttacccggctaactacttcgagaaacctagtagcaccatcgaaactgcagagtgtttcgctcagcactttccccgtgtagatcaggtcgatgagtcactgcaatccccacgggcgaccgtggcagtggctgcgttggcggcctgcctatgggcttgcccataggacgctctaatgtggacatggtgtgaagagtctattgagctagttggtagtcctccggcccctgaatgcggctaatcctaactgcagagcgcataccctcaatccagggggtggtgcgtcgtaacgggcaactctgcagcggaaccgactactttgggtgtccgtgtttccttttattcttatattggctgcttatggtgacaattgagagattgttgccatatagctattggattggccatccagtgtctaacagagcaattgtatacttgtttgttggattcgttccactgtcatatacatccactaacaccttatactatattacaaaattgaacacaagaaa

SEQ ID NO: 23071 - DNA, 598 bp, synthetic construct
  source 1..598: mol_type = other DNA
gcgcgccagccatgttcagatcaaatacttctgttttcccggactgagtatcaatagactgctcacgcggttgaaggagaaaacgttcgttacccggctaactacttcgagaaacctagtagcaccatcgaaactgcagagtgtttcgctcagcactttccccgtgtagatcaggtcgatgagtcactgcaatccccacgggcgaccgtggcagtggctgcgttggcggcctgcctatgggcttgcccataggacgctctaatgtggacatggtgtgaagagtctattgagctagttggtagtcctccggcccctgaatgcggctaatcctaactgcagagcgcataccctcaatccagggggtggtgcgtcgtaacgggcaactctgcagcggaaccgactactttgggtgtccgtgtttccttttattcttatattggctgcttatggtgacaattgagagattgttgccatatagctattggattggccatccagtgtctaacagagcaattgtatacttgtttgttggattcgttccactgtcatatacatccactaacaccttatactatattacaaaattgaacacaagaaa

SEQ ID NO: 23072 - DNA, 548 bp, synthetic construct
  source 1..548: mol_type = other DNA
tcaatagactgctcacgcggttgaaggagaaaacgttcgttacccggctaactacttcgagaaacctagtagcaccatcgaaactgcagagtgtttcgctcagcactttccccgtgtagatcaggtcgatgagtcactgcaatccccacgggcgaccgtggcagtggctgcgttggcggcctgcctatgggcttgcccataggacgctctaatgtggacatggtgtgaagagtctattgagctagttggtagtcctccggcccctgaatgcggctaatcctaactgcagagcgcataccctcaatccagggggtggtgcgtcgtaacgggcaactctgcagcggaaccgactactttgggtgtccgtgtttccttttattcttatattggctgcttatggtgacaattgagagattgttgccatatagctattggattggccatccagtgtctaacagagcaattgtatacttgtttgttggattcgttccactgtcatatacatccactaacaccttatactatattacaaaattgaacacaagaaa

SEQ ID NO: 23073 - DNA, 698 bp, synthetic construct
  source 1..698: mol_type = other DNA
agcactctggtattacggtacctttgtgcgcctgttttatatcccttcccccatgtaacttagaagatattaaacaaagttcaataggagggggtacaaaccagtgccaccacgaacaaacacttctgtttccccggtgaagctacatagactgttcccacggttgaaagtggcagatccgttatccgctttggtacttcgagaaacctagtaccaccttggaatcttcgatgcgttgcgctcagcactcaaccccagagtgtagcttaggtcgatgagtctggacgatcctcactggcgacagtggtccaggctgcgttggcggcctacctgtggcgaaagccacaggacgctagttgtgaacaaggtgtgaagagtctattgagctaccaaagagtcctccggcccctgaatgcggctaatcccaaccacggagcaagtgcccacaaaccagtgggtggcttgtcgtaatgcgtaagtctgtggcggaaccgactactttgggtgtccgtgtttccttttatttttatcatggctgcttatggtgacaatctaagattgttatcatatagctattggattggccatccggtgactaacagagatcttgcatacctgtttgttggttttactaaactagatatagttacatttaaaactcttctttatatcatacagttgaatagtagaaagagaaa

SEQ ID NO: 23074 - DNA, 648 bp, synthetic construct
  source 1..648: mol_type = other DNA
ccatgtaacttagaagatattaaacaaagttcaataggagggggtacaaaccagtgccaccacgaacaaacacttctgtttccccggtgaagctacatagactgttcccacggttgaaagtggcagatccgttatccgctttggtacttcgagaaacctagtaccaccttggaatcttcgatgcgttgcgctcagcactcaaccccagagtgtagcttaggtcgatgagtctggacgatcctcactggcgacagtggtccaggctgcgttggcggcctacctgtggcgaaagccacaggacgctagttgtgaacaaggtgtgaagagtctattgagctaccaaagagtcctccggcccctgaatgcggctaatcccaaccacggagcaagtgcccacaaaccagtgggtggcttgtcgtaatgcgtaagtctgtggcggaaccgactactttgggtgtccgtgtttccttttatttttatcatggctgcttatggtgacaatctaagattgttatcatatagctattggattggccatccggtgactaacagagatcttgcatacctgtttgttggttttactaaactagatatagttacatttaaaactcttctttatatcatacagttgaatagtagaaagagaaa

SEQ ID NO: 23075 - DNA, 598 bp, synthetic construct
  source 1..598: mol_type = other DNA
ccagtgccaccacgaacaaacacttctgtttccccggtgaagctacatagactgttcccacggttgaaagtggcagatccgttatccgctttggtacttcgagaaacctagtaccaccttggaatcttcgatgcgttgcgctcagcactcaaccccagagtgtagcttaggtcgatgagtctggacgatcctcactggcgacagtggtccaggctgcgttggcggcctacctgtggcgaaagccacaggacgctagttgtgaacaaggtgtgaagagtctattgagctaccaaagagtcctccggcccctgaatgcggctaatcccaaccacggagcaagtgcccacaaaccagtgggtggcttgtcgtaatgcgtaagtctgtggcggaaccgactactttgggtgtccgtgtttccttttatttttatcatggctgcttatggtgacaatctaagattgttatcatatagctattggattggccatccggtgactaacagagatcttgcatacctgtttgttggttttactaaactagatatagttacatttaaaactcttctttatatcatacagttgaatagtagaaagagaaa

SEQ ID NO: 23076 - DNA, 548 bp, synthetic construct
  source 1..548: mol_type = other DNA
actgttcccacggttgaaagtggcagatccgttatccgctttggtacttcgagaaacctagtaccaccttggaatcttcgatgcgttgcgctcagcactcaaccccagagtgtagcttaggtcgatgagtctggacgatcctcactggcgacagtggtccaggctgcgttggcggcctacctgtggcgaaagccacaggacgctagttgtgaacaaggtgtgaagagtctattgagctaccaaagagtcctccggcccctgaatgcggctaatcccaaccacggagcaagtgcccacaaaccagtgggtggcttgtcgtaatgcgtaagtctgtggcggaaccgactactttgggtgtccgtgtttccttttatttttatcatggctgcttatggtgacaatctaagattgttatcatatagctattggattggccatccggtgactaacagagatcttgcatacctgtttgttggttttactaaactagatatagttacatttaaaactcttctttatatcatacagttgaatagtagaaagagaaa

SEQ ID NO: 23077 - DNA, 698 bp, synthetic construct
  source 1..698: mol_type = other DNA
caccctgattctgcggaatctttgtgcgcctgttttacaacccttcccccgatttgtaatttagaagcaacgaacctcaccgatcaatagtaggcgtggcgcgccagctacgtcttgatcaagcacttctgtttccccgggctgagtatcaatagactgcttgcgcggtcgaaggagaaaacgctcgttatccggctaactacttcgagaaacccagtaacaccattgaaactgcagagtgtttcgctcagcacttcccccgtgtagatcaggtcgatgagtcactgcaatccccacgggcgaccgtggcagtggctgcgttggcggcctgcctatggggcaacccataggacgctctaaggtggacatggtgtgaagagtctattgagctagttagtagtcctccggcccctgaatgcggctaatcctaactgcggagcgcatgccctcaaaccagagggtggtgcgtcgtaatgggcaactctgcagcggaaccgactactttgggtgtccgtgtttccttttattctcttaatggctgcttatggtgacaattaaggaattgttaccatatagctattggattggccatccggtgtgtagtagagctattatttatctatttgttggttttgtaccattaaacttaaggtctgtcaccactttacaatatatactgatcctcaatacggttaagc

SEQ ID NO: 23078 - DNA, 648 bp, synthetic construct
  source 1..648: mol_type = other DNA
gatttgtaatttagaagcaacgaacctcaccgatcaatagtaggcgtggcgcgccagctacgtcttgatcaagcacttctgtttccccgggctgagtatcaatagactgcttgcgcggtcgaaggagaaaacgctcgttatccggctaactacttcgagaaacccagtaacaccattgaaactgcagagtgtttcgctcagcacttcccccgtgtagatcaggtcgatgagtcactgcaatccccacgggcgaccgtggcagtggctgcgttggcggcctgcctatggggcaacccataggacgctctaaggtggacatggtgtgaagagtctattgagctagttagtagtcctccggcccctgaatgcggctaatcctaactgcggagcgcatgccctcaaaccagagggtggtgcgtcgtaatgggcaactctgcagcggaaccgactactttgggtgtccgtgtttccttttattctcttaatggctgcttatggtgacaattaaggaattgttaccatatagctattggattggccatccggtgtgtagtagagctattatttatctatttgttggttttgtaccattaaacttaaggtctgtcaccactttacaatatatactgatcctcaatacggttaagc

SEQ ID NO: 23079 - DNA, 598 bp, synthetic construct
  source 1..598: mol_type = other DNA
gcgccagctacgtcttgatcaagcacttctgtttccccgggctgagtatcaatagactgcttgcgcggtcgaaggagaaaacgctcgttatccggctaactacttcgagaaacccagtaacaccattgaaactgcagagtgtttcgctcagcacttcccccgtgtagatcaggtcgatgagtcactgcaatccccacgggcgaccgtggcagtggctgcgttggcggcctgcctatggggcaacccataggacgctctaaggtggacatggtgtgaagagtctattgagctagttagtagtcctccggcccctgaatgcggctaatcctaactgcggagcgcatgccctcaaaccagagggtggtgcgtcgtaatgggcaactctgcagcggaaccgactactttgggtgtccgtgtttccttttattctcttaatggctgcttatggtgacaattaaggaattgttaccatatagctattggattggccatccggtgtgtagtagagctattatttatctatttgttggttttgtaccattaaacttaaggtctgtcaccactttacaatatatactgatcctcaatacggttaagc

SEQ ID NO: 23080 - DNA, 548 bp, synthetic construct
  source 1..548: mol_type = other DNA
aatagactgcttgcgcggtcgaaggagaaaacgctcgttatccggctaactacttcgagaaacccagtaacaccattgaaactgcagagtgtttcgctcagcacttcccccgtgtagatcaggtcgatgagtcactgcaatccccacgggcgaccgtggcagtggctgcgttggcggcctgcctatggggcaacccataggacgctctaaggtggacatggtgtgaagagtctattgagctagttagtagtcctccggcccctgaatgcggctaatcctaactgcggagcgcatgccctcaaaccagagggtggtgcgtcgtaatgggcaactctgcagcggaaccgactactttgggtgtccgtgtttccttttattctcttaatggctgcttatggtgacaattaaggaattgttaccatatagctattggattggccatccggtgtgtagtagagctattatttatctatttgttggttttgtaccattaaacttaaggtctgtcaccactttacaatatatactgatcctcaatacggttaagc

SEQ ID NO: 23081 - DNA, 698 bp, synthetic construct
  source 1..698: mol_type = other DNA
ctagcactctggcactaaggtacctttgtgcgcctgttttatttcccttcccccaaagtaatttagaagttatgcaccaacgatcaatagcaggtgtgacacaccagtcatatcttgatcaagtactcctgtttccccggaccgagtatcaataagctgctcgcgcggctgaaggagaaaacgttcgttacccgaccaactacttcgagaagcttagtaccaccatgaacgaggcagagtgtttcgttcagcacaaccccagtgtagatcaggctgatgagtcactgcaaaccccatgggcgaccatggcagtggctgcgttggcggcctgcccatggagaaatccatgggacgctctaattctgacatggtgtgaagagcctattgagctagttggtagtcctccggcccctgaatgcggctaatcctaactgcggagcacatgctcacaaaccagtgggtggtgtgtcgtaatgggtaactctgcagcggaaccgactactttgggtgtccgtgtttccttttattcttatgttggctgcttatggtgacaatcaaagaattgttaccatatagctattggattggccatccggtgtgcaacagagcaattgtttacctatttgttggttttgtaccactatcactgaagtctgtgatcactctcaaattcattctgaccctcaactcaatcaaac

SEQ ID NO: 23082 - DNA, 648 bp, synthetic construct
  source 1..648: mol_type = other DNA
ccccaaagtaatttagaagttatgcaccaacgatcaatagcaggtgtgacacaccagtcatatcttgatcaagtactcctgtttccccggaccgagtatcaataagctgctcgcgcggctgaaggagaaaacgttcgttacccgaccaactacttcgagaagcttagtaccaccatgaacgaggcagagtgtttcgttcagcacaaccccagtgtagatcaggctgatgagtcactgcaaaccccatgggcgaccatggcagtggctgcgttggcggcctgcccatggagaaatccatgggacgctctaattctgacatggtgtgaagagcctattgagctagttggtagtcctccggcccctgaatgcggctaatcctaactgcggagcacatgctcacaaaccagtgggtggtgtgtcgtaatgggtaactctgcagcggaaccgactactttgggtgtccgtgtttccttttattcttatgttggctgcttatggtgacaatcaaagaattgttaccatatagctattggattggccatccggtgtgcaacagagcaattgtttacctatttgttggttttgtaccactatcactgaagtctgtgatcactctcaaattcattctgaccctcaactcaatcaaac

SEQ ID NO: 23083 - DNA, 598 bp, synthetic construct
  source 1..598: mol_type = other DNA
acaccagtcatatcttgatcaagtactcctgtttccccggaccgagtatcaataagctgctcgcgcggctgaaggagaaaacgttcgttacccgaccaactacttcgagaagcttagtaccaccatgaacgaggcagagtgtttcgttcagcacaaccccagtgtagatcaggctgatgagtcactgcaaaccccatgggcgaccatggcagtggctgcgttggcggcctgcccatggagaaatccatgggacgctctaattctgacatggtgtgaagagcctattgagctagttggtagtcctccggcccctgaatgcggctaatcctaactgcggagcacatgctcacaaaccagtgggtggtgtgtcgtaatgggtaactctgcagcggaaccgactactttgggtgtccgtgtttccttttattcttatgttggctgcttatggtgacaatcaaagaattgttaccatatagctattggattggccatccggtgtgcaacagagcaattgtttacctatttgttggttttgtaccactatcactgaagtctgtgatcactctcaaattcattctgaccctcaactcaatcaaac

SEQ ID NO: 23084 - DNA, 548 bp, synthetic construct
  source 1..548: mol_type = other DNA
aataagctgctcgcgcggctgaaggagaaaacgttcgttacccgaccaactacttcgagaagcttagtaccaccatgaacgaggcagagtgtttcgttcagcacaaccccagtgtagatcaggctgatgagtcactgcaaaccccatgggcgaccatggcagtggctgcgttggcggcctgcccatggagaaatccatgggacgctctaattctgacatggtgtgaagagcctattgagctagttggtagtcctccggcccctgaatgcggctaatcctaactgcggagcacatgctcacaaaccagtgggtggtgtgtcgtaatgggtaactctgcagcggaaccgactactttgggtgtccgtgtttccttttattcttatgttggctgcttatggtgacaatcaaagaattgttaccatatagctattggattggccatccggtgtgcaacagagcaattgtttacctatttgttggttttgtaccactatcactgaagtctgtgatcactctcaaattcattctgaccctcaactcaatcaaac

SEQ ID NO: 23085 - DNA, 698 bp, synthetic construct
  source 1..698: mol_type = other DNA
gtacaccggtatcacggtacccttgtacgcctgttttatactccctttcccccgtaacttagaagcaataaaaccaagttcaatagaaagggggtacaaaccagtaccaccacgaacaagcacttctgtttccccggtgatgttgtatagactgtttccacggttgaaaacgactgatccgttatccgctcttgtacttcgagaagcctagtatcatcttgggatcttcgatgcgttgcgctcaacactcgaccccggagtgtagcttaggccgatgagtctggacgttccccaccggcgacggtggtccaggctgcgttggcggcctacctgtggtccaaagccacaggacgctagttgtgaacaaggtgtgaagagcctattgagctacttgagagtcctccggcccctgaatgcggctaatcccaaccacggagcaggtggttgcaatccagcaactagcctgtcgtaacgcgcaagtctgtggcggaaccgactactttgggtgtccgtgtttccttttatttttcattggctgcttatggtgacaatctcagattgttatcataaagcgagttggattggccatccggtgaaaatcagatcgattatttacctttttgttggatttacacctttaacattacacactttgaaactcattgaaattgtactgttgatacggtattactatcaca

SEQ ID NO: 23086 - DNA, 648 bp, synthetic construct
  source 1..648: mol_type = other DNA
cccgtaacttagaagcaataaaaccaagttcaatagaaagggggtacaaaccagtaccaccacgaacaagcacttctgtttccccggtgatgttgtatagactgtttccacggttgaaaacgactgatccgttatccgctcttgtacttcgagaagcctagtatcatcttgggatcttcgatgcgttgcgctcaacactcgaccccggagtgtagcttaggccgatgagtctggacgttccccaccggcgacggtggtccaggctgcgttggcggcctacctgtggtccaaagccacaggacgctagttgtgaacaaggtgtgaagagcctattgagctacttgagagtcctccggcccctgaatgcggctaatcccaaccacggagcaggtggttgcaatccagcaactagcctgtcgtaacgcgcaagtctgtggcggaaccgactactttgggtgtccgtgtttccttttatttttcattggctgcttatggtgacaatctcagattgttatcataaagcgagttggattggccatccggtgaaaatcagatcgattatttacctttttgttggatttacacctttaacattacacactttgaaactcattgaaattgtactgttgatacggtattactatcaca

SEQ ID NO: 23087 - DNA, 598 bp, synthetic construct
  source 1..598: mol_type = other DNA
ccagtaccaccacgaacaagcacttctgtttccccggtgatgttgtatagactgtttccacggttgaaaacgactgatccgttatccgctcttgtacttcgagaagcctagtatcatcttgggatcttcgatgcgttgcgctcaacactcgaccccggagtgtagcttaggccgatgagtctggacgttccccaccggcgacggtggtccaggctgcgttggcggcctacctgtggtccaaagccacaggacgctagttgtgaacaaggtgtgaagagcctattgagctacttgagagtcctccggcccctgaatgcggctaatcccaaccacggagcaggtggttgcaatccagcaactagcctgtcgtaacgcgcaagtctgtggcggaaccgactactttgggtgtccgtgtttccttttatttttcattggctgcttatggtgacaatctcagattgttatcataaagcgagttggattggccatccggtgaaaatcagatcgattatttacctttttgttggatttacacctttaacattacacactttgaaactcattgaaattgtactgttgatacggtattactatcaca

SEQ ID NO: 23088 - DNA, 548 bp, synthetic construct
  source 1..548: mol_type = other DNA
actgtttccacggttgaaaacgactgatccgttatccgctcttgtacttcgagaagcctagtatcatcttgggatcttcgatgcgttgcgctcaacactcgaccccggagtgtagcttaggccgatgagtctggacgttccccaccggcgacggtggtccaggctgcgttggcggcctacctgtggtccaaagccacaggacgctagttgtgaacaaggtgtgaagagcctattgagctacttgagagtcctccggcccctgaatgcggctaatcccaaccacggagcaggtggttgcaatccagcaactagcctgtcgtaacgcgcaagtctgtggcggaaccgactactttgggtgtccgtgtttccttttatttttcattggctgcttatggtgacaatctcagattgttatcataaagcgagttggattggccatccggtgaaaatcagatcgattatttacctttttgttggatttacacctttaacattacacactttgaaactcattgaaattgtactgttgatacggtattactatcaca

SEQ ID NO: 23089 - DNA, 698 bp, synthetic construct
  source 1..698: mol_type = other DNA
gtacaccggtatcgcggtacccttgtacgcctgttttatactcccttccccccgtaacttagaagcatataacacaagttcaatagaagggggtgcaaaccagcaccaccacgaacaagcacttctgtttccccggtgagatcacatagattgttcccacggtcgaaagtgatcagtccgttatccgctcttgtacttcgagaagcctagtaccttcttggaatcttcgatgcgttgcgctcagcactcaaacccagagtgtagcttaggccgatgagtctggacattccccaccggtgacggtggtccaggctgcgttggcggcctacctgtgacccaaagtcacaggacgctagttgtgaacaaggtgagaagagcctattgagctacaagagattcctccggcccctgaatgcggctaatcccaaccatggagcaggtggctgcaaaccagcagacggcctgtcgtaacgcgcaagtccgtggcggaaccgactactttgggtgtccgtgtttcctttattttttattgtggctgcttatggtgacaatcattgattgttatcataaagcgaattggattggccatccagcgataattaaccagaccatttactagtttgttggatttactccactgacattctaaacactcaatctcatagaagtggtgaaattaattggataatttaactaca

SEQ ID NO: 23090 - DNA, 648 bp, synthetic construct
  source 1..648: mol_type = other DNA
cccgtaacttagaagcatataacacaagttcaatagaagggggtgcaaaccagcaccaccacgaacaagcacttctgtttccccggtgagatcacatagattgttcccacggtcgaaagtgatcagtccgttatccgctcttgtacttcgagaagcctagtaccttcttggaatcttcgatgcgttgcgctcagcactcaaacccagagtgtagcttaggccgatgagtctggacattccccaccggtgacggtggtccaggctgcgttggcggcctacctgtgacccaaagtcacaggacgctagttgtgaacaaggtgagaagagcctattgagctacaagagattcctccggcccctgaatgcggctaatcccaaccatggagcaggtggctgcaaaccagcagacggcctgtcgtaacgcgcaagtccgtggcggaaccgactactttgggtgtccgtgtttcctttattttttattgtggctgcttatggtgacaatcattgattgttatcataaagcgaattggattggccatccagcgataattaaccagaccatttactagtttgttggatttactccactgacattctaaacactcaatctcatagaagtggtgaaattaattggataatttaactaca

SEQ ID NO: 23091 - DNA, 598 bp, synthetic construct
  source 1..598: mol_type = other DNA
cagcaccaccacgaacaagcacttctgtttccccggtgagatcacatagattgttcccacggtcgaaagtgatcagtccgttatccgctcttgtacttcgagaagcctagtaccttcttggaatcttcgatgcgttgcgctcagcactcaaacccagagtgtagcttaggccgatgagtctggacattccccaccggtgacggtggtccaggctgcgttggcggcctacctgtgacccaaagtcacaggacgctagttgtgaacaaggtgagaagagcctattgagctacaagagattcctccggcccctgaatgcggctaatcccaaccatggagcaggtggctgcaaaccagcagacggcctgtcgtaacgcgcaagtccgtggcggaaccgactactttgggtgtccgtgtttcctttattttttattgtggctgcttatggtgacaatcattgattgttatcataaagcgaattggattggccatccagcgataattaaccagaccatttactagtttgttggatttactccactgacattctaaacactcaatctcatagaagtggtgaaattaattggataatttaactaca

SEQ ID NO: 23092 - DNA, 548 bp, synthetic construct
  source 1..548: mol_type = other DNA
ttgttcccacggtcgaaagtgatcagtccgttatccgctcttgtacttcgagaagcctagtaccttcttggaatcttcgatgcgttgcgctcagcactcaaacccagagtgtagcttaggccgatgagtctggacattccccaccggtgacggtggtccaggctgcgttggcggcctacctgtgacccaaagtcacaggacgctagttgtgaacaaggtgagaagagcctattgagctacaagagattcctccggcccctgaatgcggctaatcccaaccatggagcaggtggctgcaaaccagcagacggcctgtcgtaacgcgcaagtccgtggcggaaccgactactttgggtgtccgtgtttcctttattttttattgtggctgcttatggtgacaatcattgattgttatcataaagcgaattggattggccatccagcgataattaaccagaccatttactagtttgttggatttactccactgacattctaaacactcaatctcatagaagtggtgaaattaattggataatttaactaca

SEQ ID NO: 23093 - DNA, 698 bp, synthetic construct
  source 1..698: mol_type = other DNA
gtactccggtattacggtacccttgtacgcctgttttatactcccttcccccgcaacttagaagttttacaaaactcgttcaacagaagggggtacaaaccagtaccaccacgaacaagcacttctgtttccccggtgacgttgtatagactgttcccacggtcgaaagcgactgatccgttatccgctctggtacttcgggaagcctagtagcaccttgggatcttcgacgcgttgcgttcaacactcaaccccggagtgtagcttaggtcgatgagtctggacgctcctcaccggcgacggtggtccaggctgcgttggcggcctacctgtggtccaaagccacaggacgctagttgtgaacaaggtgtgaagagcctactgagctacctgagagtcctccggcccctgaatgcggctaatcctaaccacggatcaggtgattgcaaaccagcaattggcctgtcgtaatgcgcaagtctgtggcggaaccgactactttgggtgtccgtgtttccttttattttaaaaatggctgcttatggtgacaatcatagattgttatcataaagcgagttggattggccatccggtgaaagtaaagtatattatctacttgtttgtgggatttactcctataactgcatacacttatcatctcattacgatcacactattgattagatcctgttaccaca

SEQ ID NO: 23094 - DNA, 648 bp, synthetic construct
  source 1..648: mol_type = other DNA
ccgcaacttagaagttttacaaaactcgttcaacagaagggggtacaaaccagtaccaccacgaacaagcacttctgtttccccggtgacgttgtatagactgttcccacggtcgaaagcgactgatccgttatccgctctggtacttcgggaagcctagtagcaccttgggatcttcgacgcgttgcgttcaacactcaaccccggagtgtagcttaggtcgatgagtctggacgctcctcaccggcgacggtggtccaggctgcgttggcggcctacctgtggtccaaagccacaggacgctagttgtgaacaaggtgtgaagagcctactgagctacctgagagtcctccggcccctgaatgcggctaatcctaaccacggatcaggtgattgcaaaccagcaattggcctgtcgtaatgcgcaagtctgtggcggaaccgactactttgggtgtccgtgtttccttttattttaaaaatggctgcttatggtgacaatcatagattgttatcataaagcgagttggattggccatccggtgaaagtaaagtatattatctacttgtttgtgggatttactcctataactgcatacacttatcatctcattacgatcacactattgattagatcctgttaccaca

SEQ ID NO: 23095 - DNA, 598 bp, synthetic construct
  source 1..598: mol_type = other DNA
cagtaccaccacgaacaagcacttctgtttccccggtgacgttgtatagactgttcccacggtcgaaagcgactgatccgttatccgctctggtacttcgggaagcctagtagcaccttgggatcttcgacgcgttgcgttcaacactcaaccccggagtgtagcttaggtcgatgagtctggacgctcctcaccggcgacggtggtccaggctgcgttggcggcctacctgtggtccaaagccacaggacgctagttgtgaacaaggtgtgaagagcctactgagctacctgagagtcctccggcccctgaatgcggctaatcctaaccacggatcaggtgattgcaaaccagcaattggcctgtcgtaatgcgcaagtctgtggcggaaccgactactttgggtgtccgtgtttccttttattttaaaaatggctgcttatggtgacaatcatagattgttatcataaagcgagttggattggccatccggtgaaagtaaagtatattatctacttgtttgtgggatttactcctataactgcatacacttatcatctcattacgatcacactattgattagatcctgttaccaca

SEQ ID NO: 23096 - DNA, 548 bp, synthetic construct
  source 1..548: mol_type = other DNA
ctgttcccacggtcgaaagcgactgatccgttatccgctctggtacttcgggaagcctagtagcaccttgggatcttcgacgcgttgcgttcaacactcaaccccggagtgtagcttaggtcgatgagtctggacgctcctcaccggcgacggtggtccaggctgcgttggcggcctacctgtggtccaaagccacaggacgctagttgtgaacaaggtgtgaagagcctactgagctacctgagagtcctccggcccctgaatgcggctaatcctaaccacggatcaggtgattgcaaaccagcaattggcctgtcgtaatgcgcaagtctgtggcggaaccgactactttgggtgtccgtgtttccttttattttaaaaatggctgcttatggtgacaatcatagattgttatcataaagcgagttggattggccatccggtgaaagtaaagtatattatctacttgtttgtgggatttactcctataactgcatacacttatcatctcattacgatcacactattgattagatcctgttaccaca

SEQ ID NO: 23097 - DNA, 698 bp, synthetic construct
  source 1..698: mol_type = other DNA
gtactctggtatcgcggtacctttgtacgcctgttttatactcccttccccatgtaactttagaagcaattcaccaagttcaatagagggggtacaagccagtaccaccacgaacaagcacttctgttaccccggtgagtttgcataagctgtgcccacggctgaaagtaaatgatccgttatccgcttgagtacttcgagaagcctagtatcaccttggaatcttcgacgcgttgcgctcaacactctaccccgagtgtagcttaggctgatgagtctgggcatcccccaccggcgacggtggcccaggctgcgttggcggcctacccatggccaacgccatgggacgctagttgtgaacaaggtgtgaagagcctattgagctactcaagagtcctccggcccctgaatgcggctaatcctaaccatggagcaagtggccccaacccaggggatggcttgtcgtaacgcgcaagtccgtggcggaaccgactactttgggtgtccgtgtttccttttattttatatatggctgcttatggtgacaatcacagattgttatcataaagcgaattggattggccatccggtgaaatataagcacattatttatatctttgctggattcgctccgttgacacattcttcaccaaagttgatttatacagtcttagtaattagaaatcaccacttcagtc

SEQ ID NO: 23098 - DNA, 648 bp, synthetic construct
  source 1..648: mol_type = other DNA
catgtaactttagaagcaattcaccaagttcaatagagggggtacaagccagtaccaccacgaacaagcacttctgttaccccggtgagtttgcataagctgtgcccacggctgaaagtaaatgatccgttatccgcttgagtacttcgagaagcctagtatcaccttggaatcttcgacgcgttgcgctcaacactctaccccgagtgtagcttaggctgatgagtctgggcatcccccaccggcgacggtggcccaggctgcgttggcggcctacccatggccaacgccatgggacgctagttgtgaacaaggtgtgaagagcctattgagctactcaagagtcctccggcccctgaatgcggctaatcctaaccatggagcaagtggccccaacccaggggatggcttgtcgtaacgcgcaagtccgtggcggaaccgactactttgggtgtccgtgtttccttttattttatatatggctgcttatggtgacaatcacagattgttatcataaagcgaattggattggccatccggtgaaatataagcacattatttatatctttgctggattcgctccgttgacacattcttcaccaaagttgatttatacagtcttagtaattagaaatcaccacttcagtc

SEQ ID NO: 23099 - DNA, 598 bp, synthetic construct
  source 1..598: mol_type = other DNA
agtaccaccacgaacaagcacttctgttaccccggtgagtttgcataagctgtgcccacggctgaaagtaaatgatccgttatccgcttgagtacttcgagaagcctagtatcaccttggaatcttcgacgcgttgcgctcaacactctaccccgagtgtagcttaggctgatgagtctgggcatcccccaccggcgacggtggcccaggctgcgttggcggcctacccatggccaacgccatgggacgctagttgtgaacaaggtgtgaagagcctattgagctactcaagagtcctccggcccctgaatgcggctaatcctaaccatggagcaagtggccccaacccaggggatggcttgtcgtaacgcgcaagtccgtggcggaaccgactactttgggtgtccgtgtttccttttattttatatatggctgcttatggtgacaatcacagattgttatcataaagcgaattggattggccatccggtgaaatataagcacattatttatatctttgctggattcgctccgttgacacattcttcaccaaagttgatttatacagtcttagtaattagaaatcaccacttcagtc

SEQ ID NO: 23100 - DNA, 548 bp, synthetic construct
  source 1..548: mol_type = other DNA
tgtgcccacggctgaaagtaaatgatccgttatccgcttgagtacttcgagaagcctagtatcaccttggaatcttcgacgcgttgcgctcaacactctaccccgagtgtagcttaggctgatgagtctgggcatcccccaccggcgacggtggcccaggctgcgttggcggcctacccatggccaacgccatgggacgctagttgtgaacaaggtgtgaagagcctattgagctactcaagagtcctccggcccctgaatgcggctaatcctaaccatggagcaagtggccccaacccaggggatggcttgtcgtaacgcgcaagtccgtggcggaaccgactactttgggtgtccgtgtttccttttattttatatatggctgcttatggtgacaatcacagattgttatcataaagcgaattggattggccatccggtgaaatataagcacattatttatatctttgctggattcgctccgttgacacattcttcaccaaagttgatttatacagtcttagtaattagaaatcaccacttcagtc

SEQ ID NO: 23101 - DNA, 698 bp, synthetic construct
  source 1..698: mol_type = other DNA
gtactccggtattacggtacccttgtacgcctgttttatactcccttcccctgtaacttagaagcaccgaacacaagttcaatagaagggggtacaaaccagtaccaccacgaacaagcacttctgtttccccggtgaagttgtattaaactgttcccacggttgaaagcggctgatccgttatccgctcatgtacttcgggaagcctagtaccatcttggaatcttcgatgcgttgcgctcagcactcaaccccagagtgtagcttaggtcgatgagtctggacaaacctcactggcgacagtggtccaggctgcgttggcggcctacctgtggcccaaagccacaggacgctagttgtgaacaaggtgtgaagagcctactgagctacatgagagtcctccggcccctgaatgcggccaatcccaaccacggagcaggcgactacaagccagtggttagtctgtcgtaatgcgcaagtctgtggcggaaccgactactttgggtgtccgtgtttccttttattttgacattggctgcttatggtgacaatcatagattgttatcataaagcgaattggattggccatccggtgagagtcaaaactattatctacctttttattggatttactccactgaacgcttataccccagtccttattagacttgcattgttgattagatatcactattata

SEQ ID NO: 23102 - DNA, 648 bp, synthetic construct
  source 1..648: mol_type = other DNA
ctgtaacttagaagcaccgaacacaagttcaatagaagggggtacaaaccagtaccaccacgaacaagcacttctgtttccccggtgaagttgtattaaactgttcccacggttgaaagcggctgatccgttatccgctcatgtacttcgggaagcctagtaccatcttggaatcttcgatgcgttgcgctcagcactcaaccccagagtgtagcttaggtcgatgagtctggacaaacctcactggcgacagtggtccaggctgcgttggcggcctacctgtggcccaaagccacaggacgctagttgtgaacaaggtgtgaagagcctactgagctacatgagagtcctccggcccctgaatgcggccaatcccaaccacggagcaggcgactacaagccagtggttagtctgtcgtaatgcgcaagtctgtggcggaaccgactactttgggtgtccgtgtttccttttattttgacattggctgcttatggtgacaatcatagattgttatcataaagcgaattggattggccatccggtgagagtcaaaactattatctacctttttattggatttactccactgaacgcttataccccagtccttattagacttgcattgttgattagatatcactattata

SEQ ID NO: 23103 - DNA, 598 bp, synthetic construct
  source 1..598: mol_type = other DNA
agtaccaccacgaacaagcacttctgtttccccggtgaagttgtattaaactgttcccacggttgaaagcggctgatccgttatccgctcatgtacttcgggaagcctagtaccatcttggaatcttcgatgcgttgcgctcagcactcaaccccagagtgtagcttaggtcgatgagtctggacaaacctcactggcgacagtggtccaggctgcgttggcggcctacctgtggcccaaagccacaggacgctagttgtgaacaaggtgtgaagagcctactgagctacatgagagtcctccggcccctgaatgcggccaatcccaaccacggagcaggcgactacaagccagtggttagtctgtcgtaatgcgcaagtctgtggcggaaccgactactttgggtgtccgtgtttccttttattttgacattggctgcttatggtgacaatcatagattgttatcataaagcgaattggattggccatccggtgagagtcaaaactattatctacctttttattggatttactccactgaacgcttataccccagtccttattagacttgcattgttgattagatatcactattata

SEQ ID NO: 23104 - DNA, 548 bp, synthetic construct
  source 1..548: mol_type = other DNA
ctgttcccacggttgaaagcggctgatccgttatccgctcatgtacttcgggaagcctagtaccatcttggaatcttcgatgcgttgcgctcagcactcaaccccagagtgtagcttaggtcgatgagtctggacaaacctcactggcgacagtggtccaggctgcgttggcggcctacctgtggcccaaagccacaggacgctagttgtgaacaaggtgtgaagagcctactgagctacatgagagtcctccggcccctgaatgcggccaatcccaaccacggagcaggcgactacaagccagtggttagtctgtcgtaatgcgcaagtctgtggcggaaccgactactttgggtgtccgtgtttccttttattttgacattggctgcttatggtgacaatcatagattgttatcataaagcgaattggattggccatccggtgagagtcaaaactattatctacctttttattggatttactccactgaacgcttataccccagtccttattagacttgcattgttgattagatatcactattata

SEQ ID NO: 23105 - DNA, 698 bp, synthetic construct
  source 1..698: mol_type = other DNA
gcactccggtattacggtacccttgtgcgcctgttttatactccctctcccgcaacttagaagcacgaaaccaagttcaatagaagggggtacaaaccagtaccaccacgaacaagcacctctgtttccccggtgacattgcatagactgctcacgcggttgaaagtgatcgatccgttacccgcttgtgtacttcgaaaagcctagtatcgccttggaatcttcgacgcgttgcgctcagcacccgaccccggggtgtagcttaggctgatgagtctggacattcctcaccggtgacggtggtccaggctgcgttggcggcctacctatggctaacgccataggacgctagttgtgaacaaggtgtgaagagcctattgagctacataagagtcctccggcccctgaatgcggctaatcctaaccacggagcaggcggtcgcgaaccagtgactggcttgtcgtaacgcgcaagtctgtggcggaaccgactactttgggtgtccgtgtttcctgttatttttatcatggctgcttatggtgacaatcagagattgttatcataaagcgaattggattggccatccggtgagtgttgtgtcaggtatacaaccgtttgttggaaccactgtgttagctttacttctcatttaaccagttaatcaaaaacaatacgaggacaaaacaacaatactaca

SEQ ID NO: 23106 - DNA, 648 bp, synthetic construct
  source 1..648: mol_type = other DNA
cgcaacttagaagcacgaaaccaagttcaatagaagggggtacaaaccagtaccaccacgaacaagcacctctgtttccccggtgacattgcatagactgctcacgcggttgaaagtgatcgatccgttacccgcttgtgtacttcgaaaagcctagtatcgccttggaatcttcgacgcgttgcgctcagcacccgaccccggggtgtagcttaggctgatgagtctggacattcctcaccggtgacggtggtccaggctgcgttggcggcctacctatggctaacgccataggacgctagttgtgaacaaggtgtgaagagcctattgagctacataagagtcctccggcccctgaatgcggctaatcctaaccacggagcaggcggtcgcgaaccagtgactggcttgtcgtaacgcgcaagtctgtggcggaaccgactactttgggtgtccgtgtttcctgttatttttatcatggctgcttatggtgacaatcagagattgttatcataaagcgaattggattggccatccggtgagtgttgtgtcaggtatacaaccgtttgttggaaccactgtgttagctttacttctcatttaaccagttaatcaaaaacaatacgaggacaaaacaacaatactaca

SEQ ID NO: 23107 - DNA, 598 bp, synthetic construct
  source 1..598: mol_type = other DNA
taccaccacgaacaagcacctctgtttccccggtgacattgcatagactgctcacgcggttgaaagtgatcgatccgttacccgcttgtgtacttcgaaaagcctagtatcgccttggaatcttcgacgcgttgcgctcagcacccgaccccggggtgtagcttaggctgatgagtctggacattcctcaccggtgacggtggtccaggctgcgttggcggcctacctatggctaacgccataggacgctagttgtgaacaaggtgtgaagagcctattgagctacataagagtcctccggcccctgaatgcggctaatcctaaccacggagcaggcggtcgcgaaccagtgactggcttgtcgtaacgcgcaagtctgtggcggaaccgactactttgggtgtccgtgtttcctgttatttttatcatggctgcttatggtgacaatcagagattgttatcataaagcgaattggattggccatccggtgagtgttgtgtcaggtatacaaccgtttgttggaaccactgtgttagctttacttctcatttaaccagttaatcaaaaacaatacgaggacaaaacaacaatactaca

SEQ ID NO: 23108 - DNA, 548 bp, synthetic construct
  source 1..548: mol_type = other DNA
ctcacgcggttgaaagtgatcgatccgttacccgcttgtgtacttcgaaaagcctagtatcgccttggaatcttcgacgcgttgcgctcagcacccgaccccggggtgtagcttaggctgatgagtctggacattcctcaccggtgacggtggtccaggctgcgttggcggcctacctatggctaacgccataggacgctagttgtgaacaaggtgtgaagagcctattgagctacataagagtcctccggcccctgaatgcggctaatcctaaccacggagcaggcggtcgcgaaccagtgactggcttgtcgtaacgcgcaagtctgtggcggaaccgactactttgggtgtccgtgtttcctgttatttttatcatggctgcttatggtgacaatcagagattgttatcataaagcgaattggattggccatccggtgagtgttgtgtcaggtatacaaccgtttgttggaaccactgtgttagctttacttctcatttaaccagttaatcaaaaacaatacgaggacaaaacaacaatactaca

SEQ ID NO: 23109 - DNA, 698 bp, synthetic construct
  source 1..698: mol_type = other DNA
tactccggtattacggtacccttgtacgcctgttttatactcccttccccgcaacttagaagaattaaaccaagttcaatagaagggggtacaagccagtaccaccacgaacaagcacttctgtttccccggtgacgccgtatagactgtacccacggttgaaaacgactgatccgttatccgctttcgtacttcgagaagcctagtatcatcttgggatcatcgatgcgttgcgctcagcactcaaccccggggtgtagcttaggccgatgagtctggacattcctcaccggtgacggtggtccaggctgcgttggcggcctacctgtggcccaaagccacaggacgctagttgtgaacaaggtgtgaagagcctattgagctacgaaagattcctccggcccctgaatgcggctaatcccaaccacggagcaagtgctcgcacaccagtgagtagcttgtcgtaacgggtaactctgtggcggaaccgactactttgggtgtccgtgtttcctgttatttttatcatggctgcttatggtgacaatcagagattgttatcataaagcgaattggattggccatccggtgagcgttgtgtcaggtatacaactgtttgttggaaccactgtgttagctttacttctcatttaaccaatttatcaaaaataatacgaggataaaacaacaatactaca

SEQ ID NO: 23110 - DNA, 648 bp, synthetic construct
  source 1..648: mol_type = other DNA
gcaacttagaagaattaaaccaagttcaatagaagggggtacaagccagtaccaccacgaacaagcacttctgtttccccggtgacgccgtatagactgtacccacggttgaaaacgactgatccgttatccgctttcgtacttcgagaagcctagtatcatcttgggatcatcgatgcgttgcgctcagcactcaaccccggggtgtagcttaggccgatgagtctggacattcctcaccggtgacggtggtccaggctgcgttggcggcctacctgtggcccaaagccacaggacgctagttgtgaacaaggtgtgaagagcctattgagctacgaaagattcctccggcccctgaatgcggctaatcccaaccacggagcaagtgctcgcacaccagtgagtagcttgtcgtaacgggtaactctgtggcggaaccgactactttgggtgtccgtgtttcctgttatttttatcatggctgcttatggtgacaatcagagattgttatcataaagcgaattggattggccatccggtgagcgttgtgtcaggtatacaactgtttgttggaaccactgtgttagctttacttctcatttaaccaatttatcaaaaataatacgaggataaaacaacaatactaca

SEQ ID NO: 23111 - DNA, 598 bp, synthetic construct
  source 1..598: mol_type = other DNA
accaccacgaacaagcacttctgtttccccggtgacgccgtatagactgtacccacggttgaaaacgactgatccgttatccgctttcgtacttcgagaagcctagtatcatcttgggatcatcgatgcgttgcgctcagcactcaaccccggggtgtagcttaggccgatgagtctggacattcctcaccggtgacggtggtccaggctgcgttggcggcctacctgtggcccaaagccacaggacgctagttgtgaacaaggtgtgaagagcctattgagctacgaaagattcctccggcccctgaatgcggctaatcccaaccacggagcaagtgctcgcacaccagtgagtagcttgtcgtaacgggtaactctgtggcggaaccgactactttgggtgtccgtgtttcctgttatttttatcatggctgcttatggtgacaatcagagattgttatcataaagcgaattggattggccatccggtgagcgttgtgtcaggtatacaactgtttgttggaaccactgtgttagctttacttctcatttaaccaatttatcaaaaataatacgaggataaaacaacaatactaca

SEQ ID NO: 23112 - DNA, 548 bp, synthetic construct
  source 1..548: mol_type = other DNA
acccacggttgaaaacgactgatccgttatccgctttcgtacttcgagaagcctagtatcatcttgggatcatcgatgcgttgcgctcagcactcaaccccggggtgtagcttaggccgatgagtctggacattcctcaccggtgacggtggtccaggctgcgttggcggcctacctgtggcccaaagccacaggacgctagttgtgaacaaggtgtgaagagcctattgagctacgaaagattcctccggcccctgaatgcggctaatcccaaccacggagcaagtgctcgcacaccagtgagtagcttgtcgtaacgggtaactctgtggcggaaccgactactttgggtgtccgtgtttcctgttatttttatcatggctgcttatggtgacaatcagagattgttatcataaagcgaattggattggccatccggtgagcgttgtgtcaggtatacaactgtttgttggaaccactgtgttagctttacttctcatttaaccaatttatcaaaaataatacgaggataaaacaacaatactaca

SEQ ID NO: 23113 - DNA, 698 bp, synthetic construct
  source 1..698: mol_type = other DNA
agtactccggtatcacggtacccttgtacgcctgttttatactcccttcccccgtaacttagaagagttaaaccaagttcaatagaagggggtacaaaccagtaccaccacgaacaagcacttctgtttccccggtgatattgtatagactgtacccacggtcgaaaatgattgatccgttatccgctctcatacttcgagaagcctagtatcatcttggaatcttcgatgcgttgcgctcggcactcgatcccggagtgtagcttaggtcgatgagtctggacactcctcaccggtgacggtggtccagactgcgttggcggcctacctgtggtccaaagccacaggacgctagttgtgaacaaggtgtgaagagcctattgagctatgagagagtcctccggcccctgaatgcggctaatcccaaccacggagcgagagtgcgcaagccagcgtatatctcgtcgtaacgcgcaagtctgtggcggaaccgactactttgggtgtccgtgtttccttttatttttgtattggctgcttatggtgacaatcacagattgttatcataaagcgaattggattggccatccggtgaaagtgaaatacattatttgcttatttattggattcagtccacctaattgctatactcacgaacccaccacagccgttttgttaactgaaagccggtaccaata

SEQ ID NO: 23114 - DNA, 648 bp, synthetic construct
  source 1..648: mol_type = other DNA
cccgtaacttagaagagttaaaccaagttcaatagaagggggtacaaaccagtaccaccacgaacaagcacttctgtttccccggtgatattgtatagactgtacccacggtcgaaaatgattgatccgttatccgctctcatacttcgagaagcctagtatcatcttggaatcttcgatgcgttgcgctcggcactcgatcccggagtgtagcttaggtcgatgagtctggacactcctcaccggtgacggtggtccagactgcgttggcggcctacctgtggtccaaagccacaggacgctagttgtgaacaaggtgtgaagagcctattgagctatgagagagtcctccggcccctgaatgcggctaatcccaaccacggagcgagagtgcgcaagccagcgtatatctcgtcgtaacgcgcaagtctgtggcggaaccgactactttgggtgtccgtgtttccttttatttttgtattggctgcttatggtgacaatcacagattgttatcataaagcgaattggattggccatccggtgaaagtgaaatacattatttgcttatttattggattcagtccacctaattgctatactcacgaacccaccacagccgttttgttaactgaaagccggtaccaata

SEQ ID NO: 23115 - DNA, 598 bp, synthetic construct
  source 1..598: mol_type = other DNA
agtaccaccacgaacaagcacttctgtttccccggtgatattgtatagactgtacccacggtcgaaaatgattgatccgttatccgctctcatacttcgagaagcctagtatcatcttggaatcttcgatgcgttgcgctcggcactcgatcccggagtgtagcttaggtcgatgagtctggacactcctcaccggtgacggtggtccagactgcgttggcggcctacctgtggtccaaagccacaggacgctagttgtgaacaaggtgtgaagagcctattgagctatgagagagtcctccggcccctgaatgcggctaatcccaaccacggagcgagagtgcgcaagccagcgtatatctcgtcgtaacgcgcaagtctgtggcggaaccgactactttgggtgtccgtgtttccttttatttttgtattggctgcttatggtgacaatcacagattgttatcataaagcgaattggattggccatccggtgaaagtgaaatacattatttgcttatttattggattcagtccacctaattgctatactcacgaacccaccacagccgttttgttaactgaaagccggtaccaata

SEQ ID NO: 23116 - DNA, 548 bp, synthetic construct
  source 1..548: mol_type = other DNA
tgtacccacggtcgaaaatgattgatccgttatccgctctcatacttcgagaagcctagtatcatcttggaatcttcgatgcgttgcgctcggcactcgatcccggagtgtagcttaggtcgatgagtctggacactcctcaccggtgacggtggtccagactgcgttggcggcctacctgtggtccaaagccacaggacgctagttgtgaacaaggtgtgaagagcctattgagctatgagagagtcctccggcccctgaatgcggctaatcccaaccacggagcgagagtgcgcaagccagcgtatatctcgtcgtaacgcgcaagtctgtggcggaaccgactactttgggtgtccgtgtttccttttatttttgtattggctgcttatggtgacaatcacagattgttatcataaagcgaattggattggccatccggtgaaagtgaaatacattatttgcttatttattggattcagtccacctaattgctatactcacgaacccaccacagccgttttgttaactgaaagccggtaccaata

SEQ ID NO: 23117 - DNA, 698 bp, synthetic construct
  source 1..698: mol_type = other DNA
ggctagtactctggtatcatggtacctttgtacgcctgttttatacccctaccccacgtaactttagaagcaactcaacaagttcaatagggggggtacaaaccagtaccaccacgaacaagcactcctgttaccccggtgatcttgcataagctgtgcccacggctgaaggcgagagatccgttatccgcttgagtacttcgagaagcctagtatcaccttgggatcttcgacgcgttgcgctcagcactccacccgagtgtagcttaggctgatgagcctgggcattccccaccggcgacggtggcccaggctgcgttggcggcctacccatggctaacaccatgggacgctagatgtgaacaaggtgtgaagagcctattgagctactcaagagtcctccggcccctgaatgcggctaatcccaaccacggagcaggtgtcttcaacccagaaggtagcctgtcgtaacgcgtaagtctgtggcggaaccgactactttgggtgtccgtgtttccttttatcttttatatggctgcttatggtgacaatcacagattgttatcataaagcgatttggattggccatccggtgaagtacaaacacattatctacttgtttgttggatttactccactcacacaccccacccccaatataacatctattgttttgttaacaagaaattactttcgaa

SEQ ID NO: 23118 - DNA, 648 bp, synthetic construct
  source 1..648: mol_type = other DNA
accccacgtaactttagaagcaactcaacaagttcaatagggggggtacaaaccagtaccaccacgaacaagcactcctgttaccccggtgatcttgcataagctgtgcccacggctgaaggcgagagatccgttatccgcttgagtacttcgagaagcctagtatcaccttgggatcttcgacgcgttgcgctcagcactccacccgagtgtagcttaggctgatgagcctgggcattccccaccggcgacggtggcccaggctgcgttggcggcctacccatggctaacaccatgggacgctagatgtgaacaaggtgtgaagagcctattgagctactcaagagtcctccggcccctgaatgcggctaatcccaaccacggagcaggtgtcttcaacccagaaggtagcctgtcgtaacgcgtaagtctgtggcggaaccgactactttgggtgtccgtgtttccttttatcttttatatggctgcttatggtgacaatcacagattgttatcataaagcgatttggattggccatccggtgaagtacaaacacattatctacttgtttgttggatttactccactcacacaccccacccccaatataacatctattgttttgttaacaagaaattactttcgaa

SEQ ID NO: 23119 - DNA, 598 bp, synthetic construct
  source 1..598: mol_type = other DNA
aaccagtaccaccacgaacaagcactcctgttaccccggtgatcttgcataagctgtgcccacggctgaaggcgagagatccgttatccgcttgagtacttcgagaagcctagtatcaccttgggatcttcgacgcgttgcgctcagcactccacccgagtgtagcttaggctgatgagcctgggcattccccaccggcgacggtggcccaggctgcgttggcggcctacccatggctaacaccatgggacgctagatgtgaacaaggtgtgaagagcctattgagctactcaagagtcctccggcccctgaatgcggctaatcccaaccacggagcaggtgtcttcaacccagaaggtagcctgtcgtaacgcgtaagtctgtggcggaaccgactactttgggtgtccgtgtttccttttatcttttatatggctgcttatggtgacaatcacagattgttatcataaagcgatttggattggccatccggtgaagtacaaacacattatctacttgtttgttggatttactccactcacacaccccacccccaatataacatctattgttttgttaacaagaaattactttcgaa

SEQ ID NO: 23120 - DNA, 548 bp, synthetic construct
  source 1..548: mol_type = other DNA
aagctgtgcccacggctgaaggcgagagatccgttatccgcttgagtacttcgagaagcctagtatcaccttgggatcttcgacgcgttgcgctcagcactccacccgagtgtagcttaggctgatgagcctgggcattccccaccggcgacggtggcccaggctgcgttggcggcctacccatggctaacaccatgggacgctagatgtgaacaaggtgtgaagagcctattgagctactcaagagtcctccggcccctgaatgcggctaatcccaaccacggagcaggtgtcttcaacccagaaggtagcctgtcgtaacgcgtaagtctgtggcggaaccgactactttgggtgtccgtgtttccttttatcttttatatggctgcttatggtgacaatcacagattgttatcataaagcgatttggattggccatccggtgaagtacaaacacattatctacttgtttgttggatttactccactcacacaccccacccccaatataacatctattgttttgttaacaagaaattactttcgaa

SEQ ID NO: 23121 - DNA, 699 bp, synthetic construct
  source 1..699: mol_type = other DNA
agcactctggtatcacggtacctttgtgcgcctgttttatatccctttccccatgcaacttagaagttttttaaacaaagttcaatagaagggggtacaaaccagtgccaccacgaacaagcacttctgtttccccggtgaagctgcatagactgtccccacggttgaaagcggcagatccgtcatccgctttggtacttcgagaaacctagtatcaccttggaatcttcgatgcgttgcgctcagcactcaaccccagagtgtagcttaggttgatgagtctggacaatcctcactggcgacagtggtccaggctgcgttggcggcctacctgtggtgaaaaccacaggacgctagatgtgaacaaggtgtgaagagtctattgagctaccaaagagtcctccggcccctgaatgcggctaatcctaaccacggagcaagtacccacaaaccagtgggcagcttgtcgtaacgcgcaagtctgtggcggaaccgactactttgggtgtccgtgtttcctttttattttatcatggctgcttatggtgacaatctaagattgttatcatatagctattggattggccatccggtgactaacagagatattatatacctatttgttggttttgttagattaaatactatcacattcaaaactcttctttatatcatacaattgaacagtagaaagagaaa

SEQ ID NO: 23122 - DNA, 649 bp, synthetic construct
  source 1..649: mol_type = other DNA
ccatgcaacttagaagttttttaaacaaagttcaatagaagggggtacaaaccagtgccaccacgaacaagcacttctgtttccccggtgaagctgcatagactgtccccacggttgaaagcggcagatccgtcatccgctttggtacttcgagaaacctagtatcaccttggaatcttcgatgcgttgcgctcagcactcaaccccagagtgtagcttaggttgatgagtctggacaatcctcactggcgacagtggtccaggctgcgttggcggcctacctgtggtgaaaaccacaggacgctagatgtgaacaaggtgtgaagagtctattgagctaccaaagagtcctccggcccctgaatgcggctaatcctaaccacggagcaagtacccacaaaccagtgggcagcttgtcgtaacgcgcaagtctgtggcggaaccgactactttgggtgtccgtgtttcctttttattttatcatggctgcttatggtgacaatctaagattgttatcatatagctattggattggccatccggtgactaacagagatattatatacctatttgttggttttgttagattaaatactatcacattcaaaactcttctttatatcatacaattgaacagtagaaagagaaa

SEQ ID NO: 23123 - DNA, 599 bp, synthetic construct
  source 1..599: mol_type = other DNA
accagtgccaccacgaacaagcacttctgtttccccggtgaagctgcatagactgtccccacggttgaaagcggcagatccgtcatccgctttggtacttcgagaaacctagtatcaccttggaatcttcgatgcgttgcgctcagcactcaaccccagagtgtagcttaggttgatgagtctggacaatcctcactggcgacagtggtccaggctgcgttggcggcctacctgtggtgaaaaccacaggacgctagatgtgaacaaggtgtgaagagtctattgagctaccaaagagtcctccggcccctgaatgcggctaatcctaaccacggagcaagtacccacaaaccagtgggcagcttgtcgtaacgcgcaagtctgtggcggaaccgactactttgggtgtccgtgtttcctttttattttatcatggctgcttatggtgacaatctaagattgttatcatatagctattggattggccatccggtgactaacagagatattatatacctatttgttggttttgttagattaaatactatcacattcaaaactcttctttatatcatacaattgaacagtagaaagagaaa

SEQ ID NO: 23124 - DNA, 549 bp, synthetic construct
  source 1..549: mol_type = other DNA
gactgtccccacggttgaaagcggcagatccgtcatccgctttggtacttcgagaaacctagtatcaccttggaatcttcgatgcgttgcgctcagcactcaaccccagagtgtagcttaggttgatgagtctggacaatcctcactggcgacagtggtccaggctgcgttggcggcctacctgtggtgaaaaccacaggacgctagatgtgaacaaggtgtgaagagtctattgagctaccaaagagtcctccggcccctgaatgcggctaatcctaaccacggagcaagtacccacaaaccagtgggcagcttgtcgtaacgcgcaagtctgtggcggaaccgactactttgggtgtccgtgtttcctttttattttatcatggctgcttatggtgacaatctaagattgttatcatatagctattggattggccatccggtgactaacagagatattatatacctatttgttggttttgttagattaaatactatcacattcaaaactcttctttatatcatacaattgaacagtagaaagagaaa

SEQ ID NO: 23125 - DNA, 699 bp, synthetic construct
  source 1..699: mol_type = other DNA
cactctgatttcacgaaatccttgtgcgcctgttttatatcccttccccccagtctgaaacatagaagcaatgcgcatcactgatcaatagcaggcgtaacgcgccagttacgtcatgatcaagcacatctgtctccccggaccgagtatcaatagactgcttgcgcggttgaaggagaaacagttcgttacccggctaactacttcgagaagcccagtagcaccatggaagctgcagggtgtttcgctcagcacttcccccgtgtagatcaggtcgatgagtcactgcaacccccacaggcgactgtggcagtggctgcgttggcggcctgcctatggggagacccataggacgctctaatgtggacatggtgtgaagagcctattgagctagttagtagtcctccggcccctgaatgcggctaatcctaactgcggagcacacgccctcaacccagagggtagtgtgtcgtaacgggcaactctgcagcggaaccgactactttgggtgtccgtgtttcttattattcttatattggctgcttatggtgacaattacagaattgttaccatatagctattggattggccatccggtgtgcaatagagctgttatatacctatttgttggttttgtgccactgactttaaaatctatagttactcttaatttcatattggctctcaacacaattaaac

SEQ ID NO: 23126 - DNA, 649 bp, synthetic construct
  source 1..649: mol_type = other DNA
cagtctgaaacatagaagcaatgcgcatcactgatcaatagcaggcgtaacgcgccagttacgtcatgatcaagcacatctgtctccccggaccgagtatcaatagactgcttgcgcggttgaaggagaaacagttcgttacccggctaactacttcgagaagcccagtagcaccatggaagctgcagggtgtttcgctcagcacttcccccgtgtagatcaggtcgatgagtcactgcaacccccacaggcgactgtggcagtggctgcgttggcggcctgcctatggggagacccataggacgctctaatgtggacatggtgtgaagagcctattgagctagttagtagtcctccggcccctgaatgcggctaatcctaactgcggagcacacgccctcaacccagagggtagtgtgtcgtaacgggcaactctgcagcggaaccgactactttgggtgtccgtgtttcttattattcttatattggctgcttatggtgacaattacagaattgttaccatatagctattggattggccatccggtgtgcaatagagctgttatatacctatttgttggttttgtgccactgactttaaaatctatagttactcttaatttcatattggctctcaacacaattaaac

SEQ ID NO: 23127 - DNA, 599 bp, synthetic construct
  source 1..599: mol_type = other DNA
cgcgccagttacgtcatgatcaagcacatctgtctccccggaccgagtatcaatagactgcttgcgcggttgaaggagaaacagttcgttacccggctaactacttcgagaagcccagtagcaccatggaagctgcagggtgtttcgctcagcacttcccccgtgtagatcaggtcgatgagtcactgcaacccccacaggcgactgtggcagtggctgcgttggcggcctgcctatggggagacccataggacgctctaatgtggacatggtgtgaagagcctattgagctagttagtagtcctccggcccctgaatgcggctaatcctaactgcggagcacacgccctcaacccagagggtagtgtgtcgtaacgggcaactctgcagcggaaccgactactttgggtgtccgtgtttcttattattcttatattggctgcttatggtgacaattacagaattgttaccatatagctattggattggccatccggtgtgcaatagagctgttatatacctatttgttggttttgtgccactgactttaaaatctatagttactcttaatttcatattggctctcaacacaattaaac

SEQ ID NO: 23128 - DNA, 549 bp, synthetic construct
  source 1..549: mol_type = other DNA
caatagactgcttgcgcggttgaaggagaaacagttcgttacccggctaactacttcgagaagcccagtagcaccatggaagctgcagggtgtttcgctcagcacttcccccgtgtagatcaggtcgatgagtcactgcaacccccacaggcgactgtggcagtggctgcgttggcggcctgcctatggggagacccataggacgctctaatgtggacatggtgtgaagagcctattgagctagttagtagtcctccggcccctgaatgcggctaatcctaactgcggagcacacgccctcaacccagagggtagtgtgtcgtaacgggcaactctgcagcggaaccgactactttgggtgtccgtgtttcttattattcttatattggctgcttatggtgacaattacagaattgttaccatatagctattggattggccatccggtgtgcaatagagctgttatatacctatttgttggttttgtgccactgactttaaaatctatagttactcttaatttcatattggctctcaacacaattaaac

SEQ ID NO: 23129 - DNA, 699 bp, synthetic construct
  source 1..699: mol_type = other DNA
cactctggtattacggtacctttgtgcgcctgttttatgccccttaccccttaaattggtaacttagaagttttacatacctgcgaccaatagcgggcatgacgcaccagccatgtcttggtcaagcacttctgttcccccggactgagtatcaatagactgctcacgcggtcgaaggagaaaacgttcgttatccggctggctacttcgagaaacccagtaacaccatgaaagttgcagagtgtttcgctcagcactacccccgtgtagatcaggtcgatgagtcactgcgaaccccacgggcgaccgtggcagtggctgcgctggcggcctgcccatggggtgacccatgggacgctctaatacagacatggtgtgaagagtctattgagctagtcagtagtcctccggcccctgaatgcggctaatcctaactgcggagcacatgccctcaatccagggggtggtgtgtcgtaacgggtaactctgcagcggaaccgactactttgggtgtccgtgtttccttttattcctatcatggctgcttatggtgacaattgaaagattgttaccatatagctactggattggccacccggtgtctaacagagctattgtttatctatttgttgggtacgtccttcttgactataaggcccttcagactcttaagtacatcttgtacctcaatcaaaagag

SEQ ID NO: 23130 - DNA, 649 bp, synthetic construct
  source 1..649: mol_type = other DNA
ttaaattggtaacttagaagttttacatacctgcgaccaatagcgggcatgacgcaccagccatgtcttggtcaagcacttctgttcccccggactgagtatcaatagactgctcacgcggtcgaaggagaaaacgttcgttatccggctggctacttcgagaaacccagtaacaccatgaaagttgcagagtgtttcgctcagcactacccccgtgtagatcaggtcgatgagtcactgcgaaccccacgggcgaccgtggcagtggctgcgctggcggcctgcccatggggtgacccatgggacgctctaatacagacatggtgtgaagagtctattgagctagtcagtagtcctccggcccctgaatgcggctaatcctaactgcggagcacatgccctcaatccagggggtggtgtgtcgtaacgggtaactctgcagcggaaccgactactttgggtgtccgtgtttccttttattcctatcatggctgcttatggtgacaattgaaagattgttaccatatagctactggattggccacccggtgtctaacagagctattgtttatctatttgttgggtacgtccttcttgactataaggcccttcagactcttaagtacatcttgtacctcaatcaaaagag

SEQ ID NO: 23131 - DNA, 599 bp, synthetic construct
  source 1..599: mol_type = other DNA
gacgcaccagccatgtcttggtcaagcacttctgttcccccggactgagtatcaatagactgctcacgcggtcgaaggagaaaacgttcgttatccggctggctacttcgagaaacccagtaacaccatgaaagttgcagagtgtttcgctcagcactacccccgtgtagatcaggtcgatgagtcactgcgaaccccacgggcgaccgtggcagtggctgcgctggcggcctgcccatggggtgacccatgggacgctctaatacagacatggtgtgaagagtctattgagctagtcagtagtcctccggcccctgaatgcggctaatcctaactgcggagcacatgccctcaatccagggggtggtgtgtcgtaacgggtaactctgcagcggaaccgactactttgggtgtccgtgtttccttttattcctatcatggctgcttatggtgacaattgaaagattgttaccatatagctactggattggccacccggtgtctaacagagctattgtttatctatttgttgggtacgtccttcttgactataaggcccttcagactcttaagtacatcttgtacctcaatcaaaagag

SEQ ID NO: 23132 - DNA, 549 bp, synthetic construct
  source 1..549: mol_type = other DNA
atcaatagactgctcacgcggtcgaaggagaaaacgttcgttatccggctggctacttcgagaaacccagtaacaccatgaaagttgcagagtgtttcgctcagcactacccccgtgtagatcaggtcgatgagtcactgcgaaccccacgggcgaccgtggcagtggctgcgctggcggcctgcccatggggtgacccatgggacgctctaatacagacatggtgtgaagagtctattgagctagtcagtagtcctccggcccctgaatgcggctaatcctaactgcggagcacatgccctcaatccagggggtggtgtgtcgtaacgggtaactctgcagcggaaccgactactttgggtgtccgtgtttccttttattcctatcatggctgcttatggtgacaattgaaagattgttaccatatagctactggattggccacccggtgtctaacagagctattgtttatctatttgttgggtacgtccttcttgactataaggcccttcagactcttaagtacatcttgtacctcaatcaaaagag

SEQ ID NO: 23133 - DNA, 699 bp, synthetic construct
  source 1..699: mol_type = other DNA
cactctgattctacggaatctttgtgcgcctgttttataatcccctccccccaagtttgtaatttagaagcaaagtaccgtaacgatcaacagcaggcgtggcgcaccagccatgtctcgatcaagcacttctgttcccccggacagagtatcaatagactactcacgtggttgaaggagaaaacgtccgttatccggctaactacttcgagaaacctagtaacaccattgaaactgcagagcgtttcgctcagcacttaccccgtgtagatcaggtcgatgagtcactgcattccccacgggcgaccgtggcagtggctgcgttggcggcctgcctatggggtcacccataggacgctctaatgtggacatggtgcgaagagtctattgagctagttagtagtcctccggcccctgaatgcggctaatcctaactgcggagcgtatgccctcaaaccagggggtggtgcgtcgtaacgggtaactctgcagcggaaccgactactttgggtgtccgtgtttccttttatttccttactggctgcttatggtgacaattgaagaattgttgccatatagctattggattggccatccggtgtgtaacagagcaatcatctatttgttcgtcgggtatatcccactaacgctcaactcttttaacacattacaatacatactaatcctaaatacaagaaa

SEQ ID NO: 23134 - DNA, 649 bp, synthetic construct
  source 1..649: mol_type = other DNA
ccaagtttgtaatttagaagcaaagtaccgtaacgatcaacagcaggcgtggcgcaccagccatgtctcgatcaagcacttctgttcccccggacagagtatcaatagactactcacgtggttgaaggagaaaacgtccgttatccggctaactacttcgagaaacctagtaacaccattgaaactgcagagcgtttcgctcagcacttaccccgtgtagatcaggtcgatgagtcactgcattccccacgggcgaccgtggcagtggctgcgttggcggcctgcctatggggtcacccataggacgctctaatgtggacatggtgcgaagagtctattgagctagttagtagtcctccggcccctgaatgcggctaatcctaactgcggagcgtatgccctcaaaccagggggtggtgcgtcgtaacgggtaactctgcagcggaaccgactactttgggtgtccgtgtttccttttatttccttactggctgcttatggtgacaattgaagaattgttgccatatagctattggattggccatccggtgtgtaacagagcaatcatctatttgttcgtcgggtatatcccactaacgctcaactcttttaacacattacaatacatactaatcctaaatacaagaaa

SEQ ID NO: 23135 - DNA, 599 bp, synthetic construct
  source 1..599: mol_type = other DNA
ggcgcaccagccatgtctcgatcaagcacttctgttcccccggacagagtatcaatagactactcacgtggttgaaggagaaaacgtccgttatccggctaactacttcgagaaacctagtaacaccattgaaactgcagagcgtttcgctcagcacttaccccgtgtagatcaggtcgatgagtcactgcattccccacgggcgaccgtggcagtggctgcgttggcggcctgcctatggggtcacccataggacgctctaatgtggacatggtgcgaagagtctattgagctagttagtagtcctccggcccctgaatgcggctaatcctaactgcggagcgtatgccctcaaaccagggggtggtgcgtcgtaacgggtaactctgcagcggaaccgactactttgggtgtccgtgtttccttttatttccttactggctgcttatggtgacaattgaagaattgttgccatatagctattggattggccatccggtgtgtaacagagcaatcatctatttgttcgtcgggtatatcccactaacgctcaactcttttaacacattacaatacatactaatcctaaatacaagaaa

SEQ ID NO: 23136 - DNA, 549 bp, synthetic construct
  source 1..549: mol_type = other DNA
atcaatagactactcacgtggttgaaggagaaaacgtccgttatccggctaactacttcgagaaacctagtaacaccattgaaactgcagagcgtttcgctcagcacttaccccgtgtagatcaggtcgatgagtcactgcattccccacgggcgaccgtggcagtggctgcgttggcggcctgcctatggggtcacccataggacgctctaatgtggacatggtgcgaagagtctattgagctagttagtagtcctccggcccctgaatgcggctaatcctaactgcggagcgtatgccctcaaaccagggggtggtgcgtcgtaacgggtaactctgcagcggaaccgactactttgggtgtccgtgtttccttttatttccttactggctgcttatggtgacaattgaagaattgttgccatatagctattggattggccatccggtgtgtaacagagcaatcatctatttgttcgtcgggtatatcccactaacgctcaactcttttaacacattacaatacatactaatcctaaatacaagaaa

SEQ ID NO: 23137 - DNA, 699 bp, synthetic construct
  source 1..699: mol_type = other DNA
gtactccggtattacggtacccttgtacgcctgttttatactccctttccctagtaacttagaagttgtacaattaagttcaatagaagggggtacaaaccagtaccaccacgaacaagcacttctgtttccccggtgaagttgcatagactgtccccacggttaaaagtgactgatccgttatccgctcatttacttcgggaagcctagtatcatcttgggatcttcgatgcgttgcgctcaacactcaaccccagagtgtagcttaggtcgatgagtctggacactccccactggtgacagtggtccaggctgcgttggcggcctacctgtggtccaaagccacaggacgctagtagtgaacaaggtgtgaagagcctactgagctaattgagagtcctccggcccctgaatgcggataatcctaaccacggagcaggtgatcacaatccagtgattggcctgtcgtaatgcgtgagtctgtggcggaaccgactactttgggtgtccgtgtttcctttttactcttattatggctgcttatggtgacaatcatagattgttatcataaagcgaattggattggccatccggtgagaattaaatcgctaatatatctatttgttggatttaccaaaatcaactacagaacactagccttaattcgaatcgtgttactgatcagattccaccatcaca

SEQ ID NO: 23138 - DNA, 649 bp, synthetic construct
  source 1..649: mol_type = other DNA
ctagtaacttagaagttgtacaattaagttcaatagaagggggtacaaaccagtaccaccacgaacaagcacttctgtttccccggtgaagttgcatagactgtccccacggttaaaagtgactgatccgttatccgctcatttacttcgggaagcctagtatcatcttgggatcttcgatgcgttgcgctcaacactcaaccccagagtgtagcttaggtcgatgagtctggacactccccactggtgacagtggtccaggctgcgttggcggcctacctgtggtccaaagccacaggacgctagtagtgaacaaggtgtgaagagcctactgagctaattgagagtcctccggcccctgaatgcggataatcctaaccacggagcaggtgatcacaatccagtgattggcctgtcgtaatgcgtgagtctgtggcggaaccgactactttgggtgtccgtgtttcctttttactcttattatggctgcttatggtgacaatcatagattgttatcataaagcgaattggattggccatccggtgagaattaaatcgctaatatatctatttgttggatttaccaaaatcaactacagaacactagccttaattcgaatcgtgttactgatcagattccaccatcaca

SEQ ID NO: 23139 - DNA, 599 bp, synthetic construct
  source 1..599: mol_type = other DNA
cagtaccaccacgaacaagcacttctgtttccccggtgaagttgcatagactgtccccacggttaaaagtgactgatccgttatccgctcatttacttcgggaagcctagtatcatcttgggatcttcgatgcgttgcgctcaacactcaaccccagagtgtagcttaggtcgatgagtctggacactccccactggtgacagtggtccaggctgcgttggcggcctacctgtggtccaaagccacaggacgctagtagtgaacaaggtgtgaagagcctactgagctaattgagagtcctccggcccctgaatgcggataatcctaaccacggagcaggtgatcacaatccagtgattggcctgtcgtaatgcgtgagtctgtggcggaaccgactactttgggtgtccgtgtttcctttttactcttattatggctgcttatggtgacaatcatagattgttatcataaagcgaattggattggccatccggtgagaattaaatcgctaatatatctatttgttggatttaccaaaatcaactacagaacactagccttaattcgaatcgtgttactgatcagattccaccatcaca

SEQ ID NO: 23140 - DNA, 549 bp, synthetic construct
  source 1..549: mol_type = other DNA
ctgtccccacggttaaaagtgactgatccgttatccgctcatttacttcgggaagcctagtatcatcttgggatcttcgatgcgttgcgctcaacactcaaccccagagtgtagcttaggtcgatgagtctggacactccccactggtgacagtggtccaggctgcgttggcggcctacctgtggtccaaagccacaggacgctagtagtgaacaaggtgtgaagagcctactgagctaattgagagtcctccggcccctgaatgcggataatcctaaccacggagcaggtgatcacaatccagtgattggcctgtcgtaatgcgtgagtctgtggcggaaccgactactttgggtgtccgtgtttcctttttactcttattatggctgcttatggtgacaatcatagattgttatcataaagcgaattggattggccatccggtgagaattaaatcgctaatatatctatttgttggatttaccaaaatcaactacagaacactagccttaattcgaatcgtgttactgatcagattccaccatcaca

SEQ ID NO: 23141 - DNA, 699 bp, synthetic construct
  source 1..699: mol_type = other DNA
gtactctggtattacggtacctttgtacgcctgttttatactcccttcccctccgtaacttagaagcatgagaatcaagttcaatagaagggggtacaaaccagtaccaccacgaacaagcacttctgtcaccccggtgaggttgtatagactgtccccacggttgaaagcgactgatccgttatccgctcaattacttcgggaagcctagtaccatcctggaatcttcgatgcgttgcgctcagcactcaaccccagagtgtagcttaggccgatgagtctggacaatcctcactggcgacagtggtccaggctgcgttggcggcctacctgtggtccaaagccacaggacgctagttgtgaacaaggtgcgaagagcctactgagctaattgagagtcctccggcccctgaatgcggctaatcccaaccacggagcaggcggttgcaaaccagcaactggcttgtcgtaacgcgaaagtctgtggcggaaccgactactttgggtgtccgtgtttccttttattcttatgatggctgcttatggtgacaatcgttgattgttatcataaagcgaattggattggccatccggtgaaaatcaaatctattgtttacctgttcattgggttcactccactaacttcacacactatatatctcattaaggtcgtattactagtaaggaattatcaccaaa

SEQ ID NO: 23142 - DNA, 649 bp, synthetic construct
  source 1..649: mol_type = other DNA
ctccgtaacttagaagcatgagaatcaagttcaatagaagggggtacaaaccagtaccaccacgaacaagcacttctgtcaccccggtgaggttgtatagactgtccccacggttgaaagcgactgatccgttatccgctcaattacttcgggaagcctagtaccatcctggaatcttcgatgcgttgcgctcagcactcaaccccagagtgtagcttaggccgatgagtctggacaatcctcactggcgacagtggtccaggctgcgttggcggcctacctgtggtccaaagccacaggacgctagttgtgaacaaggtgcgaagagcctactgagctaattgagagtcctccggcccctgaatgcggctaatcccaaccacggagcaggcggttgcaaaccagcaactggcttgtcgtaacgcgaaagtctgtggcggaaccgactactttgggtgtccgtgtttccttttattcttatgatggctgcttatggtgacaatcgttgattgttatcataaagcgaattggattggccatccggtgaaaatcaaatctattgtttacctgttcattgggttcactccactaacttcacacactatatatctcattaaggtcgtattactagtaaggaattatcaccaaa

SEQ ID NO: 23143 - DNA, 599 bp, synthetic construct
  source 1..599: mol_type = other DNA
ccagtaccaccacgaacaagcacttctgtcaccccggtgaggttgtatagactgtccccacggttgaaagcgactgatccgttatccgctcaattacttcgggaagcctagtaccatcctggaatcttcgatgcgttgcgctcagcactcaaccccagagtgtagcttaggccgatgagtctggacaatcctcactggcgacagtggtccaggctgcgttggcggcctacctgtggtccaaagccacaggacgctagttgtgaacaaggtgcgaagagcctactgagctaattgagagtcctccggcccctgaatgcggctaatcccaaccacggagcaggcggttgcaaaccagcaactggcttgtcgtaacgcgaaagtctgtggcggaaccgactactttgggtgtccgtgtttccttttattcttatgatggctgcttatggtgacaatcgttgattgttatcataaagcgaattggattggccatccggtgaaaatcaaatctattgtttacctgttcattgggttcactccactaacttcacacactatatatctcattaaggtcgtattactagtaaggaattatcaccaaa

SEQ ID NO: 23144 - DNA, 549 bp, synthetic construct
  source 1..549: mol_type = other DNA
actgtccccacggttgaaagcgactgatccgttatccgctcaattacttcgggaagcctagtaccatcctggaatcttcgatgcgttgcgctcagcactcaaccccagagtgtagcttaggccgatgagtctggacaatcctcactggcgacagtggtccaggctgcgttggcggcctacctgtggtccaaagccacaggacgctagttgtgaacaaggtgcgaagagcctactgagctaattgagagtcctccggcccctgaatgcggctaatcccaaccacggagcaggcggttgcaaaccagcaactggcttgtcgtaacgcgaaagtctgtggcggaaccgactactttgggtgtccgtgtttccttttattcttatgatggctgcttatggtgacaatcgttgattgttatcataaagcgaattggattggccatccggtgaaaatcaaatctattgtttacctgttcattgggttcactccactaacttcacacactatatatctcattaaggtcgtattactagtaaggaattatcaccaaa

SEQ ID NO: 23145 - DNA, 699 bp, synthetic construct
  source 1..699: mol_type = other DNA
gtactctggtattacggtacccttgtacgcctgttttatactcccttccccgtaacttagaagaaataaaccaagttcaatagaagggggcacaaaccagtgtcaccacgaacaagcacttctgtttccccggtgatattgtatagactgtacccacggttaaaagcgattgatccgttatccgctcttgtacttcgaaaagcctagtatcatcttggaatcttcgatgcgttgcgctcaacactcaaccccagagtgtagcttaggtcgatgagtctggacattccccaccggcgacggtggtccaggctgcgttggcggcctacctgtggcccaaagccacaggacgctagttgtgaacaaggtgtgaagagcctattgagctgcaagagagtcctccggcccctgaatgcggctaatcccaaccacggagcaagtgctcacacaccagtgagtggcttgtcgtaacgcgcaagtctgtggcggaaccgactactttgggtgtccgtgtttcctgttatttttatcatggctgcttatggtgacaatcagagattgttatcataaagcgaattggattggccatccggtgagtgttgtgtcaggtatacaactgtttgttggaaccactgtgttaactttacttctcatttaaccaattaatcaaaaacaatacgaggataaaacaacaatactaca

SEQ ID NO: 23146 - DNA, 649 bp, synthetic construct
  source 1..649: mol_type = other DNA
cgtaacttagaagaaataaaccaagttcaatagaagggggcacaaaccagtgtcaccacgaacaagcacttctgtttccccggtgatattgtatagactgtacccacggttaaaagcgattgatccgttatccgctcttgtacttcgaaaagcctagtatcatcttggaatcttcgatgcgttgcgctcaacactcaaccccagagtgtagcttaggtcgatgagtctggacattccccaccggcgacggtggtccaggctgcgttggcggcctacctgtggcccaaagccacaggacgctagttgtgaacaaggtgtgaagagcctattgagctgcaagagagtcctccggcccctgaatgcggctaatcccaaccacggagcaagtgctcacacaccagtgagtggcttgtcgtaacgcgcaagtctgtggcggaaccgactactttgggtgtccgtgtttcctgttatttttatcatggctgcttatggtgacaatcagagattgttatcataaagcgaattggattggccatccggtgagtgttgtgtcaggtatacaactgtttgttggaaccactgtgttaactttacttctcatttaaccaattaatcaaaaacaatacgaggataaaacaacaatactaca

SEQ ID NO: 23147 - DNA, 599 bp, synthetic construct
  source 1..599: mol_type = other DNA
tgtcaccacgaacaagcacttctgtttccccggtgatattgtatagactgtacccacggttaaaagcgattgatccgttatccgctcttgtacttcgaaaagcctagtatcatcttggaatcttcgatgcgttgcgctcaacactcaaccccagagtgtagcttaggtcgatgagtctggacattccccaccggcgacggtggtccaggctgcgttggcggcctacctgtggcccaaagccacaggacgctagttgtgaacaaggtgtgaagagcctattgagctgcaagagagtcctccggcccctgaatgcggctaatcccaaccacggagcaagtgctcacacaccagtgagtggcttgtcgtaacgcgcaagtctgtggcggaaccgactactttgggtgtccgtgtttcctgttatttttatcatggctgcttatggtgacaatcagagattgttatcataaagcgaattggattggccatccggtgagtgttgtgtcaggtatacaactgtttgttggaaccactgtgttaactttacttctcatttaaccaattaatcaaaaacaatacgaggataaaacaacaatactaca

SEQ ID NO: 23148 - DNA, 549 bp, synthetic construct
  source 1..549: mol_type = other DNA
tacccacggttaaaagcgattgatccgttatccgctcttgtacttcgaaaagcctagtatcatcttggaatcttcgatgcgttgcgctcaacactcaaccccagagtgtagcttaggtcgatgagtctggacattccccaccggcgacggtggtccaggctgcgttggcggcctacctgtggcccaaagccacaggacgctagttgtgaacaaggtgtgaagagcctattgagctgcaagagagtcctccggcccctgaatgcggctaatcccaaccacggagcaagtgctcacacaccagtgagtggcttgtcgtaacgcgcaagtctgtggcggaaccgactactttgggtgtccgtgtttcctgttatttttatcatggctgcttatggtgacaatcagagattgttatcataaagcgaattggattggccatccggtgagtgttgtgtcaggtatacaactgtttgttggaaccactgtgttaactttacttctcatttaaccaattaatcaaaaacaatacgaggataaaacaacaatactaca

SEQ ID NO: 23149 - DNA, 699 bp, synthetic construct
  source 1..699: mol_type = other DNA
gtacaccggtattacggtacccttgtacgcctgttttatactcccttccccctgtaacttagaagctcaagaatccaagttcaatagaagggggtacaaaccagtaccaccacgaacaagcacttctgtttccccggtgaagttgcatagactgttcccacggttgaaagtgactgatccgttatccgctcaactacttcgagaagcccagtatcatcttggaatcttcgatgcgttgcgctcagcactcgaccccggagtgtagcttaggctgatgagtctggacgttccccactggtgacagtggtccaggctgcgttggcggcctacctgtggtccaaagccacaggacgctagttgtgaacaaggtgtgaagagcctattgagctaattgagaatcctccggcccctgaatgcggctaatcccaaccacggagcaggtggttacaacccagtaactggcctgtcgtaacgcgtaagtctgtggcggaaccgactactttgggtgtccgtgtttccttttattcctataatggctgcttatggtgacaatcacagattgttatcataaagcgaattggattggccatccggtgagagttaagacaattatccacttgttcattggatttacccctctgactaattacacactcaaccttattagaattgtagttctagtgagatactactgtcata

SEQ ID NO: 23150 - DNA, 649 bp, synthetic construct
  source 1..649: mol_type = other DNA
cctgtaacttagaagctcaagaatccaagttcaatagaagggggtacaaaccagtaccaccacgaacaagcacttctgtttccccggtgaagttgcatagactgttcccacggttgaaagtgactgatccgttatccgctcaactacttcgagaagcccagtatcatcttggaatcttcgatgcgttgcgctcagcactcgaccccggagtgtagcttaggctgatgagtctggacgttccccactggtgacagtggtccaggctgcgttggcggcctacctgtggtccaaagccacaggacgctagttgtgaacaaggtgtgaagagcctattgagctaattgagaatcctccggcccctgaatgcggctaatcccaaccacggagcaggtggttacaacccagtaactggcctgtcgtaacgcgtaagtctgtggcggaaccgactactttgggtgtccgtgtttccttttattcctataatggctgcttatggtgacaatcacagattgttatcataaagcgaattggattggccatccggtgagagttaagacaattatccacttgttcattggatttacccctctgactaattacacactcaaccttattagaattgtagttctagtgagatactactgtcata

SEQ ID NO: 23151 - DNA, 599 bp, synthetic construct
  source 1..599: mol_type = other DNA
ccagtaccaccacgaacaagcacttctgtttccccggtgaagttgcatagactgttcccacggttgaaagtgactgatccgttatccgctcaactacttcgagaagcccagtatcatcttggaatcttcgatgcgttgcgctcagcactcgaccccggagtgtagcttaggctgatgagtctggacgttccccactggtgacagtggtccaggctgcgttggcggcctacctgtggtccaaagccacaggacgctagttgtgaacaaggtgtgaagagcctattgagctaattgagaatcctccggcccctgaatgcggctaatcccaaccacggagcaggtggttacaacccagtaactggcctgtcgtaacgcgtaagtctgtggcggaaccgactactttgggtgtccgtgtttccttttattcctataatggctgcttatggtgacaatcacagattgttatcataaagcgaattggattggccatccggtgagagttaagacaattatccacttgttcattggatttacccctctgactaattacacactcaaccttattagaattgtagttctagtgagatactactgtcata

SEQ ID NO: 23152 - DNA, 549 bp, synthetic construct
  source 1..549: mol_type = other DNA
actgttcccacggttgaaagtgactgatccgttatccgctcaactacttcgagaagcccagtatcatcttggaatcttcgatgcgttgcgctcagcactcgaccccggagtgtagcttaggctgatgagtctggacgttccccactggtgacagtggtccaggctgcgttggcggcctacctgtggtccaaagccacaggacgctagttgtgaacaaggtgtgaagagcctattgagctaattgagaatcctccggcccctgaatgcggctaatcccaaccacggagcaggtggttacaacccagtaactggcctgtcgtaacgcgtaagtctgtggcggaaccgactactttgggtgtccgtgtttccttttattcctataatggctgcttatggtgacaatcacagattgttatcataaagcgaattggattggccatccggtgagagttaagacaattatccacttgttcattggatttacccctctgactaattacacactcaaccttattagaattgtagttctagtgagatactactgtcata

SEQ ID NO: 23153 - DNA, 699 bp, synthetic construct
  source 1..699: mol_type = other DNA
gtactccggtattacggtacccttgtacgcctgttttatactcccttccccgtaacttagaagcaataaatcaagttcaccaggagggggtacaaaccagtaccaccacgaacaagcacttctgtttccccggtgacgttgcatagactgtccccacggttgaaagcgactgatccgttatccgctcgtgtacttcgagaagcctagtatcatcttggaatcttcgatgcgttgcgctcagcactcgaccccggagtgtagcttaggctgatgagtctggacattcctcaccggcgacggtggtccaggctgcgttggcggcctacctgtggctcaaagccacaggacgctagttgtgaacaaggtgtgaagagcctattgagctacacgagaatcctccggcccctgaatgcggctaatcccaaccacggagcaagtgctcacaaaccagtgagtggcttgtcgtaacgggtaactctgtggcggaaccgactactttgggtgtccgtgtttcctttttatttttgtatggctgcttatggtgacaatcagagattgttatcataaagcgtattggattggccatccggtgagtgttgtgtcaggtatacaactgtttgttggaaccactgtgttagctttacttctcatttaaccaattaatcaaaaacaatacgaggataaaacaacaatactaca

SEQ ID NO: 23154 - DNA, 649 bp, synthetic construct
  source 1..649: mol_type = other DNA
cgtaacttagaagcaataaatcaagttcaccaggagggggtacaaaccagtaccaccacgaacaagcacttctgtttccccggtgacgttgcatagactgtccccacggttgaaagcgactgatccgttatccgctcgtgtacttcgagaagcctagtatcatcttggaatcttcgatgcgttgcgctcagcactcgaccccggagtgtagcttaggctgatgagtctggacattcctcaccggcgacggtggtccaggctgcgttggcggcctacctgtggctcaaagccacaggacgctagttgtgaacaaggtgtgaagagcctattgagctacacgagaatcctccggcccctgaatgcggctaatcccaaccacggagcaagtgctcacaaaccagtgagtggcttgtcgtaacgggtaactctgtggcggaaccgactactttgggtgtccgtgtttcctttttatttttgtatggctgcttatggtgacaatcagagattgttatcataaagcgtattggattggccatccggtgagtgttgtgtcaggtatacaactgtttgttggaaccactgtgttagctttacttctcatttaaccaattaatcaaaaacaatacgaggataaaacaacaatactaca

SEQ ID NO: 23155 - DNA, 599 bp, synthetic construct
  source 1..599: mol_type = other DNA
taccaccacgaacaagcacttctgtttccccggtgacgttgcatagactgtccccacggttgaaagcgactgatccgttatccgctcgtgtacttcgagaagcctagtatcatcttggaatcttcgatgcgttgcgctcagcactcgaccccggagtgtagcttaggctgatgagtctggacattcctcaccggcgacggtggtccaggctgcgttggcggcctacctgtggctcaaagccacaggacgctagttgtgaacaaggtgtgaagagcctattgagctacacgagaatcctccggcccctgaatgcggctaatcccaaccacggagcaagtgctcacaaaccagtgagtggcttgtcgtaacgggtaactctgtggcggaaccgactactttgggtgtccgtgtttcctttttatttttgtatggctgcttatggtgacaatcagagattgttatcataaagcgtattggattggccatccggtgagtgttgtgtcaggtatacaactgtttgttggaaccactgtgttagctttacttctcatttaaccaattaatcaaaaacaatacgaggataaaacaacaatactaca

SEQ ID NO: 23156 - DNA, 549 bp, synthetic construct
  source 1..549: mol_type = other DNA
tccccacggttgaaagcgactgatccgttatccgctcgtgtacttcgagaagcctagtatcatcttggaatcttcgatgcgttgcgctcagcactcgaccccggagtgtagcttaggctgatgagtctggacattcctcaccggcgacggtggtccaggctgcgttggcggcctacctgtggctcaaagccacaggacgctagttgtgaacaaggtgtgaagagcctattgagctacacgagaatcctccggcccctgaatgcggctaatcccaaccacggagcaagtgctcacaaaccagtgagtggcttgtcgtaacgggtaactctgtggcggaaccgactactttgggtgtccgtgtttcctttttatttttgtatggctgcttatggtgacaatcagagattgttatcataaagcgtattggattggccatccggtgagtgttgtgtcaggtatacaactgtttgttggaaccactgtgttagctttacttctcatttaaccaattaatcaaaaacaatacgaggataaaacaacaatactaca

SEQ ID NO: 23157 - DNA, 700 bp, synthetic construct
  source 1..700: mol_type = other DNA
gtactccggtattccggtacccttgtacgcctgttttatactcccctcccccgtaacttagaagaaacaaaccaagttcactaggagggggtacaaaccagtaccaccacgaacaagcacttctgtttccccggtgatattgtatagactgtacccacggtcgaaaacgattgatccgttatccgcttctgtacttcgagaagcctagtaccactttggaatcttcgatgcgttgcgctcagcactcaaccccagagtgtagcttaggtcgatgagcctggactttcctcactggcgacagtggtccaggctgcgttggcggcctacctgtggcccaaagccacaggacgctagttgtgaacaaggtgtgaagagcctattgagctacaaaagagtcctccggcccctgaatgcggctaatcccaaccatggagcaagggtgtacgaaccagtacatatcttgtcgtaacgcgcaagtccgtggcggaaccgactactttgggtgtccgtgtttccttttattttcatactggctgcttatggtgacaatcatagattgttatcataaagcgaattggattggccatccggtgagtgttgtgtcaggtatacaattgtttgttggaaccactgtgtcagctttacttctcatttaaccaattaatcaaaaacaatacgaggataaaacaacaataccaca

SEQ ID NO: 23158 - DNA, 650 bp, synthetic construct
  source 1..650: mol_type = other DNA
ccgtaacttagaagaaacaaaccaagttcactaggagggggtacaaaccagtaccaccacgaacaagcacttctgtttccccggtgatattgtatagactgtacccacggtcgaaaacgattgatccgttatccgcttctgtacttcgagaagcctagtaccactttggaatcttcgatgcgttgcgctcagcactcaaccccagagtgtagcttaggtcgatgagcctggactttcctcactggcgacagtggtccaggctgcgttggcggcctacctgtggcccaaagccacaggacgctagttgtgaacaaggtgtgaagagcctattgagctacaaaagagtcctccggcccctgaatgcggctaatcccaaccatggagcaagggtgtacgaaccagtacatatcttgtcgtaacgcgcaagtccgtggcggaaccgactactttgggtgtccgtgtttccttttattttcatactggctgcttatggtgacaatcatagattgttatcataaagcgaattggattggccatccggtgagtgttgtgtcaggtatacaattgtttgttggaaccactgtgtcagctttacttctcatttaaccaattaatcaaaaacaatacgaggataaaacaacaataccaca

SEQ ID NO: 23159 - DNA, 600 bp, synthetic construct
  source 1..600: mol_type = other DNA
gtaccaccacgaacaagcacttctgtttccccggtgatattgtatagactgtacccacggtcgaaaacgattgatccgttatccgcttctgtacttcgagaagcctagtaccactttggaatcttcgatgcgttgcgctcagcactcaaccccagagtgtagcttaggtcgatgagcctggactttcctcactggcgacagtggtccaggctgcgttggcggcctacctgtggcccaaagccacaggacgctagttgtgaacaaggtgtgaagagcctattgagctacaaaagagtcctccggcccctgaatgcggctaatcccaaccatggagcaagggtgtacgaaccagtacatatcttgtcgtaacgcgcaagtccgtggcggaaccgactactttgggtgtccgtgtttccttttattttcatactggctgcttatggtgacaatcatagattgttatcataaagcgaattggattggccatccggtgagtgttgtgtcaggtatacaattgtttgttggaaccactgtgtcagctttacttctcatttaaccaattaatcaaaaacaatacgaggataaaacaacaataccaca

SEQ ID NO: 23160 - DNA, 550 bp, synthetic construct
  source 1..550: mol_type = other DNA
gtacccacggtcgaaaacgattgatccgttatccgcttctgtacttcgagaagcctagtaccactttggaatcttcgatgcgttgcgctcagcactcaaccccagagtgtagcttaggtcgatgagcctggactttcctcactggcgacagtggtccaggctgcgttggcggcctacctgtggcccaaagccacaggacgctagttgtgaacaaggtgtgaagagcctattgagctacaaaagagtcctccggcccctgaatgcggctaatcccaaccatggagcaagggtgtacgaaccagtacatatcttgtcgtaacgcgcaagtccgtggcggaaccgactactttgggtgtccgtgtttccttttattttcatactggctgcttatggtgacaatcatagattgttatcataaagcgaattggattggccatccggtgagtgttgtgtcaggtatacaattgtttgttggaaccactgtgtcagctttacttctcatttaaccaattaatcaaaaacaatacgaggataaaacaacaataccaca

SEQ ID NO: 23161 - DNA, 500 bp, synthetic construct
  source 1..500: mol_type = other DNA
aagcctagtaccactttggaatcttcgatgcgttgcgctcagcactcaaccccagagtgtagcttaggtcgatgagcctggactttcctcactggcgacagtggtccaggctgcgttggcggcctacctgtggcccaaagccacaggacgctagttgtgaacaaggtgtgaagagcctattgagctacaaaagagtcctccggcccctgaatgcggctaatcccaaccatggagcaagggtgtacgaaccagtacatatcttgtcgtaacgcgcaagtccgtggcggaaccgactactttgggtgtccgtgtttccttttattttcatactggctgcttatggtgacaatcatagattgttatcataaagcgaattggattggccatccggtgagtgttgtgtcaggtatacaattgtttgttggaaccactgtgtcagctttacttctcatttaaccaattaatcaaaaacaatacgaggataaaacaacaataccaca

SEQ ID NO: 23162 - DNA, 703 bp, synthetic construct
  source 1..703: mol_type = other DNA
agcactcttattctacggaatatttgtgcgcctgttttatagccctcccccattaagtaacttagaagtgatgtgcagcacagatcaatagcaggcatagcgcaccagctgtgtcttgatcaagcactcctgtttccccggactgagtatcaataaactgctcacgcggttgaaggagaaaacgttcgttacccggctaaccacttcgagaaacttagtaacaccattgaagctgtagagtgtttcgctcagcacttccccagtgtagatcaggctgatgagtcactgcgaccctcacgggcgaccgtggcagtggctgcgttggcggcctgcctatggggcaacccataggacgctctaaagtggacatggtgtgaagagtctattgagctggttagtagtcctccggcccctgaatgcggctaatcctaactgcggagcgcatgccctcaaaccagggggtggtgcgtcgtaacgggtaactctgcagcggaaccgactactttgggtgtccgtgtttccttttattctcatattggctgcttatggtgacaattgaagaattgttaccatatagctattggattggccatccggtgtgtaacagagcgattatcttctcttttattgcctttgtcccattgaccccaactgcgttaaacactctgcaatatatactctatcttaactctaggaagcgaac

SEQ ID NO: 23163 - DNA, 653 bp, synthetic construct
  source 1..653: mol_type = other DNA
cattaagtaacttagaagtgatgtgcagcacagatcaatagcaggcatagcgcaccagctgtgtcttgatcaagcactcctgtttccccggactgagtatcaataaactgctcacgcggttgaaggagaaaacgttcgttacccggctaaccacttcgagaaacttagtaacaccattgaagctgtagagtgtttcgctcagcacttccccagtgtagatcaggctgatgagtcactgcgaccctcacgggcgaccgtggcagtggctgcgttggcggcctgcctatggggcaacccataggacgctctaaagtggacatggtgtgaagagtctattgagctggttagtagtcctccggcccctgaatgcggctaatcctaactgcggagcgcatgccctcaaaccagggggtggtgcgtcgtaacgggtaactctgcagcggaaccgactactttgggtgtccgtgtttccttttattctcatattggctgcttatggtgacaattgaagaattgttaccatatagctattggattggccatccggtgtgtaacagagcgattatcttctcttttattgcctttgtcccattgaccccaactgcgttaaacactctgcaatatatactctatcttaactctaggaagcgaac

SEQ ID NO: 23164 - DNA, 603 bp, synthetic construct
  source 1..603: mol_type = other DNA
cgcaccagctgtgtcttgatcaagcactcctgtttccccggactgagtatcaataaactgctcacgcggttgaaggagaaaacgttcgttacccggctaaccacttcgagaaacttagtaacaccattgaagctgtagagtgtttcgctcagcacttccccagtgtagatcaggctgatgagtcactgcgaccctcacgggcgaccgtggcagtggctgcgttggcggcctgcctatggggcaacccataggacgctctaaagtggacatggtgtgaagagtctattgagctggttagtagtcctccggcccctgaatgcggctaatcctaactgcggagcgcatgccctcaaaccagggggtggtgcgtcgtaacgggtaactctgcagcggaaccgactactttgggtgtccgtgtttccttttattctcatattggctgcttatggtgacaattgaagaattgttaccatatagctattggattggccatccggtgtgtaacagagcgattatcttctcttttattgcctttgtcccattgaccccaactgcgttaaacactctgcaatatatactctatcttaactctaggaagcgaac

SEQ ID NO: 23165 - DNA, 553 bp, synthetic construct
  source 1..553: mol_type = other DNA
caataaactgctcacgcggttgaaggagaaaacgttcgttacccggctaaccacttcgagaaacttagtaacaccattgaagctgtagagtgtttcgctcagcacttccccagtgtagatcaggctgatgagtcactgcgaccctcacgggcgaccgtggcagtggctgcgttggcggcctgcctatggggcaacccataggacgctctaaagtggacatggtgtgaagagtctattgagctggttagtagtcctccggcccctgaatgcggctaatcctaactgcggagcgcatgccctcaaaccagggggtggtgcgtcgtaacgggtaactctgcagcggaaccgactactttgggtgtccgtgtttccttttattctcatattggctgcttatggtgacaattgaagaattgttaccatatagctattggattggccatccggtgtgtaacagagcgattatcttctcttttattgcctttgtcccattgaccccaactgcgttaaacactctgcaatatatactctatcttaactctaggaagcgaac

SEQ ID NO: 23166 - DNA, 503 bp, synthetic construct
  source 1..503: mol_type = other DNA
ccacttcgagaaacttagtaacaccattgaagctgtagagtgtttcgctcagcacttccccagtgtagatcaggctgatgagtcactgcgaccctcacgggcgaccgtggcagtggctgcgttggcggcctgcctatggggcaacccataggacgctctaaagtggacatggtgtgaagagtctattgagctggttagtagtcctccggcccctgaatgcggctaatcctaactgcggagcgcatgccctcaaaccagggggtggtgcgtcgtaacgggtaactctgcagcggaaccgactactttgggtgtccgtgtttccttttattctcatattggctgcttatggtgacaattgaagaattgttaccatatagctattggattggccatccggtgtgtaacagagcgattatcttctcttttattgcctttgtcccattgaccccaactgcgttaaacactctgcaatatatactctatcttaactctaggaagcgaac

SEQ ID NO: 23167 - DNA, 703 bp, synthetic construct
  source 1..703: mol_type = other DNA
gtactctggtattacggtacccttgtacgcctgttttatactcccttcccatgtaacttagaagcaaataacacaagttcaatagaagggggtacaaaccagtaccaccacgaacaagcacttctgttaccccggtgaagttgcatagactgttcccacggttgaaagcgaccgatccgttatccgctcaagtacttcgagaagcctagtatcaccttggaatcttcgatgcgttgcgctcatcactcaaccccagagtgtagcttgggctgatgagtctggacgtccctcactggcgacagtggtccaggctgcgttggcggcctacctatggcccaaagccataggacgctagttgtgaacaaggtgtgaagagcctattgagctacttgagagtcctccggcccctgaatgcggctaatcccaaccacggatcaggtgattgcaaaccagcaattagcctgtcgtaacgcgcaagtctgtggcggaaccgactactttgggtgtccgtgtttccttttattttactattggctgcttatggtgacaatcattgattgttatcataaagcgaattggattggccatccggtgaaagtaaaacaggttatttacctttttgttggatttactgcattatctaagcacactccagatttaattcgtatcgttcttgcgattaggagagcacacttttccagca

SEQ ID NO: 23168 - DNA, 653 bp, synthetic construct
  source 1..653: mol_type = other DNA
atgtaacttagaagcaaataacacaagttcaatagaagggggtacaaaccagtaccaccacgaacaagcacttctgttaccccggtgaagttgcatagactgttcccacggttgaaagcgaccgatccgttatccgctcaagtacttcgagaagcctagtatcaccttggaatcttcgatgcgttgcgctcatcactcaaccccagagtgtagcttgggctgatgagtctggacgtccctcactggcgacagtggtccaggctgcgttggcggcctacctatggcccaaagccataggacgctagttgtgaacaaggtgtgaagagcctattgagctacttgagagtcctccggcccctgaatgcggctaatcccaaccacggatcaggtgattgcaaaccagcaattagcctgtcgtaacgcgcaagtctgtggcggaaccgactactttgggtgtccgtgtttccttttattttactattggctgcttatggtgacaatcattgattgttatcataaagcgaattggattggccatccggtgaaagtaaaacaggttatttacctttttgttggatttactgcattatctaagcacactccagatttaattcgtatcgttcttgcgattaggagagcacacttttccagca

SEQ ID NO: 23169 - DNA, 603 bp, synthetic construct
  source 1..603: mol_type = other DNA
agtaccaccacgaacaagcacttctgttaccccggtgaagttgcatagactgttcccacggttgaaagcgaccgatccgttatccgctcaagtacttcgagaagcctagtatcaccttggaatcttcgatgcgttgcgctcatcactcaaccccagagtgtagcttgggctgatgagtctggacgtccctcactggcgacagtggtccaggctgcgttggcggcctacctatggcccaaagccataggacgctagttgtgaacaaggtgtgaagagcctattgagctacttgagagtcctccggcccctgaatgcggctaatcccaaccacggatcaggtgattgcaaaccagcaattagcctgtcgtaacgcgcaagtctgtggcggaaccgactactttgggtgtccgtgtttccttttattttactattggctgcttatggtgacaatcattgattgttatcataaagcgaattggattggccatccggtgaaagtaaaacaggttatttacctttttgttggatttactgcattatctaagcacactccagatttaattcgtatcgttcttgcgattaggagagcacacttttccagca

SEQ ID NO: 23170 - DNA, 553 bp, synthetic construct
  source 1..553: mol_type = other DNA
tgttcccacggttgaaagcgaccgatccgttatccgctcaagtacttcgagaagcctagtatcaccttggaatcttcgatgcgttgcgctcatcactcaaccccagagtgtagcttgggctgatgagtctggacgtccctcactggcgacagtggtccaggctgcgttggcggcctacctatggcccaaagccataggacgctagttgtgaacaaggtgtgaagagcctattgagctacttgagagtcctccggcccctgaatgcggctaatcccaaccacggatcaggtgattgcaaaccagcaattagcctgtcgtaacgcgcaagtctgtggcggaaccgactactttgggtgtccgtgtttccttttattttactattggctgcttatggtgacaatcattgattgttatcataaagcgaattggattggccatccggtgaaagtaaaacaggttatttacctttttgttggatttactgcattatctaagcacactccagatttaattcgtatcgttcttgcgattaggagagcacacttttccagca

SEQ ID NO: 23171 - DNA, 503 bp, synthetic construct
  source 1..503: mol_type = other DNA
gaagcctagtatcaccttggaatcttcgatgcgttgcgctcatcactcaaccccagagtgtagcttgggctgatgagtctggacgtccctcactggcgacagtggtccaggctgcgttggcggcctacctatggcccaaagccataggacgctagttgtgaacaaggtgtgaagagcctattgagctacttgagagtcctccggcccctgaatgcggctaatcccaaccacggatcaggtgattgcaaaccagcaattagcctgtcgtaacgcgcaagtctgtggcggaaccgactactttgggtgtccgtgtttccttttattttactattggctgcttatggtgacaatcattgattgttatcataaagcgaattggattggccatccggtgaaagtaaaacaggttatttacctttttgttggatttactgcattatctaagcacactccagatttaattcgtatcgttcttgcgattaggagagcacacttttccagca

SEQ ID NO: 23172 - DNA, 703 bp, synthetic construct
  source 1..703: mol_type = other DNA
ctgggcgcatgcactctggtatcacggtacctttgtgcgcctgttttatctcccctcccccccgtgtaatttagaagcataagcacaatgatcaatagacaacccagtgcaccaactgggccttgatcaagcacttctgttaccccgggccgactatcaataggctgctcacgtggctgaaggagaaaacgctcgttacccggccagttacttcgagaagcctagtaccaccatgaacgttgcgcagtgtttcgctccgcacaaccccagtgtagatcaggtcgatgagtcaccgcatcccccacgggtgaccgtggcggtggctgcgttggcggcctgcccatggggtaacccatgggacgctacaatactgacatggtgtgaagagtctattgagctaactggtagtcctccggcccctgaatgcggctaatcccaactgcggagcacgtgcttccaatccaggaggtagcgtgtcgtaacgggcaactctgcagcggaaccgactactttgggtgtccgtgtttcctttatctctttattggctgcttatggtgacaattgaaagattgttgccatatagctattggattggccatccggtatctaacagagcaatcatatacctgtttgttggatttgttccacttaacaaaacagagttccgtactttgtgttatattattaggttgaacacatcaaa

SEQ ID NO: 23173 - DNA, 653 bp, synthetic construct
  source 1..653: mol_type = other DNA
tcccctcccccccgtgtaatttagaagcataagcacaatgatcaatagacaacccagtgcaccaactgggccttgatcaagcacttctgttaccccgggccgactatcaataggctgctcacgtggctgaaggagaaaacgctcgttacccggccagttacttcgagaagcctagtaccaccatgaacgttgcgcagtgtttcgctccgcacaaccccagtgtagatcaggtcgatgagtcaccgcatcccccacgggtgaccgtggcggtggctgcgttggcggcctgcccatggggtaacccatgggacgctacaatactgacatggtgtgaagagtctattgagctaactggtagtcctccggcccctgaatgcggctaatcccaactgcggagcacgtgcttccaatccaggaggtagcgtgtcgtaacgggcaactctgcagcggaaccgactactttgggtgtccgtgtttcctttatctctttattggctgcttatggtgacaattgaaagattgttgccatatagctattggattggccatccggtatctaacagagcaatcatatacctgtttgttggatttgttccacttaacaaaacagagttccgtactttgtgttatattattaggttgaacacatcaaa

SEQ ID NO: 23174 - DNA, 603 bp, synthetic construct
  source 1..603: mol_type = other DNA
aacccagtgcaccaactgggccttgatcaagcacttctgttaccccgggccgactatcaataggctgctcacgtggctgaaggagaaaacgctcgttacccggccagttacttcgagaagcctagtaccaccatgaacgttgcgcagtgtttcgctccgcacaaccccagtgtagatcaggtcgatgagtcaccgcatcccccacgggtgaccgtggcggtggctgcgttggcggcctgcccatggggtaacccatgggacgctacaatactgacatggtgtgaagagtctattgagctaactggtagtcctccggcccctgaatgcggctaatcccaactgcggagcacgtgcttccaatccaggaggtagcgtgtcgtaacgggcaactctgcagcggaaccgactactttgggtgtccgtgtttcctttatctctttattggctgcttatggtgacaattgaaagattgttgccatatagctattggattggccatccggtatctaacagagcaatcatatacctgtttgttggatttgttccacttaacaaaacagagttccgtactttgtgttatattattaggttgaacacatcaaa

SEQ ID NO: 23175 - DNA, 553 bp, synthetic construct
  source 1..553: mol_type = other DNA
cgactatcaataggctgctcacgtggctgaaggagaaaacgctcgttacccggccagttacttcgagaagcctagtaccaccatgaacgttgcgcagtgtttcgctccgcacaaccccagtgtagatcaggtcgatgagtcaccgcatcccccacgggtgaccgtggcggtggctgcgttggcggcctgcccatggggtaacccatgggacgctacaatactgacatggtgtgaagagtctattgagctaactggtagtcctccggcccctgaatgcggctaatcccaactgcggagcacgtgcttccaatccaggaggtagcgtgtcgtaacgggcaactctgcagcggaaccgactactttgggtgtccgtgtttcctttatctctttattggctgcttatggtgacaattgaaagattgttgccatatagctattggattggccatccggtatctaacagagcaatcatatacctgtttgttggatttgttccacttaacaaaacagagttccgtactttgtgttatattattaggttgaacacatcaaa

SEQ ID NO: 23176 - DNA, 503 bp, synthetic construct
  source 1..503: mol_type = other DNA
cggccagttacttcgagaagcctagtaccaccatgaacgttgcgcagtgtttcgctccgcacaaccccagtgtagatcaggtcgatgagtcaccgcatcccccacgggtgaccgtggcggtggctgcgttggcggcctgcccatggggtaacccatgggacgctacaatactgacatggtgtgaagagtctattgagctaactggtagtcctccggcccctgaatgcggctaatcccaactgcggagcacgtgcttccaatccaggaggtagcgtgtcgtaacgggcaactctgcagcggaaccgactactttgggtgtccgtgtttcctttatctctttattggctgcttatggtgacaattgaaagattgttgccatatagctattggattggccatccggtatctaacagagcaatcatatacctgtttgttggatttgttccacttaacaaaacagagttccgtactttgtgttatattattaggttgaacacatcaaa

SEQ ID NO: 23177 - DNA, 703 bp, synthetic construct
  source 1..703: mol_type = other DNA
gtactccggtattacggtacccttgtacgcctgttttatactcccttcccccgtaacttagaagtaacacaaatccaagttcaatagaagggggtacaaaccagtaccaccatgaacaagcacttctgtttccccggtgaaatcatagactgtacccacggttgaaagtgatcgatccgtcatccgctcttgtacttcgagaagcctagtatcaccttggaatcttcgatgcgttgcgctcaacactcaaccccagagtgtagcttaggctgatgagtctggacactccccaccggcgacggtggtccaggctgcgttggcggcctacctgtggtccaaagccacaggacgctagttgtgaacaaggtgtgaagagcctattgagctacaggagagtcctccggcccctgaatgcggctaatcccaaccacggagcaggtggtcataatccaatgattggcctgtcgtaacgcgcaagtctgtggcggaaccgactactttgggtgtccgtgtttccttttattttatcattggctgcttatggtgacaatctaagattgccatcatatagcttttggattggccatccggtgatacttcgagttatttagcttgctgcttacatttattttaaacaacatccagttaccagcattcctattttgtttttctttcattctgagttatctaataagtagttaga

SEQ ID NO: 23178 - DNA, 653 bp, synthetic construct
  source 1..653: mol_type = other DNA
ccgtaacttagaagtaacacaaatccaagttcaatagaagggggtacaaaccagtaccaccatgaacaagcacttctgtttccccggtgaaatcatagactgtacccacggttgaaagtgatcgatccgtcatccgctcttgtacttcgagaagcctagtatcaccttggaatcttcgatgcgttgcgctcaacactcaaccccagagtgtagcttaggctgatgagtctggacactccccaccggcgacggtggtccaggctgcgttggcggcctacctgtggtccaaagccacaggacgctagttgtgaacaaggtgtgaagagcctattgagctacaggagagtcctccggcccctgaatgcggctaatcccaaccacggagcaggtggtcataatccaatgattggcctgtcgtaacgcgcaagtctgtggcggaaccgactactttgggtgtccgtgtttccttttattttatcattggctgcttatggtgacaatctaagattgccatcatatagcttttggattggccatccggtgatacttcgagttatttagcttgctgcttacatttattttaaacaacatccagttaccagcattcctattttgtttttctttcattctgagttatctaataagtagttaga

SEQ ID NO: 23179 - DNA, 603 bp, synthetic construct
  source 1..603: mol_type = other DNA
ccagtaccaccatgaacaagcacttctgtttccccggtgaaatcatagactgtacccacggttgaaagtgatcgatccgtcatccgctcttgtacttcgagaagcctagtatcaccttggaatcttcgatgcgttgcgctcaacactcaaccccagagtgtagcttaggctgatgagtctggacactccccaccggcgacggtggtccaggctgcgttggcggcctacctgtggtccaaagccacaggacgctagttgtgaacaaggtgtgaagagcctattgagctacaggagagtcctccggcccctgaatgcggctaatcccaaccacggagcaggtggtcataatccaatgattggcctgtcgtaacgcgcaagtctgtggcggaaccgactactttgggtgtccgtgtttccttttattttatcattggctgcttatggtgacaatctaagattgccatcatatagcttttggattggccatccggtgatacttcgagttatttagcttgctgcttacatttattttaaacaacatccagttaccagcattcctattttgtttttctttcattctgagttatctaataagtagttaga

SEQ ID NO: 23180 - DNA, 553 bp, synthetic construct
  source 1..553: mol_type = other DNA
tgtacccacggttgaaagtgatcgatccgtcatccgctcttgtacttcgagaagcctagtatcaccttggaatcttcgatgcgttgcgctcaacactcaaccccagagtgtagcttaggctgatgagtctggacactccccaccggcgacggtggtccaggctgcgttggcggcctacctgtggtccaaagccacaggacgctagttgtgaacaaggtgtgaagagcctattgagctacaggagagtcctccggcccctgaatgcggctaatcccaaccacggagcaggtggtcataatccaatgattggcctgtcgtaacgcgcaagtctgtggcggaaccgactactttgggtgtccgtgtttccttttattttatcattggctgcttatggtgacaatctaagattgccatcatatagcttttggattggccatccggtgatacttcgagttatttagcttgctgcttacatttattttaaacaacatccagttaccagcattcctattttgtttttctttcattctgagttatctaataagtagttaga

SEQ ID NO: 23181 - DNA, 503 bp, synthetic construct
  source 1..503: mol_type = other DNA
gaagcctagtatcaccttggaatcttcgatgcgttgcgctcaacactcaaccccagagtgtagcttaggctgatgagtctggacactccccaccggcgacggtggtccaggctgcgttggcggcctacctgtggtccaaagccacaggacgctagttgtgaacaaggtgtgaagagcctattgagctacaggagagtcctccggcccctgaatgcggctaatcccaaccacggagcaggtggtcataatccaatgattggcctgtcgtaacgcgcaagtctgtggcggaaccgactactttgggtgtccgtgtttccttttattttatcattggctgcttatggtgacaatctaagattgccatcatatagcttttggattggccatccggtgatacttcgagttatttagcttgctgcttacatttattttaaacaacatccagttaccagcattcctattttgtttttctttcattctgagttatctaataagtagttaga

SEQ ID NO: 23182 - DNA, 704 bp, synthetic construct
  source 1..704: mol_type = other DNA
actgggcgctagcactctgataccacggtacctttgtgcgcctgttttatcaccctaccccacacgaaacttagaagcaatacataactgaccaatagtaggtgtggcgcaccagccacatcttggtcaagcacttctgtctccccgggttgagtatcaataagctgttcacacggctgaaggagaaaacacccgttacccggccaactacttcgagaaacctagtatcaccatgaacgttgcgaggtgtttcgctcagcacttcccccgtgtagatcaggccgatgagtcaccgcattccccacgggtgaccgtggcggtggctgcgttggcggcctgcctatgggttagcccataggacgccttaatactgacatggtgcgaagagtctattgagctagttggtagtcctccggcccctgaatgcggctaatcctaactgcggagcacatacccacaaaccagtgggcggtgtgtcgtaacgggtaactctgcagcggaaccgactactttgggtgtccgtgtttccttttatctttatattggctgcttatggtgacaatcagagaattgttaccatatagctactggattggccatccggtgtccaatagagctattatatacctgtttgttggattcaccccattgacctacaaatccctaaatactttgtgttatattttgaacttaaatacacgaaa

SEQ ID NO: 23183 - DNA, 654 bp, synthetic construct
  source 1..654: mol_type = other DNA
caccctaccccacacgaaacttagaagcaatacataactgaccaatagtaggtgtggcgcaccagccacatcttggtcaagcacttctgtctccccgggttgagtatcaataagctgttcacacggctgaaggagaaaacacccgttacccggccaactacttcgagaaacctagtatcaccatgaacgttgcgaggtgtttcgctcagcacttcccccgtgtagatcaggccgatgagtcaccgcattccccacgggtgaccgtggcggtggctgcgttggcggcctgcctatgggttagcccataggacgccttaatactgacatggtgcgaagagtctattgagctagttggtagtcctccggcccctgaatgcggctaatcctaactgcggagcacatacccacaaaccagtgggcggtgtgtcgtaacgggtaactctgcagcggaaccgactactttgggtgtccgtgtttccttttatctttatattggctgcttatggtgacaatcagagaattgttaccatatagctactggattggccatccggtgtccaatagagctattatatacctgtttgttggattcaccccattgacctacaaatccctaaatactttgtgttatattttgaacttaaatacacgaaa

SEQ ID NO: 23184 - DNA, 604 bp, synthetic construct
  source 1..604: mol_type = other DNA
ggtgtggcgcaccagccacatcttggtcaagcacttctgtctccccgggttgagtatcaataagctgttcacacggctgaaggagaaaacacccgttacccggccaactacttcgagaaacctagtatcaccatgaacgttgcgaggtgtttcgctcagcacttcccccgtgtagatcaggccgatgagtcaccgcattccccacgggtgaccgtggcggtggctgcgttggcggcctgcctatgggttagcccataggacgccttaatactgacatggtgcgaagagtctattgagctagttggtagtcctccggcccctgaatgcggctaatcctaactgcggagcacatacccacaaaccagtgggcggtgtgtcgtaacgggtaactctgcagcggaaccgactactttgggtgtccgtgtttccttttatctttatattggctgcttatggtgacaatcagagaattgttaccatatagctactggattggccatccggtgtccaatagagctattatatacctgtttgttggattcaccccattgacctacaaatccctaaatactttgtgttatattttgaacttaaatacacgaaa

SEQ ID NO: 23185 - DNA, 554 bp, synthetic construct
  source 1..554: mol_type = other DNA
tgagtatcaataagctgttcacacggctgaaggagaaaacacccgttacccggccaactacttcgagaaacctagtatcaccatgaacgttgcgaggtgtttcgctcagcacttcccccgtgtagatcaggccgatgagtcaccgcattccccacgggtgaccgtggcggtggctgcgttggcggcctgcctatgggttagcccataggacgccttaatactgacatggtgcgaagagtctattgagctagttggtagtcctccggcccctgaatgcggctaatcctaactgcggagcacatacccacaaaccagtgggcggtgtgtcgtaacgggtaactctgcagcggaaccgactactttgggtgtccgtgtttccttttatctttatattggctgcttatggtgacaatcagagaattgttaccatatagctactggattggccatccggtgtccaatagagctattatatacctgtttgttggattcaccccattgacctacaaatccctaaatactttgtgttatattttgaacttaaatacacgaaa

SEQ ID NO: 23186 - DNA, 504 bp, synthetic construct
  source 1..504: mol_type = other DNA
cggccaactacttcgagaaacctagtatcaccatgaacgttgcgaggtgtttcgctcagcacttcccccgtgtagatcaggccgatgagtcaccgcattccccacgggtgaccgtggcggtggctgcgttggcggcctgcctatgggttagcccataggacgccttaatactgacatggtgcgaagagtctattgagctagttggtagtcctccggcccctgaatgcggctaatcctaactgcggagcacatacccacaaaccagtgggcggtgtgtcgtaacgggtaactctgcagcggaaccgactactttgggtgtccgtgtttccttttatctttatattggctgcttatggtgacaatcagagaattgttaccatatagctactggattggccatccggtgtccaatagagctattatatacctgtttgttggattcaccccattgacctacaaatccctaaatactttgtgttatattttgaacttaaatacacgaaa

SEQ ID NO: 23187 - DNA, 704 bp, synthetic construct
  source 1..704: mol_type = other DNA
gtactccggtattacggtacccttgtacgcctgttttatatccccttcccctgtaacttagaagcagacaacacaagttcaatagaagggggtacaaaccagtaccaccacgaacaagcacttctgttaccccggtgacgttgcatagactgttcccacggtcaaaagcgatcgatccgttatccgctcaagtacttcgaaaagcctagtatcaccttggaatcttcgatgcgttgcgctcggcactcgatcccggagtgtagcttaggccgatgagtctggacgatcctcactggcgacagtggtccaggctgcgttggcggcctacctatggcccaaagccataggacgctagttgtgaacaaggtgtgaagagcctattgagctacttgagaatcctccggcccctgaatgcggctaatcccaaccacggatcaggtgattgcaatccagcaattggcctgtcgtaacgcgcaagtctgtggcggaaccgactactttgggtgtccgtgtttccttttaattttattgctggctgcttatggtgacaatcgtagattgttatcatagagcgaattggattggccatccggtgagattaaaacacattatttacctttttgttggatttaccacactatctacgtacactccagacttaatccgcatagtacttttaattagaagatcttatcattataaca

SEQ ID NO: 23188 - DNA, 654 bp, synthetic construct
  source 1..654: mol_type = other DNA
ctgtaacttagaagcagacaacacaagttcaatagaagggggtacaaaccagtaccaccacgaacaagcacttctgttaccccggtgacgttgcatagactgttcccacggtcaaaagcgatcgatccgttatccgctcaagtacttcgaaaagcctagtatcaccttggaatcttcgatgcgttgcgctcggcactcgatcccggagtgtagcttaggccgatgagtctggacgatcctcactggcgacagtggtccaggctgcgttggcggcctacctatggcccaaagccataggacgctagttgtgaacaaggtgtgaagagcctattgagctacttgagaatcctccggcccctgaatgcggctaatcccaaccacggatcaggtgattgcaatccagcaattggcctgtcgtaacgcgcaagtctgtggcggaaccgactactttgggtgtccgtgtttccttttaattttattgctggctgcttatggtgacaatcgtagattgttatcatagagcgaattggattggccatccggtgagattaaaacacattatttacctttttgttggatttaccacactatctacgtacactccagacttaatccgcatagtacttttaattagaagatcttatcattataaca

SEQ ID NO: 23189 - DNA, 604 bp, synthetic construct
  source 1..604: mol_type = other DNA
agtaccaccacgaacaagcacttctgttaccccggtgacgttgcatagactgttcccacggtcaaaagcgatcgatccgttatccgctcaagtacttcgaaaagcctagtatcaccttggaatcttcgatgcgttgcgctcggcactcgatcccggagtgtagcttaggccgatgagtctggacgatcctcactggcgacagtggtccaggctgcgttggcggcctacctatggcccaaagccataggacgctagttgtgaacaaggtgtgaagagcctattgagctacttgagaatcctccggcccctgaatgcggctaatcccaaccacggatcaggtgattgcaatccagcaattggcctgtcgtaacgcgcaagtctgtggcggaaccgactactttgggtgtccgtgtttccttttaattttattgctggctgcttatggtgacaatcgtagattgttatcatagagcgaattggattggccatccggtgagattaaaacacattatttacctttttgttggatttaccacactatctacgtacactccagacttaatccgcatagtacttttaattagaagatcttatcattataaca

SEQ ID NO: 23190 - DNA, 554 bp, synthetic construct
  source 1..554: mol_type = other DNA
tgttcccacggtcaaaagcgatcgatccgttatccgctcaagtacttcgaaaagcctagtatcaccttggaatcttcgatgcgttgcgctcggcactcgatcccggagtgtagcttaggccgatgagtctggacgatcctcactggcgacagtggtccaggctgcgttggcggcctacctatggcccaaagccataggacgctagttgtgaacaaggtgtgaagagcctattgagctacttgagaatcctccggcccctgaatgcggctaatcccaaccacggatcaggtgattgcaatccagcaattggcctgtcgtaacgcgcaagtctgtggcggaaccgactactttgggtgtccgtgtttccttttaattttattgctggctgcttatggtgacaatcgtagattgttatcatagagcgaattggattggccatccggtgagattaaaacacattatttacctttttgttggatttaccacactatctacgtacactccagacttaatccgcatagtacttttaattagaagatcttatcattataaca

SEQ ID NO: 23191 - DNA, 504 bp, synthetic construct
  source 1..504: mol_type = other DNA
aaagcctagtatcaccttggaatcttcgatgcgttgcgctcggcactcgatcccggagtgtagcttaggccgatgagtctggacgatcctcactggcgacagtggtccaggctgcgttggcggcctacctatggcccaaagccataggacgctagttgtgaacaaggtgtgaagagcctattgagctacttgagaatcctccggcccctgaatgcggctaatcccaaccacggatcaggtgattgcaatccagcaattggcctgtcgtaacgcgcaagtctgtggcggaaccgactactttgggtgtccgtgtttccttttaattttattgctggctgcttatggtgacaatcgtagattgttatcatagagcgaattggattggccatccggtgagattaaaacacattatttacctttttgttggatttaccacactatctacgtacactccagacttaatccgcatagtacttttaattagaagatcttatcattataaca

SEQ ID NO: 23192 - DNA, 704 bp, synthetic construct
  source 1..704: mol_type = other DNA
gtactccggtatcgaggtacccttgtacgcctgttttatactcccttcccccgtaacttagaagccaaaaatacaagttcaatagaagggggtacaaaccagtaccaccacgaacaagcacttctgttaccccggtgatgttgcatagactgtccccacggtcgaaagcgattgatccgttatccgcttaggtacttcgagaagcctagtatcaccttggaatcttcgatgcgttgcgctcatcactcgaccccggagtgtagcttaggtcgatgagtctggacgatcctcactggcgacagtggtccaggctgcgttggcggcctacctatggcccaaagccataggacgctagttgtgaacaaggtgtgaagagcctattgagctacttaagagtcctccggcccctgaatgcggctaatcccaaccacggatcaggtgattgcaatccagcgattggcctgtcgtaacgcgcaagtctgtggcggaaccgactactttgggtgtccgtgtttccttttaattttattattggctgcttatggtgacaatcatagattgttatcataaagcgaattggattggccatccggtgaaaataaaacacattatctacctttttgttggatttactacactgtctacacacactccagatataatttatatagttcttttaatcaggagatcttatcattataaca

SEQ ID NO: 23193 - DNA, 654 bp, synthetic construct
  source 1..654: mol_type = other DNA
ccgtaacttagaagccaaaaatacaagttcaatagaagggggtacaaaccagtaccaccacgaacaagcacttctgttaccccggtgatgttgcatagactgtccccacggtcgaaagcgattgatccgttatccgcttaggtacttcgagaagcctagtatcaccttggaatcttcgatgcgttgcgctcatcactcgaccccggagtgtagcttaggtcgatgagtctggacgatcctcactggcgacagtggtccaggctgcgttggcggcctacctatggcccaaagccataggacgctagttgtgaacaaggtgtgaagagcctattgagctacttaagagtcctccggcccctgaatgcggctaatcccaaccacggatcaggtgattgcaatccagcgattggcctgtcgtaacgcgcaagtctgtggcggaaccgactactttgggtgtccgtgtttccttttaattttattattggctgcttatggtgacaatcatagattgttatcataaagcgaattggattggccatccggtgaaaataaaacacattatctacctttttgttggatttactacactgtctacacacactccagatataatttatatagttcttttaatcaggagatcttatcattataaca

SEQ ID NO: 23194 - DNA, 604 bp, synthetic construct
  source 1..604: mol_type = other DNA
agtaccaccacgaacaagcacttctgttaccccggtgatgttgcatagactgtccccacggtcgaaagcgattgatccgttatccgcttaggtacttcgagaagcctagtatcaccttggaatcttcgatgcgttgcgctcatcactcgaccccggagtgtagcttaggtcgatgagtctggacgatcctcactggcgacagtggtccaggctgcgttggcggcctacctatggcccaaagccataggacgctagttgtgaacaaggtgtgaagagcctattgagctacttaagagtcctccggcccctgaatgcggctaatcccaaccacggatcaggtgattgcaatccagcgattggcctgtcgtaacgcgcaagtctgtggcggaaccgactactttgggtgtccgtgtttccttttaattttattattggctgcttatggtgacaatcatagattgttatcataaagcgaattggattggccatccggtgaaaataaaacacattatctacctttttgttggatttactacactgtctacacacactccagatataatttatatagttcttttaatcaggagatcttatcattataaca

SEQ ID NO: 23195 - DNA, 554 bp, synthetic construct
  source 1..554: mol_type = other DNA
tgtccccacggtcgaaagcgattgatccgttatccgcttaggtacttcgagaagcctagtatcaccttggaatcttcgatgcgttgcgctcatcactcgaccccggagtgtagcttaggtcgatgagtctggacgatcctcactggcgacagtggtccaggctgcgttggcggcctacctatggcccaaagccataggacgctagttgtgaacaaggtgtgaagagcctattgagctacttaagagtcctccggcccctgaatgcggctaatcccaaccacggatcaggtgattgcaatccagcgattggcctgtcgtaacgcgcaagtctgtggcggaaccgactactttgggtgtccgtgtttccttttaattttattattggctgcttatggtgacaatcatagattgttatcataaagcgaattggattggccatccggtgaaaataaaacacattatctacctttttgttggatttactacactgtctacacacactccagatataatttatatagttcttttaatcaggagatcttatcattataaca

SEQ ID NO: 23196 - DNA, 504 bp, synthetic construct
  source 1..504: mol_type = other DNA
gaagcctagtatcaccttggaatcttcgatgcgttgcgctcatcactcgaccccggagtgtagcttaggtcgatgagtctggacgatcctcactggcgacagtggtccaggctgcgttggcggcctacctatggcccaaagccataggacgctagttgtgaacaaggtgtgaagagcctattgagctacttaagagtcctccggcccctgaatgcggctaatcccaaccacggatcaggtgattgcaatccagcgattggcctgtcgtaacgcgcaagtctgtggcggaaccgactactttgggtgtccgtgtttccttttaattttattattggctgcttatggtgacaatcatagattgttatcataaagcgaattggattggccatccggtgaaaataaaacacattatctacctttttgttggatttactacactgtctacacacactccagatataatttatatagttcttttaatcaggagatcttatcattataaca

SEQ ID NO: 23197 - DNA, 704 bp, synthetic construct
  source 1..704: mol_type = other DNA
tggcggctagtactccggtattacggtacccttgtacgcctgttttatactccccaccccgcaacttagaagaagctaatcaagttcaataggagggggtacaaaccagtaccaccacgaacaagcacttctgtctccccggtgacattgcatagactgtccccacggttgaaagcgatcgatccgttatccgctcttgtacttcgagaagcctagtaccatcttggaatcagcgatgcgttgcgctccgcactcaatcccagagtgtagcttaggctgatgagtctggacattcctcaccggcgacggtggtccaggctgcgttggcggcctacctgtggcccaaagccacaggacgctagttgtgaacaaggtgtgaagagcctattgagctataagagagtcctccggcccctgaatgcggctaatcccaaccacggatcaagggtgcacgaaccagtgtataccttgtcgtaacgcgcaagtctgtggcggaaccgactactttgggtgtccgtgtttccttttattgtttcaatggctgcttatggtgacaatcattgattgttatcataaagcgaattggattggccatccggtgaaagtgaaacatattgtttgcctccttattgggtctactccaatcgacctctttacctacaatcttattgccacagttttactggttagaagtgtgtttcaca

SEQ ID NO: 23198 - DNA, 654 bp, synthetic construct
  source 1..654: mol_type = other DNA
tccccaccccgcaacttagaagaagctaatcaagttcaataggagggggtacaaaccagtaccaccacgaacaagcacttctgtctccccggtgacattgcatagactgtccccacggttgaaagcgatcgatccgttatccgctcttgtacttcgagaagcctagtaccatcttggaatcagcgatgcgttgcgctccgcactcaatcccagagtgtagcttaggctgatgagtctggacattcctcaccggcgacggtggtccaggctgcgttggcggcctacctgtggcccaaagccacaggacgctagttgtgaacaaggtgtgaagagcctattgagctataagagagtcctccggcccctgaatgcggctaatcccaaccacggatcaagggtgcacgaaccagtgtataccttgtcgtaacgcgcaagtctgtggcggaaccgactactttgggtgtccgtgtttccttttattgtttcaatggctgcttatggtgacaatcattgattgttatcataaagcgaattggattggccatccggtgaaagtgaaacatattgtttgcctccttattgggtctactccaatcgacctctttacctacaatcttattgccacagttttactggttagaagtgtgtttcaca

SEQ ID NO: 23199 - DNA, 604 bp, synthetic construct
  source 1..604: mol_type = other DNA
acaaaccagtaccaccacgaacaagcacttctgtctccccggtgacattgcatagactgtccccacggttgaaagcgatcgatccgttatccgctcttgtacttcgagaagcctagtaccatcttggaatcagcgatgcgttgcgctccgcactcaatcccagagtgtagcttaggctgatgagtctggacattcctcaccggcgacggtggtccaggctgcgttggcggcctacctgtggcccaaagccacaggacgctagttgtgaacaaggtgtgaagagcctattgagctataagagagtcctccggcccctgaatgcggctaatcccaaccacggatcaagggtgcacgaaccagtgtataccttgtcgtaacgcgcaagtctgtggcggaaccgactactttgggtgtccgtgtttccttttattgtttcaatggctgcttatggtgacaatcattgattgttatcataaagcgaattggattggccatccggtgaaagtgaaacatattgtttgcctccttattgggtctactccaatcgacctctttacctacaatcttattgccacagttttactggttagaagtgtgtttcaca

SEQ ID NO: 23200 - DNA, 554 bp, synthetic construct
  source 1..554: mol_type = other DNA
catagactgtccccacggttgaaagcgatcgatccgttatccgctcttgtacttcgagaagcctagtaccatcttggaatcagcgatgcgttgcgctccgcactcaatcccagagtgtagcttaggctgatgagtctggacattcctcaccggcgacggtggtccaggctgcgttggcggcctacctgtggcccaaagccacaggacgctagttgtgaacaaggtgtgaagagcctattgagctataagagagtcctccggcccctgaatgcggctaatcccaaccacggatcaagggtgcacgaaccagtgtataccttgtcgtaacgcgcaagtctgtggcggaaccgactactttgggtgtccgtgtttccttttattgtttcaatggctgcttatggtgacaatcattgattgttatcataaagcgaattggattggccatccggtgaaagtgaaacatattgtttgcctccttattgggtctactccaatcgacctctttacctacaatcttattgccacagttttactggttagaagtgtgtttcaca

SEQ ID NO: 23201 - DNA, 504 bp, synthetic construct
  source 1..504: mol_type = other DNA
acttcgagaagcctagtaccatcttggaatcagcgatgcgttgcgctccgcactcaatcccagagtgtagcttaggctgatgagtctggacattcctcaccggcgacggtggtccaggctgcgttggcggcctacctgtggcccaaagccacaggacgctagttgtgaacaaggtgtgaagagcctattgagctataagagagtcctccggcccctgaatgcggctaatcccaaccacggatcaagggtgcacgaaccagtgtataccttgtcgtaacgcgcaagtctgtggcggaaccgactactttgggtgtccgtgtttccttttattgtttcaatggctgcttatggtgacaatcattgattgttatcataaagcgaattggattggccatccggtgaaagtgaaacatattgtttgcctccttattgggtctactccaatcgacctctttacctacaatcttattgccacagttttactggttagaagtgtgtttcaca

SEQ ID NO: 23202 - DNA, 705 bp, synthetic construct
  source 1..705: mol_type = other DNA
acttcggtttctggacaaatacaaagaacctcagtcctcttggtactttctcgcctgagtcaacaaagcgagaaacctgcccctctaacgccagacgagcggcataaaacttgaacttctggcacgctccactcttccctctcccaatcccatccccatcgcgctctcaaggtcgcgcaattctgggactagcccagatttaaaagttcctggcaccctttgcccctttaggcccttaaggcaggaactgaccttgtgctgtgacctcggtgcggaagtgctactgcgtagtgattgtaagctcctcttatggttctgccctggcaaggctatagagtactgtgatccgctgcggatgccatcctggtaacaggacccccagtgtgcgtaacagtatgttcacggctcaccgtgttcaccatgactggaacactgctttcgtgaaacagtgtgtgtccaatccctgtgatcagtatcaaccacaccacctaggaatgctaggaaggtaccccggttcgccgggatctgatcctaggctaattgtctacagtggtgctcctttattttctctccaaccatttattgttcacaactgcttgatcttgtgtttgctgcctttctctgctctcactgccattctcaagtgttcacactgtccaagctcctttggttgttttcatccacttgccattgtcaactcttgtc

SEQ ID NO: 23203 - DNA, 655 bp, synthetic construct
  source 1..655: mol_type = other DNA
tcgcctgagtcaacaaagcgagaaacctgcccctctaacgccagacgagcggcataaaacttgaacttctggcacgctccactcttccctctcccaatcccatccccatcgcgctctcaaggtcgcgcaattctgggactagcccagatttaaaagttcctggcaccctttgcccctttaggcccttaaggcaggaactgaccttgtgctgtgacctcggtgcggaagtgctactgcgtagtgattgtaagctcctcttatggttctgccctggcaaggctatagagtactgtgatccgctgcggatgccatcctggtaacaggacccccagtgtgcgtaacagtatgttcacggctcaccgtgttcaccatgactggaacactgctttcgtgaaacagtgtgtgtccaatccctgtgatcagtatcaaccacaccacctaggaatgctaggaaggtaccccggttcgccgggatctgatcctaggctaattgtctacagtggtgctcctttattttctctccaaccatttattgttcacaactgcttgatcttgtgtttgctgcctttctctgctctcactgccattctcaagtgttcacactgtccaagctcctttggttgttttcatccacttgccattgtcaactcttgtc

SEQ ID NO: 23204 - DNA, 605 bp, synthetic construct
  source 1..605: mol_type = other DNA
ggcataaaacttgaacttctggcacgctccactcttccctctcccaatcccatccccatcgcgctctcaaggtcgcgcaattctgggactagcccagatttaaaagttcctggcaccctttgcccctttaggcccttaaggcaggaactgaccttgtgctgtgacctcggtgcggaagtgctactgcgtagtgattgtaagctcctcttatggttctgccctggcaaggctatagagtactgtgatccgctgcggatgccatcctggtaacaggacccccagtgtgcgtaacagtatgttcacggctcaccgtgttcaccatgactggaacactgctttcgtgaaacagtgtgtgtccaatccctgtgatcagtatcaaccacaccacctaggaatgctaggaaggtaccccggttcgccgggatctgatcctaggctaattgtctacagtggtgctcctttattttctctccaaccatttattgttcacaactgcttgatcttgtgtttgctgcctttctctgctctcactgccattctcaagtgttcacactgtccaagctcctttggttgttttcatccacttgccattgtcaactcttgtc

SEQ ID NO: 23205 - DNA, 555 bp, synthetic construct
  source 1..555: mol_type = other DNA
catccccatcgcgctctcaaggtcgcgcaattctgggactagcccagatttaaaagttcctggcaccctttgcccctttaggcccttaaggcaggaactgaccttgtgctgtgacctcggtgcggaagtgctactgcgtagtgattgtaagctcctcttatggttctgccctggcaaggctatagagtactgtgatccgctgcggatgccatcctggtaacaggacccccagtgtgcgtaacagtatgttcacggctcaccgtgttcaccatgactggaacactgctttcgtgaaacagtgtgtgtccaatccctgtgatcagtatcaaccacaccacctaggaatgctaggaaggtaccccggttcgccgggatctgatcctaggctaattgtctacagtggtgctcctttattttctctccaaccatttattgttcacaactgcttgatcttgtgtttgctgcctttctctgctctcactgccattctcaagtgttcacactgtccaagctcctttggttgttttcatccacttgccattgtcaactcttgtc

SEQ ID NO: 23206 - DNA, 505 bp, synthetic construct
  source 1..505: mol_type = other DNA
taaaagttcctggcaccctttgcccctttaggcccttaaggcaggaactgaccttgtgctgtgacctcggtgcggaagtgctactgcgtagtgattgtaagctcctcttatggttctgccctggcaaggctatagagtactgtgatccgctgcggatgccatcctggtaacaggacccccagtgtgcgtaacagtatgttcacggctcaccgtgttcaccatgactggaacactgctttcgtgaaacagtgtgtgtccaatccctgtgatcagtatcaaccacaccacctaggaatgctaggaaggtaccccggttcgccgggatctgatcctaggctaattgtctacagtggtgctcctttattttctctccaaccatttattgttcacaactgcttgatcttgtgtttgctgcctttctctgctctcactgccattctcaagtgttcacactgtccaagctcctttggttgttttcatccacttgccattgtcaactcttgtc

SEQ ID NO: 23207 - DNA, 705 bp, synthetic construct
  source 1..705: mol_type = other DNA
cacactgattctgcgggatctttgtgcgcctgttttatatcccctccccccaaactaggtaacttagaagattagcacttgtatgaccaatagtaggcgtgacgcgccagtcatgtcttggtcaagcacttctgtttccccggactgagtatcaataagctgcttgcgcggctgaaggagaaaacgttcgttacccggctaactacttcgagaaacctagtaacaccatgaaagttgcggagtgtttcgctcagcacttcccccgtgtagatcaggtcgatgagtcactgcaaaccccacgggtgaccgtggcagtggctgcgttggcggcctgcctatgggtcaacccataggacgctctaatacagacatggtgtgaagagtctattgagctagttagtagtcctccggcccctgaatgcggctaatcctaactgcggagcacacgcttgcaaaccagtgagtagtgtgtcgtaatgggcaactctgcagcggaaccgactactttgggtgtccgtgtttccttttattctcatactggctgcttatggtgacaattgaagaattgttactatatagctattggattggccatccggtgtgtaacagagcgataatctactcctttgttgcatttgttccactaacccttactacattagacattctacaatacatactttatctcaactccaagaaacgaac

SEQ ID NO: 23208 - DNA, 655 bp, synthetic construct
  source 1..655: mol_type = other DNA
caaactaggtaacttagaagattagcacttgtatgaccaatagtaggcgtgacgcgccagtcatgtcttggtcaagcacttctgtttccccggactgagtatcaataagctgcttgcgcggctgaaggagaaaacgttcgttacccggctaactacttcgagaaacctagtaacaccatgaaagttgcggagtgtttcgctcagcacttcccccgtgtagatcaggtcgatgagtcactgcaaaccccacgggtgaccgtggcagtggctgcgttggcggcctgcctatgggtcaacccataggacgctctaatacagacatggtgtgaagagtctattgagctagttagtagtcctccggcccctgaatgcggctaatcctaactgcggagcacacgcttgcaaaccagtgagtagtgtgtcgtaatgggcaactctgcagcggaaccgactactttgggtgtccgtgtttccttttattctcatactggctgcttatggtgacaattgaagaattgttactatatagctattggattggccatccggtgtgtaacagagcgataatctactcctttgttgcatttgttccactaacccttactacattagacattctacaatacatactttatctcaactccaagaaacgaac

SEQ ID NO: 23209 - DNA, 605 bp, synthetic construct
  source 1..605: mol_type = other DNA
gacgcgccagtcatgtcttggtcaagcacttctgtttccccggactgagtatcaataagctgcttgcgcggctgaaggagaaaacgttcgttacccggctaactacttcgagaaacctagtaacaccatgaaagttgcggagtgtttcgctcagcacttcccccgtgtagatcaggtcgatgagtcactgcaaaccccacgggtgaccgtggcagtggctgcgttggcggcctgcctatgggtcaacccataggacgctctaatacagacatggtgtgaagagtctattgagctagttagtagtcctccggcccctgaatgcggctaatcctaactgcggagcacacgcttgcaaaccagtgagtagtgtgtcgtaatgggcaactctgcagcggaaccgactactttgggtgtccgtgtttccttttattctcatactggctgcttatggtgacaattgaagaattgttactatatagctattggattggccatccggtgtgtaacagagcgataatctactcctttgttgcatttgttccactaacccttactacattagacattctacaatacatactttatctcaactccaagaaacgaac

SEQ ID NO: 23210 - DNA, 555 bp, synthetic construct
  source 1..555: mol_type = other DNA
atcaataagctgcttgcgcggctgaaggagaaaacgttcgttacccggctaactacttcgagaaacctagtaacaccatgaaagttgcggagtgtttcgctcagcacttcccccgtgtagatcaggtcgatgagtcactgcaaaccccacgggtgaccgtggcagtggctgcgttggcggcctgcctatgggtcaacccataggacgctctaatacagacatggtgtgaagagtctattgagctagttagtagtcctccggcccctgaatgcggctaatcctaactgcggagcacacgcttgcaaaccagtgagtagtgtgtcgtaatgggcaactctgcagcggaaccgactactttgggtgtccgtgtttccttttattctcatactggctgcttatggtgacaattgaagaattgttactatatagctattggattggccatccggtgtgtaacagagcgataatctactcctttgttgcatttgttccactaacccttactacattagacattctacaatacatactttatctcaactccaagaaacgaac

SEQ ID NO: 23211 - DNA, 505 bp, synthetic construct
  source 1..505: mol_type = other DNA
aactacttcgagaaacctagtaacaccatgaaagttgcggagtgtttcgctcagcacttcccccgtgtagatcaggtcgatgagtcactgcaaaccccacgggtgaccgtggcagtggctgcgttggcggcctgcctatgggtcaacccataggacgctctaatacagacatggtgtgaagagtctattgagctagttagtagtcctccggcccctgaatgcggctaatcctaactgcggagcacacgcttgcaaaccagtgagtagtgtgtcgtaatgggcaactctgcagcggaaccgactactttgggtgtccgtgtttccttttattctcatactggctgcttatggtgacaattgaagaattgttactatatagctattggattggccatccggtgtgtaacagagcgataatctactcctttgttgcatttgttccactaacccttactacattagacattctacaatacatactttatctcaactccaagaaacgaac

SEQ ID NO: 23212 - DNA, 708 bp, synthetic construct
  source 1..708: mol_type = other DNA
gcccattgggcgctagcactctggtaccacggtacctttgtgcgcctgttttatcaccctaacccccacgaaacttagaagtaacacataaccgaccaatagtaggtgtggcgcaccagccgcatcttggtcaagcacttctgtttccccgggttgagtatcaataagctgttcacacggctgaaggagaaaacacccgttacccgaccaactacttcgagaaacctagtaccaccatgaacgttgcaaggcgtttcgctcagcacttcccccgtgtagatcaggccgatgagtcaccgcattccccacgggtgaccgtggcggtggctgcgttggcggcctgcctatgggttagcccataggacgccttaatactgacatggtgcgaagagtctattgagctagttggtagtcctccggcccctgaatgcggataatcctaactgcggagcacatactcacaaaccagtgagctgtgtgtcgtaacgggcaactctgcagcggaaccgactactttgggagaccgtgtttccttttatctttatattggctgcttatggtgacaatcagagaattgttgccatatagctattggattggccatccggtgtctaatagagctattatatacctgtttgttggattcactccgctgacacataaatcccttaatactttgtgttatatcttgaacttaaacacacgaaa

SEQ ID NO: 23213 - DNA, 658 bp, synthetic construct
  source 1..658: mol_type = other DNA
ttatcaccctaacccccacgaaacttagaagtaacacataaccgaccaatagtaggtgtggcgcaccagccgcatcttggtcaagcacttctgtttccccgggttgagtatcaataagctgttcacacggctgaaggagaaaacacccgttacccgaccaactacttcgagaaacctagtaccaccatgaacgttgcaaggcgtttcgctcagcacttcccccgtgtagatcaggccgatgagtcaccgcattccccacgggtgaccgtggcggtggctgcgttggcggcctgcctatgggttagcccataggacgccttaatactgacatggtgcgaagagtctattgagctagttggtagtcctccggcccctgaatgcggataatcctaactgcggagcacatactcacaaaccagtgagctgtgtgtcgtaacgggcaactctgcagcggaaccgactactttgggagaccgtgtttccttttatctttatattggctgcttatggtgacaatcagagaattgttgccatatagctattggattggccatccggtgtctaatagagctattatatacctgtttgttggattcactccgctgacacataaatcccttaatactttgtgttatatcttgaacttaaacacacgaaa

SEQ ID NO: 23214 - DNA, 608 bp, synthetic construct
  source 1..608: mol_type = other DNA
agtaggtgtggcgcaccagccgcatcttggtcaagcacttctgtttccccgggttgagtatcaataagctgttcacacggctgaaggagaaaacacccgttacccgaccaactacttcgagaaacctagtaccaccatgaacgttgcaaggcgtttcgctcagcacttcccccgtgtagatcaggccgatgagtcaccgcattccccacgggtgaccgtggcggtggctgcgttggcggcctgcctatgggttagcccataggacgccttaatactgacatggtgcgaagagtctattgagctagttggtagtcctccggcccctgaatgcggataatcctaactgcggagcacatactcacaaaccagtgagctgtgtgtcgtaacgggcaactctgcagcggaaccgactactttgggagaccgtgtttccttttatctttatattggctgcttatggtgacaatcagagaattgttgccatatagctattggattggccatccggtgtctaatagagctattatatacctgtttgttggattcactccgctgacacataaatcccttaatactttgtgttatatcttgaacttaaacacacgaaa

SEQ ID NO: 23215 - DNA, 558 bp, synthetic construct
  source 1..558: mol_type = other DNA
gggttgagtatcaataagctgttcacacggctgaaggagaaaacacccgttacccgaccaactacttcgagaaacctagtaccaccatgaacgttgcaaggcgtttcgctcagcacttcccccgtgtagatcaggccgatgagtcaccgcattccccacgggtgaccgtggcggtggctgcgttggcggcctgcctatgggttagcccataggacgccttaatactgacatggtgcgaagagtctattgagctagttggtagtcctccggcccctgaatgcggataatcctaactgcggagcacatactcacaaaccagtgagctgtgtgtcgtaacgggcaactctgcagcggaaccgactactttgggagaccgtgtttccttttatctttatattggctgcttatggtgacaatcagagaattgttgccatatagctattggattggccatccggtgtctaatagagctattatatacctgtttgttggattcactccgctgacacataaatcccttaatactttgtgttatatcttgaacttaaacacacgaaa

SEQ ID NO: 23216 - DNA, 508 bp, synthetic construct
  source 1..508: mol_type = other DNA
tacccgaccaactacttcgagaaacctagtaccaccatgaacgttgcaaggcgtttcgctcagcacttcccccgtgtagatcaggccgatgagtcaccgcattccccacgggtgaccgtggcggtggctgcgttggcggcctgcctatgggttagcccataggacgccttaatactgacatggtgcgaagagtctattgagctagttggtagtcctccggcccctgaatgcggataatcctaactgcggagcacatactcacaaaccagtgagctgtgtgtcgtaacgggcaactctgcagcggaaccgactactttgggagaccgtgtttccttttatctttatattggctgcttatggtgacaatcagagaattgttgccatatagctattggattggccatccggtgtctaatagagctattatatacctgtttgttggattcactccgctgacacataaatcccttaatactttgtgttatatcttgaacttaaacacacgaaa

SEQ ID NO: 23217 - DNA, 708 bp, synthetic construct
  source 1..708: mol_type = other DNA
gcccactgggcgctagcactctggtatcacggtacctttgtgcgcctgtttttccacccctccccatacgcaacttagaagagagactcaaccggtcaatagacagcctagtacaccaactaggttctgaccaagaacttctgtttccccggaccgagtatcaataggctgcttacgcggctgaaggagaaaacgttcgttacccggccaattacttcgagaaacctagtatcaccatggaagttgcgcagtgtttcgctccgcacaaccccagtgtagatcaggtcgatgagtcaccgcattccccacaggcgactgtggcggtggctgcgttggcggcctgcccgtggggcaacccacgggacgcttcaataccgacatggtgcgaagagtctattgagctaattggtagtcctccggcccctgaatgcggctaatcctaactgtggagcagatacccacgcgccagtgggcagtctgtcgtaatgggcaactccgcagcggaaccgactactttgggtgtccgtgtttccttttatcctcataatggctgcttatggtgacaattgaaagattgttgccatatagctattggattggccatccggtgactaacagagcaattatttacttgtttgttgggtttgtaccattgaactacaaggtccttaatactctaaactacattataagtctcaatacagtgca

SEQ ID NO: 23218 - DNA, 658 bp, synthetic construct
  source 1..658: mol_type = other DNA
tttccacccctccccatacgcaacttagaagagagactcaaccggtcaatagacagcctagtacaccaactaggttctgaccaagaacttctgtttccccggaccgagtatcaataggctgcttacgcggctgaaggagaaaacgttcgttacccggccaattacttcgagaaacctagtatcaccatggaagttgcgcagtgtttcgctccgcacaaccccagtgtagatcaggtcgatgagtcaccgcattccccacaggcgactgtggcggtggctgcgttggcggcctgcccgtggggcaacccacgggacgcttcaataccgacatggtgcgaagagtctattgagctaattggtagtcctccggcccctgaatgcggctaatcctaactgtggagcagatacccacgcgccagtgggcagtctgtcgtaatgggcaactccgcagcggaaccgactactttgggtgtccgtgtttccttttatcctcataatggctgcttatggtgacaattgaaagattgttgccatatagctattggattggccatccggtgactaacagagcaattatttacttgtttgttgggtttgtaccattgaactacaaggtccttaatactctaaactacattataagtctcaatacagtgca

SEQ ID NO: 23219 - DNA, 608 bp, synthetic construct
  source 1..608: mol_type = other DNA
agacagcctagtacaccaactaggttctgaccaagaacttctgtttccccggaccgagtatcaataggctgcttacgcggctgaaggagaaaacgttcgttacccggccaattacttcgagaaacctagtatcaccatggaagttgcgcagtgtttcgctccgcacaaccccagtgtagatcaggtcgatgagtcaccgcattccccacaggcgactgtggcggtggctgcgttggcggcctgcccgtggggcaacccacgggacgcttcaataccgacatggtgcgaagagtctattgagctaattggtagtcctccggcccctgaatgcggctaatcctaactgtggagcagatacccacgcgccagtgggcagtctgtcgtaatgggcaactccgcagcggaaccgactactttgggtgtccgtgtttccttttatcctcataatggctgcttatggtgacaattgaaagattgttgccatatagctattggattggccatccggtgactaacagagcaattatttacttgtttgttgggtttgtaccattgaactacaaggtccttaatactctaaactacattataagtctcaatacagtgca

SEQ ID NO: 23220 - DNA, 558 bp, synthetic construct
  source 1..558: mol_type = other DNA
ggaccgagtatcaataggctgcttacgcggctgaaggagaaaacgttcgttacccggccaattacttcgagaaacctagtatcaccatggaagttgcgcagtgtttcgctccgcacaaccccagtgtagatcaggtcgatgagtcaccgcattccccacaggcgactgtggcggtggctgcgttggcggcctgcccgtggggcaacccacgggacgcttcaataccgacatggtgcgaagagtctattgagctaattggtagtcctccggcccctgaatgcggctaatcctaactgtggagcagatacccacgcgccagtgggcagtctgtcgtaatgggcaactccgcagcggaaccgactactttgggtgtccgtgtttccttttatcctcataatggctgcttatggtgacaattgaaagattgttgccatatagctattggattggccatccggtgactaacagagcaattatttacttgtttgttgggtttgtaccattgaactacaaggtccttaatactctaaactacattataagtctcaatacagtgca

SEQ ID NO: 23221 - DNA, 508 bp, synthetic construct
  source 1..508: mol_type = other DNA
tacccggccaattacttcgagaaacctagtatcaccatggaagttgcgcagtgtttcgctccgcacaaccccagtgtagatcaggtcgatgagtcaccgcattccccacaggcgactgtggcggtggctgcgttggcggcctgcccgtggggcaacccacgggacgcttcaataccgacatggtgcgaagagtctattgagctaattggtagtcctccggcccctgaatgcggctaatcctaactgtggagcagatacccacgcgccagtgggcagtctgtcgtaatgggcaactccgcagcggaaccgactactttgggtgtccgtgtttccttttatcctcataatggctgcttatggtgacaattgaaagattgttgccatatagctattggattggccatccggtgactaacagagcaattatttacttgtttgttgggtttgtaccattgaactacaaggtccttaatactctaaactacattataagtctcaatacagtgca

SEQ ID NO: 23222 - DNA, 709 bp, synthetic construct
  source 1..709: mol_type = other DNA
cccactgggcgctagcacactggttctgcgggacctttgtgcgcctgttttataacccttccctaagcagtaacttagaagctttgtacaatcatggccaatagtgggcgtggcgcgccagtcacgtcttggtcaagcacttctgtatccccggactgagtatcaatagactgctcacgtggttgaaggagaaaacgtccgttacccggctaactacttcgagaaacctagtagcaccatgaaagttgcggagtgtttcgttcagcacttcccccgtgtagatcaggtcgatgagtcactgtaaaccccacgggcgaccgtgacagtggctgcgttggcggcctgcccatggggtaacccatgggacgctctaatacagacatggtgcgaagagtctattgagctagttagcagtcctccggcccctgaatgcggctaatcctaactgcggagcgcgcaccctcaacccagggggcggcgcgtcgtaatgggcaactctgcagcggaaccgactactttgggtgtccgtgtttccttttattctttattggctgcttatggtgacaattgaaaagttgttaccatatagctattggattggccatccggtgtctaacagagctattgtttacctattcattggattcgtccctcttaatctcaaggtcattcaaactctcgattgcatattgctccttaactgtaagaa

SEQ ID NO: 23223 - DNA, 659 bp, synthetic construct
  source 1..659: mol_type = other DNA
tataacccttccctaagcagtaacttagaagctttgtacaatcatggccaatagtgggcgtggcgcgccagtcacgtcttggtcaagcacttctgtatccccggactgagtatcaatagactgctcacgtggttgaaggagaaaacgtccgttacccggctaactacttcgagaaacctagtagcaccatgaaagttgcggagtgtttcgttcagcacttcccccgtgtagatcaggtcgatgagtcactgtaaaccccacgggcgaccgtgacagtggctgcgttggcggcctgcccatggggtaacccatgggacgctctaatacagacatggtgcgaagagtctattgagctagttagcagtcctccggcccctgaatgcggctaatcctaactgcggagcgcgcaccctcaacccagggggcggcgcgtcgtaatgggcaactctgcagcggaaccgactactttgggtgtccgtgtttccttttattctttattggctgcttatggtgacaattgaaaagttgttaccatatagctattggattggccatccggtgtctaacagagctattgtttacctattcattggattcgtccctcttaatctcaaggtcattcaaactctcgattgcatattgctccttaactgtaagaa

SEQ ID NO: 23224 - DNA, 609 bp, synthetic construct
  source 1..609: mol_type = other DNA
atagtgggcgtggcgcgccagtcacgtcttggtcaagcacttctgtatccccggactgagtatcaatagactgctcacgtggttgaaggagaaaacgtccgttacccggctaactacttcgagaaacctagtagcaccatgaaagttgcggagtgtttcgttcagcacttcccccgtgtagatcaggtcgatgagtcactgtaaaccccacgggcgaccgtgacagtggctgcgttggcggcctgcccatggggtaacccatgggacgctctaatacagacatggtgcgaagagtctattgagctagttagcagtcctccggcccctgaatgcggctaatcctaactgcggagcgcgcaccctcaacccagggggcggcgcgtcgtaatgggcaactctgcagcggaaccgactactttgggtgtccgtgtttccttttattctttattggctgcttatggtgacaattgaaaagttgttaccatatagctattggattggccatccggtgtctaacagagctattgtttacctattcattggattcgtccctcttaatctcaaggtcattcaaactctcgattgcatattgctccttaactgtaagaa

SEQ ID NO: 23225 - DNA, 559 bp, synthetic construct
  source 1..559: mol_type = other DNA
ccggactgagtatcaatagactgctcacgtggttgaaggagaaaacgtccgttacccggctaactacttcgagaaacctagtagcaccatgaaagttgcggagtgtttcgttcagcacttcccccgtgtagatcaggtcgatgagtcactgtaaaccccacgggcgaccgtgacagtggctgcgttggcggcctgcccatggggtaacccatgggacgctctaatacagacatggtgcgaagagtctattgagctagttagcagtcctccggcccctgaatgcggctaatcctaactgcggagcgcgcaccctcaacccagggggcggcgcgtcgtaatgggcaactctgcagcggaaccgactactttgggtgtccgtgtttccttttattctttattggctgcttatggtgacaattgaaaagttgttaccatatagctattggattggccatccggtgtctaacagagctattgtttacctattcattggattcgtccctcttaatctcaaggtcattcaaactctcgattgcatattgctccttaactgtaagaa

SEQ ID NO: 23226 - DNA, 509 bp, synthetic construct
  source 1..509: mol_type = other DNA
gttacccggctaactacttcgagaaacctagtagcaccatgaaagttgcggagtgtttcgttcagcacttcccccgtgtagatcaggtcgatgagtcactgtaaaccccacgggcgaccgtgacagtggctgcgttggcggcctgcccatggggtaacccatgggacgctctaatacagacatggtgcgaagagtctattgagctagttagcagtcctccggcccctgaatgcggctaatcctaactgcggagcgcgcaccctcaacccagggggcggcgcgtcgtaatgggcaactctgcagcggaaccgactactttgggtgtccgtgtttccttttattctttattggctgcttatggtgacaattgaaaagttgttaccatatagctattggattggccatccggtgtctaacagagctattgtttacctattcattggattcgtccctcttaatctcaaggtcattcaaactctcgattgcatattgctccttaactgtaagaa

SEQ ID NO: 23227 - DNA, 712 bp, synthetic construct
  source 1..712: mol_type = other DNA
gcccactgggcgctagcacactgattctgcgggatctttgtgcgcctgttttataacccctcccctaagcagtaacttagaagcttcacactattacgaccaatagtaggcgtggcgcgccagtcacgttttggtcaagcacttctgtctccccggactgagtatcaatagactgctcacgcggttgaaggagaaaacgttcgttatccggctaactacttcgagaaacctagtagcaccgtgaaagttgcggagtgtttcgctcagcacttcccccgtgtagatcaggtcgatgagtcactgtgaaccccacgggtgaccgtgacagtggctgcgttggcggcctgcccatggggtgacccatgggacgctctaatacagacacggtgtgaagagtctattgagctagttagtagtcctccggcccctgaatgcggctaatcctaactgcggagcgcgcaccctcaatccagggggccagcgcgtcgtaatgggtaactctgcagcggaaccgactactttgggtgtccgtgtttccttttattccttattggctgcttatggtgacaattgaaaagttgttaccatatagctattggattggccatccggtgaccaacagagctattgtttacctgtttattggatacgtccctctcaatctcaaagccattcaaactcttgattacatattacttcttaactgtaagaa

SEQ ID NO: 23228 - DNA, 662 bp, synthetic construct
  source 1..662: mol_type = other DNA
ttataacccctcccctaagcagtaacttagaagcttcacactattacgaccaatagtaggcgtggcgcgccagtcacgttttggtcaagcacttctgtctccccggactgagtatcaatagactgctcacgcggttgaaggagaaaacgttcgttatccggctaactacttcgagaaacctagtagcaccgtgaaagttgcggagtgtttcgctcagcacttcccccgtgtagatcaggtcgatgagtcactgtgaaccccacgggtgaccgtgacagtggctgcgttggcggcctgcccatggggtgacccatgggacgctctaatacagacacggtgtgaagagtctattgagctagttagtagtcctccggcccctgaatgcggctaatcctaactgcggagcgcgcaccctcaatccagggggccagcgcgtcgtaatgggtaactctgcagcggaaccgactactttgggtgtccgtgtttccttttattccttattggctgcttatggtgacaattgaaaagttgttaccatatagctattggattggccatccggtgaccaacagagctattgtttacctgtttattggatacgtccctctcaatctcaaagccattcaaactcttgattacatattacttcttaactgtaagaa

SEQ ID NO: 23229 - DNA, 612 bp, synthetic construct
  source 1..612: mol_type = other DNA
caatagtaggcgtggcgcgccagtcacgttttggtcaagcacttctgtctccccggactgagtatcaatagactgctcacgcggttgaaggagaaaacgttcgttatccggctaactacttcgagaaacctagtagcaccgtgaaagttgcggagtgtttcgctcagcacttcccccgtgtagatcaggtcgatgagtcactgtgaaccccacgggtgaccgtgacagtggctgcgttggcggcctgcccatggggtgacccatgggacgctctaatacagacacggtgtgaagagtctattgagctagttagtagtcctccggcccctgaatgcggctaatcctaactgcggagcgcgcaccctcaatccagggggccagcgcgtcgtaatgggtaactctgcagcggaaccgactactttgggtgtccgtgtttccttttattccttattggctgcttatggtgacaattgaaaagttgttaccatatagctattggattggccatccggtgaccaacagagctattgtttacctgtttattggatacgtccctctcaatctcaaagccattcaaactcttgattacatattacttcttaactgtaagaa

SEQ ID NO: 23230 - DNA, 562 bp, synthetic construct
  source 1..562: mol_type = other DNA
ccccggactgagtatcaatagactgctcacgcggttgaaggagaaaacgttcgttatccggctaactacttcgagaaacctagtagcaccgtgaaagttgcggagtgtttcgctcagcacttcccccgtgtagatcaggtcgatgagtcactgtgaaccccacgggtgaccgtgacagtggctgcgttggcggcctgcccatggggtgacccatgggacgctctaatacagacacggtgtgaagagtctattgagctagttagtagtcctccggcccctgaatgcggctaatcctaactgcggagcgcgcaccctcaatccagggggccagcgcgtcgtaatgggtaactctgcagcggaaccgactactttgggtgtccgtgtttccttttattccttattggctgcttatggtgacaattgaaaagttgttaccatatagctattggattggccatccggtgaccaacagagctattgtttacctgtttattggatacgtccctctcaatctcaaagccattcaaactcttgattacatattacttcttaactgtaagaa

SEQ ID NO: 23231 - DNA, 512 bp, synthetic construct
  source 1..512: mol_type = other DNA
tcgttatccggctaactacttcgagaaacctagtagcaccgtgaaagttgcggagtgtttcgctcagcacttcccccgtgtagatcaggtcgatgagtcactgtgaaccccacgggtgaccgtgacagtggctgcgttggcggcctgcccatggggtgacccatgggacgctctaatacagacacggtgtgaagagtctattgagctagttagtagtcctccggcccctgaatgcggctaatcctaactgcggagcgcgcaccctcaatccagggggccagcgcgtcgtaatgggtaactctgcagcggaaccgactactttgggtgtccgtgtttccttttattccttattggctgcttatggtgacaattgaaaagttgttaccatatagctattggattggccatccggtgaccaacagagctattgtttacctgtttattggatacgtccctctcaatctcaaagccattcaaactcttgattacatattacttcttaactgtaagaa

SEQ ID NO: 23232 - DNA, 716 bp, synthetic construct
  source 1..716: mol_type = other DNA
tcagctacttcggtacctgttcggaggaattaaacgggcaccctacccaagggttacatgggaccatattcctcctcccctgtaactttaagttttgtgcccgtattcttgactccaggcggatgttgtgtcgcccgtcctgtgaacaaacagctagacactttcctcccctccctctgggctgctccggcagtccactccctccccccagcgtaacatgccccgctggagtgatgcacctggaagtcgtggacgtgggttagtaacttcggtgaaaacccactataatgacaactggttgacccccacactcaaaggactcgagtctttctcccttaaggctagcccggccacatgaatttgcagctggcaactagtgagtccaccatgtcccgcaacctcggctgcggagtgctgttccccaagcgtatgccttccttctgtaagagtgcgcctggcaagcacatctgagaagtcgttccgctgcgtcgtgccaacctggcgacaggtgacccagtgtgcgtagacttcttccggattcgtccggctcttctctaggaaacatgcgtgtaaggttcatgtgccaaagccctgcgcgcggtgttcttctactgccctaggaatgtgccgcaggtacccctacttcggtagggatctgagcggtagctaattgtctacgggtagtttcatttccatcttctcttcaggtcgacatc

SEQ ID NO: 23233 - DNA, 666 bp, synthetic construct
  source 1..666: mol_type = other DNA
gggttacatgggaccatattcctcctcccctgtaactttaagttttgtgcccgtattcttgactccaggcggatgttgtgtcgcccgtcctgtgaacaaacagctagacactttcctcccctccctctgggctgctccggcagtccactccctccccccagcgtaacatgccccgctggagtgatgcacctggaagtcgtggacgtgggttagtaacttcggtgaaaacccactataatgacaactggttgacccccacactcaaaggactcgagtctttctcccttaaggctagcccggccacatgaatttgcagctggcaactagtgagtccaccatgtcccgcaacctcggctgcggagtgctgttccccaagcgtatgccttccttctgtaagagtgcgcctggcaagcacatctgagaagtcgttccgctgcgtcgtgccaacctggcgacaggtgacccagtgtgcgtagacttcttccggattcgtccggctcttctctaggaaacatgcgtgtaaggttcatgtgccaaagccctgcgcgcggtgttcttctactgccctaggaatgtgccgcaggtacccctacttcggtagggatctgagcggtagctaattgtctacgggtagtttcatttccatcttctcttcaggtcgacatc

SEQ ID NO: 23234 - DNA, 616 bp, synthetic construct
  source 1..616: mol_type = other DNA
ccgtattcttgactccaggcggatgttgtgtcgcccgtcctgtgaacaaacagctagacactttcctcccctccctctgggctgctccggcagtccactccctccccccagcgtaacatgccccgctggagtgatgcacctggaagtcgtggacgtgggttagtaacttcggtgaaaacccactataatgacaactggttgacccccacactcaaaggactcgagtctttctcccttaaggctagcccggccacatgaatttgcagctggcaactagtgagtccaccatgtcccgcaacctcggctgcggagtgctgttccccaagcgtatgccttccttctgtaagagtgcgcctggcaagcacatctgagaagtcgttccgctgcgtcgtgccaacctggcgacaggtgacccagtgtgcgtagacttcttccggattcgtccggctcttctctaggaaacatgcgtgtaaggttcatgtgccaaagccctgcgcgcggtgttcttctactgccctaggaatgtgccgcaggtacccctacttcggtagggatctgagcggtagctaattgtctacgggtagtttcatttccatcttctcttcaggtcgacatc

SEQ ID NO: 23235 - DNA, 566 bp, synthetic construct
  source 1..566: mol_type = other DNA
cagctagacactttcctcccctccctctgggctgctccggcagtccactccctccccccagcgtaacatgccccgctggagtgatgcacctggaagtcgtggacgtgggttagtaacttcggtgaaaacccactataatgacaactggttgacccccacactcaaaggactcgagtctttctcccttaaggctagcccggccacatgaatttgcagctggcaactagtgagtccaccatgtcccgcaacctcggctgcggagtgctgttccccaagcgtatgccttccttctgtaagagtgcgcctggcaagcacatctgagaagtcgttccgctgcgtcgtgccaacctggcgacaggtgacccagtgtgcgtagacttcttccggattcgtccggctcttctctaggaaacatgcgtgtaaggttcatgtgccaaagccctgcgcgcggtgttcttctactgccctaggaatgtgccgcaggtacccctacttcggtagggatctgagcggtagctaattgtctacgggtagtttcatttccatcttctcttcaggtcgacatc

SEQ ID NO: 23236 - DNA, 516 bp, synthetic construct
  source 1..516: mol_type = other DNA
cctccccccagcgtaacatgccccgctggagtgatgcacctggaagtcgtggacgtgggttagtaacttcggtgaaaacccactataatgacaactggttgacccccacactcaaaggactcgagtctttctcccttaaggctagcccggccacatgaatttgcagctggcaactagtgagtccaccatgtcccgcaacctcggctgcggagtgctgttccccaagcgtatgccttccttctgtaagagtgcgcctggcaagcacatctgagaagtcgttccgctgcgtcgtgccaacctggcgacaggtgacccagtgtgcgtagacttcttccggattcgtccggctcttctctaggaaacatgcgtgtaaggttcatgtgccaaagccctgcgcgcggtgttcttctactgccctaggaatgtgccgcaggtacccctacttcggtagggatctgagcggtagctaattgtctacgggtagtttcatttccatcttctcttcaggtcgacatc

SEQ ID NO: 23237 - DNA, 719 bp, synthetic construct
  source 1..719: mol_type = other DNA
tgcctgaagctggcactgtgaggttagtctactaaccaaggcttccgtgcagggcttgcacgttaggagttcatgttgattcatgctccaatgcccaaaactttgtgtgtttgtctgtgtctttcccaaagttcttcctaaggtttcggtactcaagccttaatctctggtcccagcttttgggccttagtatccagagaatgtacccgtgcttcgatgaacgtaagaaagctgtcttttaccgaaaaattttaatgaaataagtataactggctcgcgccacctggtgtgtgccgttggaattcccccatggtaacatggtccaacgggcccgaaaggctagtgggcaatcggtcctccaaggaaggggttcccaccccgacctgaacaggattcgatgaagctcacctcccaggctcctaaccccaaggaagtttacttaaagtaattaagatctagtacgtaattgctggcaattttgctagtagttgggaacgttatgacctaatgagtagacccccagaaggtaccccattttatgggatctgatctgggccctatactgtgtgtctccccacatatagggttaaaacaatgaaagttaggtccaaaatattcttttctttttattctttctttagtggtgacgccattatatcagcaatttgctgatgttttatagcgtacgcggcgatacgaacgattcatcactagagaaa

SEQ ID NO: 23238 - DNA, 669 bp, synthetic construct
  source 1..669: mol_type = other DNA
agggcttgcacgttaggagttcatgttgattcatgctccaatgcccaaaactttgtgtgtttgtctgtgtctttcccaaagttcttcctaaggtttcggtactcaagccttaatctctggtcccagcttttgggccttagtatccagagaatgtacccgtgcttcgatgaacgtaagaaagctgtcttttaccgaaaaattttaatgaaataagtataactggctcgcgccacctggtgtgtgccgttggaattcccccatggtaacatggtccaacgggcccgaaaggctagtgggcaatcggtcctccaaggaaggggttcccaccccgacctgaacaggattcgatgaagctcacctcccaggctcctaaccccaaggaagtttacttaaagtaattaagatctagtacgtaattgctggcaattttgctagtagttgggaacgttatgacctaatgagtagacccccagaaggtaccccattttatgggatctgatctgggccctatactgtgtgtctccccacatatagggttaaaacaatgaaagttaggtccaaaatattcttttctttttattctttctttagtggtgacgccattatatcagcaatttgctgatgttttatagcgtacgcggcgatacgaacgattcatcactagagaaa

SEQ ID NO: 23239 - DNA, 619 bp, synthetic construct
  source 1..619: mol_type = other DNA
ctttgtgtgtttgtctgtgtctttcccaaagttcttcctaaggtttcggtactcaagccttaatctctggtcccagcttttgggccttagtatccagagaatgtacccgtgcttcgatgaacgtaagaaagctgtcttttaccgaaaaattttaatgaaataagtataactggctcgcgccacctggtgtgtgccgttggaattcccccatggtaacatggtccaacgggcccgaaaggctagtgggcaatcggtcctccaaggaaggggttcccaccccgacctgaacaggattcgatgaagctcacctcccaggctcctaaccccaaggaagtttacttaaagtaattaagatctagtacgtaattgctggcaattttgctagtagttgggaacgttatgacctaatgagtagacccccagaaggtaccccattttatgggatctgatctgggccctatactgtgtgtctccccacatatagggttaaaacaatgaaagttaggtccaaaatattcttttctttttattctttctttagtggtgacgccattatatcagcaatttgctgatgttttatagcgtacgcggcgatacgaacgattcatcactagagaaa

SEQ ID NO: 23240 - DNA, 569 bp, synthetic construct
  source 1..569: mol_type = other DNA
actcaagccttaatctctggtcccagcttttgggccttagtatccagagaatgtacccgtgcttcgatgaacgtaagaaagctgtcttttaccgaaaaattttaatgaaataagtataactggctcgcgccacctggtgtgtgccgttggaattcccccatggtaacatggtccaacgggcccgaaaggctagtgggcaatcggtcctccaaggaaggggttcccaccccgacctgaacaggattcgatgaagctcacctcccaggctcctaaccccaaggaagtttacttaaagtaattaagatctagtacgtaattgctggcaattttgctagtagttgggaacgttatgacctaatgagtagacccccagaaggtaccccattttatgggatctgatctgggccctatactgtgtgtctccccacatatagggttaaaacaatgaaagttaggtccaaaatattcttttctttttattctttctttagtggtgacgccattatatcagcaatttgctgatgttttatagcgtacgcggcgatacgaacgattcatcactagagaaa

SEQ ID NO: 23241 - DNA, 519 bp, synthetic construct
  source 1..519: mol_type = other DNA
atgtacccgtgcttcgatgaacgtaagaaagctgtcttttaccgaaaaattttaatgaaataagtataactggctcgcgccacctggtgtgtgccgttggaattcccccatggtaacatggtccaacgggcccgaaaggctagtgggcaatcggtcctccaaggaaggggttcccaccccgacctgaacaggattcgatgaagctcacctcccaggctcctaaccccaaggaagtttacttaaagtaattaagatctagtacgtaattgctggcaattttgctagtagttgggaacgttatgacctaatgagtagacccccagaaggtaccccattttatgggatctgatctgggccctatactgtgtgtctccccacatatagggttaaaacaatgaaagttaggtccaaaatattcttttctttttattctttctttagtggtgacgccattatatcagcaatttgctgatgttttatagcgtacgcggcgatacgaacgattcatcactagagaaa

SEQ ID NO: 23242 - DNA, 720 bp, synthetic construct
  source 1..720: mol_type = other DNA
caaggccaactcggttcaacttcggtttccggacaaatacaagaacctcagtcctcttggtactttctcgcctgagtcaacaaagcgagaaacctgcccctctaacgccagacgagcggcatgaaacttgaacttctggcatgttccactttccctctccctcaccccaccccaccgcgctctcaaggtcgcgctcttccgggactagcccggttttaaaagttcctggcaccctttgcccctctaggcccttaaggtaggaactgaccttgtgctgtgatctcggtgcggaagtgctactgcgtagtgattgtaagatccctttgtggttctgccctggcaaggctacagagtactgtgatccgctgcggacgccatcctggtaacaggacccccagtgtgcgcaacagtatgtccacggtcttccgtgttcaccacattcggaacactgctctcgtgaaacagtgtgtgtccaatccctgtgaccagtattaaccacaccacctaggaatgctaggaaggtaccccggttcgccgggatctgatcctaggctaattgtctacagtggtgctccttttattttcccctcacttcattgactacaactgcttgatttccgtgtttgctgctcttcttagctctcactgccattctcaagtgttcacactgtccaagctcctttggttgtttgcctccacttgccactgtcaactcttgtc

SEQ ID NO: 23243 - DNA, 670 bp, synthetic construct
  source 1..670: mol_type = other DNA
gtcctcttggtactttctcgcctgagtcaacaaagcgagaaacctgcccctctaacgccagacgagcggcatgaaacttgaacttctggcatgttccactttccctctccctcaccccaccccaccgcgctctcaaggtcgcgctcttccgggactagcccggttttaaaagttcctggcaccctttgcccctctaggcccttaaggtaggaactgaccttgtgctgtgatctcggtgcggaagtgctactgcgtagtgattgtaagatccctttgtggttctgccctggcaaggctacagagtactgtgatccgctgcggacgccatcctggtaacaggacccccagtgtgcgcaacagtatgtccacggtcttccgtgttcaccacattcggaacactgctctcgtgaaacagtgtgtgtccaatccctgtgaccagtattaaccacaccacctaggaatgctaggaaggtaccccggttcgccgggatctgatcctaggctaattgtctacagtggtgctccttttattttcccctcacttcattgactacaactgcttgatttccgtgtttgctgctcttcttagctctcactgccattctcaagtgttcacactgtccaagctcctttggttgtttgcctccacttgccactgtcaactcttgtc

SEQ ID NO: 23244 - DNA, 620 bp, synthetic construct
  source 1..620: mol_type = other DNA
tctaacgccagacgagcggcatgaaacttgaacttctggcatgttccactttccctctccctcaccccaccccaccgcgctctcaaggtcgcgctcttccgggactagcccggttttaaaagttcctggcaccctttgcccctctaggcccttaaggtaggaactgaccttgtgctgtgatctcggtgcggaagtgctactgcgtagtgattgtaagatccctttgtggttctgccctggcaaggctacagagtactgtgatccgctgcggacgccatcctggtaacaggacccccagtgtgcgcaacagtatgtccacggtcttccgtgttcaccacattcggaacactgctctcgtgaaacagtgtgtgtccaatccctgtgaccagtattaaccacaccacctaggaatgctaggaaggtaccccggttcgccgggatctgatcctaggctaattgtctacagtggtgctccttttattttcccctcacttcattgactacaactgcttgatttccgtgtttgctgctcttcttagctctcactgccattctcaagtgttcacactgtccaagctcctttggttgtttgcctccacttgccactgtcaactcttgtc

SEQ ID NO: 23245 - DNA, 570 bp, synthetic construct
  source 1..570: mol_type = other DNA
ttccctctccctcaccccaccccaccgcgctctcaaggtcgcgctcttccgggactagcccggttttaaaagttcctggcaccctttgcccctctaggcccttaaggtaggaactgaccttgtgctgtgatctcggtgcggaagtgctactgcgtagtgattgtaagatccctttgtggttctgccctggcaaggctacagagtactgtgatccgctgcggacgccatcctggtaacaggacccccagtgtgcgcaacagtatgtccacggtcttccgtgttcaccacattcggaacactgctctcgtgaaacagtgtgtgtccaatccctgtgaccagtattaaccacaccacctaggaatgctaggaaggtaccccggttcgccgggatctgatcctaggctaattgtctacagtggtgctccttttattttcccctcacttcattgactacaactgcttgatttccgtgtttgctgctcttcttagctctcactgccattctcaagtgttcacactgtccaagctcctttggttgtttgcctccacttgccactgtcaactcttgtc

SEQ ID NO: 23246 - DNA, 520 bp, synthetic construct
  source 1..520: mol_type = other DNA
gggactagcccggttttaaaagttcctggcaccctttgcccctctaggcccttaaggtaggaactgaccttgtgctgtgatctcggtgcggaagtgctactgcgtagtgattgtaagatccctttgtggttctgccctggcaaggctacagagtactgtgatccgctgcggacgccatcctggtaacaggacccccagtgtgcgcaacagtatgtccacggtcttccgtgttcaccacattcggaacactgctctcgtgaaacagtgtgtgtccaatccctgtgaccagtattaaccacaccacctaggaatgctaggaaggtaccccggttcgccgggatctgatcctaggctaattgtctacagtggtgctccttttattttcccctcacttcattgactacaactgcttgatttccgtgtttgctgctcttcttagctctcactgccattctcaagtgttcacactgtccaagctcctttggttgtttgcctccacttgccactgtcaactcttgtc

SEQ ID NO: 23247 - DNA, 723 bp, synthetic construct
  source 1..723: mol_type = other DNA
ccttaaataaattaagatcaccactactgaggggagtagtccgactccgctccggtaccgccgcaccagtattccggtacgcctagtaccctaatacggagtagatggtgtccctcacccgaaacttagaagaaagtaaactacccgaccaataggagcgcggcatccagtcgcgtatcggtcaagcacttctgtttccccggtctgcatagatcgttacccgcccgacccactgcgagaagcctagtagctggccaagcgaatgcgaggttgcgctcaaccacaaccccagtggtagctctggaagatggggctcgcaaactcccccgtggtaacacggttgcttgcccgcgcgtgcttccgggttcggtctcacgccgttcacctcaacctcgcgtaaccagtcaagagcttattgcgctggggcggttctcctccggggccgtgaatgctgctaatcctaacctctgagcgtgtgcgcacaaaccagtgttgctacgtcgtaatgcgcaagttggaggcggaacagactactttcggtaccccgtgtttcctttaattttatatttcaatttatggtgacattgactgacatttgccaagttgctcggttacctctgaacattgctttgtattatctgatagctttctacaaaaccacccagctttcacttgaactcattgagtttgtagtttatttgaaccaagcacacaaattctacg

SEQ ID NO: 23248 - DNA, 673 bp, synthetic construct
  source 1..673: mol_type = other DNA
tccggtaccgccgcaccagtattccggtacgcctagtaccctaatacggagtagatggtgtccctcacccgaaacttagaagaaagtaaactacccgaccaataggagcgcggcatccagtcgcgtatcggtcaagcacttctgtttccccggtctgcatagatcgttacccgcccgacccactgcgagaagcctagtagctggccaagcgaatgcgaggttgcgctcaaccacaaccccagtggtagctctggaagatggggctcgcaaactcccccgtggtaacacggttgcttgcccgcgcgtgcttccgggttcggtctcacgccgttcacctcaacctcgcgtaaccagtcaagagcttattgcgctggggcggttctcctccggggccgtgaatgctgctaatcctaacctctgagcgtgtgcgcacaaaccagtgttgctacgtcgtaatgcgcaagttggaggcggaacagactactttcggtaccccgtgtttcctttaattttatatttcaatttatggtgacattgactgacatttgccaagttgctcggttacctctgaacattgctttgtattatctgatagctttctacaaaaccacccagctttcacttgaactcattgagtttgtagtttatttgaaccaagcacacaaattctacg

SEQ ID NO: 23249 - DNA, 623 bp, synthetic construct
  source 1..623: mol_type = other DNA
gtagatggtgtccctcacccgaaacttagaagaaagtaaactacccgaccaataggagcgcggcatccagtcgcgtatcggtcaagcacttctgtttccccggtctgcatagatcgttacccgcccgacccactgcgagaagcctagtagctggccaagcgaatgcgaggttgcgctcaaccacaaccccagtggtagctctggaagatggggctcgcaaactcccccgtggtaacacggttgcttgcccgcgcgtgcttccgggttcggtctcacgccgttcacctcaacctcgcgtaaccagtcaagagcttattgcgctggggcggttctcctccggggccgtgaatgctgctaatcctaacctctgagcgtgtgcgcacaaaccagtgttgctacgtcgtaatgcgcaagttggaggcggaacagactactttcggtaccccgtgtttcctttaattttatatttcaatttatggtgacattgactgacatttgccaagttgctcggttacctctgaacattgctttgtattatctgatagctttctacaaaaccacccagctttcacttgaactcattgagtttgtagtttatttgaaccaagcacacaaattctacg

SEQ ID NO: 23250 - DNA, 573 bp, synthetic construct
  source 1..573: mol_type = other DNA
aataggagcgcggcatccagtcgcgtatcggtcaagcacttctgtttccccggtctgcatagatcgttacccgcccgacccactgcgagaagcctagtagctggccaagcgaatgcgaggttgcgctcaaccacaaccccagtggtagctctggaagatggggctcgcaaactcccccgtggtaacacggttgcttgcccgcgcgtgcttccgggttcggtctcacgccgttcacctcaacctcgcgtaaccagtcaagagcttattgcgctggggcggttctcctccggggccgtgaatgctgctaatcctaacctctgagcgtgtgcgcacaaaccagtgttgctacgtcgtaatgcgcaagttggaggcggaacagactactttcggtaccccgtgtttcctttaattttatatttcaatttatggtgacattgactgacatttgccaagttgctcggttacctctgaacattgctttgtattatctgatagctttctacaaaaccacccagctttcacttgaactcattgagtttgtagtttatttgaaccaagcacacaaattctacg

SEQ ID NO: 23251 - DNA, 523 bp, synthetic construct
  source 1..523: mol_type = other DNA
cggtctgcatagatcgttacccgcccgacccactgcgagaagcctagtagctggccaagcgaatgcgaggttgcgctcaaccacaaccccagtggtagctctggaagatggggctcgcaaactcccccgtggtaacacggttgcttgcccgcgcgtgcttccgggttcggtctcacgccgttcacctcaacctcgcgtaaccagtcaagagcttattgcgctggggcggttctcctccggggccgtgaatgctgctaatcctaacctctgagcgtgtgcgcacaaaccagtgttgctacgtcgtaatgcgcaagttggaggcggaacagactactttcggtaccccgtgtttcctttaattttatatttcaatttatggtgacattgactgacatttgccaagttgctcggttacctctgaacattgctttgtattatctgatagctttctacaaaaccacccagctttcacttgaactcattgagtttgtagtttatttgaaccaagcacacaaattctacg

SEQ ID NO: 23252 - DNA, 724 bp, synthetic construct
  source 1..724: mol_type = other DNA
ggaataaatcaatattcccagagccgaggggagtagtccgactccgctccactacggtgctccagtagattgctattgcggtagctctctacggggtggctggtattcctcaccctgaaacttagaagtttgtacacaccgaccaatagcggtctggcagccagccaggcaacggtcaagcacttctgtttccccggtccgcaaggatcgttacccgcccgaattgctacgaaaagcctagtaagtacccaagtttgtgcgaggttgcgttcagccacaatcccagtggtagctctgagtgatggggctcgtgattacccctctggtgacagagacacttgcccgcgcgtgcacttgggttcaccagaaatggtgttcacctcaatcaagcgcaagtactgaagagccaattgtgccaatttggtctcctccggggccgtgaatgctgctaatcctaacctccgagcgtgtgcgcacaatccagtgttgctacgtcgtaacgcgtaagttggaggcggaacagactactttcggtaccccgtgtttccttattttattcatttaaatttatggtgacaattgttgagatttgtgagctagcaaaattaccattgaatttggcattgtactgtctcattgcttttcacaaaacctcagatatcccacccagttacattgatcttttagttcatttgaatttacagttcaaactgagacaagtaaa

SEQ ID NO: 23253 - DNA, 674 bp, synthetic construct
  source 1..674: mol_type = other DNA
actacggtgctccagtagattgctattgcggtagctctctacggggtggctggtattcctcaccctgaaacttagaagtttgtacacaccgaccaatagcggtctggcagccagccaggcaacggtcaagcacttctgtttccccggtccgcaaggatcgttacccgcccgaattgctacgaaaagcctagtaagtacccaagtttgtgcgaggttgcgttcagccacaatcccagtggtagctctgagtgatggggctcgtgattacccctctggtgacagagacacttgcccgcgcgtgcacttgggttcaccagaaatggtgttcacctcaatcaagcgcaagtactgaagagccaattgtgccaatttggtctcctccggggccgtgaatgctgctaatcctaacctccgagcgtgtgcgcacaatccagtgttgctacgtcgtaacgcgtaagttggaggcggaacagactactttcggtaccccgtgtttccttattttattcatttaaatttatggtgacaattgttgagatttgtgagctagcaaaattaccattgaatttggcattgtactgtctcattgcttttcacaaaacctcagatatcccacccagttacattgatcttttagttcatttgaatttacagttcaaactgagacaagtaaa

SEQ ID NO: 23254 - DNA, 624 bp, synthetic construct
  source 1..624: mol_type = other DNA
tggtattcctcaccctgaaacttagaagtttgtacacaccgaccaatagcggtctggcagccagccaggcaacggtcaagcacttctgtttccccggtccgcaaggatcgttacccgcccgaattgctacgaaaagcctagtaagtacccaagtttgtgcgaggttgcgttcagccacaatcccagtggtagctctgagtgatggggctcgtgattacccctctggtgacagagacacttgcccgcgcgtgcacttgggttcaccagaaatggtgttcacctcaatcaagcgcaagtactgaagagccaattgtgccaatttggtctcctccggggccgtgaatgctgctaatcctaacctccgagcgtgtgcgcacaatccagtgttgctacgtcgtaacgcgtaagttggaggcggaacagactactttcggtaccccgtgtttccttattttattcatttaaatttatggtgacaattgttgagatttgtgagctagcaaaattaccattgaatttggcattgtactgtctcattgcttttcacaaaacctcagatatcccacccagttacattgatcttttagttcatttgaatttacagttcaaactgagacaagtaaa

SEQ ID NO: 23255 - DNA, 574 bp, synthetic construct
  source 1..574: mol_type = other DNA
ggtctggcagccagccaggcaacggtcaagcacttctgtttccccggtccgcaaggatcgttacccgcccgaattgctacgaaaagcctagtaagtacccaagtttgtgcgaggttgcgttcagccacaatcccagtggtagctctgagtgatggggctcgtgattacccctctggtgacagagacacttgcccgcgcgtgcacttgggttcaccagaaatggtgttcacctcaatcaagcgcaagtactgaagagccaattgtgccaatttggtctcctccggggccgtgaatgctgctaatcctaacctccgagcgtgtgcgcacaatccagtgttgctacgtcgtaacgcgtaagttggaggcggaacagactactttcggtaccccgtgtttccttattttattcatttaaatttatggtgacaattgttgagatttgtgagctagcaaaattaccattgaatttggcattgtactgtctcattgcttttcacaaaacctcagatatcccacccagttacattgatcttttagttcatttgaatttacagttcaaactgagacaagtaaa

SEQ ID NO: 23256 - DNA, 524 bp, synthetic construct
  source 1..524: mol_type = other DNA
gcaaggatcgttacccgcccgaattgctacgaaaagcctagtaagtacccaagtttgtgcgaggttgcgttcagccacaatcccagtggtagctctgagtgatggggctcgtgattacccctctggtgacagagacacttgcccgcgcgtgcacttgggttcaccagaaatggtgttcacctcaatcaagcgcaagtactgaagagccaattgtgccaatttggtctcctccggggccgtgaatgctgctaatcctaacctccgagcgtgtgcgcacaatccagtgttgctacgtcgtaacgcgtaagttggaggcggaacagactactttcggtaccccgtgtttccttattttattcatttaaatttatggtgacaattgttgagatttgtgagctagcaaaattaccattgaatttggcattgtactgtctcattgcttttcacaaaacctcagatatcccacccagttacattgatcttttagttcatttgaatttacagttcaaactgagacaagtaaa

SEQ ID NO: 23257 - DNA, 737 bp, synthetic construct
  source 1..737: mol_type = other DNA
ggcttcgcagtgttcccacccacagggcccactgggcgccagcactctgattccacggaatctttgtgtgcctgttttacaaccctttcctaatttgtaacgtagaagcaatatacactactgatcaatagcaggcatggcgcgccagtcatgtctcgatcaagcacttctgtttccccggactgagtatcaatagactgctcacgcggttgaaggagaaaacgttcgttatccggctaactacttcgagaaacctagtagcaccatagaagctgcagagtgtttcgctcagcacttcccccgtgtagatcaggctgatgagtcactgcaatccccacgggcgaccgtggcagtggctgcgctggcggcctgcctatggggcaacccataggacgctctaatgtggacatggtgcgaagagtctattgagctagttagtagtcctccggcccctgaatgcggctaatcttaactgcggagcacatgccttcaacccaggaggtggtgtgtcgtaacgggcaactctgcagcggaaccgactactttgggtgtccgtgtttctctttatccttatattggctgcttatggtgacaattacggaattgttaccatatagctattggattggccatccggtgtctaatagagctattgtgtacctatttgttggatttactccgctatcatataaatctctgaacactttgtgctttatattgaacttaaacacacgaaa

SEQ ID NO: 23258 - DNA, 687 bp, synthetic construct
  source 1..687: mol_type = other DNA
ttccacggaatctttgtgtgcctgttttacaaccctttcctaatttgtaacgtagaagcaatatacactactgatcaatagcaggcatggcgcgccagtcatgtctcgatcaagcacttctgtttccccggactgagtatcaatagactgctcacgcggttgaaggagaaaacgttcgttatccggctaactacttcgagaaacctagtagcaccatagaagctgcagagtgtttcgctcagcacttcccccgtgtagatcaggctgatgagtcactgcaatccccacgggcgaccgtggcagtggctgcgctggcggcctgcctatggggcaacccataggacgctctaatgtggacatggtgcgaagagtctattgagctagttagtagtcctccggcccctgaatgcggctaatcttaactgcggagcacatgccttcaacccaggaggtggtgtgtcgtaacgggcaactctgcagcggaaccgactactttgggtgtccgtgtttctctttatccttatattggctgcttatggtgacaattacggaattgttaccatatagctattggattggccatccggtgtctaatagagctattgtgtacctatttgttggatttactccgctatcatataaatctctgaacactttgtgctttatattgaacttaaacacacgaaa

SEQ ID NO: 23259 - DNA, 637 bp, synthetic construct
  source 1..637: mol_type = other DNA
cgtagaagcaatatacactactgatcaatagcaggcatggcgcgccagtcatgtctcgatcaagcacttctgtttccccggactgagtatcaatagactgctcacgcggttgaaggagaaaacgttcgttatccggctaactacttcgagaaacctagtagcaccatagaagctgcagagtgtttcgctcagcacttcccccgtgtagatcaggctgatgagtcactgcaatccccacgggcgaccgtggcagtggctgcgctggcggcctgcctatggggcaacccataggacgctctaatgtggacatggtgcgaagagtctattgagctagttagtagtcctccggcccctgaatgcggctaatcttaactgcggagcacatgccttcaacccaggaggtggtgtgtcgtaacgggcaactctgcagcggaaccgactactttgggtgtccgtgtttctctttatccttatattggctgcttatggtgacaattacggaattgttaccatatagctattggattggccatccggtgtctaatagagctattgtgtacctatttgttggatttactccgctatcatataaatctctgaacactttgtgctttatattgaacttaaacacacgaaa

SEQ ID NO: 23260 - DNA, 587 bp, synthetic construct
  source 1..587: mol_type = other DNA
atgtctcgatcaagcacttctgtttccccggactgagtatcaatagactgctcacgcggttgaaggagaaaacgttcgttatccggctaactacttcgagaaacctagtagcaccatagaagctgcagagtgtttcgctcagcacttcccccgtgtagatcaggctgatgagtcactgcaatccccacgggcgaccgtggcagtggctgcgctggcggcctgcctatggggcaacccataggacgctctaatgtggacatggtgcgaagagtctattgagctagttagtagtcctccggcccctgaatgcggctaatcttaactgcggagcacatgccttcaacccaggaggtggtgtgtcgtaacgggcaactctgcagcggaaccgactactttgggtgtccgtgtttctctttatccttatattggctgcttatggtgacaattacggaattgttaccatatagctattggattggccatccggtgtctaatagagctattgtgtacctatttgttggatttactccgctatcatataaatctctgaacactttgtgctttatattgaacttaaacacacgaaa

SEQ ID NO: 23261 - DNA, 537 bp, synthetic construct
  source 1..537: mol_type = other DNA
ctcacgcggttgaaggagaaaacgttcgttatccggctaactacttcgagaaacctagtagcaccatagaagctgcagagtgtttcgctcagcacttcccccgtgtagatcaggctgatgagtcactgcaatccccacgggcgaccgtggcagtggctgcgctggcggcctgcctatggggcaacccataggacgctctaatgtggacatggtgcgaagagtctattgagctagttagtagtcctccggcccctgaatgcggctaatcttaactgcggagcacatgccttcaacccaggaggtggtgtgtcgtaacgggcaactctgcagcggaaccgactactttgggtgtccgtgtttctctttatccttatattggctgcttatggtgacaattacggaattgttaccatatagctattggattggccatccggtgtctaatagagctattgtgtacctatttgttggatttactccgctatcatataaatctctgaacactttgtgctttatattgaacttaaacacacgaaa

SEQ ID NO: 23262 - DNA, 748 bp, synthetic construct
  source 1..748: mol_type = other DNA
gtaccttggtattacggtaccattgtacgccagtacctttgtacgcctgttttatattccctacccccacatgtaactttagaagtttaagtaacaaagaccaataggagtccaacatccagttggattgcggtcaagcacttctgtttccccggacctagtagtgataggctgtacccacggccgaagatgaacccgtccgttatccggccagctacttcgagaagcctagtagcatcaaagatctgtcttggcgtttcgctcagcgcgttccccccgcgtagatcgggctgatgggtctccgcattccccacgggcgaccgtggcggaggccgcgtggcggcccgcctatggcgaaagccataggacgccatttcagtgacagggtgtgaagagcctattgagctagttggtagtcctccggcccctgaatgcggctaatcctaaccactgagcgtccaccagcaaaccagctgggagggcgtcgtaacgggtaactcggtggcggaaccgactactttgggtgtccgtgtttccttttgatcctattgtggctgcttatggtgacaacttacagttgttatcataaagcttttggattggccatccggaaaaagttatcagtgtttgatattgttcggctttcacgcctaccaataagacaatcactttacttgttagttgcattttatcccactaaggatatcactgagttacatcttcaattgctcctaacattatcagcaca

SEQ ID NO: 23263 - DNA, 698 bp, synthetic construct
  source 1..698: mol_type = other DNA
tttatattccctacccccacatgtaactttagaagtttaagtaacaaagaccaataggagtccaacatccagttggattgcggtcaagcacttctgtttccccggacctagtagtgataggctgtacccacggccgaagatgaacccgtccgttatccggccagctacttcgagaagcctagtagcatcaaagatctgtcttggcgtttcgctcagcgcgttccccccgcgtagatcgggctgatgggtctccgcattccccacgggcgaccgtggcggaggccgcgtggcggcccgcctatggcgaaagccataggacgccatttcagtgacagggtgtgaagagcctattgagctagttggtagtcctccggcccctgaatgcggctaatcctaaccactgagcgtccaccagcaaaccagctgggagggcgtcgtaacgggtaactcggtggcggaaccgactactttgggtgtccgtgtttccttttgatcctattgtggctgcttatggtgacaacttacagttgttatcataaagcttttggattggccatccggaaaaagttatcagtgtttgatattgttcggctttcacgcctaccaataagacaatcactttacttgttagttgcattttatcccactaaggatatcactgagttacatcttcaattgctcctaacattatcagcaca

SEQ ID NO: 23264 - DNA, 648 bp, synthetic construct
  source 1..648: mol_type = other DNA
ccaataggagtccaacatccagttggattgcggtcaagcacttctgtttccccggacctagtagtgataggctgtacccacggccgaagatgaacccgtccgttatccggccagctacttcgagaagcctagtagcatcaaagatctgtcttggcgtttcgctcagcgcgttccccccgcgtagatcgggctgatgggtctccgcattccccacgggcgaccgtggcggaggccgcgtggcggcccgcctatggcgaaagccataggacgccatttcagtgacagggtgtgaagagcctattgagctagttggtagtcctccggcccctgaatgcggctaatcctaaccactgagcgtccaccagcaaaccagctgggagggcgtcgtaacgggtaactcggtggcggaaccgactactttgggtgtccgtgtttccttttgatcctattgtggctgcttatggtgacaacttacagttgttatcataaagcttttggattggccatccggaaaaagttatcagtgtttgatattgttcggctttcacgcctaccaataagacaatcactttacttgttagttgcattttatcccactaaggatatcactgagttacatcttcaattgctcctaacattatcagcaca

SEQ ID NO: 23265 - DNA, 598 bp, synthetic construct
  source 1..598: mol_type = other DNA
cccggacctagtagtgataggctgtacccacggccgaagatgaacccgtccgttatccggccagctacttcgagaagcctagtagcatcaaagatctgtcttggcgtttcgctcagcgcgttccccccgcgtagatcgggctgatgggtctccgcattccccacgggcgaccgtggcggaggccgcgtggcggcccgcctatggcgaaagccataggacgccatttcagtgacagggtgtgaagagcctattgagctagttggtagtcctccggcccctgaatgcggctaatcctaaccactgagcgtccaccagcaaaccagctgggagggcgtcgtaacgggtaactcggtggcggaaccgactactttgggtgtccgtgtttccttttgatcctattgtggctgcttatggtgacaacttacagttgttatcataaagcttttggattggccatccggaaaaagttatcagtgtttgatattgttcggctttcacgcctaccaataagacaatcactttacttgttagttgcattttatcccactaaggatatcactgagttacatcttcaattgctcctaacattatcagcaca

SEQ ID NO: 23266 - DNA, 548 bp, synthetic construct
  source 1..548: mol_type = other DNA
cgttatccggccagctacttcgagaagcctagtagcatcaaagatctgtcttggcgtttcgctcagcgcgttccccccgcgtagatcgggctgatgggtctccgcattccccacgggcgaccgtggcggaggccgcgtggcggcccgcctatggcgaaagccataggacgccatttcagtgacagggtgtgaagagcctattgagctagttggtagtcctccggcccctgaatgcggctaatcctaaccactgagcgtccaccagcaaaccagctgggagggcgtcgtaacgggtaactcggtggcggaaccgactactttgggtgtccgtgtttccttttgatcctattgtggctgcttatggtgacaacttacagttgttatcataaagcttttggattggccatccggaaaaagttatcagtgtttgatattgttcggctttcacgcctaccaataagacaatcactttacttgttagttgcattttatcccactaaggatatcactgagttacatcttcaattgctcctaacattatcagcaca

SEQ ID NO: 23267 - DNA, 748 bp, synthetic construct
  source 1..748: mol_type = other DNA
agtaccttggtattacggtaccattgtacgtcagtacctttgtacgcctgttttatatcccttcccccacatgtaacattagaagtcaagtaaacaaagaccaataggagcccaacaaccagttgggttgcggtcaagcacttctgtctccccggacctagtagtgataggctgtacccacggccgaagatgaacccgtccgttatccggccagctacttcgagaagcctagtaacatcaaagatctgtcttggcgtttcgctcagcgcgttccccccgcgtagatcgggctgatgggtctccgcataccccacgggcgaccgtggcggaggccgcgtggcggcccgcctatggcgaaagccataggacgccatttcagtgacagggtgtgaagagcctattgagctagttggtagtcctccggcccctgaatgcggctaatcctaaccacggagcatccaccagcaaaccagctgggagggtgtcgtaacgggtaactctgtggcggaaccgactactttgggtgtccgtgtttccttttgatcctattttggctgcttatggtgacaacgataagttgttatcataaagcttttgggttggccacctggaaaaaattgtcagtgtttgatatcgctcggctttcacgcctaccagtcaaacaagctctttatctccttgttggattctactcaataaaggacataactcagtttcacataaatctgttgctttcattgtcagcaaa

SEQ ID NO: 23268 - DNA, 698 bp, synthetic construct
  source 1..698: mol_type = other DNA
ttttatatcccttcccccacatgtaacattagaagtcaagtaaacaaagaccaataggagcccaacaaccagttgggttgcggtcaagcacttctgtctccccggacctagtagtgataggctgtacccacggccgaagatgaacccgtccgttatccggccagctacttcgagaagcctagtaacatcaaagatctgtcttggcgtttcgctcagcgcgttccccccgcgtagatcgggctgatgggtctccgcataccccacgggcgaccgtggcggaggccgcgtggcggcccgcctatggcgaaagccataggacgccatttcagtgacagggtgtgaagagcctattgagctagttggtagtcctccggcccctgaatgcggctaatcctaaccacggagcatccaccagcaaaccagctgggagggtgtcgtaacgggtaactctgtggcggaaccgactactttgggtgtccgtgtttccttttgatcctattttggctgcttatggtgacaacgataagttgttatcataaagcttttgggttggccacctggaaaaaattgtcagtgtttgatatcgctcggctttcacgcctaccagtcaaacaagctctttatctccttgttggattctactcaataaaggacataactcagtttcacataaatctgttgctttcattgtcagcaaa

SEQ ID NO: 23269 - DNA, 648 bp, synthetic construct
  source 1..648: mol_type = other DNA
ccaataggagcccaacaaccagttgggttgcggtcaagcacttctgtctccccggacctagtagtgataggctgtacccacggccgaagatgaacccgtccgttatccggccagctacttcgagaagcctagtaacatcaaagatctgtcttggcgtttcgctcagcgcgttccccccgcgtagatcgggctgatgggtctccgcataccccacgggcgaccgtggcggaggccgcgtggcggcccgcctatggcgaaagccataggacgccatttcagtgacagggtgtgaagagcctattgagctagttggtagtcctccggcccctgaatgcggctaatcctaaccacggagcatccaccagcaaaccagctgggagggtgtcgtaacgggtaactctgtggcggaaccgactactttgggtgtccgtgtttccttttgatcctattttggctgcttatggtgacaacgataagttgttatcataaagcttttgggttggccacctggaaaaaattgtcagtgtttgatatcgctcggctttcacgcctaccagtcaaacaagctctttatctccttgttggattctactcaataaaggacataactcagtttcacataaatctgttgctttcattgtcagcaaa

SEQ ID NO: 23270 - DNA, 598 bp, synthetic construct
  source 1..598: mol_type = other DNA
cccggacctagtagtgataggctgtacccacggccgaagatgaacccgtccgttatccggccagctacttcgagaagcctagtaacatcaaagatctgtcttggcgtttcgctcagcgcgttccccccgcgtagatcgggctgatgggtctccgcataccccacgggcgaccgtggcggaggccgcgtggcggcccgcctatggcgaaagccataggacgccatttcagtgacagggtgtgaagagcctattgagctagttggtagtcctccggcccctgaatgcggctaatcctaaccacggagcatccaccagcaaaccagctgggagggtgtcgtaacgggtaactctgtggcggaaccgactactttgggtgtccgtgtttccttttgatcctattttggctgcttatggtgacaacgataagttgttatcataaagcttttgggttggccacctggaaaaaattgtcagtgtttgatatcgctcggctttcacgcctaccagtcaaacaagctctttatctccttgttggattctactcaataaaggacataactcagtttcacataaatctgttgctttcattgtcagcaaa

SEQ ID NO: 23271 - DNA, 548 bp, synthetic construct
  source 1..548: mol_type = other DNA
cgttatccggccagctacttcgagaagcctagtaacatcaaagatctgtcttggcgtttcgctcagcgcgttccccccgcgtagatcgggctgatgggtctccgcataccccacgggcgaccgtggcggaggccgcgtggcggcccgcctatggcgaaagccataggacgccatttcagtgacagggtgtgaagagcctattgagctagttggtagtcctccggcccctgaatgcggctaatcctaaccacggagcatccaccagcaaaccagctgggagggtgtcgtaacgggtaactctgtggcggaaccgactactttgggtgtccgtgtttccttttgatcctattttggctgcttatggtgacaacgataagttgttatcataaagcttttgggttggccacctggaaaaaattgtcagtgtttgatatcgctcggctttcacgcctaccagtcaaacaagctctttatctccttgttggattctactcaataaaggacataactcagtttcacataaatctgttgctttcattgtcagcaaa

SEQ ID NO: 23272 - DNA, 750 bp, synthetic construct
  source 1..750: mol_type = other DNA
tagtacctttgtacgcctgttttccccccccttaaacaaattaagatcgctggtcctgtggggagtagtccgactccgcaccgatacgtcgcaccagcactccggtacgcctagtaccctagtgcggaggtaccagtgtccccccccctcgaaacttagaagcaatgaaccaaaccgacccaaaaggatgcgttgcacccagcagcgtaatggtcaagcacttctgtttccccggccgcaaggtcgttatccgcccgcaccactacgagaagcctattaggcagccaagcttgcaaagcgttgcgttcagccacaaccccagtggtagctctgagagatgggactcgttgttcccccatggtaacatggtgacttgtccgcgtgtgctctcgggttcgccatcaggcgttcacgctgcacaagtgtaactgctgaagagcctattgtgctggagcggttttcctccggaaccgtgaatgctgctaatcctaacctctgagcgtgtgcgcacaaaccagtgttgctacgtcgtaacgcgtaagtcggaggcggaacagactactttcggtactccgtgtttccttattttatatcgtttcatttatggtaacaattactgagattttaaagattgccaagctgcccttaaacattggtttgtattatctagttgcattttataaaacctctgagctttcacttgaattgattgatttcttagtctttctaaacaagcataaattgaggaca

SEQ ID NO: 23273 - DNA, 700 bp, synthetic construct
  source 1..700: mol_type = other DNA
tggtcctgtggggagtagtccgactccgcaccgatacgtcgcaccagcactccggtacgcctagtaccctagtgcggaggtaccagtgtccccccccctcgaaacttagaagcaatgaaccaaaccgacccaaaaggatgcgttgcacccagcagcgtaatggtcaagcacttctgtttccccggccgcaaggtcgttatccgcccgcaccactacgagaagcctattaggcagccaagcttgcaaagcgttgcgttcagccacaaccccagtggtagctctgagagatgggactcgttgttcccccatggtaacatggtgacttgtccgcgtgtgctctcgggttcgccatcaggcgttcacgctgcacaagtgtaactgctgaagagcctattgtgctggagcggttttcctccggaaccgtgaatgctgctaatcctaacctctgagcgtgtgcgcacaaaccagtgttgctacgtcgtaacgcgtaagtcggaggcggaacagactactttcggtactccgtgtttccttattttatatcgtttcatttatggtaacaattactgagattttaaagattgccaagctgcccttaaacattggtttgtattatctagttgcattttataaaacctctgagctttcacttgaattgattgatttcttagtctttctaaacaagcataaattgaggaca

SEQ ID NO: 23274 - DNA, 650 bp, synthetic construct
  source 1..650: mol_type = other DNA
tccggtacgcctagtaccctagtgcggaggtaccagtgtccccccccctcgaaacttagaagcaatgaaccaaaccgacccaaaaggatgcgttgcacccagcagcgtaatggtcaagcacttctgtttccccggccgcaaggtcgttatccgcccgcaccactacgagaagcctattaggcagccaagcttgcaaagcgttgcgttcagccacaaccccagtggtagctctgagagatgggactcgttgttcccccatggtaacatggtgacttgtccgcgtgtgctctcgggttcgccatcaggcgttcacgctgcacaagtgtaactgctgaagagcctattgtgctggagcggttttcctccggaaccgtgaatgctgctaatcctaacctctgagcgtgtgcgcacaaaccagtgttgctacgtcgtaacgcgtaagtcggaggcggaacagactactttcggtactccgtgtttccttattttatatcgtttcatttatggtaacaattactgagattttaaagattgccaagctgcccttaaacattggtttgtattatctagttgcattttataaaacctctgagctttcacttgaattgattgatttcttagtctttctaaacaagcataaattgaggaca

SEQ ID NO: 23275 - DNA, 600 bp, synthetic construct
  source 1..600: mol_type = other DNA
gaaacttagaagcaatgaaccaaaccgacccaaaaggatgcgttgcacccagcagcgtaatggtcaagcacttctgtttccccggccgcaaggtcgttatccgcccgcaccactacgagaagcctattaggcagccaagcttgcaaagcgttgcgttcagccacaaccccagtggtagctctgagagatgggactcgttgttcccccatggtaacatggtgacttgtccgcgtgtgctctcgggttcgccatcaggcgttcacgctgcacaagtgtaactgctgaagagcctattgtgctggagcggttttcctccggaaccgtgaatgctgctaatcctaacctctgagcgtgtgcgcacaaaccagtgttgctacgtcgtaacgcgtaagtcggaggcggaacagactactttcggtactccgtgtttccttattttatatcgtttcatttatggtaacaattactgagattttaaagattgccaagctgcccttaaacattggtttgtattatctagttgcattttataaaacctctgagctttcacttgaattgattgatttcttagtctttctaaacaagcataaattgaggaca

SEQ ID NO: 23276 - DNA, 550 bp, synthetic construct
  source 1..550: mol_type = other DNA
agcagcgtaatggtcaagcacttctgtttccccggccgcaaggtcgttatccgcccgcaccactacgagaagcctattaggcagccaagcttgcaaagcgttgcgttcagccacaaccccagtggtagctctgagagatgggactcgttgttcccccatggtaacatggtgacttgtccgcgtgtgctctcgggttcgccatcaggcgttcacgctgcacaagtgtaactgctgaagagcctattgtgctggagcggttttcctccggaaccgtgaatgctgctaatcctaacctctgagcgtgtgcgcacaaaccagtgttgctacgtcgtaacgcgtaagtcggaggcggaacagactactttcggtactccgtgtttccttattttatatcgtttcatttatggtaacaattactgagattttaaagattgccaagctgcccttaaacattggtttgtattatctagttgcattttataaaacctctgagctttcacttgaattgattgatttcttagtctttctaaacaagcataaattgaggaca

SEQ ID NO: 23277 - DNA, 500 bp, synthetic construct
  source 1..500: mol_type = other DNA
ccgcccgcaccactacgagaagcctattaggcagccaagcttgcaaagcgttgcgttcagccacaaccccagtggtagctctgagagatgggactcgttgttcccccatggtaacatggtgacttgtccgcgtgtgctctcgggttcgccatcaggcgttcacgctgcacaagtgtaactgctgaagagcctattgtgctggagcggttttcctccggaaccgtgaatgctgctaatcctaacctctgagcgtgtgcgcacaaaccagtgttgctacgtcgtaacgcgtaagtcggaggcggaacagactactttcggtactccgtgtttccttattttatatcgtttcatttatggtaacaattactgagattttaaagattgccaagctgcccttaaacattggtttgtattatctagttgcattttataaaacctctgagctttcacttgaattgattgatttcttagtctttctaaacaagcataaattgaggaca

SEQ ID NO: 23278 - DNA, 751 bp, synthetic construct
  source 1..751: mol_type = other DNA
acgccagtaccatggtattacggtaccatgttacgtcagtacctttgtacgcctgttttatatcccctccccgaagtaaccttagaagtttaagtaacaaagaccaataggagtccagcaaccagctggattgcggtcaagcacttctgtttccccggacctagtagtgataggctgtacccacggccgaagatgaacccgtccgttatccggccagctacttcgagaagcctagtagcatcaaagatctgtcttggcgtttcgctcagcgcgtttcccccgcgtagatcgggctgatgggtctccgcataccccacgggcgaccgtggcggaggccgcgtggcggcccgcctatggcgaaagccataggacgccatttcagtgacagggtgtgaagagcctattgagctagttggtagtcctccggcccctgaatgcggctaatcctaaccacggagcgtccaccagcaaaccagctggcggggcgtcgtaacgggtaactctgtggcggaaccgactactttgggtgtccgtgtttccttttgatcctattttggctgcttatggtgacaacaataagttgttatcataaagcttttgggttggccacctggaaaaagttatcagtgtttgatattgttcggctttcacgcctaccaacaaaacaagccttatatttattggttgccttttgtcccttggcggaaattactgattttcacctaaagcttctgattacattgacggcaaa

SEQ ID NO: 23279 - DNA, 701 bp, synthetic construct
  source 1..701: mol_type = other DNA
gcctgttttatatcccctccccgaagtaaccttagaagtttaagtaacaaagaccaataggagtccagcaaccagctggattgcggtcaagcacttctgtttccccggacctagtagtgataggctgtacccacggccgaagatgaacccgtccgttatccggccagctacttcgagaagcctagtagcatcaaagatctgtcttggcgtttcgctcagcgcgtttcccccgcgtagatcgggctgatgggtctccgcataccccacgggcgaccgtggcggaggccgcgtggcggcccgcctatggcgaaagccataggacgccatttcagtgacagggtgtgaagagcctattgagctagttggtagtcctccggcccctgaatgcggctaatcctaaccacggagcgtccaccagcaaaccagctggcggggcgtcgtaacgggtaactctgtggcggaaccgactactttgggtgtccgtgtttccttttgatcctattttggctgcttatggtgacaacaataagttgttatcataaagcttttgggttggccacctggaaaaagttatcagtgtttgatattgttcggctttcacgcctaccaacaaaacaagccttatatttattggttgccttttgtcccttggcggaaattactgattttcacctaaagcttctgattacattgacggcaaa

SEQ ID NO: 23280 - DNA, 651 bp, synthetic construct
  source 1..651: mol_type = other DNA
agaccaataggagtccagcaaccagctggattgcggtcaagcacttctgtttccccggacctagtagtgataggctgtacccacggccgaagatgaacccgtccgttatccggccagctacttcgagaagcctagtagcatcaaagatctgtcttggcgtttcgctcagcgcgtttcccccgcgtagatcgggctgatgggtctccgcataccccacgggcgaccgtggcggaggccgcgtggcggcccgcctatggcgaaagccataggacgccatttcagtgacagggtgtgaagagcctattgagctagttggtagtcctccggcccctgaatgcggctaatcctaaccacggagcgtccaccagcaaaccagctggcggggcgtcgtaacgggtaactctgtggcggaaccgactactttgggtgtccgtgtttccttttgatcctattttggctgcttatggtgacaacaataagttgttatcataaagcttttgggttggccacctggaaaaagttatcagtgtttgatattgttcggctttcacgcctaccaacaaaacaagccttatatttattggttgccttttgtcccttggcggaaattactgattttcacctaaagcttctgattacattgacggcaaa

SEQ ID NO: 23281 - DNA, 601 bp, synthetic construct
  source 1..601: mol_type = other DNA
ttccccggacctagtagtgataggctgtacccacggccgaagatgaacccgtccgttatccggccagctacttcgagaagcctagtagcatcaaagatctgtcttggcgtttcgctcagcgcgtttcccccgcgtagatcgggctgatgggtctccgcataccccacgggcgaccgtggcggaggccgcgtggcggcccgcctatggcgaaagccataggacgccatttcagtgacagggtgtgaagagcctattgagctagttggtagtcctccggcccctgaatgcggctaatcctaaccacggagcgtccaccagcaaaccagctggcggggcgtcgtaacgggtaactctgtggcggaaccgactactttgggtgtccgtgtttccttttgatcctattttggctgcttatggtgacaacaataagttgttatcataaagcttttgggttggccacctggaaaaagttatcagtgtttgatattgttcggctttcacgcctaccaacaaaacaagccttatatttattggttgccttttgtcccttggcggaaattactgattttcacctaaagcttctgattacattgacggcaaa

SEQ ID NO: 23282 - DNA, 551 bp, synthetic construct
  source 1..551: mol_type = other DNA
gtccgttatccggccagctacttcgagaagcctagtagcatcaaagatctgtcttggcgtttcgctcagcgcgtttcccccgcgtagatcgggctgatgggtctccgcataccccacgggcgaccgtggcggaggccgcgtggcggcccgcctatggcgaaagccataggacgccatttcagtgacagggtgtgaagagcctattgagctagttggtagtcctccggcccctgaatgcggctaatcctaaccacggagcgtccaccagcaaaccagctggcggggcgtcgtaacgggtaactctgtggcggaaccgactactttgggtgtccgtgtttccttttgatcctattttggctgcttatggtgacaacaataagttgttatcataaagcttttgggttggccacctggaaaaagttatcagtgtttgatattgttcggctttcacgcctaccaacaaaacaagccttatatttattggttgccttttgtcccttggcggaaattactgattttcacctaaagcttctgattacattgacggcaaa

SEQ ID NO: 23283 - DNA, 501 bp, synthetic construct
  source 1..501: mol_type = other DNA
gtcttggcgtttcgctcagcgcgtttcccccgcgtagatcgggctgatgggtctccgcataccccacgggcgaccgtggcggaggccgcgtggcggcccgcctatggcgaaagccataggacgccatttcagtgacagggtgtgaagagcctattgagctagttggtagtcctccggcccctgaatgcggctaatcctaaccacggagcgtccaccagcaaaccagctggcggggcgtcgtaacgggtaactctgtggcggaaccgactactttgggtgtccgtgtttccttttgatcctattttggctgcttatggtgacaacaataagttgttatcataaagcttttgggttggccacctggaaaaagttatcagtgtttgatattgttcggctttcacgcctaccaacaaaacaagccttatatttattggttgccttttgtcccttggcggaaattactgattttcacctaaagcttctgattacattgacggcaaa

SEQ ID NO: 23284 - DNA, 753 bp, synthetic construct
  source 1..753: mol_type = other DNA
ggcgcgcctcggcaaggccgccgataccgcactgtgctacttcggtaccactctgcgggaatgacaatatgcccggtgtatagtttgcctgtttctcgcaccgttaccgctcgttcgggaatgtgaaactggcacccctcctctcccctaccaccctttctccttcgcccccattcataatttacaacgccgcacacagcggcggccgccaagggctagcctggcggttataaaaggaacctgggtctttccctcttcaagccaaaaggtaggttccctgtgtccctgaatgctcggtgaggaatgctgcaccgtaacgctttgtgaagtgtttgcaagttctggcccggcaagcctacagagtgctgtgatccgctgcggacgccatcctggtaacaggacccccagtgtgcgcaacagtatgttcagacttcggtttgttcacttgctttcatggaccattgcgcgaaagtgcgtgcgccatatccctgtacttcaggtgtgcttctctggaccctaggaatgctgcgaaggtaccccgtttcggcgggatctgatcgcaggctaattgtctatgggttcagtttcctttttctttactccacaattgactgcttaactgactctggatcttgtgcttccactgctctttctgctctcaaaacggcttcacttaccaactctcacctttcgaccaacaccatttacacactaacttttttcgactcttctgactcctggcttggtgaagac

SEQ ID NO: 23285 - DNA, 703 bp, synthetic construct
  source 1..703: mol_type = other DNA
ctctgcgggaatgacaatatgcccggtgtatagtttgcctgtttctcgcaccgttaccgctcgttcgggaatgtgaaactggcacccctcctctcccctaccaccctttctccttcgcccccattcataatttacaacgccgcacacagcggcggccgccaagggctagcctggcggttataaaaggaacctgggtctttccctcttcaagccaaaaggtaggttccctgtgtccctgaatgctcggtgaggaatgctgcaccgtaacgctttgtgaagtgtttgcaagttctggcccggcaagcctacagagtgctgtgatccgctgcggacgccatcctggtaacaggacccccagtgtgcgcaacagtatgttcagacttcggtttgttcacttgctttcatggaccattgcgcgaaagtgcgtgcgccatatccctgtacttcaggtgtgcttctctggaccctaggaatgctgcgaaggtaccccgtttcggcgggatctgatcgcaggctaattgtctatgggttcagtttcctttttctttactccacaattgactgcttaactgactctggatcttgtgcttccactgctctttctgctctcaaaacggcttcacttaccaactctcacctttcgaccaacaccatttacacactaacttttttcgactcttctgactcctggcttggtgaagac

SEQ ID NO: 23286 - DNA, 653 bp, synthetic construct
  source 1..653: mol_type = other DNA
ccgttaccgctcgttcgggaatgtgaaactggcacccctcctctcccctaccaccctttctccttcgcccccattcataatttacaacgccgcacacagcggcggccgccaagggctagcctggcggttataaaaggaacctgggtctttccctcttcaagccaaaaggtaggttccctgtgtccctgaatgctcggtgaggaatgctgcaccgtaacgctttgtgaagtgtttgcaagttctggcccggcaagcctacagagtgctgtgatccgctgcggacgccatcctggtaacaggacccccagtgtgcgcaacagtatgttcagacttcggtttgttcacttgctttcatggaccattgcgcgaaagtgcgtgcgccatatccctgtacttcaggtgtgcttctctggaccctaggaatgctgcgaaggtaccccgtttcggcgggatctgatcgcaggctaattgtctatgggttcagtttcctttttctttactccacaattgactgcttaactgactctggatcttgtgcttccactgctctttctgctctcaaaacggcttcacttaccaactctcacctttcgaccaacaccatttacacactaacttttttcgactcttctgactcctggcttggtgaagac

SEQ ID NO: 23287 - DNA, 603 bp, synthetic construct
  source 1..603: mol_type = other DNA
ccaccctttctccttcgcccccattcataatttacaacgccgcacacagcggcggccgccaagggctagcctggcggttataaaaggaacctgggtctttccctcttcaagccaaaaggtaggttccctgtgtccctgaatgctcggtgaggaatgctgcaccgtaacgctttgtgaagtgtttgcaagttctggcccggcaagcctacagagtgctgtgatccgctgcggacgccatcctggtaacaggacccccagtgtgcgcaacagtatgttcagacttcggtttgttcacttgctttcatggaccattgcgcgaaagtgcgtgcgccatatccctgtacttcaggtgtgcttctctggaccctaggaatgctgcgaaggtaccccgtttcggcgggatctgatcgcaggctaattgtctatgggttcagtttcctttttctttactccacaattgactgcttaactgactctggatcttgtgcttccactgctctttctgctctcaaaacggcttcacttaccaactctcacctttcgaccaacaccatttacacactaacttttttcgactcttctgactcctggcttggtgaagac

SEQ ID NO: 23288 - DNA, 553 bp, synthetic construct
  source 1..553: mol_type = other DNA
ggcggccgccaagggctagcctggcggttataaaaggaacctgggtctttccctcttcaagccaaaaggtaggttccctgtgtccctgaatgctcggtgaggaatgctgcaccgtaacgctttgtgaagtgtttgcaagttctggcccggcaagcctacagagtgctgtgatccgctgcggacgccatcctggtaacaggacccccagtgtgcgcaacagtatgttcagacttcggtttgttcacttgctttcatggaccattgcgcgaaagtgcgtgcgccatatccctgtacttcaggtgtgcttctctggaccctaggaatgctgcgaaggtaccccgtttcggcgggatctgatcgcaggctaattgtctatgggttcagtttcctttttctttactccacaattgactgcttaactgactctggatcttgtgcttccactgctctttctgctctcaaaacggcttcacttaccaactctcacctttcgaccaacaccatttacacactaacttttttcgactcttctgactcctggcttggtgaagac

SEQ ID NO: 23289 - DNA, 503 bp, synthetic construct
  source 1..503: mol_type = other DNA
ccctcttcaagccaaaaggtaggttccctgtgtccctgaatgctcggtgaggaatgctgcaccgtaacgctttgtgaagtgtttgcaagttctggcccggcaagcctacagagtgctgtgatccgctgcggacgccatcctggtaacaggacccccagtgtgcgcaacagtatgttcagacttcggtttgttcacttgctttcatggaccattgcgcgaaagtgcgtgcgccatatccctgtacttcaggtgtgcttctctggaccctaggaatgctgcgaaggtaccccgtttcggcgggatctgatcgcaggctaattgtctatgggttcagtttcctttttctttactccacaattgactgcttaactgactctggatcttgtgcttccactgctctttctgctctcaaaacggcttcacttaccaactctcacctttcgaccaacaccatttacacactaacttttttcgactcttctgactcctggcttggtgaagac

SEQ ID NO: 23290 - DNA, 754 bp, synthetic construct
  source 1..754: mol_type = other DNA
tgcctaacctcggtattacggtaccgttgtttacagtacctttgtacgcctgttttatatcccctccccacaagcaactttagaagtatcaagcaaataaggaccaataggagtccaacacccagttggatcatggtcaagcacttctgtctccccggacctagtagtgataggctgtacccacggccgaagatgaaaccgtccgttatccggccagctacttcgagaagcctagtagcatcaaagatctgtcttggcgtttcgctcagcgcgttttcccccgcgtagatcgggctgatgggtctccgcataccccacgggcgaccgtggcggaggccgcgtggcggcccgcctatggcgaaagccataggacgccatttcagtgacagggtgtgaagagcctattgagctagttggtagtcctccggcccctgaatgcggctaatcctaaccacggagcgtttaccagcaaaccagctggcggaacgtcgtaacgggtaactctgtggcggaaccgactactttgggtgtccgtgtttccttttgatcctattgtggctgcttatggtgacaacttacggttgttatcataaagcttttggattggccatccggaaagagttatcagtgtttgatattgttcggctttcacgcctaccattaagacaatcactttatttgttagttgcattttatcctgccaaggacattactgagtttcacctacaactttactcatacaattacatcaagt

SEQ ID NO: 23291 - DNA, 704 bp, synthetic construct
  source 1..704: mol_type = other DNA
tgttttatatcccctccccacaagcaactttagaagtatcaagcaaataaggaccaataggagtccaacacccagttggatcatggtcaagcacttctgtctccccggacctagtagtgataggctgtacccacggccgaagatgaaaccgtccgttatccggccagctacttcgagaagcctagtagcatcaaagatctgtcttggcgtttcgctcagcgcgttttcccccgcgtagatcgggctgatgggtctccgcataccccacgggcgaccgtggcggaggccgcgtggcggcccgcctatggcgaaagccataggacgccatttcagtgacagggtgtgaagagcctattgagctagttggtagtcctccggcccctgaatgcggctaatcctaaccacggagcgtttaccagcaaaccagctggcggaacgtcgtaacgggtaactctgtggcggaaccgactactttgggtgtccgtgtttccttttgatcctattgtggctgcttatggtgacaacttacggttgttatcataaagcttttggattggccatccggaaagagttatcagtgtttgatattgttcggctttcacgcctaccattaagacaatcactttatttgttagttgcattttatcctgccaaggacattactgagtttcacctacaactttactcatacaattacatcaagt

SEQ ID NO: 23292 - DNA, 654 bp, synthetic construct
  source 1..654: mol_type = other DNA
ggaccaataggagtccaacacccagttggatcatggtcaagcacttctgtctccccggacctagtagtgataggctgtacccacggccgaagatgaaaccgtccgttatccggccagctacttcgagaagcctagtagcatcaaagatctgtcttggcgtttcgctcagcgcgttttcccccgcgtagatcgggctgatgggtctccgcataccccacgggcgaccgtggcggaggccgcgtggcggcccgcctatggcgaaagccataggacgccatttcagtgacagggtgtgaagagcctattgagctagttggtagtcctccggcccctgaatgcggctaatcctaaccacggagcgtttaccagcaaaccagctggcggaacgtcgtaacgggtaactctgtggcggaaccgactactttgggtgtccgtgtttccttttgatcctattgtggctgcttatggtgacaacttacggttgttatcataaagcttttggattggccatccggaaagagttatcagtgtttgatattgttcggctttcacgcctaccattaagacaatcactttatttgttagttgcattttatcctgccaaggacattactgagtttcacctacaactttactcatacaattacatcaagt

SEQ ID NO: 23293 - DNA, 604 bp, synthetic construct
  source 1..604: mol_type = other DNA
ctccccggacctagtagtgataggctgtacccacggccgaagatgaaaccgtccgttatccggccagctacttcgagaagcctagtagcatcaaagatctgtcttggcgtttcgctcagcgcgttttcccccgcgtagatcgggctgatgggtctccgcataccccacgggcgaccgtggcggaggccgcgtggcggcccgcctatggcgaaagccataggacgccatttcagtgacagggtgtgaagagcctattgagctagttggtagtcctccggcccctgaatgcggctaatcctaaccacggagcgtttaccagcaaaccagctggcggaacgtcgtaacgggtaactctgtggcggaaccgactactttgggtgtccgtgtttccttttgatcctattgtggctgcttatggtgacaacttacggttgttatcataaagcttttggattggccatccggaaagagttatcagtgtttgatattgttcggctttcacgcctaccattaagacaatcactttatttgttagttgcattttatcctgccaaggacattactgagtttcacctacaactttactcatacaattacatcaagt

SEQ ID NO: 23294 - DNA, 554 bp, synthetic construct
  source 1..554: mol_type = other DNA
gtccgttatccggccagctacttcgagaagcctagtagcatcaaagatctgtcttggcgtttcgctcagcgcgttttcccccgcgtagatcgggctgatgggtctccgcataccccacgggcgaccgtggcggaggccgcgtggcggcccgcctatggcgaaagccataggacgccatttcagtgacagggtgtgaagagcctattgagctagttggtagtcctccggcccctgaatgcggctaatcctaaccacggagcgtttaccagcaaaccagctggcggaacgtcgtaacgggtaactctgtggcggaaccgactactttgggtgtccgtgtttccttttgatcctattgtggctgcttatggtgacaacttacggttgttatcataaagcttttggattggccatccggaaagagttatcagtgtttgatattgttcggctttcacgcctaccattaagacaatcactttatttgttagttgcattttatcctgccaaggacattactgagtttcacctacaactttactcatacaattacatcaagt

SEQ ID NO: 23295 - DNA, 504 bp, synthetic construct
  source 1..504: mol_type = other DNA
gtcttggcgtttcgctcagcgcgttttcccccgcgtagatcgggctgatgggtctccgcataccccacgggcgaccgtggcggaggccgcgtggcggcccgcctatggcgaaagccataggacgccatttcagtgacagggtgtgaagagcctattgagctagttggtagtcctccggcccctgaatgcggctaatcctaaccacggagcgtttaccagcaaaccagctggcggaacgtcgtaacgggtaactctgtggcggaaccgactactttgggtgtccgtgtttccttttgatcctattgtggctgcttatggtgacaacttacggttgttatcataaagcttttggattggccatccggaaagagttatcagtgtttgatattgttcggctttcacgcctaccattaagacaatcactttatttgttagttgcattttatcctgccaaggacattactgagtttcacctacaactttactcatacaattacatcaagt

SEQ ID NO: 23296 - DNA, 758 bp, synthetic construct
  source 1..758: mol_type = other DNA
gcgcatgttcgcgtcgtcgtaagtctggattcccaaggcccactcggttcaacttcggtttccggacaaatacaaagaacctcagtcctcttggtactttctcgcctgagtctacaaagcgagaaacctgcccctctaacgccagacgagcggcataaaactcgaacttctggcacgttccaccaccccttctcctatcccaacccccattgcgctctcaaggtcgcgcttttccgagactagctcggattcaaaaagttcctggcaccctttaccccttcaggcccttaaggtaggaactgaccttgtgctgtgatctcggtgcggaagtgctactgcgtagtgattgtaagatccttttgtggttctgccctggcaaggctacagagtgctgtgatccgctgcggatgccatcctggtaacaggacccccagtgtgcgcaacagtatgttcacggtcttccgtgttcaccacattcggaacactgctttcgtgaaacagtgtgtgtccaatccctgtgatcagtatcaaccacaccacctaggaatgctaggaaggtaccccggttcgccgggatctgatcctaggctaattgtctacggtggtgctcctttttattttccacttcaactcactggttacaactgcttgatttctgtgtttgctgcttttctctgctctcactgccattctcaagtgttcacactgtccaagctcctttggttgttcgcttccacttgccactgtcaactcttgtc

SEQ ID NO: 23297 - DNA, 708 bp, synthetic construct
  source 1..708: mol_type = other DNA
aacttcggtttccggacaaatacaaagaacctcagtcctcttggtactttctcgcctgagtctacaaagcgagaaacctgcccctctaacgccagacgagcggcataaaactcgaacttctggcacgttccaccaccccttctcctatcccaacccccattgcgctctcaaggtcgcgcttttccgagactagctcggattcaaaaagttcctggcaccctttaccccttcaggcccttaaggtaggaactgaccttgtgctgtgatctcggtgcggaagtgctactgcgtagtgattgtaagatccttttgtggttctgccctggcaaggctacagagtgctgtgatccgctgcggatgccatcctggtaacaggacccccagtgtgcgcaacagtatgttcacggtcttccgtgttcaccacattcggaacactgctttcgtgaaacagtgtgtgtccaatccctgtgatcagtatcaaccacaccacctaggaatgctaggaaggtaccccggttcgccgggatctgatcctaggctaattgtctacggtggtgctcctttttattttccacttcaactcactggttacaactgcttgatttctgtgtttgctgcttttctctgctctcactgccattctcaagtgttcacactgtccaagctcctttggttgttcgcttccacttgccactgtcaactcttgtc

SEQ ID NO: 23298 - DNA, 658 bp, synthetic construct
  source 1..658: mol_type = other DNA
ctcgcctgagtctacaaagcgagaaacctgcccctctaacgccagacgagcggcataaaactcgaacttctggcacgttccaccaccccttctcctatcccaacccccattgcgctctcaaggtcgcgcttttccgagactagctcggattcaaaaagttcctggcaccctttaccccttcaggcccttaaggtaggaactgaccttgtgctgtgatctcggtgcggaagtgctactgcgtagtgattgtaagatccttttgtggttctgccctggcaaggctacagagtgctgtgatccgctgcggatgccatcctggtaacaggacccccagtgtgcgcaacagtatgttcacggtcttccgtgttcaccacattcggaacactgctttcgtgaaacagtgtgtgtccaatccctgtgatcagtatcaaccacaccacctaggaatgctaggaaggtaccccggttcgccgggatctgatcctaggctaattgtctacggtggtgctcctttttattttccacttcaactcactggttacaactgcttgatttctgtgtttgctgcttttctctgctctcactgccattctcaagtgttcacactgtccaagctcctttggttgttcgcttccacttgccactgtcaactcttgtc

SEQ ID NO: 23299 - DNA, 608 bp, synthetic construct
  source 1..608: mol_type = other DNA
cggcataaaactcgaacttctggcacgttccaccaccccttctcctatcccaacccccattgcgctctcaaggtcgcgcttttccgagactagctcggattcaaaaagttcctggcaccctttaccccttcaggcccttaaggtaggaactgaccttgtgctgtgatctcggtgcggaagtgctactgcgtagtgattgtaagatccttttgtggttctgccctggcaaggctacagagtgctgtgatccgctgcggatgccatcctggtaacaggacccccagtgtgcgcaacagtatgttcacggtcttccgtgttcaccacattcggaacactgctttcgtgaaacagtgtgtgtccaatccctgtgatcagtatcaaccacaccacctaggaatgctaggaaggtaccccggttcgccgggatctgatcctaggctaattgtctacggtggtgctcctttttattttccacttcaactcactggttacaactgcttgatttctgtgtttgctgcttttctctgctctcactgccattctcaagtgttcacactgtccaagctcctttggttgttcgcttccacttgccactgtcaactcttgtc

SEQ ID NO: 23300 - DNA, 558 bp, synthetic construct
  source 1..558: mol_type = other DNA
caacccccattgcgctctcaaggtcgcgcttttccgagactagctcggattcaaaaagttcctggcaccctttaccccttcaggcccttaaggtaggaactgaccttgtgctgtgatctcggtgcggaagtgctactgcgtagtgattgtaagatccttttgtggttctgccctggcaaggctacagagtgctgtgatccgctgcggatgccatcctggtaacaggacccccagtgtgcgcaacagtatgttcacggtcttccgtgttcaccacattcggaacactgctttcgtgaaacagtgtgtgtccaatccctgtgatcagtatcaaccacaccacctaggaatgctaggaaggtaccccggttcgccgggatctgatcctaggctaattgtctacggtggtgctcctttttattttccacttcaactcactggttacaactgcttgatttctgtgtttgctgcttttctctgctctcactgccattctcaagtgttcacactgtccaagctcctttggttgttcgcttccacttgccactgtcaactcttgtc

SEQ ID NO: 23301 - DNA, 508 bp, synthetic construct
  source 1..508: mol_type = other DNA
tcaaaaagttcctggcaccctttaccccttcaggcccttaaggtaggaactgaccttgtgctgtgatctcggtgcggaagtgctactgcgtagtgattgtaagatccttttgtggttctgccctggcaaggctacagagtgctgtgatccgctgcggatgccatcctggtaacaggacccccagtgtgcgcaacagtatgttcacggtcttccgtgttcaccacattcggaacactgctttcgtgaaacagtgtgtgtccaatccctgtgatcagtatcaaccacaccacctaggaatgctaggaaggtaccccggttcgccgggatctgatcctaggctaattgtctacggtggtgctcctttttattttccacttcaactcactggttacaactgcttgatttctgtgtttgctgcttttctctgctctcactgccattctcaagtgttcacactgtccaagctcctttggttgttcgcttccacttgccactgtcaactcttgtc

SEQ ID NO: 23302 - DNA, 759 bp, synthetic construct
  source 1..759: mol_type = other DNA
tacactggtatgccttacctcggtattacggtaccgatgtatatagtacctttgtacgcctgttttatatccctcccccacatgtaaccttagaagtttacacaaacaaagaccaataggagtccaacacccagttggattgcggtcaagcacttctgtttccccggacctagtagtgataggctgtacccacggccgaagatgaacccgtccgttatccggctacctacttcgggaagcctagtaacattctgaagtctctgaggcgtttcgctcagcacgaccccggtgtagatcgggctgatgggtctccgcataccccacgggcgaccgtggcggaggccgcgttggcggcccgcctatggcgaaagccataggacgcctcttagatgacagggtgtgaagagcctactgagctgggtagtagtcctccggcccctgaatgcggctaatcctaaccacggagcgtccaccagcaatccagctggcagggcgtcgtaacgggcaactctgtggcggaaccgactactttgggtgtccgtgtttccttttgatcctattttggctgcttatggtgacaacgataagttgttatcataaagctcttgggttggccacctggaaaaagttatcagtgtttgatattgttcggctctcacgcctaccaataagacaagccctatatttacttgttgcattttactcgtcagaagaaatcacagagtatcatttggatttgttactcacattaaggacaag

SEQ ID NO: 23303 - DNA, 709 bp, synthetic construct
  source 1..709: mol_type = other DNA
tttgtacgcctgttttatatccctcccccacatgtaaccttagaagtttacacaaacaaagaccaataggagtccaacacccagttggattgcggtcaagcacttctgtttccccggacctagtagtgataggctgtacccacggccgaagatgaacccgtccgttatccggctacctacttcgggaagcctagtaacattctgaagtctctgaggcgtttcgctcagcacgaccccggtgtagatcgggctgatgggtctccgcataccccacgggcgaccgtggcggaggccgcgttggcggcccgcctatggcgaaagccataggacgcctcttagatgacagggtgtgaagagcctactgagctgggtagtagtcctccggcccctgaatgcggctaatcctaaccacggagcgtccaccagcaatccagctggcagggcgtcgtaacgggcaactctgtggcggaaccgactactttgggtgtccgtgtttccttttgatcctattttggctgcttatggtgacaacgataagttgttatcataaagctcttgggttggccacctggaaaaagttatcagtgtttgatattgttcggctctcacgcctaccaataagacaagccctatatttacttgttgcattttactcgtcagaagaaatcacagagtatcatttggatttgttactcacattaaggacaag

SEQ ID NO: 23304 - DNA, 659 bp, synthetic construct
  source 1..659: mol_type = other DNA
cacaaacaaagaccaataggagtccaacacccagttggattgcggtcaagcacttctgtttccccggacctagtagtgataggctgtacccacggccgaagatgaacccgtccgttatccggctacctacttcgggaagcctagtaacattctgaagtctctgaggcgtttcgctcagcacgaccccggtgtagatcgggctgatgggtctccgcataccccacgggcgaccgtggcggaggccgcgttggcggcccgcctatggcgaaagccataggacgcctcttagatgacagggtgtgaagagcctactgagctgggtagtagtcctccggcccctgaatgcggctaatcctaaccacggagcgtccaccagcaatccagctggcagggcgtcgtaacgggcaactctgtggcggaaccgactactttgggtgtccgtgtttccttttgatcctattttggctgcttatggtgacaacgataagttgttatcataaagctcttgggttggccacctggaaaaagttatcagtgtttgatattgttcggctctcacgcctaccaataagacaagccctatatttacttgttgcattttactcgtcagaagaaatcacagagtatcatttggatttgttactcacattaaggacaag

SEQ ID NO: 23305 - DNA, 609 bp, synthetic construct
  source 1..609: mol_type = other DNA
cacttctgtttccccggacctagtagtgataggctgtacccacggccgaagatgaacccgtccgttatccggctacctacttcgggaagcctagtaacattctgaagtctctgaggcgtttcgctcagcacgaccccggtgtagatcgggctgatgggtctccgcataccccacgggcgaccgtggcggaggccgcgttggcggcccgcctatggcgaaagccataggacgcctcttagatgacagggtgtgaagagcctactgagctgggtagtagtcctccggcccctgaatgcggctaatcctaaccacggagcgtccaccagcaatccagctggcagggcgtcgtaacgggcaactctgtggcggaaccgactactttgggtgtccgtgtttccttttgatcctattttggctgcttatggtgacaacgataagttgttatcataaagctcttgggttggccacctggaaaaagttatcagtgtttgatattgttcggctctcacgcctaccaataagacaagccctatatttacttgttgcattttactcgtcagaagaaatcacagagtatcatttggatttgttactcacattaaggacaag

SEQ ID NO: 23306 - DNA, 559 bp, synthetic construct
  source 1..559: mol_type = other DNA
gatgaacccgtccgttatccggctacctacttcgggaagcctagtaacattctgaagtctctgaggcgtttcgctcagcacgaccccggtgtagatcgggctgatgggtctccgcataccccacgggcgaccgtggcggaggccgcgttggcggcccgcctatggcgaaagccataggacgcctcttagatgacagggtgtgaagagcctactgagctgggtagtagtcctccggcccctgaatgcggctaatcctaaccacggagcgtccaccagcaatccagctggcagggcgtcgtaacgggcaactctgtggcggaaccgactactttgggtgtccgtgtttccttttgatcctattttggctgcttatggtgacaacgataagttgttatcataaagctcttgggttggccacctggaaaaagttatcagtgtttgatattgttcggctctcacgcctaccaataagacaagccctatatttacttgttgcattttactcgtcagaagaaatcacagagtatcatttggatttgttactcacattaaggacaag

SEQ ID NO: 23307 - DNA, 509 bp, synthetic construct
  source 1..509: mol_type = other DNA
tctgaagtctctgaggcgtttcgctcagcacgaccccggtgtagatcgggctgatgggtctccgcataccccacgggcgaccgtggcggaggccgcgttggcggcccgcctatggcgaaagccataggacgcctcttagatgacagggtgtgaagagcctactgagctgggtagtagtcctccggcccctgaatgcggctaatcctaaccacggagcgtccaccagcaatccagctggcagggcgtcgtaacgggcaactctgtggcggaaccgactactttgggtgtccgtgtttccttttgatcctattttggctgcttatggtgacaacgataagttgttatcataaagctcttgggttggccacctggaaaaagttatcagtgtttgatattgttcggctctcacgcctaccaataagacaagccctatatttacttgttgcattttactcgtcagaagaaatcacagagtatcatttggatttgttactcacattaaggacaag

SEQ ID NO: 23308 - DNA, 759 bp, synthetic construct
  source 1..759: mol_type = other DNA
ttagtacctttgtacgcctgttttcccctcccttaaacaaattaagattaccactactgaggggagtagtccgactccgctccagcactgctgcaccagtgaattggtacgctagtacctctgcacggagtagatggtatcccccccccgaaacttagaagtttgcaacaaacccgaccaataggtgcgtggcatccagctgcgtaaaggtcaagcacttctgtttccccggtccacaaggatcgttacccgcccaacccactgcgagaagcctattaactggccaaacaactgaagagttgcgctccgccacgacccctgtggtagctctggaagatggggctcgcacttcccccgtggtaacacggttgcctgcccgcgcgtgcttccgggttcgacctagtgtcgttcactccaaagttgcgtaaccagccaagagcctattgcgctgggatggttttcctccggggccgtgaatgctgctaatcctaacctccgagcgtgtgcgcacaaaccagtgttgctacgtcgtaacgcgtaagttggaggcggaacagactactttcggtaccccgtgtttcctcttatttttatataatattttatggtgacaattgctgagatttgtgatttggccaccctaccattgaatattgctttgtattatctggttgcatttcataaagcttcagaaatacctgcttcctatatcgatctacttgtattcctcaatttaaagcacaaattagagaacataag

SEQ ID NO: 23309 - DNA, 709 bp, synthetic construct
  source 1..709: mol_type = other DNA
ccactactgaggggagtagtccgactccgctccagcactgctgcaccagtgaattggtacgctagtacctctgcacggagtagatggtatcccccccccgaaacttagaagtttgcaacaaacccgaccaataggtgcgtggcatccagctgcgtaaaggtcaagcacttctgtttccccggtccacaaggatcgttacccgcccaacccactgcgagaagcctattaactggccaaacaactgaagagttgcgctccgccacgacccctgtggtagctctggaagatggggctcgcacttcccccgtggtaacacggttgcctgcccgcgcgtgcttccgggttcgacctagtgtcgttcactccaaagttgcgtaaccagccaagagcctattgcgctgggatggttttcctccggggccgtgaatgctgctaatcctaacctccgagcgtgtgcgcacaaaccagtgttgctacgtcgtaacgcgtaagttggaggcggaacagactactttcggtaccccgtgtttcctcttatttttatataatattttatggtgacaattgctgagatttgtgatttggccaccctaccattgaatattgctttgtattatctggttgcatttcataaagcttcagaaatacctgcttcctatatcgatctacttgtattcctcaatttaaagcacaaattagagaacataag

SEQ ID NO: 23310 - DNA, 659 bp, synthetic construct
  source 1..659: mol_type = other DNA
gaattggtacgctagtacctctgcacggagtagatggtatcccccccccgaaacttagaagtttgcaacaaacccgaccaataggtgcgtggcatccagctgcgtaaaggtcaagcacttctgtttccccggtccacaaggatcgttacccgcccaacccactgcgagaagcctattaactggccaaacaactgaagagttgcgctccgccacgacccctgtggtagctctggaagatggggctcgcacttcccccgtggtaacacggttgcctgcccgcgcgtgcttccgggttcgacctagtgtcgttcactccaaagttgcgtaaccagccaagagcctattgcgctgggatggttttcctccggggccgtgaatgctgctaatcctaacctccgagcgtgtgcgcacaaaccagtgttgctacgtcgtaacgcgtaagttggaggcggaacagactactttcggtaccccgtgtttcctcttatttttatataatattttatggtgacaattgctgagatttgtgatttggccaccctaccattgaatattgctttgtattatctggttgcatttcataaagcttcagaaatacctgcttcctatatcgatctacttgtattcctcaatttaaagcacaaattagagaacataag

SEQ ID NO: 23311 - DNA, 609 bp, synthetic construct
  source 1..609: mol_type = other DNA
aaacttagaagtttgcaacaaacccgaccaataggtgcgtggcatccagctgcgtaaaggtcaagcacttctgtttccccggtccacaaggatcgttacccgcccaacccactgcgagaagcctattaactggccaaacaactgaagagttgcgctccgccacgacccctgtggtagctctggaagatggggctcgcacttcccccgtggtaacacggttgcctgcccgcgcgtgcttccgggttcgacctagtgtcgttcactccaaagttgcgtaaccagccaagagcctattgcgctgggatggttttcctccggggccgtgaatgctgctaatcctaacctccgagcgtgtgcgcacaaaccagtgttgctacgtcgtaacgcgtaagttggaggcggaacagactactttcggtaccccgtgtttcctcttatttttatataatattttatggtgacaattgctgagatttgtgatttggccaccctaccattgaatattgctttgtattatctggttgcatttcataaagcttcagaaatacctgcttcctatatcgatctacttgtattcctcaatttaaagcacaaattagagaacataag

SEQ ID NO: 23312 - DNA, 559 bp, synthetic construct
  source 1..559: mol_type = other DNA
tgcgtaaaggtcaagcacttctgtttccccggtccacaaggatcgttacccgcccaacccactgcgagaagcctattaactggccaaacaactgaagagttgcgctccgccacgacccctgtggtagctctggaagatggggctcgcacttcccccgtggtaacacggttgcctgcccgcgcgtgcttccgggttcgacctagtgtcgttcactccaaagttgcgtaaccagccaagagcctattgcgctgggatggttttcctccggggccgtgaatgctgctaatcctaacctccgagcgtgtgcgcacaaaccagtgttgctacgtcgtaacgcgtaagttggaggcggaacagactactttcggtaccccgtgtttcctcttatttttatataatattttatggtgacaattgctgagatttgtgatttggccaccctaccattgaatattgctttgtattatctggttgcatttcataaagcttcagaaatacctgcttcctatatcgatctacttgtattcctcaatttaaagcacaaattagagaacataag

SEQ ID NO: 23313 - DNA, 509 bp, synthetic construct
  source 1..509: mol_type = other DNA
cgcccaacccactgcgagaagcctattaactggccaaacaactgaagagttgcgctccgccacgacccctgtggtagctctggaagatggggctcgcacttcccccgtggtaacacggttgcctgcccgcgcgtgcttccgggttcgacctagtgtcgttcactccaaagttgcgtaaccagccaagagcctattgcgctgggatggttttcctccggggccgtgaatgctgctaatcctaacctccgagcgtgtgcgcacaaaccagtgttgctacgtcgtaacgcgtaagttggaggcggaacagactactttcggtaccccgtgtttcctcttatttttatataatattttatggtgacaattgctgagatttgtgatttggccaccctaccattgaatattgctttgtattatctggttgcatttcataaagcttcagaaatacctgcttcctatatcgatctacttgtattcctcaatttaaagcacaaattagagaacataag

SEQ ID NO: 23314 - DNA, 762 bp, synthetic construct
  source 1..762: mol_type = other DNA
tactctggttcgattagaacctttgtacgcctgttttcccctcccttaaacaaattaagatctctgccaatgtggggagtagtccgactccgcaccgatacgtcgcaccagcagaccggttcgcttaggacccttctgcggattggtatgagtccctctcccgaaacttagaagtttggacaaaccgaccaataggtgcgtggcatccagccatgttacggtcaagcacctctgtttccccggtcagaaatgatcgttacccgccctacccactacgaaaagcctattaaccattgaaagtgatgaggagttgcgctcagccatgaccccgatggtagctctgagggatggagctcgcagttcccccgtggtaacacggttgcttgctcgcgtgtgcccttgggttcgaccatttggtcgttcactccaaatcatcgtaaatggccaagagccaattgtgctggggaggttttcctccggagccgtgaatgctgctaatcccaacctccgagcgtgtgcgcacaatccagtgttgctacgtcgtaacgcgtaagttggaggcggaacagactactttcggtactccgtgtttccttttattttattattatattaatggtgacactgtttgagatttgcgagattgccaaattgccactcaacattgcactctattatttggtatcattctacaatacctcagaacttacggttgagctcattgatttcctcgtctttttgaataaaaataaattaaagaca

SEQ ID NO: 23315 - DNA, 712 bp, synthetic construct
  source 1..712: mol_type = other DNA
caaattaagatctctgccaatgtggggagtagtccgactccgcaccgatacgtcgcaccagcagaccggttcgcttaggacccttctgcggattggtatgagtccctctcccgaaacttagaagtttggacaaaccgaccaataggtgcgtggcatccagccatgttacggtcaagcacctctgtttccccggtcagaaatgatcgttacccgccctacccactacgaaaagcctattaaccattgaaagtgatgaggagttgcgctcagccatgaccccgatggtagctctgagggatggagctcgcagttcccccgtggtaacacggttgcttgctcgcgtgtgcccttgggttcgaccatttggtcgttcactccaaatcatcgtaaatggccaagagccaattgtgctggggaggttttcctccggagccgtgaatgctgctaatcccaacctccgagcgtgtgcgcacaatccagtgttgctacgtcgtaacgcgtaagttggaggcggaacagactactttcggtactccgtgtttccttttattttattattatattaatggtgacactgtttgagatttgcgagattgccaaattgccactcaacattgcactctattatttggtatcattctacaatacctcagaacttacggttgagctcattgatttcctcgtctttttgaataaaaataaattaaagaca

SEQ ID NO: 23316 - DNA, 662 bp, synthetic construct
  source 1..662: mol_type = other DNA
cgtcgcaccagcagaccggttcgcttaggacccttctgcggattggtatgagtccctctcccgaaacttagaagtttggacaaaccgaccaataggtgcgtggcatccagccatgttacggtcaagcacctctgtttccccggtcagaaatgatcgttacccgccctacccactacgaaaagcctattaaccattgaaagtgatgaggagttgcgctcagccatgaccccgatggtagctctgagggatggagctcgcagttcccccgtggtaacacggttgcttgctcgcgtgtgcccttgggttcgaccatttggtcgttcactccaaatcatcgtaaatggccaagagccaattgtgctggggaggttttcctccggagccgtgaatgctgctaatcccaacctccgagcgtgtgcgcacaatccagtgttgctacgtcgtaacgcgtaagttggaggcggaacagactactttcggtactccgtgtttccttttattttattattatattaatggtgacactgtttgagatttgcgagattgccaaattgccactcaacattgcactctattatttggtatcattctacaatacctcagaacttacggttgagctcattgatttcctcgtctttttgaataaaaataaattaaagaca

SEQ ID NO: 23317 - DNA, 612 bp, synthetic construct
  source 1..612: mol_type = other DNA
agtccctctcccgaaacttagaagtttggacaaaccgaccaataggtgcgtggcatccagccatgttacggtcaagcacctctgtttccccggtcagaaatgatcgttacccgccctacccactacgaaaagcctattaaccattgaaagtgatgaggagttgcgctcagccatgaccccgatggtagctctgagggatggagctcgcagttcccccgtggtaacacggttgcttgctcgcgtgtgcccttgggttcgaccatttggtcgttcactccaaatcatcgtaaatggccaagagccaattgtgctggggaggttttcctccggagccgtgaatgctgctaatcccaacctccgagcgtgtgcgcacaatccagtgttgctacgtcgtaacgcgtaagttggaggcggaacagactactttcggtactccgtgtttccttttattttattattatattaatggtgacactgtttgagatttgcgagattgccaaattgccactcaacattgcactctattatttggtatcattctacaatacctcagaacttacggttgagctcattgatttcctcgtctttttgaataaaaataaattaaagaca

SEQ ID NO: 23318 - DNA, 562 bp, synthetic construct
  source 1..562: mol_type = other DNA
tggcatccagccatgttacggtcaagcacctctgtttccccggtcagaaatgatcgttacccgccctacccactacgaaaagcctattaaccattgaaagtgatgaggagttgcgctcagccatgaccccgatggtagctctgagggatggagctcgcagttcccccgtggtaacacggttgcttgctcgcgtgtgcccttgggttcgaccatttggtcgttcactccaaatcatcgtaaatggccaagagccaattgtgctggggaggttttcctccggagccgtgaatgctgctaatcccaacctccgagcgtgtgcgcacaatccagtgttgctacgtcgtaacgcgtaagttggaggcggaacagactactttcggtactccgtgtttccttttattttattattatattaatggtgacactgtttgagatttgcgagattgccaaattgccactcaacattgcactctattatttggtatcattctacaatacctcagaacttacggttgagctcattgatttcctcgtctttttgaataaaaataaattaaagaca

SEQ ID NO: 23319 - DNA, 512 bp, synthetic construct
  source 1..512: mol_type = other DNA
tgatcgttacccgccctacccactacgaaaagcctattaaccattgaaagtgatgaggagttgcgctcagccatgaccccgatggtagctctgagggatggagctcgcagttcccccgtggtaacacggttgcttgctcgcgtgtgcccttgggttcgaccatttggtcgttcactccaaatcatcgtaaatggccaagagccaattgtgctggggaggttttcctccggagccgtgaatgctgctaatcccaacctccgagcgtgtgcgcacaatccagtgttgctacgtcgtaacgcgtaagttggaggcggaacagactactttcggtactccgtgtttccttttattttattattatattaatggtgacactgtttgagatttgcgagattgccaaattgccactcaacattgcactctattatttggtatcattctacaatacctcagaacttacggttgagctcattgatttcctcgtctttttgaataaaaataaattaaagaca

SEQ ID NO: 23320 - DNA, 763 bp, synthetic construct
  source 1..763: mol_type = other DNA
tacactggtatgccagtaccttggtatcacggtaccattgtacgccagtacctttgtacgcctgttttatattcccttccccatacgtaactttagaagtttaagcaaattaagaccaataggagtccaacaaccagttggattgcggtcaagcacttctgtttccccggacctagtagtgataggctgtacccacggccgaagatgaacccgtccgttatccggccagctacttcgagaagcctagtagcatcaaagatctgtcttggcgtttcgctcagcgcgttccccccgcgtagatcgggctgatgggtctccgcataccccacgggcgaccgtggcggaggccgcgtggcggcccgcctatggcgaaagccataggacgccatttcagtgacagggtgtgaagagcctattgagctagttggtagtcctccggcccctgaatgcggctaatcctaaccactgagcgtccaccaacaaaccagttgggagggcgtcgtaacgggtaactcggtggcggaaccgactactttgggtgtccgtgtttccttttgatcctattttggctgcttatggtgacaacgataagttgttatcataaagcttttgggttggccacctggaaaaagttatcagtgtttgatattgttcggctttcacgcctaccattcagactaactctttatttgcttattgcattttacccatcggaggatattacagacttccatctacaactcttattcacattatcaacaca

SEQ ID NO: 23321 - DNA, 713 bp, synthetic construct
  source 1..713: mol_type = other DNA
cctttgtacgcctgttttatattcccttccccatacgtaactttagaagtttaagcaaattaagaccaataggagtccaacaaccagttggattgcggtcaagcacttctgtttccccggacctagtagtgataggctgtacccacggccgaagatgaacccgtccgttatccggccagctacttcgagaagcctagtagcatcaaagatctgtcttggcgtttcgctcagcgcgttccccccgcgtagatcgggctgatgggtctccgcataccccacgggcgaccgtggcggaggccgcgtggcggcccgcctatggcgaaagccataggacgccatttcagtgacagggtgtgaagagcctattgagctagttggtagtcctccggcccctgaatgcggctaatcctaaccactgagcgtccaccaacaaaccagttgggagggcgtcgtaacgggtaactcggtggcggaaccgactactttgggtgtccgtgtttccttttgatcctattttggctgcttatggtgacaacgataagttgttatcataaagcttttgggttggccacctggaaaaagttatcagtgtttgatattgttcggctttcacgcctaccattcagactaactctttatttgcttattgcattttacccatcggaggatattacagacttccatctacaactcttattcacattatcaacaca

SEQ ID NO: 23322 - DNA, 663 bp, synthetic construct
  source 1..663: mol_type = other DNA
ttaagcaaattaagaccaataggagtccaacaaccagttggattgcggtcaagcacttctgtttccccggacctagtagtgataggctgtacccacggccgaagatgaacccgtccgttatccggccagctacttcgagaagcctagtagcatcaaagatctgtcttggcgtttcgctcagcgcgttccccccgcgtagatcgggctgatgggtctccgcataccccacgggcgaccgtggcggaggccgcgtggcggcccgcctatggcgaaagccataggacgccatttcagtgacagggtgtgaagagcctattgagctagttggtagtcctccggcccctgaatgcggctaatcctaaccactgagcgtccaccaacaaaccagttgggagggcgtcgtaacgggtaactcggtggcggaaccgactactttgggtgtccgtgtttccttttgatcctattttggctgcttatggtgacaacgataagttgttatcataaagcttttgggttggccacctggaaaaagttatcagtgtttgatattgttcggctttcacgcctaccattcagactaactctttatttgcttattgcattttacccatcggaggatattacagacttccatctacaactcttattcacattatcaacaca

SEQ ID NO: 23323 - DNA, 613 bp, synthetic construct
  source 1..613: mol_type = other DNA
aagcacttctgtttccccggacctagtagtgataggctgtacccacggccgaagatgaacccgtccgttatccggccagctacttcgagaagcctagtagcatcaaagatctgtcttggcgtttcgctcagcgcgttccccccgcgtagatcgggctgatgggtctccgcataccccacgggcgaccgtggcggaggccgcgtggcggcccgcctatggcgaaagccataggacgccatttcagtgacagggtgtgaagagcctattgagctagttggtagtcctccggcccctgaatgcggctaatcctaaccactgagcgtccaccaacaaaccagttgggagggcgtcgtaacgggtaactcggtggcggaaccgactactttgggtgtccgtgtttccttttgatcctattttggctgcttatggtgacaacgataagttgttatcataaagcttttgggttggccacctggaaaaagttatcagtgtttgatattgttcggctttcacgcctaccattcagactaactctttatttgcttattgcattttacccatcggaggatattacagacttccatctacaactcttattcacattatcaacaca

SEQ ID NO: 23324 - DNA, 563 bp, synthetic construct
  source 1..563: mol_type = other DNA
gaagatgaacccgtccgttatccggccagctacttcgagaagcctagtagcatcaaagatctgtcttggcgtttcgctcagcgcgttccccccgcgtagatcgggctgatgggtctccgcataccccacgggcgaccgtggcggaggccgcgtggcggcccgcctatggcgaaagccataggacgccatttcagtgacagggtgtgaagagcctattgagctagttggtagtcctccggcccctgaatgcggctaatcctaaccactgagcgtccaccaacaaaccagttgggagggcgtcgtaacgggtaactcggtggcggaaccgactactttgggtgtccgtgtttccttttgatcctattttggctgcttatggtgacaacgataagttgttatcataaagcttttgggttggccacctggaaaaagttatcagtgtttgatattgttcggctttcacgcctaccattcagactaactctttatttgcttattgcattttacccatcggaggatattacagacttccatctacaactcttattcacattatcaacaca

SEQ ID NO: 23325 - DNA, 513 bp, synthetic construct
  source 1..513: mol_type = other DNA
catcaaagatctgtcttggcgtttcgctcagcgcgttccccccgcgtagatcgggctgatgggtctccgcataccccacgggcgaccgtggcggaggccgcgtggcggcccgcctatggcgaaagccataggacgccatttcagtgacagggtgtgaagagcctattgagctagttggtagtcctccggcccctgaatgcggctaatcctaaccactgagcgtccaccaacaaaccagttgggagggcgtcgtaacgggtaactcggtggcggaaccgactactttgggtgtccgtgtttccttttgatcctattttggctgcttatggtgacaacgataagttgttatcataaagcttttgggttggccacctggaaaaagttatcagtgtttgatattgttcggctttcacgcctaccattcagactaactctttatttgcttattgcattttacccatcggaggatattacagacttccatctacaactcttattcacattatcaacaca

SEQ ID NO: 23326 - DNA, 764 bp, synthetic construct
  source 1..764: mol_type = other DNA
tactctggttcgattagaacctttgtacgcctgttttccccacccttaaataaatcaagatctctgccaatgtggggagtagtccgactccgcaccgatacgtcgcaccagcagaccggttcgcttaggacccttctgcggattggtatgagttcccacccttgtaacttagaagttctcacaaaccgaccaatagcggcgttgcatccagcagcgcaacggtcaagcacttctgtttccccggcgcgtcgcgtcgttacccgcccggtctactacgggaagcccagtatggtcccaattgattgcgcagttgcgttcggccacaaccccagtggtagctctgaggaatggggctcgcccttcccccacagtaatgtggtggcctgcccgcgcgtgtcctcgggttcactcctagagtgttcactgcaattttgagtaagatctgaagagcctactgtgctaggttggttttcctccggagccgtgaatgctgctaatcccaacctccgagcgtgtgcgcacaatccagtgttgctacgtcgtaacgcgtaagttggaggcggaacagactactttcggtactccgtgtttccttattttattcacttattttatggtgacactgactgatatttgtgagtttgctcggctgcccttgaatattgctttgtactatttaatagcatttcatagaaccactcaactttcaattgagcttattgacttcgccgtctttctcaatcagatacacaaaaccacacata

SEQ ID NO: 23327 - DNA, 714 bp, synthetic construct
  source 1..714: mol_type = other DNA
taaatcaagatctctgccaatgtggggagtagtccgactccgcaccgatacgtcgcaccagcagaccggttcgcttaggacccttctgcggattggtatgagttcccacccttgtaacttagaagttctcacaaaccgaccaatagcggcgttgcatccagcagcgcaacggtcaagcacttctgtttccccggcgcgtcgcgtcgttacccgcccggtctactacgggaagcccagtatggtcccaattgattgcgcagttgcgttcggccacaaccccagtggtagctctgaggaatggggctcgcccttcccccacagtaatgtggtggcctgcccgcgcgtgtcctcgggttcactcctagagtgttcactgcaattttgagtaagatctgaagagcctactgtgctaggttggttttcctccggagccgtgaatgctgctaatcccaacctccgagcgtgtgcgcacaatccagtgttgctacgtcgtaacgcgtaagttggaggcggaacagactactttcggtactccgtgtttccttattttattcacttattttatggtgacactgactgatatttgtgagtttgctcggctgcccttgaatattgctttgtactatttaatagcatttcatagaaccactcaactttcaattgagcttattgacttcgccgtctttctcaatcagatacacaaaaccacacata

SEQ ID NO: 23328 - DNA, 664 bp, synthetic construct
  source 1..664: mol_type = other DNA
cgtcgcaccagcagaccggttcgcttaggacccttctgcggattggtatgagttcccacccttgtaacttagaagttctcacaaaccgaccaatagcggcgttgcatccagcagcgcaacggtcaagcacttctgtttccccggcgcgtcgcgtcgttacccgcccggtctactacgggaagcccagtatggtcccaattgattgcgcagttgcgttcggccacaaccccagtggtagctctgaggaatggggctcgcccttcccccacagtaatgtggtggcctgcccgcgcgtgtcctcgggttcactcctagagtgttcactgcaattttgagtaagatctgaagagcctactgtgctaggttggttttcctccggagccgtgaatgctgctaatcccaacctccgagcgtgtgcgcacaatccagtgttgctacgtcgtaacgcgtaagttggaggcggaacagactactttcggtactccgtgtttccttattttattcacttattttatggtgacactgactgatatttgtgagtttgctcggctgcccttgaatattgctttgtactatttaatagcatttcatagaaccactcaactttcaattgagcttattgacttcgccgtctttctcaatcagatacacaaaaccacacata

SEQ ID NO: 23329 - DNA, 614 bp, synthetic construct
  source 1..614: mol_type = other DNA
agttcccacccttgtaacttagaagttctcacaaaccgaccaatagcggcgttgcatccagcagcgcaacggtcaagcacttctgtttccccggcgcgtcgcgtcgttacccgcccggtctactacgggaagcccagtatggtcccaattgattgcgcagttgcgttcggccacaaccccagtggtagctctgaggaatggggctcgcccttcccccacagtaatgtggtggcctgcccgcgcgtgtcctcgggttcactcctagagtgttcactgcaattttgagtaagatctgaagagcctactgtgctaggttggttttcctccggagccgtgaatgctgctaatcccaacctccgagcgtgtgcgcacaatccagtgttgctacgtcgtaacgcgtaagttggaggcggaacagactactttcggtactccgtgtttccttattttattcacttattttatggtgacactgactgatatttgtgagtttgctcggctgcccttgaatattgctttgtactatttaatagcatttcatagaaccactcaactttcaattgagcttattgacttcgccgtctttctcaatcagatacacaaaaccacacata

SEQ ID NO: 23330 - DNA, 564 bp, synthetic construct
  source 1..564: mol_type = other DNA
gttgcatccagcagcgcaacggtcaagcacttctgtttccccggcgcgtcgcgtcgttacccgcccggtctactacgggaagcccagtatggtcccaattgattgcgcagttgcgttcggccacaaccccagtggtagctctgaggaatggggctcgcccttcccccacagtaatgtggtggcctgcccgcgcgtgtcctcgggttcactcctagagtgttcactgcaattttgagtaagatctgaagagcctactgtgctaggttggttttcctccggagccgtgaatgctgctaatcccaacctccgagcgtgtgcgcacaatccagtgttgctacgtcgtaacgcgtaagttggaggcggaacagactactttcggtactccgtgtttccttattttattcacttattttatggtgacactgactgatatttgtgagtttgctcggctgcccttgaatattgctttgtactatttaatagcatttcatagaaccactcaactttcaattgagcttattgacttcgccgtctttctcaatcagatacacaaaaccacacata

SEQ ID NO: 23331 - DNA, 514 bp, synthetic construct
  source 1..514: mol_type = other DNA
gcgtcgttacccgcccggtctactacgggaagcccagtatggtcccaattgattgcgcagttgcgttcggccacaaccccagtggtagctctgaggaatggggctcgcccttcccccacagtaatgtggtggcctgcccgcgcgtgtcctcgggttcactcctagagtgttcactgcaattttgagtaagatctgaagagcctactgtgctaggttggttttcctccggagccgtgaatgctgctaatcccaacctccgagcgtgtgcgcacaatccagtgttgctacgtcgtaacgcgtaagttggaggcggaacagactactttcggtactccgtgtttccttattttattcacttattttatggtgacactgactgatatttgtgagtttgctcggctgcccttgaatattgctttgtactatttaatagcatttcatagaaccactcaactttcaattgagcttattgacttcgccgtctttctcaatcagatacacaaaaccacacata

SEQ ID NO: 23332 - DNA, 764 bp, synthetic construct
  source 1..764: mol_type = other DNA
tactctggtacgctagtacactagcacgttagtgcttttgtacgccagtacctttgtacgcctgttttattttcccttccccacatgtaactttagaagtttagaaacaaacaatgaccaataggagtccagcatccagttggattgcggtcaagtacttctgtttccccggacctagtagtgataggctgtacccacggccgaagatgaacccgtccgttatccggctacctacttcgggaagcctagtaacattctgaagtctctgaggcgtttcgctcagcacgaccccggtgtagatcgggctgatgggtctccgcataccccacgggtgaccgtggcggaggccgcgttggcggcccgcctatggcgaaagccataggacgcctcttagatgacagggtgtgaagagcctactgagctgggtagtagtcctccggcccctgaatgcggctaatcctaaccacggagcgtccaccggcaaaccggtcgggagggcgtcgtaacgggtaactctgtggcggaaccgactactttgggtgtccgtgtttccttttgatcctattttggctgcttatggtgacaacgataagttgttatcataaagcttttgggttggccacctggaaaaagttatcagtgtttgatattgttcggctctcacgccttccaacaaaacaggccttacttcttttaattgcattttatccatcggaggttattacagatttccatctgaagcttcttctcacagtagcagtaaa

SEQ ID NO: 23333 - DNA, 714 bp, synthetic construct
  source 1..714: mol_type = other DNA
cctttgtacgcctgttttattttcccttccccacatgtaactttagaagtttagaaacaaacaatgaccaataggagtccagcatccagttggattgcggtcaagtacttctgtttccccggacctagtagtgataggctgtacccacggccgaagatgaacccgtccgttatccggctacctacttcgggaagcctagtaacattctgaagtctctgaggcgtttcgctcagcacgaccccggtgtagatcgggctgatgggtctccgcataccccacgggtgaccgtggcggaggccgcgttggcggcccgcctatggcgaaagccataggacgcctcttagatgacagggtgtgaagagcctactgagctgggtagtagtcctccggcccctgaatgcggctaatcctaaccacggagcgtccaccggcaaaccggtcgggagggcgtcgtaacgggtaactctgtggcggaaccgactactttgggtgtccgtgtttccttttgatcctattttggctgcttatggtgacaacgataagttgttatcataaagcttttgggttggccacctggaaaaagttatcagtgtttgatattgttcggctctcacgccttccaacaaaacaggccttacttcttttaattgcattttatccatcggaggttattacagatttccatctgaagcttcttctcacagtagcagtaaa

SEQ ID NO: 23334 - DNA, 664 bp, synthetic construct
  source 1..664: mol_type = other DNA
ttagaaacaaacaatgaccaataggagtccagcatccagttggattgcggtcaagtacttctgtttccccggacctagtagtgataggctgtacccacggccgaagatgaacccgtccgttatccggctacctacttcgggaagcctagtaacattctgaagtctctgaggcgtttcgctcagcacgaccccggtgtagatcgggctgatgggtctccgcataccccacgggtgaccgtggcggaggccgcgttggcggcccgcctatggcgaaagccataggacgcctcttagatgacagggtgtgaagagcctactgagctgggtagtagtcctccggcccctgaatgcggctaatcctaaccacggagcgtccaccggcaaaccggtcgggagggcgtcgtaacgggtaactctgtggcggaaccgactactttgggtgtccgtgtttccttttgatcctattttggctgcttatggtgacaacgataagttgttatcataaagcttttgggttggccacctggaaaaagttatcagtgtttgatattgttcggctctcacgccttccaacaaaacaggccttacttcttttaattgcattttatccatcggaggttattacagatttccatctgaagcttcttctcacagtagcagtaaa

SEQ ID NO: 23335 - DNA, 614 bp, synthetic construct
  source 1..614: mol_type = other DNA
tcaagtacttctgtttccccggacctagtagtgataggctgtacccacggccgaagatgaacccgtccgttatccggctacctacttcgggaagcctagtaacattctgaagtctctgaggcgtttcgctcagcacgaccccggtgtagatcgggctgatgggtctccgcataccccacgggtgaccgtggcggaggccgcgttggcggcccgcctatggcgaaagccataggacgcctcttagatgacagggtgtgaagagcctactgagctgggtagtagtcctccggcccctgaatgcggctaatcctaaccacggagcgtccaccggcaaaccggtcgggagggcgtcgtaacgggtaactctgtggcggaaccgactactttgggtgtccgtgtttccttttgatcctattttggctgcttatggtgacaacgataagttgttatcataaagcttttgggttggccacctggaaaaagttatcagtgtttgatattgttcggctctcacgccttccaacaaaacaggccttacttcttttaattgcattttatccatcggaggttattacagatttccatctgaagcttcttctcacagtagcagtaaa

SEQ ID NO: 23336 - DNA, 564 bp, synthetic construct
  source 1..564: mol_type = other DNA
ccgaagatgaacccgtccgttatccggctacctacttcgggaagcctagtaacattctgaagtctctgaggcgtttcgctcagcacgaccccggtgtagatcgggctgatgggtctccgcataccccacgggtgaccgtggcggaggccgcgttggcggcccgcctatggcgaaagccataggacgcctcttagatgacagggtgtgaagagcctactgagctgggtagtagtcctccggcccctgaatgcggctaatcctaaccacggagcgtccaccggcaaaccggtcgggagggcgtcgtaacgggtaactctgtggcggaaccgactactttgggtgtccgtgtttccttttgatcctattttggctgcttatggtgacaacgataagttgttatcataaagcttttgggttggccacctggaaaaagttatcagtgtttgatattgttcggctctcacgccttccaacaaaacaggccttacttcttttaattgcattttatccatcggaggttattacagatttccatctgaagcttcttctcacagtagcagtaaa

SEQ ID NO: 23337 - DNA, 514 bp, synthetic construct
  source 1..514: mol_type = other DNA
aacattctgaagtctctgaggcgtttcgctcagcacgaccccggtgtagatcgggctgatgggtctccgcataccccacgggtgaccgtggcggaggccgcgttggcggcccgcctatggcgaaagccataggacgcctcttagatgacagggtgtgaagagcctactgagctgggtagtagtcctccggcccctgaatgcggctaatcctaaccacggagcgtccaccggcaaaccggtcgggagggcgtcgtaacgggtaactctgtggcggaaccgactactttgggtgtccgtgtttccttttgatcctattttggctgcttatggtgacaacgataagttgttatcataaagcttttgggttggccacctggaaaaagttatcagtgtttgatattgttcggctctcacgccttccaacaaaacaggccttacttcttttaattgcattttatccatcggaggttattacagatttccatctgaagcttcttctcacagtagcagtaaa

SEQ ID NO: 23338 - DNA, 764 bp, synthetic construct
  source 1..764: mol_type = other DNA
gactggtacgccagtaccttggtatcacggtaccactgtacgctagtacctttacacgcctgttttataccccttccccaaacgtaacattagaagtttaacaagcaaagaccaataggagtccaacacccagttggattgcggtcaagtacttctgtctccccggacctagtagtgataggctgtacccacggccgaagatgaaaccgtccgttatccggccagctacttcgagaagcctagtagcatcaaagatctgtcttggcgtttcgctcagcgcgttttcccccgcgtagatcgggctgatgggtctccgcataccccacgggcgaccgtggcggaggccgcgtggcggcccgcctatggcgaaagccataggacgccatttcagtgacagggtgtgaagagcctattgagctagttggtagtcctccggcccctgaatgcggctaatcctaaccacggagcgtttaccagcaaaccagctggcggaacgtcgtaacgggtaactctgtggcggaaccgactactttgggtgtccgtgtttcctgttgatcctattttggctgcttatggtgacaacgataagttgttatcataaagcttttgggttggccacctggaaaaaagttatcagtgtttgatattgttcggctttcacgcctaccattaagacaatcactttatttgttagttgcattttatcctgccaaggacattactgagtttcacctacaacttttactcatacaattacatcaagt

SEQ ID NO: 23339 - DNA, 714 bp, synthetic construct
  source 1..714: mol_type = other DNA
tttacacgcctgttttataccccttccccaaacgtaacattagaagtttaacaagcaaagaccaataggagtccaacacccagttggattgcggtcaagtacttctgtctccccggacctagtagtgataggctgtacccacggccgaagatgaaaccgtccgttatccggccagctacttcgagaagcctagtagcatcaaagatctgtcttggcgtttcgctcagcgcgttttcccccgcgtagatcgggctgatgggtctccgcataccccacgggcgaccgtggcggaggccgcgtggcggcccgcctatggcgaaagccataggacgccatttcagtgacagggtgtgaagagcctattgagctagttggtagtcctccggcccctgaatgcggctaatcctaaccacggagcgtttaccagcaaaccagctggcggaacgtcgtaacgggtaactctgtggcggaaccgactactttgggtgtccgtgtttcctgttgatcctattttggctgcttatggtgacaacgataagttgttatcataaagcttttgggttggccacctggaaaaaagttatcagtgtttgatattgttcggctttcacgcctaccattaagacaatcactttatttgttagttgcattttatcctgccaaggacattactgagtttcacctacaacttttactcatacaattacatcaagt

SEQ ID NO: 23340 - DNA, 664 bp, synthetic construct
  source 1..664: mol_type = other DNA
acaagcaaagaccaataggagtccaacacccagttggattgcggtcaagtacttctgtctccccggacctagtagtgataggctgtacccacggccgaagatgaaaccgtccgttatccggccagctacttcgagaagcctagtagcatcaaagatctgtcttggcgtttcgctcagcgcgttttcccccgcgtagatcgggctgatgggtctccgcataccccacgggcgaccgtggcggaggccgcgtggcggcccgcctatggcgaaagccataggacgccatttcagtgacagggtgtgaagagcctattgagctagttggtagtcctccggcccctgaatgcggctaatcctaaccacggagcgtttaccagcaaaccagctggcggaacgtcgtaacgggtaactctgtggcggaaccgactactttgggtgtccgtgtttcctgttgatcctattttggctgcttatggtgacaacgataagttgttatcataaagcttttgggttggccacctggaaaaaagttatcagtgtttgatattgttcggctttcacgcctaccattaagacaatcactttatttgttagttgcattttatcctgccaaggacattactgagtttcacctacaacttttactcatacaattacatcaagt

SEQ ID NO: 23341 - DNA, 614 bp, synthetic construct
  source 1..614: mol_type = other DNA
acttctgtctccccggacctagtagtgataggctgtacccacggccgaagatgaaaccgtccgttatccggccagctacttcgagaagcctagtagcatcaaagatctgtcttggcgtttcgctcagcgcgttttcccccgcgtagatcgggctgatgggtctccgcataccccacgggcgaccgtggcggaggccgcgtggcggcccgcctatggcgaaagccataggacgccatttcagtgacagggtgtgaagagcctattgagctagttggtagtcctccggcccctgaatgcggctaatcctaaccacggagcgtttaccagcaaaccagctggcggaacgtcgtaacgggtaactctgtggcggaaccgactactttgggtgtccgtgtttcctgttgatcctattttggctgcttatggtgacaacgataagttgttatcataaagcttttgggttggccacctggaaaaaagttatcagtgtttgatattgttcggctttcacgcctaccattaagacaatcactttatttgttagttgcattttatcctgccaaggacattactgagtttcacctacaacttttactcatacaattacatcaagt

SEQ ID NO: 23342 - DNA, 564 bp, synthetic construct
  source 1..564: mol_type = other DNA
atgaaaccgtccgttatccggccagctacttcgagaagcctagtagcatcaaagatctgtcttggcgtttcgctcagcgcgttttcccccgcgtagatcgggctgatgggtctccgcataccccacgggcgaccgtggcggaggccgcgtggcggcccgcctatggcgaaagccataggacgccatttcagtgacagggtgtgaagagcctattgagctagttggtagtcctccggcccctgaatgcggctaatcctaaccacggagcgtttaccagcaaaccagctggcggaacgtcgtaacgggtaactctgtggcggaaccgactactttgggtgtccgtgtttcctgttgatcctattttggctgcttatggtgacaacgataagttgttatcataaagcttttgggttggccacctggaaaaaagttatcagtgtttgatattgttcggctttcacgcctaccattaagacaatcactttatttgttagttgcattttatcctgccaaggacattactgagtttcacctacaacttttactcatacaattacatcaagt

SEQ ID NO: 23343 - DNA, 514 bp, synthetic construct
  source 1..514: mol_type = other DNA
aaagatctgtcttggcgtttcgctcagcgcgttttcccccgcgtagatcgggctgatgggtctccgcataccccacgggcgaccgtggcggaggccgcgtggcggcccgcctatggcgaaagccataggacgccatttcagtgacagggtgtgaagagcctattgagctagttggtagtcctccggcccctgaatgcggctaatcctaaccacggagcgtttaccagcaaaccagctggcggaacgtcgtaacgggtaactctgtggcggaaccgactactttgggtgtccgtgtttcctgttgatcctattttggctgcttatggtgacaacgataagttgttatcataaagcttttgggttggccacctggaaaaaagttatcagtgtttgatattgttcggctttcacgcctaccattaagacaatcactttatttgttagttgcattttatcctgccaaggacattactgagtttcacctacaacttttactcatacaattacatcaagt

SEQ ID NO: 23344 - DNA, 764 bp, synthetic construct
  source 1..764: mol_type = other DNA
cactctggtatgcttagtacctttgtgcgcctgttttcccctcccttaaacaaattaagattgccactactgaggggagtagtccgactccgctccggtacagccgcaccagtactccggtgcgcatagcaccctagtacggagtaggtggtatcccttcccgaaacttagaagttatgaaccaaaccgaccaataggagcgtggcatccagccatgttgtggtcaagcacttctgtttccccggtccgcaaggatcgttacccgcccgacccactacgagaagcctattaactggccaagcgattgcgaagttgcgctcagccacaatcccagtggtagctctggaagatggggctcgcactccccccgtggtaacacggttgcttgcccgcgtgtgcttccgggttcggtcaccgaccgttcacttcaatctcgcgtaaccagccaagagccgattgtgctgggacggttttcctccggggccgtgaatgctgctaatcctaacctccgagcgtgtgcgcacaaaccagtgttgctacgtcgtaacgcgtaagttggaggcggaacagactactttcggtaccccgtgtttcttttgatttattttgtattttaatggtgacactgactgacatttgtgagtttgctcgattgcctttgaatattgctctgtattatctaatagcatttcacaagactacccaactttcactcgagcttattgactttgctgtttacttgaaccgcatacacaaactcaaca

SEQ ID NO: 23345 - DNA, 714 bp, synthetic construct
  source 1..714: mol_type = other DNA
caaattaagattgccactactgaggggagtagtccgactccgctccggtacagccgcaccagtactccggtgcgcatagcaccctagtacggagtaggtggtatcccttcccgaaacttagaagttatgaaccaaaccgaccaataggagcgtggcatccagccatgttgtggtcaagcacttctgtttccccggtccgcaaggatcgttacccgcccgacccactacgagaagcctattaactggccaagcgattgcgaagttgcgctcagccacaatcccagtggtagctctggaagatggggctcgcactccccccgtggtaacacggttgcttgcccgcgtgtgcttccgggttcggtcaccgaccgttcacttcaatctcgcgtaaccagccaagagccgattgtgctgggacggttttcctccggggccgtgaatgctgctaatcctaacctccgagcgtgtgcgcacaaaccagtgttgctacgtcgtaacgcgtaagttggaggcggaacagactactttcggtaccccgtgtttcttttgatttattttgtattttaatggtgacactgactgacatttgtgagtttgctcgattgcctttgaatattgctctgtattatctaatagcatttcacaagactacccaactttcactcgagcttattgactttgctgtttacttgaaccgcatacacaaactcaaca

SEQ ID NO: 23346 - DNA, 664 bp, synthetic construct
  source 1..664: mol_type = other DNA
cagccgcaccagtactccggtgcgcatagcaccctagtacggagtaggtggtatcccttcccgaaacttagaagttatgaaccaaaccgaccaataggagcgtggcatccagccatgttgtggtcaagcacttctgtttccccggtccgcaaggatcgttacccgcccgacccactacgagaagcctattaactggccaagcgattgcgaagttgcgctcagccacaatcccagtggtagctctggaagatggggctcgcactccccccgtggtaacacggttgcttgcccgcgtgtgcttccgggttcggtcaccgaccgttcacttcaatctcgcgtaaccagccaagagccgattgtgctgggacggttttcctccggggccgtgaatgctgctaatcctaacctccgagcgtgtgcgcacaaaccagtgttgctacgtcgtaacgcgtaagttggaggcggaacagactactttcggtaccccgtgtttcttttgatttattttgtattttaatggtgacactgactgacatttgtgagtttgctcgattgcctttgaatattgctctgtattatctaatagcatttcacaagactacccaactttcactcgagcttattgactttgctgtttacttgaaccgcatacacaaactcaaca

SEQ ID NO: 23347 - DNA, 614 bp, synthetic construct
  source 1..614: mol_type = other DNA
gtatcccttcccgaaacttagaagttatgaaccaaaccgaccaataggagcgtggcatccagccatgttgtggtcaagcacttctgtttccccggtccgcaaggatcgttacccgcccgacccactacgagaagcctattaactggccaagcgattgcgaagttgcgctcagccacaatcccagtggtagctctggaagatggggctcgcactccccccgtggtaacacggttgcttgcccgcgtgtgcttccgggttcggtcaccgaccgttcacttcaatctcgcgtaaccagccaagagccgattgtgctgggacggttttcctccggggccgtgaatgctgctaatcctaacctccgagcgtgtgcgcacaaaccagtgttgctacgtcgtaacgcgtaagttggaggcggaacagactactttcggtaccccgtgtttcttttgatttattttgtattttaatggtgacactgactgacatttgtgagtttgctcgattgcctttgaatattgctctgtattatctaatagcatttcacaagactacccaactttcactcgagcttattgactttgctgtttacttgaaccgcatacacaaactcaaca

SEQ ID NO: 23348 - DNA, 564 bp, synthetic construct
  source 1..564: mol_type = other DNA
cgtggcatccagccatgttgtggtcaagcacttctgtttccccggtccgcaaggatcgttacccgcccgacccactacgagaagcctattaactggccaagcgattgcgaagttgcgctcagccacaatcccagtggtagctctggaagatggggctcgcactccccccgtggtaacacggttgcttgcccgcgtgtgcttccgggttcggtcaccgaccgttcacttcaatctcgcgtaaccagccaagagccgattgtgctgggacggttttcctccggggccgtgaatgctgctaatcctaacctccgagcgtgtgcgcacaaaccagtgttgctacgtcgtaacgcgtaagttggaggcggaacagactactttcggtaccccgtgtttcttttgatttattttgtattttaatggtgacactgactgacatttgtgagtttgctcgattgcctttgaatattgctctgtattatctaatagcatttcacaagactacccaactttcactcgagcttattgactttgctgtttacttgaaccgcatacacaaactcaaca

SEQ ID NO: 23349 - DNA, 514 bp, synthetic construct
  source 1..514: mol_type = other DNA
aaggatcgttacccgcccgacccactacgagaagcctattaactggccaagcgattgcgaagttgcgctcagccacaatcccagtggtagctctggaagatggggctcgcactccccccgtggtaacacggttgcttgcccgcgtgtgcttccgggttcggtcaccgaccgttcacttcaatctcgcgtaaccagccaagagccgattgtgctgggacggttttcctccggggccgtgaatgctgctaatcctaacctccgagcgtgtgcgcacaaaccagtgttgctacgtcgtaacgcgtaagttggaggcggaacagactactttcggtaccccgtgtttcttttgatttattttgtattttaatggtgacactgactgacatttgtgagtttgctcgattgcctttgaatattgctctgtattatctaatagcatttcacaagactacccaactttcactcgagcttattgactttgctgtttacttgaaccgcatacacaaactcaaca

SEQ ID NO: 23350 - DNA, 765 bp, synthetic construct
  source 1..765: mol_type = other DNA
ctctggtgcgttagtacctttgcacgcctgttttcccttcccttaaacaaattaagatcgccagcgccgaggggagtagtccgactccgctccactacggtgctccagtggattgctattacggtagctcttcacggggtggctggtgtccccaaccccgcaacttagaagccagcacagatcgaccaatagcggctcggcagccagtcgggcaacggtcaagcacttctgtttccccggtccgtaaggatcgttacccgcccaggatgctacgagaaacttagtaaacacccaagcttgtgagaggttgcgctcagccacaaccccagtggtagctctgagtgatggggctcgtgactacccctctggtaacagagacacttgcccgcgtgtgcactcgggttcatcagaaatggtgttcacctcgaccaagcgtaagtgttgaagagtctattgtgccagcctggtttcctccggggccgtgaatgctgctaatcctaacctccgagcgtgtgcgcacaatccagtgttgctacgtcgtaacgcgtaagttggaggcggaacagactactttcggtaccccgtgtttcctcattcattatttcaatttatggtgacaattacagagatttgtgaattggcgaaactaccactgaatttggccttgtattgtcttattgccttccacaaaacttctgatattccacccagttatatcgatctcctggtttatctaaatttacaatataaattgaaccagataca

SEQ ID NO: 23351 - DNA, 715 bp, synthetic construct
  source 1..715: mol_type = other DNA
attaagatcgccagcgccgaggggagtagtccgactccgctccactacggtgctccagtggattgctattacggtagctcttcacggggtggctggtgtccccaaccccgcaacttagaagccagcacagatcgaccaatagcggctcggcagccagtcgggcaacggtcaagcacttctgtttccccggtccgtaaggatcgttacccgcccaggatgctacgagaaacttagtaaacacccaagcttgtgagaggttgcgctcagccacaaccccagtggtagctctgagtgatggggctcgtgactacccctctggtaacagagacacttgcccgcgtgtgcactcgggttcatcagaaatggtgttcacctcgaccaagcgtaagtgttgaagagtctattgtgccagcctggtttcctccggggccgtgaatgctgctaatcctaacctccgagcgtgtgcgcacaatccagtgttgctacgtcgtaacgcgtaagttggaggcggaacagactactttcggtaccccgtgtttcctcattcattatttcaatttatggtgacaattacagagatttgtgaattggcgaaactaccactgaatttggccttgtattgtcttattgccttccacaaaacttctgatattccacccagttatatcgatctcctggtttatctaaatttacaatataaattgaaccagataca

SEQ ID NO: 23352 - DNA, 665 bp, synthetic construct
  source 1..665: mol_type = other DNA
tgctccagtggattgctattacggtagctcttcacggggtggctggtgtccccaaccccgcaacttagaagccagcacagatcgaccaatagcggctcggcagccagtcgggcaacggtcaagcacttctgtttccccggtccgtaaggatcgttacccgcccaggatgctacgagaaacttagtaaacacccaagcttgtgagaggttgcgctcagccacaaccccagtggtagctctgagtgatggggctcgtgactacccctctggtaacagagacacttgcccgcgtgtgcactcgggttcatcagaaatggtgttcacctcgaccaagcgtaagtgttgaagagtctattgtgccagcctggtttcctccggggccgtgaatgctgctaatcctaacctccgagcgtgtgcgcacaatccagtgttgctacgtcgtaacgcgtaagttggaggcggaacagactactttcggtaccccgtgtttcctcattcattatttcaatttatggtgacaattacagagatttgtgaattggcgaaactaccactgaatttggccttgtattgtcttattgccttccacaaaacttctgatattccacccagttatatcgatctcctggtttatctaaatttacaatataaattgaaccagataca

SEQ ID NO: 23353 - DNA, 615 bp, synthetic construct
  source 1..615: mol_type = other DNA
cccaaccccgcaacttagaagccagcacagatcgaccaatagcggctcggcagccagtcgggcaacggtcaagcacttctgtttccccggtccgtaaggatcgttacccgcccaggatgctacgagaaacttagtaaacacccaagcttgtgagaggttgcgctcagccacaaccccagtggtagctctgagtgatggggctcgtgactacccctctggtaacagagacacttgcccgcgtgtgcactcgggttcatcagaaatggtgttcacctcgaccaagcgtaagtgttgaagagtctattgtgccagcctggtttcctccggggccgtgaatgctgctaatcctaacctccgagcgtgtgcgcacaatccagtgttgctacgtcgtaacgcgtaagttggaggcggaacagactactttcggtaccccgtgtttcctcattcattatttcaatttatggtgacaattacagagatttgtgaattggcgaaactaccactgaatttggccttgtattgtcttattgccttccacaaaacttctgatattccacccagttatatcgatctcctggtttatctaaatttacaatataaattgaaccagataca

SEQ ID NO: 23354 - DNA, 565 bp, synthetic construct
  source 1..565: mol_type = other DNA
cagccagtcgggcaacggtcaagcacttctgtttccccggtccgtaaggatcgttacccgcccaggatgctacgagaaacttagtaaacacccaagcttgtgagaggttgcgctcagccacaaccccagtggtagctctgagtgatggggctcgtgactacccctctggtaacagagacacttgcccgcgtgtgcactcgggttcatcagaaatggtgttcacctcgaccaagcgtaagtgttgaagagtctattgtgccagcctggtttcctccggggccgtgaatgctgctaatcctaacctccgagcgtgtgcgcacaatccagtgttgctacgtcgtaacgcgtaagttggaggcggaacagactactttcggtaccccgtgtttcctcattcattatttcaatttatggtgacaattacagagatttgtgaattggcgaaactaccactgaatttggccttgtattgtcttattgccttccacaaaacttctgatattccacccagttatatcgatctcctggtttatctaaatttacaatataaattgaaccagataca

SEQ ID NO: 23355 - DNA, 515 bp, synthetic construct
  source 1..515: mol_type = other DNA
tcgttacccgcccaggatgctacgagaaacttagtaaacacccaagcttgtgagaggttgcgctcagccacaaccccagtggtagctctgagtgatggggctcgtgactacccctctggtaacagagacacttgcccgcgtgtgcactcgggttcatcagaaatggtgttcacctcgaccaagcgtaagtgttgaagagtctattgtgccagcctggtttcctccggggccgtgaatgctgctaatcctaacctccgagcgtgtgcgcacaatccagtgttgctacgtcgtaacgcgtaagttggaggcggaacagactactttcggtaccccgtgtttcctcattcattatttcaatttatggtgacaattacagagatttgtgaattggcgaaactaccactgaatttggccttgtattgtcttattgccttccacaaaacttctgatattccacccagttatatcgatctcctggtttatctaaatttacaatataaattgaaccagataca

SEQ ID NO: 23356 - DNA, 766 bp, synthetic construct
  source 1..766: mol_type = other DNA
tactctggtacgtcagcacccttgtacccccgtttttccctcccttaaacaaattaagattaccactactgaggggagtagtccgactccgctccggtactgccgcaccagtactccggtacgtttagtactctagtacggagtagatggtatcccccacccttgcaacttagaaggaatcaaactacccgaccaataggcgcgcggcatccagccgcgttacggtcaagcacttctgtttccccggtccgcaagggtcgttatccgcccgctccactacgaaaagcctagtagccaaccaaacgactgcgaagttgcgttcagccacaaccccagtggtagctctggaagatggggctcgcaatacccccgtggtgacacggttgcttgcccgcgcgtgcttccgggttcggtcatgtaccgttcactttaatgtcgtgtaattggtcaagagcctattgtgctggagcggttttcctccggggccgtgaatgctgctaatcccaacctctgagcgtgtgcgcacaaaccagtgttgctacgtcgtaacgcgtaagtcggaggcggaacagactactttcggtaccccgtgtttcacttatttttactttatattttatggtgacacttgctgatatttgtgaatttgctcgcttgccgttgaacatagccttgtattatttagtagcattttacaacacaagccagctttcagttgaactcattgattttgctgtttacctcaattacatacacaaacacaaca

SEQ ID NO: 23357 - DNA, 716 bp, synthetic construct
  source 1..716: mol_type = other DNA
aaattaagattaccactactgaggggagtagtccgactccgctccggtactgccgcaccagtactccggtacgtttagtactctagtacggagtagatggtatcccccacccttgcaacttagaaggaatcaaactacccgaccaataggcgcgcggcatccagccgcgttacggtcaagcacttctgtttccccggtccgcaagggtcgttatccgcccgctccactacgaaaagcctagtagccaaccaaacgactgcgaagttgcgttcagccacaaccccagtggtagctctggaagatggggctcgcaatacccccgtggtgacacggttgcttgcccgcgcgtgcttccgggttcggtcatgtaccgttcactttaatgtcgtgtaattggtcaagagcctattgtgctggagcggttttcctccggggccgtgaatgctgctaatcccaacctctgagcgtgtgcgcacaaaccagtgttgctacgtcgtaacgcgtaagtcggaggcggaacagactactttcggtaccccgtgtttcacttatttttactttatattttatggtgacacttgctgatatttgtgaatttgctcgcttgccgttgaacatagccttgtattatttagtagcattttacaacacaagccagctttcagttgaactcattgattttgctgtttacctcaattacatacacaaacacaaca

SEQ ID NO: 23358 - DNA, 666 bp, synthetic construct
  source 1..666: mol_type = other DNA
tgccgcaccagtactccggtacgtttagtactctagtacggagtagatggtatcccccacccttgcaacttagaaggaatcaaactacccgaccaataggcgcgcggcatccagccgcgttacggtcaagcacttctgtttccccggtccgcaagggtcgttatccgcccgctccactacgaaaagcctagtagccaaccaaacgactgcgaagttgcgttcagccacaaccccagtggtagctctggaagatggggctcgcaatacccccgtggtgacacggttgcttgcccgcgcgtgcttccgggttcggtcatgtaccgttcactttaatgtcgtgtaattggtcaagagcctattgtgctggagcggttttcctccggggccgtgaatgctgctaatcccaacctctgagcgtgtgcgcacaaaccagtgttgctacgtcgtaacgcgtaagtcggaggcggaacagactactttcggtaccccgtgtttcacttatttttactttatattttatggtgacacttgctgatatttgtgaatttgctcgcttgccgttgaacatagccttgtattatttagtagcattttacaacacaagccagctttcagttgaactcattgattttgctgtttacctcaattacatacacaaacacaaca

SEQ ID NO: 23359 - DNA, 616 bp, synthetic construct
  source 1..616: mol_type = other DNA
tatcccccacccttgcaacttagaaggaatcaaactacccgaccaataggcgcgcggcatccagccgcgttacggtcaagcacttctgtttccccggtccgcaagggtcgttatccgcccgctccactacgaaaagcctagtagccaaccaaacgactgcgaagttgcgttcagccacaaccccagtggtagctctggaagatggggctcgcaatacccccgtggtgacacggttgcttgcccgcgcgtgcttccgggttcggtcatgtaccgttcactttaatgtcgtgtaattggtcaagagcctattgtgctggagcggttttcctccggggccgtgaatgctgctaatcccaacctctgagcgtgtgcgcacaaaccagtgttgctacgtcgtaacgcgtaagtcggaggcggaacagactactttcggtaccccgtgtttcacttatttttactttatattttatggtgacacttgctgatatttgtgaatttgctcgcttgccgttgaacatagccttgtattatttagtagcattttacaacacaagccagctttcagttgaactcattgattttgctgtttacctcaattacatacacaaacacaaca

SEQ ID NO: 23360 - DNA, 566 bp, synthetic construct
  source 1..566: mol_type = other DNA
cgcgcggcatccagccgcgttacggtcaagcacttctgtttccccggtccgcaagggtcgttatccgcccgctccactacgaaaagcctagtagccaaccaaacgactgcgaagttgcgttcagccacaaccccagtggtagctctggaagatggggctcgcaatacccccgtggtgacacggttgcttgcccgcgcgtgcttccgggttcggtcatgtaccgttcactttaatgtcgtgtaattggtcaagagcctattgtgctggagcggttttcctccggggccgtgaatgctgctaatcccaacctctgagcgtgtgcgcacaaaccagtgttgctacgtcgtaacgcgtaagtcggaggcggaacagactactttcggtaccccgtgtttcacttatttttactttatattttatggtgacacttgctgatatttgtgaatttgctcgcttgccgttgaacatagccttgtattatttagtagcattttacaacacaagccagctttcagttgaactcattgattttgctgtttacctcaattacatacacaaacacaaca

SEQ ID NO: 23361 - DNA, 516 bp, synthetic construct
  source 1..516: mol_type = other DNA
gcaagggtcgttatccgcccgctccactacgaaaagcctagtagccaaccaaacgactgcgaagttgcgttcagccacaaccccagtggtagctctggaagatggggctcgcaatacccccgtggtgacacggttgcttgcccgcgcgtgcttccgggttcggtcatgtaccgttcactttaatgtcgtgtaattggtcaagagcctattgtgctggagcggttttcctccggggccgtgaatgctgctaatcccaacctctgagcgtgtgcgcacaaaccagtgttgctacgtcgtaacgcgtaagtcggaggcggaacagactactttcggtaccccgtgtttcacttatttttactttatattttatggtgacacttgctgatatttgtgaatttgctcgcttgccgttgaacatagccttgtattatttagtagcattttacaacacaagccagctttcagttgaactcattgattttgctgtttacctcaattacatacacaaacacaaca

SEQ ID NO: 23362 - DNA, 766 bp, synthetic construct
  source 1..766: mol_type = other DNA
cactctggtacgctagtacctttgtacgcctgttttccccacccttaaataaattaagattaccactaccgaggggagtagtccgactccgctccggcacagccgcaccagtgcactggtacgctagtaccttttcacggggtagtcggtatccccccccgtaacttagaagcatgtaacaaaccgaccaataggtgcgcggcagccagctgcgttgcggtcaagcacttctgtctccccggtccgcaaggatcgttacccgcccactccactacgaggagcctagtaactggccaagtgattgcggagttgcgttcagccacaaccccagtggtagctctggaagatggggctcgcacatcccccgtggtaacacggttgcttgcccgcgtgtgcttccgggttcagtctccgactgttcacttcaacatcacgcaaccagccaagagccgattgtgctggagtggtcttcctccggggccgtgaatgctgctaatcctaacctccgagcgtgtgcgcacaatccagtgttgctacgtcgtaacgcgtaagttggaggcggaacagactactttcggcaccccgtgtttcctttattttattcttattttatggtgacaattgcagagatttgtgatattgcgactttaccgttaaacatagcactgcattacctggttgcattccacaaaacttcagagattcctagttcctacattgacctacttgtttatttgaatcttaaatacaaacttgagcaagtgaa

SEQ ID NO: 23363 - DNA, 716 bp, synthetic construct
  source 1..716: mol_type = other DNA
aaattaagattaccactaccgaggggagtagtccgactccgctccggcacagccgcaccagtgcactggtacgctagtaccttttcacggggtagtcggtatccccccccgtaacttagaagcatgtaacaaaccgaccaataggtgcgcggcagccagctgcgttgcggtcaagcacttctgtctccccggtccgcaaggatcgttacccgcccactccactacgaggagcctagtaactggccaagtgattgcggagttgcgttcagccacaaccccagtggtagctctggaagatggggctcgcacatcccccgtggtaacacggttgcttgcccgcgtgtgcttccgggttcagtctccgactgttcacttcaacatcacgcaaccagccaagagccgattgtgctggagtggtcttcctccggggccgtgaatgctgctaatcctaacctccgagcgtgtgcgcacaatccagtgttgctacgtcgtaacgcgtaagttggaggcggaacagactactttcggcaccccgtgtttcctttattttattcttattttatggtgacaattgcagagatttgtgatattgcgactttaccgttaaacatagcactgcattacctggttgcattccacaaaacttcagagattcctagttcctacattgacctacttgtttatttgaatcttaaatacaaacttgagcaagtgaa

SEQ ID NO: 23364 - DNA, 666 bp, synthetic construct
  source 1..666: mol_type = other DNA
agccgcaccagtgcactggtacgctagtaccttttcacggggtagtcggtatccccccccgtaacttagaagcatgtaacaaaccgaccaataggtgcgcggcagccagctgcgttgcggtcaagcacttctgtctccccggtccgcaaggatcgttacccgcccactccactacgaggagcctagtaactggccaagtgattgcggagttgcgttcagccacaaccccagtggtagctctggaagatggggctcgcacatcccccgtggtaacacggttgcttgcccgcgtgtgcttccgggttcagtctccgactgttcacttcaacatcacgcaaccagccaagagccgattgtgctggagtggtcttcctccggggccgtgaatgctgctaatcctaacctccgagcgtgtgcgcacaatccagtgttgctacgtcgtaacgcgtaagttggaggcggaacagactactttcggcaccccgtgtttcctttattttattcttattttatggtgacaattgcagagatttgtgatattgcgactttaccgttaaacatagcactgcattacctggttgcattccacaaaacttcagagattcctagttcctacattgacctacttgtttatttgaatcttaaatacaaacttgagcaagtgaa

SEQ ID NO: 23365 - DNA, 616 bp, synthetic construct
  source 1..616: mol_type = other DNA
atccccccccgtaacttagaagcatgtaacaaaccgaccaataggtgcgcggcagccagctgcgttgcggtcaagcacttctgtctccccggtccgcaaggatcgttacccgcccactccactacgaggagcctagtaactggccaagtgattgcggagttgcgttcagccacaaccccagtggtagctctggaagatggggctcgcacatcccccgtggtaacacggttgcttgcccgcgtgtgcttccgggttcagtctccgactgttcacttcaacatcacgcaaccagccaagagccgattgtgctggagtggtcttcctccggggccgtgaatgctgctaatcctaacctccgagcgtgtgcgcacaatccagtgttgctacgtcgtaacgcgtaagttggaggcggaacagactactttcggcaccccgtgtttcctttattttattcttattttatggtgacaattgcagagatttgtgatattgcgactttaccgttaaacatagcactgcattacctggttgcattccacaaaacttcagagattcctagttcctacattgacctacttgtttatttgaatcttaaatacaaacttgagcaagtgaa

SEQ ID NO: 23366 - DNA, 566 bp, synthetic construct
  source 1..566: mol_type = other DNA
ggcagccagctgcgttgcggtcaagcacttctgtctccccggtccgcaaggatcgttacccgcccactccactacgaggagcctagtaactggccaagtgattgcggagttgcgttcagccacaaccccagtggtagctctggaagatggggctcgcacatcccccgtggtaacacggttgcttgcccgcgtgtgcttccgggttcagtctccgactgttcacttcaacatcacgcaaccagccaagagccgattgtgctggagtggtcttcctccggggccgtgaatgctgctaatcctaacctccgagcgtgtgcgcacaatccagtgttgctacgtcgtaacgcgtaagttggaggcggaacagactactttcggcaccccgtgtttcctttattttattcttattttatggtgacaattgcagagatttgtgatattgcgactttaccgttaaacatagcactgcattacctggttgcattccacaaaacttcagagattcctagttcctacattgacctacttgtttatttgaatcttaaatacaaacttgagcaagtgaa

SEQ ID NO: 23367 - DNA, 516 bp, synthetic construct
  source 1..516: mol_type = other DNA
gatcgttacccgcccactccactacgaggagcctagtaactggccaagtgattgcggagttgcgttcagccacaaccccagtggtagctctggaagatggggctcgcacatcccccgtggtaacacggttgcttgcccgcgtgtgcttccgggttcagtctccgactgttcacttcaacatcacgcaaccagccaagagccgattgtgctggagtggtcttcctccggggccgtgaatgctgctaatcctaacctccgagcgtgtgcgcacaatccagtgttgctacgtcgtaacgcgtaagttggaggcggaacagactactttcggcaccccgtgtttcctttattttattcttattttatggtgacaattgcagagatttgtgatattgcgactttaccgttaaacatagcactgcattacctggttgcattccacaaaacttcagagattcctagttcctacattgacctacttgtttatttgaatcttaaatacaaacttgagcaagtgaa

SEQ ID NO: 23368 - DNA, 766 bp, synthetic construct
  source 1..766: mol_type = other DNA
tactctggtacgctagtacctttgtacgcctgttttcccctcccttaaacaaattaagattgccactactgaggggagtagtccgactccgctccgacactgtcgcaccagtactccggtacgcttagtaccctagtacggagtaggtggcatccccaccccgaaacttagaagtatgcaaacaaaccgaccaataggcgcgcggtatccagccgtgtgaaggtcaagcacttctgtctccccggtccgtaaggatcgttacccgcccgacctactacgaaaagcctagtagttggccaagcgagcacgaggttgcactcaaccacaaccccagtggtagctctggaagatggggctcgcagttcccccgtggcaacacggttgcttgcccgcgtgcgcttccgggttcggacttgtgccgttcacctcaaactcgcgtaaccagcgaagagccgattgtgctaggacggttttcctccggggccgtgaatgctgctaatcccaacctccgagcgtgtgcgcacattccagtgttgctacgtcgtaatgcgtaagtcggaggcggaacagactactttcggtaccccgtgtttcctcttattttatttacattttatggtgacactgactgacattcgtgagctagcccgcttgcctctcaatattgcactttattatttggtagcattttacaatactctcgaacttacccttgagcttgttgatttcatcgtttacctaaatcggcttgacaaaggatacaata

SEQ ID NO: 23369 - DNA, 716 bp, synthetic construct
  source 1..716: mol_type = other DNA
aaattaagattgccactactgaggggagtagtccgactccgctccgacactgtcgcaccagtactccggtacgcttagtaccctagtacggagtaggtggcatccccaccccgaaacttagaagtatgcaaacaaaccgaccaataggcgcgcggtatccagccgtgtgaaggtcaagcacttctgtctccccggtccgtaaggatcgttacccgcccgacctactacgaaaagcctagtagttggccaagcgagcacgaggttgcactcaaccacaaccccagtggtagctctggaagatggggctcgcagttcccccgtggcaacacggttgcttgcccgcgtgcgcttccgggttcggacttgtgccgttcacctcaaactcgcgtaaccagcgaagagccgattgtgctaggacggttttcctccggggccgtgaatgctgctaatcccaacctccgagcgtgtgcgcacattccagtgttgctacgtcgtaatgcgtaagtcggaggcggaacagactactttcggtaccccgtgtttcctcttattttatttacattttatggtgacactgactgacattcgtgagctagcccgcttgcctctcaatattgcactttattatttggtagcattttacaatactctcgaacttacccttgagcttgttgatttcatcgtttacctaaatcggcttgacaaaggatacaata

SEQ ID NO: 23370 - DNA, 666 bp, synthetic construct
  source 1..666: mol_type = other DNA
tgtcgcaccagtactccggtacgcttagtaccctagtacggagtaggtggcatccccaccccgaaacttagaagtatgcaaacaaaccgaccaataggcgcgcggtatccagccgtgtgaaggtcaagcacttctgtctccccggtccgtaaggatcgttacccgcccgacctactacgaaaagcctagtagttggccaagcgagcacgaggttgcactcaaccacaaccccagtggtagctctggaagatggggctcgcagttcccccgtggcaacacggttgcttgcccgcgtgcgcttccgggttcggacttgtgccgttcacctcaaactcgcgtaaccagcgaagagccgattgtgctaggacggttttcctccggggccgtgaatgctgctaatcccaacctccgagcgtgtgcgcacattccagtgttgctacgtcgtaatgcgtaagtcggaggcggaacagactactttcggtaccccgtgtttcctcttattttatttacattttatggtgacactgactgacattcgtgagctagcccgcttgcctctcaatattgcactttattatttggtagcattttacaatactctcgaacttacccttgagcttgttgatttcatcgtttacctaaatcggcttgacaaaggatacaata

SEQ ID NO: 23371 - DNA, 616 bp, synthetic construct
  source 1..616: mol_type = other DNA
catccccaccccgaaacttagaagtatgcaaacaaaccgaccaataggcgcgcggtatccagccgtgtgaaggtcaagcacttctgtctccccggtccgtaaggatcgttacccgcccgacctactacgaaaagcctagtagttggccaagcgagcacgaggttgcactcaaccacaaccccagtggtagctctggaagatggggctcgcagttcccccgtggcaacacggttgcttgcccgcgtgcgcttccgggttcggacttgtgccgttcacctcaaactcgcgtaaccagcgaagagccgattgtgctaggacggttttcctccggggccgtgaatgctgctaatcccaacctccgagcgtgtgcgcacattccagtgttgctacgtcgtaatgcgtaagtcggaggcggaacagactactttcggtaccccgtgtttcctcttattttatttacattttatggtgacactgactgacattcgtgagctagcccgcttgcctctcaatattgcactttattatttggtagcattttacaatactctcgaacttacccttgagcttgttgatttcatcgtttacctaaatcggcttgacaaaggatacaata

SEQ ID NO: 23372 - DNA, 566 bp, synthetic construct
  source 1..566: mol_type = other DNA
cgcggtatccagccgtgtgaaggtcaagcacttctgtctccccggtccgtaaggatcgttacccgcccgacctactacgaaaagcctagtagttggccaagcgagcacgaggttgcactcaaccacaaccccagtggtagctctggaagatggggctcgcagttcccccgtggcaacacggttgcttgcccgcgtgcgcttccgggttcggacttgtgccgttcacctcaaactcgcgtaaccagcgaagagccgattgtgctaggacggttttcctccggggccgtgaatgctgctaatcccaacctccgagcgtgtgcgcacattccagtgttgctacgtcgtaatgcgtaagtcggaggcggaacagactactttcggtaccccgtgtttcctcttattttatttacattttatggtgacactgactgacattcgtgagctagcccgcttgcctctcaatattgcactttattatttggtagcattttacaatactctcgaacttacccttgagcttgttgatttcatcgtttacctaaatcggcttgacaaaggatacaata

SEQ ID NO: 23373 - DNA, 516 bp, synthetic construct
  source 1..516: mol_type = other DNA
aaggatcgttacccgcccgacctactacgaaaagcctagtagttggccaagcgagcacgaggttgcactcaaccacaaccccagtggtagctctggaagatggggctcgcagttcccccgtggcaacacggttgcttgcccgcgtgcgcttccgggttcggacttgtgccgttcacctcaaactcgcgtaaccagcgaagagccgattgtgctaggacggttttcctccggggccgtgaatgctgctaatcccaacctccgagcgtgtgcgcacattccagtgttgctacgtcgtaatgcgtaagtcggaggcggaacagactactttcggtaccccgtgtttcctcttattttatttacattttatggtgacactgactgacattcgtgagctagcccgcttgcctctcaatattgcactttattatttggtagcattttacaatactctcgaacttacccttgagcttgttgatttcatcgtttacctaaatcggcttgacaaaggatacaata

SEQ ID NO: 23374 - DNA, 767 bp, synthetic construct
  source 1..767: mol_type = other DNA
tactctggtacgttagtacctttgtacgcctgttttcccctcccttaaataaattaagattgccactactgaggggagtagtccgactccgctccggcactgccgcaccagtactccggtacgcctagtaccctagtacggagtagatggtatcccccccccgaaacttagaagtaatgagtctaaccgaccaataggcgcgcggcatccagccgtgttacggtcaagcacttctgtttccccggtccgcaaggatcgttacccgcccgacccactacgagaagcctattaactggccaagcgtcagtgaagttgcactcagccacaaccccagtggtagctctggaagatggggctcgcatctcccccgtggtaacacggttgcttgcccgcgcgtgcttccgggttcagcctcgcgctgttcacttcaatgacacgtaaccagccaagagccgattgtgctgggacggttttcctccggggccgtgaatgctgctaatcctaacctccgagcgtgtgcgcacaatccagtgttgctacgtcgtaacgcgtaagttggaggcggaacagactactttcggtaccccgtgtttcccttaaatttttccttaaatatatggtgacattgactgacatttgtgagtttgctcgcttgccaatcaacattgcactctattacctaatagcatttcacaatacttgtgaactcacccttgaacttgtcaatttctccgcctatttgaactacttaaatagaaagtataaca

SEQ ID NO: 23375 - DNA, 717 bp, synthetic construct
  source 1..717: mol_type = other DNA
aaattaagattgccactactgaggggagtagtccgactccgctccggcactgccgcaccagtactccggtacgcctagtaccctagtacggagtagatggtatcccccccccgaaacttagaagtaatgagtctaaccgaccaataggcgcgcggcatccagccgtgttacggtcaagcacttctgtttccccggtccgcaaggatcgttacccgcccgacccactacgagaagcctattaactggccaagcgtcagtgaagttgcactcagccacaaccccagtggtagctctggaagatggggctcgcatctcccccgtggtaacacggttgcttgcccgcgcgtgcttccgggttcagcctcgcgctgttcacttcaatgacacgtaaccagccaagagccgattgtgctgggacggttttcctccggggccgtgaatgctgctaatcctaacctccgagcgtgtgcgcacaatccagtgttgctacgtcgtaacgcgtaagttggaggcggaacagactactttcggtaccccgtgtttcccttaaatttttccttaaatatatggtgacattgactgacatttgtgagtttgctcgcttgccaatcaacattgcactctattacctaatagcatttcacaatacttgtgaactcacccttgaacttgtcaatttctccgcctatttgaactacttaaatagaaagtataaca

SEQ ID NO: 23376 - DNA, 667 bp, synthetic construct
  source 1..667: mol_type = other DNA
tgccgcaccagtactccggtacgcctagtaccctagtacggagtagatggtatcccccccccgaaacttagaagtaatgagtctaaccgaccaataggcgcgcggcatccagccgtgttacggtcaagcacttctgtttccccggtccgcaaggatcgttacccgcccgacccactacgagaagcctattaactggccaagcgtcagtgaagttgcactcagccacaaccccagtggtagctctggaagatggggctcgcatctcccccgtggtaacacggttgcttgcccgcgcgtgcttccgggttcagcctcgcgctgttcacttcaatgacacgtaaccagccaagagccgattgtgctgggacggttttcctccggggccgtgaatgctgctaatcctaacctccgagcgtgtgcgcacaatccagtgttgctacgtcgtaacgcgtaagttggaggcggaacagactactttcggtaccccgtgtttcccttaaatttttccttaaatatatggtgacattgactgacatttgtgagtttgctcgcttgccaatcaacattgcactctattacctaatagcatttcacaatacttgtgaactcacccttgaacttgtcaatttctccgcctatttgaactacttaaatagaaagtataaca

SEQ ID NO: 23377 - DNA, 617 bp, synthetic construct
  source 1..617: mol_type = other DNA
tatcccccccccgaaacttagaagtaatgagtctaaccgaccaataggcgcgcggcatccagccgtgttacggtcaagcacttctgtttccccggtccgcaaggatcgttacccgcccgacccactacgagaagcctattaactggccaagcgtcagtgaagttgcactcagccacaaccccagtggtagctctggaagatggggctcgcatctcccccgtggtaacacggttgcttgcccgcgcgtgcttccgggttcagcctcgcgctgttcacttcaatgacacgtaaccagccaagagccgattgtgctgggacggttttcctccggggccgtgaatgctgctaatcctaacctccgagcgtgtgcgcacaatccagtgttgctacgtcgtaacgcgtaagttggaggcggaacagactactttcggtaccccgtgtttcccttaaatttttccttaaatatatggtgacattgactgacatttgtgagtttgctcgcttgccaatcaacattgcactctattacctaatagcatttcacaatacttgtgaactcacccttgaacttgtcaatttctccgcctatttgaactacttaaatagaaagtataaca

SEQ ID NO: 23378 - DNA, 567 bp, synthetic construct
  source 1..567: mol_type = other DNA
cgcggcatccagccgtgttacggtcaagcacttctgtttccccggtccgcaaggatcgttacccgcccgacccactacgagaagcctattaactggccaagcgtcagtgaagttgcactcagccacaaccccagtggtagctctggaagatggggctcgcatctcccccgtggtaacacggttgcttgcccgcgcgtgcttccgggttcagcctcgcgctgttcacttcaatgacacgtaaccagccaagagccgattgtgctgggacggttttcctccggggccgtgaatgctgctaatcctaacctccgagcgtgtgcgcacaatccagtgttgctacgtcgtaacgcgtaagttggaggcggaacagactactttcggtaccccgtgtttcccttaaatttttccttaaatatatggtgacattgactgacatttgtgagtttgctcgcttgccaatcaacattgcactctattacctaatagcatttcacaatacttgtgaactcacccttgaacttgtcaatttctccgcctatttgaactacttaaatagaaagtataaca

SEQ ID NO: 23379 - DNA, 517 bp, synthetic construct
  source 1..517: mol_type = other DNA
aaggatcgttacccgcccgacccactacgagaagcctattaactggccaagcgtcagtgaagttgcactcagccacaaccccagtggtagctctggaagatggggctcgcatctcccccgtggtaacacggttgcttgcccgcgcgtgcttccgggttcagcctcgcgctgttcacttcaatgacacgtaaccagccaagagccgattgtgctgggacggttttcctccggggccgtgaatgctgctaatcctaacctccgagcgtgtgcgcacaatccagtgttgctacgtcgtaacgcgtaagttggaggcggaacagactactttcggtaccccgtgtttcccttaaatttttccttaaatatatggtgacattgactgacatttgtgagtttgctcgcttgccaatcaacattgcactctattacctaatagcatttcacaatacttgtgaactcacccttgaacttgtcaatttctccgcctatttgaactacttaaatagaaagtataaca

SEQ ID NO: 23380 - DNA, 768 bp, synthetic construct
  source 1..768: mol_type = other DNA
gtactctggtacgttagtaccttgtacgcctgttttcccctccttaaacaaattaagattaccactactgaggggagtagtccgactccgctccagcactgctgcaccagtgaattggtatgattagtacctcttcacggagtagatggtattcctaccccgcaacttagaagtttattaacaaaccgaccaataggtgcacagtatccagctgtgtaacggtcaagcacttctgtttccccggtccaccaggatcgttacccgcccgacccactacgagaagcctagtaactagccaagtgactgcgaagttgcgctcaaccacaaccccagtggtagctctggaagatggggctcgcacctcccccgtggtaacacggttgcctgcccgcgtgtgcttccgggttcggccttgtgccgttcacttctacgtcatgtaactagccaagagcctattgtgctgggacggttttcctccgggaccgtgaatgctgctaatcctaacctccgagcgtgtgcgcacaatccagtgttgctacgtcgtaacgcgtaagttggaggcggaacagactactttcggtaccccgtgtttcctcttttattatattatttaatggtgacaattgcagaaatttgtgatttagcgactttaccattgcacatagcattatattgtttgattgctttccacaaaacatctgatatacccaactcttatatcgatctacttatctttctttgcttgaagaataaattaaagaaagcacg

SEQ ID NO: 23381 - DNA, 718 bp, synthetic construct
  source 1..718: mol_type = other DNA
aattaagattaccactactgaggggagtagtccgactccgctccagcactgctgcaccagtgaattggtatgattagtacctcttcacggagtagatggtattcctaccccgcaacttagaagtttattaacaaaccgaccaataggtgcacagtatccagctgtgtaacggtcaagcacttctgtttccccggtccaccaggatcgttacccgcccgacccactacgagaagcctagtaactagccaagtgactgcgaagttgcgctcaaccacaaccccagtggtagctctggaagatggggctcgcacctcccccgtggtaacacggttgcctgcccgcgtgtgcttccgggttcggccttgtgccgttcacttctacgtcatgtaactagccaagagcctattgtgctgggacggttttcctccgggaccgtgaatgctgctaatcctaacctccgagcgtgtgcgcacaatccagtgttgctacgtcgtaacgcgtaagttggaggcggaacagactactttcggtaccccgtgtttcctcttttattatattatttaatggtgacaattgcagaaatttgtgatttagcgactttaccattgcacatagcattatattgtttgattgctttccacaaaacatctgatatacccaactcttatatcgatctacttatctttctttgcttgaagaataaattaaagaaagcacg

SEQ ID NO: 23382 - DNA, 668 bp, synthetic construct
  source 1..668: mol_type = other DNA
gctgcaccagtgaattggtatgattagtacctcttcacggagtagatggtattcctaccccgcaacttagaagtttattaacaaaccgaccaataggtgcacagtatccagctgtgtaacggtcaagcacttctgtttccccggtccaccaggatcgttacccgcccgacccactacgagaagcctagtaactagccaagtgactgcgaagttgcgctcaaccacaaccccagtggtagctctggaagatggggctcgcacctcccccgtggtaacacggttgcctgcccgcgtgtgcttccgggttcggccttgtgccgttcacttctacgtcatgtaactagccaagagcctattgtgctgggacggttttcctccgggaccgtgaatgctgctaatcctaacctccgagcgtgtgcgcacaatccagtgttgctacgtcgtaacgcgtaagttggaggcggaacagactactttcggtaccccgtgtttcctcttttattatattatttaatggtgacaattgcagaaatttgtgatttagcgactttaccattgcacatagcattatattgtttgattgctttccacaaaacatctgatatacccaactcttatatcgatctacttatctttctttgcttgaagaataaattaaagaaagcacg

SEQ ID NO: 23383 - DNA, 618 bp, synthetic construct
  source 1..618: mol_type = other DNA
attcctaccccgcaacttagaagtttattaacaaaccgaccaataggtgcacagtatccagctgtgtaacggtcaagcacttctgtttccccggtccaccaggatcgttacccgcccgacccactacgagaagcctagtaactagccaagtgactgcgaagttgcgctcaaccacaaccccagtggtagctctggaagatggggctcgcacctcccccgtggtaacacggttgcctgcccgcgtgtgcttccgggttcggccttgtgccgttcacttctacgtcatgtaactagccaagagcctattgtgctgggacggttttcctccgggaccgtgaatgctgctaatcctaacctccgagcgtgtgcgcacaatccagtgttgctacgtcgtaacgcgtaagttggaggcggaacagactactttcggtaccccgtgtttcctcttttattatattatttaatggtgacaattgcagaaatttgtgatttagcgactttaccattgcacatagcattatattgtttgattgctttccacaaaacatctgatatacccaactcttatatcgatctacttatctttctttgcttgaagaataaattaaagaaagcacg

SEQ ID NO: 23384 - DNA, 568 bp, synthetic construct
  source 1..568: mol_type = other DNA
acagtatccagctgtgtaacggtcaagcacttctgtttccccggtccaccaggatcgttacccgcccgacccactacgagaagcctagtaactagccaagtgactgcgaagttgcgctcaaccacaaccccagtggtagctctggaagatggggctcgcacctcccccgtggtaacacggttgcctgcccgcgtgtgcttccgggttcggccttgtgccgttcacttctacgtcatgtaactagccaagagcctattgtgctgggacggttttcctccgggaccgtgaatgctgctaatcctaacctccgagcgtgtgcgcacaatccagtgttgctacgtcgtaacgcgtaagttggaggcggaacagactactttcggtaccccgtgtttcctcttttattatattatttaatggtgacaattgcagaaatttgtgatttagcgactttaccattgcacatagcattatattgtttgattgctttccacaaaacatctgatatacccaactcttatatcgatctacttatctttctttgcttgaagaataaattaaagaaagcacg

SEQ ID NO: 23385 - DNA, 518 bp, synthetic construct
  source 1..518: mol_type = other DNA
aggatcgttacccgcccgacccactacgagaagcctagtaactagccaagtgactgcgaagttgcgctcaaccacaaccccagtggtagctctggaagatggggctcgcacctcccccgtggtaacacggttgcctgcccgcgtgtgcttccgggttcggccttgtgccgttcacttctacgtcatgtaactagccaagagcctattgtgctgggacggttttcctccgggaccgtgaatgctgctaatcctaacctccgagcgtgtgcgcacaatccagtgttgctacgtcgtaacgcgtaagttggaggcggaacagactactttcggtaccccgtgtttcctcttttattatattatttaatggtgacaattgcagaaatttgtgatttagcgactttaccattgcacatagcattatattgtttgattgctttccacaaaacatctgatatacccaactcttatatcgatctacttatctttctttgcttgaagaataaattaaagaaagcacg

SEQ ID NO: 23386 - DNA, 768 bp, synthetic construct
  source 1..768: mol_type = other DNA
tactctggttcgttagaacctttgtacgcctgttttcccctccttaaacaaattaagatctctgccaatgtggggagtagtccgactccgcaccgatacgtcgcaccagtagaccggttcgcttaggacccttctacggattggtatgagttccccaccccgtaacttagaagtactagcaaaaccgaccaataggagcgtggcacccagctgcgttaaggtcaagcacttctgtctccccggccagaaatggtcgtcacccgccctctctactacgagaagcctattaaccattgaaggcgatgaggagttgcgctccaccacaaccccagtggtagctctgagagatggggctcgcagtcacccccgtggtaacacggttgcttgcccgcgtgtgctctcgggttcggccacttggccgttcactccaactcgttgtaagtggccaagagcctattgtgctagagaggttttcctccggagccgtgaatgctgctaatcccaacctccgagcgtgtgcgcacaatccagtgttgctacgtcgtaacgcgcaagttggaggcggaacagactactttcggtactccgtgtttccttattattttatacaacaatttatggtgacattgactgatactattgagttcgcccgcttgccattgaatattgccttgtattaccttatagcatttcaaaaagccacagatctcaccctcgagctcattcactttgcagtttgtttgaatcgcatacacaagacatttgaac

SEQ ID NO: 23387 - DNA, 718 bp, synthetic construct
  source 1..718: mol_type = other DNA
aattaagatctctgccaatgtggggagtagtccgactccgcaccgatacgtcgcaccagtagaccggttcgcttaggacccttctacggattggtatgagttccccaccccgtaacttagaagtactagcaaaaccgaccaataggagcgtggcacccagctgcgttaaggtcaagcacttctgtctccccggccagaaatggtcgtcacccgccctctctactacgagaagcctattaaccattgaaggcgatgaggagttgcgctccaccacaaccccagtggtagctctgagagatggggctcgcagtcacccccgtggtaacacggttgcttgcccgcgtgtgctctcgggttcggccacttggccgttcactccaactcgttgtaagtggccaagagcctattgtgctagagaggttttcctccggagccgtgaatgctgctaatcccaacctccgagcgtgtgcgcacaatccagtgttgctacgtcgtaacgcgcaagttggaggcggaacagactactttcggtactccgtgtttccttattattttatacaacaatttatggtgacattgactgatactattgagttcgcccgcttgccattgaatattgccttgtattaccttatagcatttcaaaaagccacagatctcaccctcgagctcattcactttgcagtttgtttgaatcgcatacacaagacatttgaac

SEQ ID NO: 23388 - DNA, 668 bp, synthetic construct
  source 1..668: mol_type = other DNA
tcgcaccagtagaccggttcgcttaggacccttctacggattggtatgagttccccaccccgtaacttagaagtactagcaaaaccgaccaataggagcgtggcacccagctgcgttaaggtcaagcacttctgtctccccggccagaaatggtcgtcacccgccctctctactacgagaagcctattaaccattgaaggcgatgaggagttgcgctccaccacaaccccagtggtagctctgagagatggggctcgcagtcacccccgtggtaacacggttgcttgcccgcgtgtgctctcgggttcggccacttggccgttcactccaactcgttgtaagtggccaagagcctattgtgctagagaggttttcctccggagccgtgaatgctgctaatcccaacctccgagcgtgtgcgcacaatccagtgttgctacgtcgtaacgcgcaagttggaggcggaacagactactttcggtactccgtgtttccttattattttatacaacaatttatggtgacattgactgatactattgagttcgcccgcttgccattgaatattgccttgtattaccttatagcatttcaaaaagccacagatctcaccctcgagctcattcactttgcagtttgtttgaatcgcatacacaagacatttgaac

SEQ ID NO: 23389 - DNA, 618 bp, synthetic construct
  source 1..618: mol_type = other DNA
ttccccaccccgtaacttagaagtactagcaaaaccgaccaataggagcgtggcacccagctgcgttaaggtcaagcacttctgtctccccggccagaaatggtcgtcacccgccctctctactacgagaagcctattaaccattgaaggcgatgaggagttgcgctccaccacaaccccagtggtagctctgagagatggggctcgcagtcacccccgtggtaacacggttgcttgcccgcgtgtgctctcgggttcggccacttggccgttcactccaactcgttgtaagtggccaagagcctattgtgctagagaggttttcctccggagccgtgaatgctgctaatcccaacctccgagcgtgtgcgcacaatccagtgttgctacgtcgtaacgcgcaagttggaggcggaacagactactttcggtactccgtgtttccttattattttatacaacaatttatggtgacattgactgatactattgagttcgcccgcttgccattgaatattgccttgtattaccttatagcatttcaaaaagccacagatctcaccctcgagctcattcactttgcagtttgtttgaatcgcatacacaagacatttgaac

SEQ ID NO: 23390 - DNA, 568 bp, synthetic construct
  source 1..568: mol_type = other DNA
tggcacccagctgcgttaaggtcaagcacttctgtctccccggccagaaatggtcgtcacccgccctctctactacgagaagcctattaaccattgaaggcgatgaggagttgcgctccaccacaaccccagtggtagctctgagagatggggctcgcagtcacccccgtggtaacacggttgcttgcccgcgtgtgctctcgggttcggccacttggccgttcactccaactcgttgtaagtggccaagagcctattgtgctagagaggttttcctccggagccgtgaatgctgctaatcccaacctccgagcgtgtgcgcacaatccagtgttgctacgtcgtaacgcgcaagttggaggcggaacagactactttcggtactccgtgtttccttattattttatacaacaatttatggtgacattgactgatactattgagttcgcccgcttgccattgaatattgccttgtattaccttatagcatttcaaaaagccacagatctcaccctcgagctcattcactttgcagtttgtttgaatcgcatacacaagacatttgaac

SEQ ID NO: 23391 - DNA, 518 bp, synthetic construct
  source 1..518: mol_type = other DNA
tggtcgtcacccgccctctctactacgagaagcctattaaccattgaaggcgatgaggagttgcgctccaccacaaccccagtggtagctctgagagatggggctcgcagtcacccccgtggtaacacggttgcttgcccgcgtgtgctctcgggttcggccacttggccgttcactccaactcgttgtaagtggccaagagcctattgtgctagagaggttttcctccggagccgtgaatgctgctaatcccaacctccgagcgtgtgcgcacaatccagtgttgctacgtcgtaacgcgcaagttggaggcggaacagactactttcggtactccgtgtttccttattattttatacaacaatttatggtgacattgactgatactattgagttcgcccgcttgccattgaatattgccttgtattaccttatagcatttcaaaaagccacagatctcaccctcgagctcattcactttgcagtttgtttgaatcgcatacacaagacatttgaac

SEQ ID NO: 23392 - DNA, 768 bp, synthetic construct
  source 1..768: mol_type = other DNA
tactctggtttgcttagaacctttgtacgcctgttttcccccccctttaaataaattaagatctctgccaatgtggggagtagtccgactccgcaccgatacgtcgcaccagcagaccggttcgcctagaacccttctgcggattggtatgagttcctccccgaaacttagaagcaccgcaccaaccgaccaataggagcgtggcacccagccatgttacggtcaagcacttctgtttccccggtcagaaatgatcgttatccgccctctcccctacgagaagcctattaaccaccgaacgtggtgaagagttgcgctcagccacaatcccagtggtagctctgagagatggggctcgcatttcccccgtggtaacacggttgcttgcccgcgcgtgctctcgggttcagtcttctgactgttcactctgaaccacggtaagtggccaagagcctattgtgctggagaggttctcctccggagccgtgaatgctgctaatcccaacctctgagcgtgtgcgcacaatccagtgttgctacgtcgtaacgcgtaagtcggaggcggaacagactactttcggtactccgtgtttccttattatctattaatcaatttatggtgacactgactgatattgttgagtttgctcgattgcccttgaacattgccttatactatcttattgcattttaatagagccacagagcttactgttgagcttattgactttgctgtttacttgaatcaaatatacgcattagataaac

SEQ ID NO: 23393 - DNA, 718 bp, synthetic construct
  source 1..718: mol_type = other DNA
ataaattaagatctctgccaatgtggggagtagtccgactccgcaccgatacgtcgcaccagcagaccggttcgcctagaacccttctgcggattggtatgagttcctccccgaaacttagaagcaccgcaccaaccgaccaataggagcgtggcacccagccatgttacggtcaagcacttctgtttccccggtcagaaatgatcgttatccgccctctcccctacgagaagcctattaaccaccgaacgtggtgaagagttgcgctcagccacaatcccagtggtagctctgagagatggggctcgcatttcccccgtggtaacacggttgcttgcccgcgcgtgctctcgggttcagtcttctgactgttcactctgaaccacggtaagtggccaagagcctattgtgctggagaggttctcctccggagccgtgaatgctgctaatcccaacctctgagcgtgtgcgcacaatccagtgttgctacgtcgtaacgcgtaagtcggaggcggaacagactactttcggtactccgtgtttccttattatctattaatcaatttatggtgacactgactgatattgttgagtttgctcgattgcccttgaacattgccttatactatcttattgcattttaatagagccacagagcttactgttgagcttattgactttgctgtttacttgaatcaaatatacgcattagataaac

SEQ ID NO: 23394 - DNA, 668 bp, synthetic construct
  source 1..668: mol_type = other DNA
acgtcgcaccagcagaccggttcgcctagaacccttctgcggattggtatgagttcctccccgaaacttagaagcaccgcaccaaccgaccaataggagcgtggcacccagccatgttacggtcaagcacttctgtttccccggtcagaaatgatcgttatccgccctctcccctacgagaagcctattaaccaccgaacgtggtgaagagttgcgctcagccacaatcccagtggtagctctgagagatggggctcgcatttcccccgtggtaacacggttgcttgcccgcgcgtgctctcgggttcagtcttctgactgttcactctgaaccacggtaagtggccaagagcctattgtgctggagaggttctcctccggagccgtgaatgctgctaatcccaacctctgagcgtgtgcgcacaatccagtgttgctacgtcgtaacgcgtaagtcggaggcggaacagactactttcggtactccgtgtttccttattatctattaatcaatttatggtgacactgactgatattgttgagtttgctcgattgcccttgaacattgccttatactatcttattgcattttaatagagccacagagcttactgttgagcttattgactttgctgtttacttgaatcaaatatacgcattagataaac

SEQ ID NO: 23395 - DNA, 618 bp, synthetic construct
  source 1..618: mol_type = other DNA
gagttcctccccgaaacttagaagcaccgcaccaaccgaccaataggagcgtggcacccagccatgttacggtcaagcacttctgtttccccggtcagaaatgatcgttatccgccctctcccctacgagaagcctattaaccaccgaacgtggtgaagagttgcgctcagccacaatcccagtggtagctctgagagatggggctcgcatttcccccgtggtaacacggttgcttgcccgcgcgtgctctcgggttcagtcttctgactgttcactctgaaccacggtaagtggccaagagcctattgtgctggagaggttctcctccggagccgtgaatgctgctaatcccaacctctgagcgtgtgcgcacaatccagtgttgctacgtcgtaacgcgtaagtcggaggcggaacagactactttcggtactccgtgtttccttattatctattaatcaatttatggtgacactgactgatattgttgagtttgctcgattgcccttgaacattgccttatactatcttattgcattttaatagagccacagagcttactgttgagcttattgactttgctgtttacttgaatcaaatatacgcattagataaac

SEQ ID NO: 23396 - DNA, 568 bp, synthetic construct
  source 1..568: mol_type = other DNA
gtggcacccagccatgttacggtcaagcacttctgtttccccggtcagaaatgatcgttatccgccctctcccctacgagaagcctattaaccaccgaacgtggtgaagagttgcgctcagccacaatcccagtggtagctctgagagatggggctcgcatttcccccgtggtaacacggttgcttgcccgcgcgtgctctcgggttcagtcttctgactgttcactctgaaccacggtaagtggccaagagcctattgtgctggagaggttctcctccggagccgtgaatgctgctaatcccaacctctgagcgtgtgcgcacaatccagtgttgctacgtcgtaacgcgtaagtcggaggcggaacagactactttcggtactccgtgtttccttattatctattaatcaatttatggtgacactgactgatattgttgagtttgctcgattgcccttgaacattgccttatactatcttattgcattttaatagagccacagagcttactgttgagcttattgactttgctgtttacttgaatcaaatatacgcattagataaac

SEQ ID NO: 23397 - DNA, 518 bp, synthetic construct
  source 1..518: mol_type = other DNA
atgatcgttatccgccctctcccctacgagaagcctattaaccaccgaacgtggtgaagagttgcgctcagccacaatcccagtggtagctctgagagatggggctcgcatttcccccgtggtaacacggttgcttgcccgcgcgtgctctcgggttcagtcttctgactgttcactctgaaccacggtaagtggccaagagcctattgtgctggagaggttctcctccggagccgtgaatgctgctaatcccaacctctgagcgtgtgcgcacaatccagtgttgctacgtcgtaacgcgtaagtcggaggcggaacagactactttcggtactccgtgtttccttattatctattaatcaatttatggtgacactgactgatattgttgagtttgctcgattgcccttgaacattgccttatactatcttattgcattttaatagagccacagagcttactgttgagcttattgactttgctgtttacttgaatcaaatatacgcattagataaac

SEQ ID NO: 23398 - DNA, 769 bp, synthetic construct
  source 1..769: mol_type = other DNA
gtactctggtacgttagtacctttgtacgcctgttttcccctcccttaaataaattaagattaccactactgaggggagtagtccgactccgctccgacaatgtcgcaccagtgcactggtacgctagtaccttttcacggagtagctggtattccctcccgaaacttagaagcacttaaatcaaccgaccaataggcgcgcggtagccagccgcgttacggtcaagcactcctgtttccccggtccacaaggatcgttacccgcccgacccactgcgagaaacctagtagttggccaagtggtaacgaggttgcgctcagccacaaccccagtggtagctccggaagatggggctcgcaccacccccgcggtaacgcggttgcttgcccgcgcgtgcttccgggtccggtctcgtaccgttcacctcaataccacgtaaccagcaaagagtctattgcgctgggacggttttcctccggggccgtgaatgctgctaatcccaacctccgagcgtgtgcgcacaatccagtgttgctacgtcgtaacgcgtaagttggaggcggaacagactactttcggtaccccgtgtttccctatcattccatttcattttatggtgacaattgctgagatctgtgatttggcgaccttaccactgaatattgccttatattacttggttgcattccacaaaacctctgacatacctgcttcctatatcgacctacttgttttcctcaatttaaagtatagactacaaatagcaga

SEQ ID NO: 23399 - DNA, 719 bp, synthetic construct
  source 1..719: mol_type = other DNA
taaattaagattaccactactgaggggagtagtccgactccgctccgacaatgtcgcaccagtgcactggtacgctagtaccttttcacggagtagctggtattccctcccgaaacttagaagcacttaaatcaaccgaccaataggcgcgcggtagccagccgcgttacggtcaagcactcctgtttccccggtccacaaggatcgttacccgcccgacccactgcgagaaacctagtagttggccaagtggtaacgaggttgcgctcagccacaaccccagtggtagctccggaagatggggctcgcaccacccccgcggtaacgcggttgcttgcccgcgcgtgcttccgggtccggtctcgtaccgttcacctcaataccacgtaaccagcaaagagtctattgcgctgggacggttttcctccggggccgtgaatgctgctaatcccaacctccgagcgtgtgcgcacaatccagtgttgctacgtcgtaacgcgtaagttggaggcggaacagactactttcggtaccccgtgtttccctatcattccatttcattttatggtgacaattgctgagatctgtgatttggcgaccttaccactgaatattgccttatattacttggttgcattccacaaaacctctgacatacctgcttcctatatcgacctacttgttttcctcaatttaaagtatagactacaaatagcaga

SEQ ID NO: 23400 - DNA, 669 bp, synthetic construct
  source 1..669: mol_type = other DNA
atgtcgcaccagtgcactggtacgctagtaccttttcacggagtagctggtattccctcccgaaacttagaagcacttaaatcaaccgaccaataggcgcgcggtagccagccgcgttacggtcaagcactcctgtttccccggtccacaaggatcgttacccgcccgacccactgcgagaaacctagtagttggccaagtggtaacgaggttgcgctcagccacaaccccagtggtagctccggaagatggggctcgcaccacccccgcggtaacgcggttgcttgcccgcgcgtgcttccgggtccggtctcgtaccgttcacctcaataccacgtaaccagcaaagagtctattgcgctgggacggttttcctccggggccgtgaatgctgctaatcccaacctccgagcgtgtgcgcacaatccagtgttgctacgtcgtaacgcgtaagttggaggcggaacagactactttcggtaccccgtgtttccctatcattccatttcattttatggtgacaattgctgagatctgtgatttggcgaccttaccactgaatattgccttatattacttggttgcattccacaaaacctctgacatacctgcttcctatatcgacctacttgttttcctcaatttaaagtatagactacaaatagcaga

SEQ ID NO: 23401 - DNA, 619 bp, synthetic construct
  source 1..619: mol_type = other DNA
tattccctcccgaaacttagaagcacttaaatcaaccgaccaataggcgcgcggtagccagccgcgttacggtcaagcactcctgtttccccggtccacaaggatcgttacccgcccgacccactgcgagaaacctagtagttggccaagtggtaacgaggttgcgctcagccacaaccccagtggtagctccggaagatggggctcgcaccacccccgcggtaacgcggttgcttgcccgcgcgtgcttccgggtccggtctcgtaccgttcacctcaataccacgtaaccagcaaagagtctattgcgctgggacggttttcctccggggccgtgaatgctgctaatcccaacctccgagcgtgtgcgcacaatccagtgttgctacgtcgtaacgcgtaagttggaggcggaacagactactttcggtaccccgtgtttccctatcattccatttcattttatggtgacaattgctgagatctgtgatttggcgaccttaccactgaatattgccttatattacttggttgcattccacaaaacctctgacatacctgcttcctatatcgacctacttgttttcctcaatttaaagtatagactacaaatagcaga

SEQ ID NO: 23402 - DNA, 569 bp, synthetic construct
  source 1..569: mol_type = other DNA
gcggtagccagccgcgttacggtcaagcactcctgtttccccggtccacaaggatcgttacccgcccgacccactgcgagaaacctagtagttggccaagtggtaacgaggttgcgctcagccacaaccccagtggtagctccggaagatggggctcgcaccacccccgcggtaacgcggttgcttgcccgcgcgtgcttccgggtccggtctcgtaccgttcacctcaataccacgtaaccagcaaagagtctattgcgctgggacggttttcctccggggccgtgaatgctgctaatcccaacctccgagcgtgtgcgcacaatccagtgttgctacgtcgtaacgcgtaagttggaggcggaacagactactttcggtaccccgtgtttccctatcattccatttcattttatggtgacaattgctgagatctgtgatttggcgaccttaccactgaatattgccttatattacttggttgcattccacaaaacctctgacatacctgcttcctatatcgacctacttgttttcctcaatttaaagtatagactacaaatagcaga

SEQ ID NO: 23403 - DNA, 519 bp, synthetic construct
  source 1..519: mol_type = other DNA
aggatcgttacccgcccgacccactgcgagaaacctagtagttggccaagtggtaacgaggttgcgctcagccacaaccccagtggtagctccggaagatggggctcgcaccacccccgcggtaacgcggttgcttgcccgcgcgtgcttccgggtccggtctcgtaccgttcacctcaataccacgtaaccagcaaagagtctattgcgctgggacggttttcctccggggccgtgaatgctgctaatcccaacctccgagcgtgtgcgcacaatccagtgttgctacgtcgtaacgcgtaagttggaggcggaacagactactttcggtaccccgtgtttccctatcattccatttcattttatggtgacaattgctgagatctgtgatttggcgaccttaccactgaatattgccttatattacttggttgcattccacaaaacctctgacatacctgcttcctatatcgacctacttgttttcctcaatttaaagtatagactacaaatagcaga

SEQ ID NO: 23404 - DNA, 769 bp, synthetic construct
  source 1..769: mol_type = other DNA
tactctggttcgtttagaacccttgtacgcctgttttcccctcccttaaacaaattaagatctctgccaatgtggggagtagtccgactccgcaccgatacgtcgcaccagcagaccggttcgcttagaacccttctgcggattggtatgagttccccccccttgcaacttagaagcatgagaacaaccgaccaataggagcatggcatccagccgtgtcacggtcaagcacttctgtttccccggccagagatggtcgttacccgccctacccactacgagaagcctattaactaccgaaatcagcgaagagttgcactcagccacaaccccggtggtagctctgagagatggggctcgcaacaacccccgtggtaacacggttgcttgcccgcgcgtgctctcgggttcagtctttgactgttcactccgacctgacgtaagtagccaagagcctattgtgctgggaaggttttcctccggagccgtgaatgctgctaatcctaacctccgagcgtgtgcgcacaaaccagtgttgctacgtcgtaacgcgcaagttggaggcggaacagactactttcggtactccgtgtttccttattttattaactccaatttatggtgacattgactgatattgttgtatttgcccgcctaccgttgaacatagctttatatcatctcattgcattcaagaaatccacagagcttaccctggaactccttgactttgcagttttcttaaatcggatacataaactcagtaaga

SEQ ID NO: 23405 - DNA, 719 bp, synthetic construct
  source 1..719: mol_type = other DNA
caaattaagatctctgccaatgtggggagtagtccgactccgcaccgatacgtcgcaccagcagaccggttcgcttagaacccttctgcggattggtatgagttccccccccttgcaacttagaagcatgagaacaaccgaccaataggagcatggcatccagccgtgtcacggtcaagcacttctgtttccccggccagagatggtcgttacccgccctacccactacgagaagcctattaactaccgaaatcagcgaagagttgcactcagccacaaccccggtggtagctctgagagatggggctcgcaacaacccccgtggtaacacggttgcttgcccgcgcgtgctctcgggttcagtctttgactgttcactccgacctgacgtaagtagccaagagcctattgtgctgggaaggttttcctccggagccgtgaatgctgctaatcctaacctccgagcgtgtgcgcacaaaccagtgttgctacgtcgtaacgcgcaagttggaggcggaacagactactttcggtactccgtgtttccttattttattaactccaatttatggtgacattgactgatattgttgtatttgcccgcctaccgttgaacatagctttatatcatctcattgcattcaagaaatccacagagcttaccctggaactccttgactttgcagttttcttaaatcggatacataaactcagtaaga

SEQ ID NO: 23406 - DNA, 669 bp, synthetic construct
  source 1..669: mol_type = other DNA
cgtcgcaccagcagaccggttcgcttagaacccttctgcggattggtatgagttccccccccttgcaacttagaagcatgagaacaaccgaccaataggagcatggcatccagccgtgtcacggtcaagcacttctgtttccccggccagagatggtcgttacccgccctacccactacgagaagcctattaactaccgaaatcagcgaagagttgcactcagccacaaccccggtggtagctctgagagatggggctcgcaacaacccccgtggtaacacggttgcttgcccgcgcgtgctctcgggttcagtctttgactgttcactccgacctgacgtaagtagccaagagcctattgtgctgggaaggttttcctccggagccgtgaatgctgctaatcctaacctccgagcgtgtgcgcacaaaccagtgttgctacgtcgtaacgcgcaagttggaggcggaacagactactttcggtactccgtgtttccttattttattaactccaatttatggtgacattgactgatattgttgtatttgcccgcctaccgttgaacatagctttatatcatctcattgcattcaagaaatccacagagcttaccctggaactccttgactttgcagttttcttaaatcggatacataaactcagtaaga

SEQ ID NO: 23407 - DNA, 619 bp, synthetic construct
  source 1..619: mol_type = other DNA
agttccccccccttgcaacttagaagcatgagaacaaccgaccaataggagcatggcatccagccgtgtcacggtcaagcacttctgtttccccggccagagatggtcgttacccgccctacccactacgagaagcctattaactaccgaaatcagcgaagagttgcactcagccacaaccccggtggtagctctgagagatggggctcgcaacaacccccgtggtaacacggttgcttgcccgcgcgtgctctcgggttcagtctttgactgttcactccgacctgacgtaagtagccaagagcctattgtgctgggaaggttttcctccggagccgtgaatgctgctaatcctaacctccgagcgtgtgcgcacaaaccagtgttgctacgtcgtaacgcgcaagttggaggcggaacagactactttcggtactccgtgtttccttattttattaactccaatttatggtgacattgactgatattgttgtatttgcccgcctaccgttgaacatagctttatatcatctcattgcattcaagaaatccacagagcttaccctggaactccttgactttgcagttttcttaaatcggatacataaactcagtaaga

SEQ ID NO: 23408 - DNA, 569 bp, synthetic construct
  source 1..569: mol_type = other DNA
gcatggcatccagccgtgtcacggtcaagcacttctgtttccccggccagagatggtcgttacccgccctacccactacgagaagcctattaactaccgaaatcagcgaagagttgcactcagccacaaccccggtggtagctctgagagatggggctcgcaacaacccccgtggtaacacggttgcttgcccgcgcgtgctctcgggttcagtctttgactgttcactccgacctgacgtaagtagccaagagcctattgtgctgggaaggttttcctccggagccgtgaatgctgctaatcctaacctccgagcgtgtgcgcacaaaccagtgttgctacgtcgtaacgcgcaagttggaggcggaacagactactttcggtactccgtgtttccttattttattaactccaatttatggtgacattgactgatattgttgtatttgcccgcctaccgttgaacatagctttatatcatctcattgcattcaagaaatccacagagcttaccctggaactccttgactttgcagttttcttaaatcggatacataaactcagtaaga

SEQ ID NO: 23409 - DNA, 519 bp, synthetic construct
  source 1..519: mol_type = other DNA
agatggtcgttacccgccctacccactacgagaagcctattaactaccgaaatcagcgaagagttgcactcagccacaaccccggtggtagctctgagagatggggctcgcaacaacccccgtggtaacacggttgcttgcccgcgcgtgctctcgggttcagtctttgactgttcactccgacctgacgtaagtagccaagagcctattgtgctgggaaggttttcctccggagccgtgaatgctgctaatcctaacctccgagcgtgtgcgcacaaaccagtgttgctacgtcgtaacgcgcaagttggaggcggaacagactactttcggtactccgtgtttccttattttattaactccaatttatggtgacattgactgatattgttgtatttgcccgcctaccgttgaacatagctttatatcatctcattgcattcaagaaatccacagagcttaccctggaactccttgactttgcagttttcttaaatcggatacataaactcagtaaga

SEQ ID NO: 23410 - DNA, 769 bp, synthetic construct
  source 1..769: mol_type = other DNA
tactctggtatgcttaatacctttgtacgcctgtttttccctcccttaaataaattaagattaccactactgaggggagtagtccgactccgctccggtaccgccgcaccagtactccggtacgctcagtaccctagtacggagtagttggtattccctccctgtaatttagaagtatgaaattaaaccgaccaataggaggcgtggcatccagtcgcgttacggtcaagcacttctgtttccccggtccgtaaggatcgttacccgcccgacccactacggaaagcctagtaactggccaactggatgagaggttgcactcagccacaaccccagtggtagctctggaagatggggctcgcaccttcccccgtggtaacacggttgcttgcccgcgtgtgctcccgggttcggtccccgaccgttcacttcgattccaggtaaccagccaagagccaactgtgctgggacggttttcctccggggccgtgaatgctgctaatcctaacctccgagcgtgtgcgcgcaaaccagcgttgctacgtcgtaacgcgtaagttggaggcggaacagactactttcggtaccccgtgtttccttttattttacttattgtttatggttacactgactgatatttgtgagtttgctcgtttgcctttgaatattgctttgtattactttgttgcttttcacaaaacgacccagctcaccgttgaacttgtcgattttgctgtttttcttaatctaacctacaagaaacttaaca

SEQ ID NO: 23411 - DNA, 719 bp, synthetic construct
  source 1..719: mol_type = other DNA
taaattaagattaccactactgaggggagtagtccgactccgctccggtaccgccgcaccagtactccggtacgctcagtaccctagtacggagtagttggtattccctccctgtaatttagaagtatgaaattaaaccgaccaataggaggcgtggcatccagtcgcgttacggtcaagcacttctgtttccccggtccgtaaggatcgttacccgcccgacccactacggaaagcctagtaactggccaactggatgagaggttgcactcagccacaaccccagtggtagctctggaagatggggctcgcaccttcccccgtggtaacacggttgcttgcccgcgtgtgctcccgggttcggtccccgaccgttcacttcgattccaggtaaccagccaagagccaactgtgctgggacggttttcctccggggccgtgaatgctgctaatcctaacctccgagcgtgtgcgcgcaaaccagcgttgctacgtcgtaacgcgtaagttggaggcggaacagactactttcggtaccccgtgtttccttttattttacttattgtttatggttacactgactgatatttgtgagtttgctcgtttgcctttgaatattgctttgtattactttgttgcttttcacaaaacgacccagctcaccgttgaacttgtcgattttgctgtttttcttaatctaacctacaagaaacttaaca

SEQ ID NO: 23412 - DNA, 669 bp, synthetic construct
  source 1..669: mol_type = other DNA
ccgccgcaccagtactccggtacgctcagtaccctagtacggagtagttggtattccctccctgtaatttagaagtatgaaattaaaccgaccaataggaggcgtggcatccagtcgcgttacggtcaagcacttctgtttccccggtccgtaaggatcgttacccgcccgacccactacggaaagcctagtaactggccaactggatgagaggttgcactcagccacaaccccagtggtagctctggaagatggggctcgcaccttcccccgtggtaacacggttgcttgcccgcgtgtgctcccgggttcggtccccgaccgttcacttcgattccaggtaaccagccaagagccaactgtgctgggacggttttcctccggggccgtgaatgctgctaatcctaacctccgagcgtgtgcgcgcaaaccagcgttgctacgtcgtaacgcgtaagttggaggcggaacagactactttcggtaccccgtgtttccttttattttacttattgtttatggttacactgactgatatttgtgagtttgctcgtttgcctttgaatattgctttgtattactttgttgcttttcacaaaacgacccagctcaccgttgaacttgtcgattttgctgtttttcttaatctaacctacaagaaacttaaca

SEQ ID NO: 23413 - DNA, 619 bp, synthetic construct
  source 1..619: mol_type = other DNA
gtattccctccctgtaatttagaagtatgaaattaaaccgaccaataggaggcgtggcatccagtcgcgttacggtcaagcacttctgtttccccggtccgtaaggatcgttacccgcccgacccactacggaaagcctagtaactggccaactggatgagaggttgcactcagccacaaccccagtggtagctctggaagatggggctcgcaccttcccccgtggtaacacggttgcttgcccgcgtgtgctcccgggttcggtccccgaccgttcacttcgattccaggtaaccagccaagagccaactgtgctgggacggttttcctccggggccgtgaatgctgctaatcctaacctccgagcgtgtgcgcgcaaaccagcgttgctacgtcgtaacgcgtaagttggaggcggaacagactactttcggtaccccgtgtttccttttattttacttattgtttatggttacactgactgatatttgtgagtttgctcgtttgcctttgaatattgctttgtattactttgttgcttttcacaaaacgacccagctcaccgttgaacttgtcgattttgctgtttttcttaatctaacctacaagaaacttaaca

SEQ ID NO: 23414 - DNA, 569 bp, synthetic construct
  source 1..569: mol_type = other DNA
ggcgtggcatccagtcgcgttacggtcaagcacttctgtttccccggtccgtaaggatcgttacccgcccgacccactacggaaagcctagtaactggccaactggatgagaggttgcactcagccacaaccccagtggtagctctggaagatggggctcgcaccttcccccgtggtaacacggttgcttgcccgcgtgtgctcccgggttcggtccccgaccgttcacttcgattccaggtaaccagccaagagccaactgtgctgggacggttttcctccggggccgtgaatgctgctaatcctaacctccgagcgtgtgcgcgcaaaccagcgttgctacgtcgtaacgcgtaagttggaggcggaacagactactttcggtaccccgtgtttccttttattttacttattgtttatggttacactgactgatatttgtgagtttgctcgtttgcctttgaatattgctttgtattactttgttgcttttcacaaaacgacccagctcaccgttgaacttgtcgattttgctgtttttcttaatctaacctacaagaaacttaaca

SEQ ID NO: 23415 - DNA, 519 bp, synthetic construct
  source 1..519: mol_type = other DNA
gtaaggatcgttacccgcccgacccactacggaaagcctagtaactggccaactggatgagaggttgcactcagccacaaccccagtggtagctctggaagatggggctcgcaccttcccccgtggtaacacggttgcttgcccgcgtgtgctcccgggttcggtccccgaccgttcacttcgattccaggtaaccagccaagagccaactgtgctgggacggttttcctccggggccgtgaatgctgctaatcctaacctccgagcgtgtgcgcgcaaaccagcgttgctacgtcgtaacgcgtaagttggaggcggaacagactactttcggtaccccgtgtttccttttattttacttattgtttatggttacactgactgatatttgtgagtttgctcgtttgcctttgaatattgctttgtattactttgttgcttttcacaaaacgacccagctcaccgttgaacttgtcgattttgctgtttttcttaatctaacctacaagaaacttaaca

SEQ ID NO: 23416 - DNA, 770 bp, synthetic construct
  source 1..770: mol_type = other DNA
gtactctggtacgccagtacctttgtacgcctgttttcccctccctaaataaattaagattaccactactgaggggagtagtccgactccgctccggcaatgccgcaccagtgcactggtacgctagtaccttttcacggagtagatggtattcctcaccccgaaacttagaagcacgaaaacaaaccgaccaataggtgcatggcatccagccgtgttatggtcaagcacttctgtttccccggtccgcaaggatcgttacccgcccgacccactacgagaagcctagtaactgaccaagtagttgagaggttgcgctcagccacaaccccagtggtagctctggaagatggggctcgcacttcccccgtggtaacacggttgcttgcccgcgcgtgcttccgggttcggcctctgccgttcacctcgattctgcgtaatcagccaagagcctattgtgctgggacggtttcctccggggccgtgaatgctgctaatcccaacctccgagcgtgtgcgcacaatccagtgttgctacgtcgtaacgcgtaagttggaggcggaacagactactttcggaaccccgtgtttcctttgttttaattttaatgctttatggtgacaattgttgagatctgcgatctagcgaccttgccattgaacattgctttgtattatttggttgcattccacaaaacctctgacatacccagctcctatattgatcttttggtttatctaaacttaaaacacaaactcgaaggattgcg

SEQ ID NO: 23417 - DNA, 720 bp, synthetic construct
  source 1..720: mol_type = other DNA
aaattaagattaccactactgaggggagtagtccgactccgctccggcaatgccgcaccagtgcactggtacgctagtaccttttcacggagtagatggtattcctcaccccgaaacttagaagcacgaaaacaaaccgaccaataggtgcatggcatccagccgtgttatggtcaagcacttctgtttccccggtccgcaaggatcgttacccgcccgacccactacgagaagcctagtaactgaccaagtagttgagaggttgcgctcagccacaaccccagtggtagctctggaagatggggctcgcacttcccccgtggtaacacggttgcttgcccgcgcgtgcttccgggttcggcctctgccgttcacctcgattctgcgtaatcagccaagagcctattgtgctgggacggtttcctccggggccgtgaatgctgctaatcccaacctccgagcgtgtgcgcacaatccagtgttgctacgtcgtaacgcgtaagttggaggcggaacagactactttcggaaccccgtgtttcctttgttttaattttaatgctttatggtgacaattgttgagatctgcgatctagcgaccttgccattgaacattgctttgtattatttggttgcattccacaaaacctctgacatacccagctcctatattgatcttttggtttatctaaacttaaaacacaaactcgaaggattgcg

SEQ ID NO: 23418 - DNA, 670 bp, synthetic construct
  source 1..670: mol_type = other DNA
tgccgcaccagtgcactggtacgctagtaccttttcacggagtagatggtattcctcaccccgaaacttagaagcacgaaaacaaaccgaccaataggtgcatggcatccagccgtgttatggtcaagcacttctgtttccccggtccgcaaggatcgttacccgcccgacccactacgagaagcctagtaactgaccaagtagttgagaggttgcgctcagccacaaccccagtggtagctctggaagatggggctcgcacttcccccgtggtaacacggttgcttgcccgcgcgtgcttccgggttcggcctctgccgttcacctcgattctgcgtaatcagccaagagcctattgtgctgggacggtttcctccggggccgtgaatgctgctaatcccaacctccgagcgtgtgcgcacaatccagtgttgctacgtcgtaacgcgtaagttggaggcggaacagactactttcggaaccccgtgtttcctttgttttaattttaatgctttatggtgacaattgttgagatctgcgatctagcgaccttgccattgaacattgctttgtattatttggttgcattccacaaaacctctgacatacccagctcctatattgatcttttggtttatctaaacttaaaacacaaactcgaaggattgcg

SEQ ID NO: 23419 - DNA, 620 bp, synthetic construct
  source 1..620: mol_type = other DNA
attcctcaccccgaaacttagaagcacgaaaacaaaccgaccaataggtgcatggcatccagccgtgttatggtcaagcacttctgtttccccggtccgcaaggatcgttacccgcccgacccactacgagaagcctagtaactgaccaagtagttgagaggttgcgctcagccacaaccccagtggtagctctggaagatggggctcgcacttcccccgtggtaacacggttgcttgcccgcgcgtgcttccgggttcggcctctgccgttcacctcgattctgcgtaatcagccaagagcctattgtgctgggacggtttcctccggggccgtgaatgctgctaatcccaacctccgagcgtgtgcgcacaatccagtgttgctacgtcgtaacgcgtaagttggaggcggaacagactactttcggaaccccgtgtttcctttgttttaattttaatgctttatggtgacaattgttgagatctgcgatctagcgaccttgccattgaacattgctttgtattatttggttgcattccacaaaacctctgacatacccagctcctatattgatcttttggtttatctaaacttaaaacacaaactcgaaggattgcg

SEQ ID NO: 23420 - DNA, 570 bp, synthetic construct
  source 1..570: mol_type = other DNA
catggcatccagccgtgttatggtcaagcacttctgtttccccggtccgcaaggatcgttacccgcccgacccactacgagaagcctagtaactgaccaagtagttgagaggttgcgctcagccacaaccccagtggtagctctggaagatggggctcgcacttcccccgtggtaacacggttgcttgcccgcgcgtgcttccgggttcggcctctgccgttcacctcgattctgcgtaatcagccaagagcctattgtgctgggacggtttcctccggggccgtgaatgctgctaatcccaacctccgagcgtgtgcgcacaatccagtgttgctacgtcgtaacgcgtaagttggaggcggaacagactactttcggaaccccgtgtttcctttgttttaattttaatgctttatggtgacaattgttgagatctgcgatctagcgaccttgccattgaacattgctttgtattatttggttgcattccacaaaacctctgacatacccagctcctatattgatcttttggtttatctaaacttaaaacacaaactcgaaggattgcg

SEQ ID NO: 23421 - DNA, 520 bp, synthetic construct
  source 1..520: mol_type = other DNA
aaggatcgttacccgcccgacccactacgagaagcctagtaactgaccaagtagttgagaggttgcgctcagccacaaccccagtggtagctctggaagatggggctcgcacttcccccgtggtaacacggttgcttgcccgcgcgtgcttccgggttcggcctctgccgttcacctcgattctgcgtaatcagccaagagcctattgtgctgggacggtttcctccggggccgtgaatgctgctaatcccaacctccgagcgtgtgcgcacaatccagtgttgctacgtcgtaacgcgtaagttggaggcggaacagactactttcggaaccccgtgtttcctttgttttaattttaatgctttatggtgacaattgttgagatctgcgatctagcgaccttgccattgaacattgctttgtattatttggttgcattccacaaaacctctgacatacccagctcctatattgatcttttggtttatctaaacttaaaacacaaactcgaaggattgcg

SEQ ID NO: 23422 - DNA, 770 bp, synthetic construct
  source 1..770: mol_type = other DNA
tactctggtacgcttagtacctttgtacgcctgttttccctttcccttaaacaaattaagattaccactgttgaggggagtagtccgactccgctccggcactgccgcaccagtactccggtatgcctagtaccctagtacggagcagatggtatccccctttccctgaaacttagaagtctgacgcaaacccgaccaataggagcgcggtatccaaccgcgtaacggtcaagcacttctgtttccccggtccgcaaggatcgttacccgcccgtcccactacgggaagcctagtaactggccaactgagtgagaggttgcgctcagccacatacccagtggtagctctggaagatggggctcgcactccccccgtggtaacacggttgcttgcccgcgtgtgcttccgggttcggtttcgaccgttcacctcaaccccaggtaaccagccaagagcctactgtgctggagcggttttcctccggagccgtgaatgctgctaatcccaacctccgagcgtgtgcgcacaaaccagtgttgctacgtcgtaacgcgtaagttggaggcggaacagactactttcggtactccgtgtttccttttgttttatctattgtttatggtgacactgtctgacatttgtgaatttgctcgcttacccttgaatattgcattgtattatctggttgcatttcacaacacaacccaactctccattgaactcatcaactttgctgtatttcttaacacaatacaaagaaagcgagata

SEQ ID NO: 23423 - DNA, 720 bp, synthetic construct
  source 1..720: mol_type = other DNA
acaaattaagattaccactgttgaggggagtagtccgactccgctccggcactgccgcaccagtactccggtatgcctagtaccctagtacggagcagatggtatccccctttccctgaaacttagaagtctgacgcaaacccgaccaataggagcgcggtatccaaccgcgtaacggtcaagcacttctgtttccccggtccgcaaggatcgttacccgcccgtcccactacgggaagcctagtaactggccaactgagtgagaggttgcgctcagccacatacccagtggtagctctggaagatggggctcgcactccccccgtggtaacacggttgcttgcccgcgtgtgcttccgggttcggtttcgaccgttcacctcaaccccaggtaaccagccaagagcctactgtgctggagcggttttcctccggagccgtgaatgctgctaatcccaacctccgagcgtgtgcgcacaaaccagtgttgctacgtcgtaacgcgtaagttggaggcggaacagactactttcggtactccgtgtttccttttgttttatctattgtttatggtgacactgtctgacatttgtgaatttgctcgcttacccttgaatattgcattgtattatctggttgcatttcacaacacaacccaactctccattgaactcatcaactttgctgtatttcttaacacaatacaaagaaagcgagata

SEQ ID NO: 23424 - DNA, 670 bp, synthetic construct
  source 1..670: mol_type = other DNA
actgccgcaccagtactccggtatgcctagtaccctagtacggagcagatggtatccccctttccctgaaacttagaagtctgacgcaaacccgaccaataggagcgcggtatccaaccgcgtaacggtcaagcacttctgtttccccggtccgcaaggatcgttacccgcccgtcccactacgggaagcctagtaactggccaactgagtgagaggttgcgctcagccacatacccagtggtagctctggaagatggggctcgcactccccccgtggtaacacggttgcttgcccgcgtgtgcttccgggttcggtttcgaccgttcacctcaaccccaggtaaccagccaagagcctactgtgctggagcggttttcctccggagccgtgaatgctgctaatcccaacctccgagcgtgtgcgcacaaaccagtgttgctacgtcgtaacgcgtaagttggaggcggaacagactactttcggtactccgtgtttccttttgttttatctattgtttatggtgacactgtctgacatttgtgaatttgctcgcttacccttgaatattgcattgtattatctggttgcatttcacaacacaacccaactctccattgaactcatcaactttgctgtatttcttaacacaatacaaagaaagcgagata

SEQ ID NO: 23425 - DNA, 620 bp, synthetic construct
  source 1..620: mol_type = other DNA
ggtatccccctttccctgaaacttagaagtctgacgcaaacccgaccaataggagcgcggtatccaaccgcgtaacggtcaagcacttctgtttccccggtccgcaaggatcgttacccgcccgtcccactacgggaagcctagtaactggccaactgagtgagaggttgcgctcagccacatacccagtggtagctctggaagatggggctcgcactccccccgtggtaacacggttgcttgcccgcgtgtgcttccgggttcggtttcgaccgttcacctcaaccccaggtaaccagccaagagcctactgtgctggagcggttttcctccggagccgtgaatgctgctaatcccaacctccgagcgtgtgcgcacaaaccagtgttgctacgtcgtaacgcgtaagttggaggcggaacagactactttcggtactccgtgtttccttttgttttatctattgtttatggtgacactgtctgacatttgtgaatttgctcgcttacccttgaatattgcattgtattatctggttgcatttcacaacacaacccaactctccattgaactcatcaactttgctgtatttcttaacacaatacaaagaaagcgagata

SEQ ID NO: 23426 - DNA, 570 bp, synthetic construct
  source 1..570: mol_type = other DNA
aggagcgcggtatccaaccgcgtaacggtcaagcacttctgtttccccggtccgcaaggatcgttacccgcccgtcccactacgggaagcctagtaactggccaactgagtgagaggttgcgctcagccacatacccagtggtagctctggaagatggggctcgcactccccccgtggtaacacggttgcttgcccgcgtgtgcttccgggttcggtttcgaccgttcacctcaaccccaggtaaccagccaagagcctactgtgctggagcggttttcctccggagccgtgaatgctgctaatcccaacctccgagcgtgtgcgcacaaaccagtgttgctacgtcgtaacgcgtaagttggaggcggaacagactactttcggtactccgtgtttccttttgttttatctattgtttatggtgacactgtctgacatttgtgaatttgctcgcttacccttgaatattgcattgtattatctggttgcatttcacaacacaacccaactctccattgaactcatcaactttgctgtatttcttaacacaatacaaagaaagcgagata

SEQ ID NO: 23427 - DNA, 520 bp, synthetic construct
  source 1..520: mol_type = other DNA
tccgcaaggatcgttacccgcccgtcccactacgggaagcctagtaactggccaactgagtgagaggttgcgctcagccacatacccagtggtagctctggaagatggggctcgcactccccccgtggtaacacggttgcttgcccgcgtgtgcttccgggttcggtttcgaccgttcacctcaaccccaggtaaccagccaagagcctactgtgctggagcggttttcctccggagccgtgaatgctgctaatcccaacctccgagcgtgtgcgcacaaaccagtgttgctacgtcgtaacgcgtaagttggaggcggaacagactactttcggtactccgtgtttccttttgttttatctattgtttatggtgacactgtctgacatttgtgaatttgctcgcttacccttgaatattgcattgtattatctggttgcatttcacaacacaacccaactctccattgaactcatcaactttgctgtatttcttaacacaatacaaagaaagcgagata

SEQ ID NO: 23428 - DNA, 770 bp, synthetic construct
  source 1..770: mol_type = other DNA
tactctggttcgtttagaacccttgtacgcctgtttttcccccccttaaataaattaagatctctgccaatgtggggagtagtccgactccgcaccgatacgtcgcaccaacagaccggttcgcctaggacccttctgcggattggtatgagtcccccccccgaaacttagaagcacattacaaactggccaataggagcgtggtatccaaccgcgttgcggtcaagcacttctgtttccccggtcagaaatgatcgttacccgccctccccactacgagaagcctattaaccactgaaagtgatgatgagttgcgctcagccacaaccccggtggtagctctgagagatggggctcgcaccacccccgtggtgacacggttgcttgcccgcgtgtgctctcgggttcagtcgcgagactgttcactctgactcattgtaggtggccaagagcctattgtgctggggaggttttcctccggagccgtgaatgctgctaatcccaacctccgagcgtgtgcgcacaatccagtgttgctacgtcgtaacgcgtaagttggaggcggaacagactactttcggtactccgtgtttccttaattttattgttcaaatttatggtgacattgtctgacatttgtgaattcgctcgcctgccacttaatatcgctttatatcatctgatagcattccataagactacagaactcactttggaactcatcgactttgctgttttcctgaatactgttcacaaccaaacaaaacaaa

SEQ ID NO: 23429 - DNA, 720 bp, synthetic construct
  source 1..720: mol_type = other DNA
taaattaagatctctgccaatgtggggagtagtccgactccgcaccgatacgtcgcaccaacagaccggttcgcctaggacccttctgcggattggtatgagtcccccccccgaaacttagaagcacattacaaactggccaataggagcgtggtatccaaccgcgttgcggtcaagcacttctgtttccccggtcagaaatgatcgttacccgccctccccactacgagaagcctattaaccactgaaagtgatgatgagttgcgctcagccacaaccccggtggtagctctgagagatggggctcgcaccacccccgtggtgacacggttgcttgcccgcgtgtgctctcgggttcagtcgcgagactgttcactctgactcattgtaggtggccaagagcctattgtgctggggaggttttcctccggagccgtgaatgctgctaatcccaacctccgagcgtgtgcgcacaatccagtgttgctacgtcgtaacgcgtaagttggaggcggaacagactactttcggtactccgtgtttccttaattttattgttcaaatttatggtgacattgtctgacatttgtgaattcgctcgcctgccacttaatatcgctttatatcatctgatagcattccataagactacagaactcactttggaactcatcgactttgctgttttcctgaatactgttcacaaccaaacaaaacaaa

SEQ ID NO: 23430 - DNA, 670 bp, synthetic construct
  source 1..670: mol_type = other DNA
cgtcgcaccaacagaccggttcgcctaggacccttctgcggattggtatgagtcccccccccgaaacttagaagcacattacaaactggccaataggagcgtggtatccaaccgcgttgcggtcaagcacttctgtttccccggtcagaaatgatcgttacccgccctccccactacgagaagcctattaaccactgaaagtgatgatgagttgcgctcagccacaaccccggtggtagctctgagagatggggctcgcaccacccccgtggtgacacggttgcttgcccgcgtgtgctctcgggttcagtcgcgagactgttcactctgactcattgtaggtggccaagagcctattgtgctggggaggttttcctccggagccgtgaatgctgctaatcccaacctccgagcgtgtgcgcacaatccagtgttgctacgtcgtaacgcgtaagttggaggcggaacagactactttcggtactccgtgtttccttaattttattgttcaaatttatggtgacattgtctgacatttgtgaattcgctcgcctgccacttaatatcgctttatatcatctgatagcattccataagactacagaactcactttggaactcatcgactttgctgttttcctgaatactgttcacaaccaaacaaaacaaa

SEQ ID NO: 23431 - DNA, 620 bp, synthetic construct
  source 1..620: mol_type = other DNA
agtcccccccccgaaacttagaagcacattacaaactggccaataggagcgtggtatccaaccgcgttgcggtcaagcacttctgtttccccggtcagaaatgatcgttacccgccctccccactacgagaagcctattaaccactgaaagtgatgatgagttgcgctcagccacaaccccggtggtagctctgagagatggggctcgcaccacccccgtggtgacacggttgcttgcccgcgtgtgctctcgggttcagtcgcgagactgttcactctgactcattgtaggtggccaagagcctattgtgctggggaggttttcctccggagccgtgaatgctgctaatcccaacctccgagcgtgtgcgcacaatccagtgttgctacgtcgtaacgcgtaagttggaggcggaacagactactttcggtactccgtgtttccttaattttattgttcaaatttatggtgacattgtctgacatttgtgaattcgctcgcctgccacttaatatcgctttatatcatctgatagcattccataagactacagaactcactttggaactcatcgactttgctgttttcctgaatactgttcacaaccaaacaaaacaaa

SEQ ID NO: 23432 - DNA, 570 bp, synthetic construct
  source 1..570: mol_type = other DNA
gtggtatccaaccgcgttgcggtcaagcacttctgtttccccggtcagaaatgatcgttacccgccctccccactacgagaagcctattaaccactgaaagtgatgatgagttgcgctcagccacaaccccggtggtagctctgagagatggggctcgcaccacccccgtggtgacacggttgcttgcccgcgtgtgctctcgggttcagtcgcgagactgttcactctgactcattgtaggtggccaagagcctattgtgctggggaggttttcctccggagccgtgaatgctgctaatcccaacctccgagcgtgtgcgcacaatccagtgttgctacgtcgtaacgcgtaagttggaggcggaacagactactttcggtactccgtgtttccttaattttattgttcaaatttatggtgacattgtctgacatttgtgaattcgctcgcctgccacttaatatcgctttatatcatctgatagcattccataagactacagaactcactttggaactcatcgactttgctgttttcctgaatactgttcacaaccaaacaaaacaaa

SEQ ID NO: 23433 - DNA, 520 bp, synthetic construct
  source 1..520: mol_type = other DNA
atgatcgttacccgccctccccactacgagaagcctattaaccactgaaagtgatgatgagttgcgctcagccacaaccccggtggtagctctgagagatggggctcgcaccacccccgtggtgacacggttgcttgcccgcgtgtgctctcgggttcagtcgcgagactgttcactctgactcattgtaggtggccaagagcctattgtgctggggaggttttcctccggagccgtgaatgctgctaatcccaacctccgagcgtgtgcgcacaatccagtgttgctacgtcgtaacgcgtaagttggaggcggaacagactactttcggtactccgtgtttccttaattttattgttcaaatttatggtgacattgtctgacatttgtgaattcgctcgcctgccacttaatatcgctttatatcatctgatagcattccataagactacagaactcactttggaactcatcgactttgctgttttcctgaatactgttcacaaccaaacaaaacaaa

SEQ ID NO: 23434 - DNA, 771 bp, synthetic construct
  source 1..771: mol_type = other DNA
tactctggtacgttagtacctttgtacgcctgttttcccctcccttaaacaaattaagattaccactactgaggggagtagtccgactccgctccggtactgccgcaccagtactccggtacacttagtaccctagtacggagtagatggtatccccaccccgcaacttagaagcatgcaaacaaaccgaccaataggcgcacgatatccagtcgtgtttcggtcaagcacttctgtctccccggtccgaaaggatcgttacccgcccgacccactacgagaagcccagtaactggccaagtgattgcgaagttgcgctcagccacaaccccagtggtagctctggaagatggggctcgcgtctcccccgtggtgacacggtcgcttgcccgcgtgtgcttccgggttcggcctacgccgttcacttcaatgtcacgtaaccagccaagagcctattgtgctgggacggttttcctccggggccgtgaatgctgctaatcccaacctccgagcgtgtgcgcacaacccagtgttgctacgtcgtaatgcgtaagttggaggcggaacagactactttcggtaccccgtgtttcctttaaattttattcattattttatggtgacaattgctgagatctgcgaattagcgactctgccgttgaatattgctctgtactatttggttgcattccacaaaacctctgacatccccagtacatacattactttacttgtttacctcaatctaaagcacaagctagataatacaaa

SEQ ID NO: 23435 - DNA, 721 bp, synthetic construct
  source 1..721: mol_type = other DNA
aaattaagattaccactactgaggggagtagtccgactccgctccggtactgccgcaccagtactccggtacacttagtaccctagtacggagtagatggtatccccaccccgcaacttagaagcatgcaaacaaaccgaccaataggcgcacgatatccagtcgtgtttcggtcaagcacttctgtctccccggtccgaaaggatcgttacccgcccgacccactacgagaagcccagtaactggccaagtgattgcgaagttgcgctcagccacaaccccagtggtagctctggaagatggggctcgcgtctcccccgtggtgacacggtcgcttgcccgcgtgtgcttccgggttcggcctacgccgttcacttcaatgtcacgtaaccagccaagagcctattgtgctgggacggttttcctccggggccgtgaatgctgctaatcccaacctccgagcgtgtgcgcacaacccagtgttgctacgtcgtaatgcgtaagttggaggcggaacagactactttcggtaccccgtgtttcctttaaattttattcattattttatggtgacaattgctgagatctgcgaattagcgactctgccgttgaatattgctctgtactatttggttgcattccacaaaacctctgacatccccagtacatacattactttacttgtttacctcaatctaaagcacaagctagataatacaaa

SEQ ID NO: 23436 - DNA, 671 bp, synthetic construct
  source 1..671: mol_type = other DNA
tgccgcaccagtactccggtacacttagtaccctagtacggagtagatggtatccccaccccgcaacttagaagcatgcaaacaaaccgaccaataggcgcacgatatccagtcgtgtttcggtcaagcacttctgtctccccggtccgaaaggatcgttacccgcccgacccactacgagaagcccagtaactggccaagtgattgcgaagttgcgctcagccacaaccccagtggtagctctggaagatggggctcgcgtctcccccgtggtgacacggtcgcttgcccgcgtgtgcttccgggttcggcctacgccgttcacttcaatgtcacgtaaccagccaagagcctattgtgctgggacggttttcctccggggccgtgaatgctgctaatcccaacctccgagcgtgtgcgcacaacccagtgttgctacgtcgtaatgcgtaagttggaggcggaacagactactttcggtaccccgtgtttcctttaaattttattcattattttatggtgacaattgctgagatctgcgaattagcgactctgccgttgaatattgctctgtactatttggttgcattccacaaaacctctgacatccccagtacatacattactttacttgtttacctcaatctaaagcacaagctagataatacaaa

SEQ ID NO: 23437 - DNA, 621 bp, synthetic construct
  source 1..621: mol_type = other DNA
tatccccaccccgcaacttagaagcatgcaaacaaaccgaccaataggcgcacgatatccagtcgtgtttcggtcaagcacttctgtctccccggtccgaaaggatcgttacccgcccgacccactacgagaagcccagtaactggccaagtgattgcgaagttgcgctcagccacaaccccagtggtagctctggaagatggggctcgcgtctcccccgtggtgacacggtcgcttgcccgcgtgtgcttccgggttcggcctacgccgttcacttcaatgtcacgtaaccagccaagagcctattgtgctgggacggttttcctccggggccgtgaatgctgctaatcccaacctccgagcgtgtgcgcacaacccagtgttgctacgtcgtaatgcgtaagttggaggcggaacagactactttcggtaccccgtgtttcctttaaattttattcattattttatggtgacaattgctgagatctgcgaattagcgactctgccgttgaatattgctctgtactatttggttgcattccacaaaacctctgacatccccagtacatacattactttacttgtttacctcaatctaaagcacaagctagataatacaaa

SEQ ID NO: 23438 - DNA, 571 bp, synthetic construct
  source 1..571: mol_type = other DNA
cacgatatccagtcgtgtttcggtcaagcacttctgtctccccggtccgaaaggatcgttacccgcccgacccactacgagaagcccagtaactggccaagtgattgcgaagttgcgctcagccacaaccccagtggtagctctggaagatggggctcgcgtctcccccgtggtgacacggtcgcttgcccgcgtgtgcttccgggttcggcctacgccgttcacttcaatgtcacgtaaccagccaagagcctattgtgctgggacggttttcctccggggccgtgaatgctgctaatcccaacctccgagcgtgtgcgcacaacccagtgttgctacgtcgtaatgcgtaagttggaggcggaacagactactttcggtaccccgtgtttcctttaaattttattcattattttatggtgacaattgctgagatctgcgaattagcgactctgccgttgaatattgctctgtactatttggttgcattccacaaaacctctgacatccccagtacatacattactttacttgtttacctcaatctaaagcacaagctagataatacaaa

SEQ ID NO: 23439 - DNA, 521 bp, synthetic construct
  source 1..521: mol_type = other DNA
aaggatcgttacccgcccgacccactacgagaagcccagtaactggccaagtgattgcgaagttgcgctcagccacaaccccagtggtagctctggaagatggggctcgcgtctcccccgtggtgacacggtcgcttgcccgcgtgtgcttccgggttcggcctacgccgttcacttcaatgtcacgtaaccagccaagagcctattgtgctgggacggttttcctccggggccgtgaatgctgctaatcccaacctccgagcgtgtgcgcacaacccagtgttgctacgtcgtaatgcgtaagttggaggcggaacagactactttcggtaccccgtgtttcctttaaattttattcattattttatggtgacaattgctgagatctgcgaattagcgactctgccgttgaatattgctctgtactatttggttgcattccacaaaacctctgacatccccagtacatacattactttacttgtttacctcaatctaaagcacaagctagataatacaaa

SEQ ID NO: 23440 - DNA, 772 bp, synthetic construct
  source 1..772: mol_type = other DNA
catgtggtactgtggtatcgcggtaccacagtacgcctctttgaccgccctgacccaagaatcttttcctttaacagatctcttcgtaacaagggcctcagcctgacgcaagtgcctccattggagtctctccaagccctccggggcttggagggcgccgaccccctgcctagggggagcccacgacacggctggagtccattggcacaccgcagccacgattcaagccagaattgaaagcgggaagcacttctgtctccccggtgtggatcatacgctgtacccacggcgaaaagtgaagcatcgttacccgactcggtacttcgagaagcccagtacagttgtggatctctgcagggtatacgctcagcgtgacccctacgtagttccttgagatggctgagagaacaccccacgggcgaccgtgtctctcggcgcgtggctcaaggccgggccttcagtggctcggtgccttgcagagtgaagcctccgaacagcctattgagctaccgtttagcctccgccctcttgaatgcggctaatcctaaccatggagcgcccgcccacagtccagtgggtagagcgtcgtaacgcgcaagtccgtggcggaaccgactactttagagtggcgtgtttccaatttatcctttataaagttgcttatggtgacaccacaagagatccacgatttcttgtttcttatcactgagacacaagtcatattcatcaatctttattgcggaattaacttggtgcgtccaaacacatcagc

SEQ ID NO: 23441 - DNA, 722 bp, synthetic construct
  source 1..722: mol_type = other DNA
tgacccaagaatcttttcctttaacagatctcttcgtaacaagggcctcagcctgacgcaagtgcctccattggagtctctccaagccctccggggcttggagggcgccgaccccctgcctagggggagcccacgacacggctggagtccattggcacaccgcagccacgattcaagccagaattgaaagcgggaagcacttctgtctccccggtgtggatcatacgctgtacccacggcgaaaagtgaagcatcgttacccgactcggtacttcgagaagcccagtacagttgtggatctctgcagggtatacgctcagcgtgacccctacgtagttccttgagatggctgagagaacaccccacgggcgaccgtgtctctcggcgcgtggctcaaggccgggccttcagtggctcggtgccttgcagagtgaagcctccgaacagcctattgagctaccgtttagcctccgccctcttgaatgcggctaatcctaaccatggagcgcccgcccacagtccagtgggtagagcgtcgtaacgcgcaagtccgtggcggaaccgactactttagagtggcgtgtttccaatttatcctttataaagttgcttatggtgacaccacaagagatccacgatttcttgtttcttatcactgagacacaagtcatattcatcaatctttattgcggaattaacttggtgcgtccaaacacatcagc

SEQ ID NO: 23442 - DNA, 672 bp, synthetic construct
  source 1..672: mol_type = other DNA
gcctgacgcaagtgcctccattggagtctctccaagccctccggggcttggagggcgccgaccccctgcctagggggagcccacgacacggctggagtccattggcacaccgcagccacgattcaagccagaattgaaagcgggaagcacttctgtctccccggtgtggatcatacgctgtacccacggcgaaaagtgaagcatcgttacccgactcggtacttcgagaagcccagtacagttgtggatctctgcagggtatacgctcagcgtgacccctacgtagttccttgagatggctgagagaacaccccacgggcgaccgtgtctctcggcgcgtggctcaaggccgggccttcagtggctcggtgccttgcagagtgaagcctccgaacagcctattgagctaccgtttagcctccgccctcttgaatgcggctaatcctaaccatggagcgcccgcccacagtccagtgggtagagcgtcgtaacgcgcaagtccgtggcggaaccgactactttagagtggcgtgtttccaatttatcctttataaagttgcttatggtgacaccacaagagatccacgatttcttgtttcttatcactgagacacaagtcatattcatcaatctttattgcggaattaacttggtgcgtccaaacacatcagc

SEQ ID NO: 23443 - DNA, 622 bp, synthetic construct
  source 1..622: mol_type = other DNA
gagggcgccgaccccctgcctagggggagcccacgacacggctggagtccattggcacaccgcagccacgattcaagccagaattgaaagcgggaagcacttctgtctccccggtgtggatcatacgctgtacccacggcgaaaagtgaagcatcgttacccgactcggtacttcgagaagcccagtacagttgtggatctctgcagggtatacgctcagcgtgacccctacgtagttccttgagatggctgagagaacaccccacgggcgaccgtgtctctcggcgcgtggctcaaggccgggccttcagtggctcggtgccttgcagagtgaagcctccgaacagcctattgagctaccgtttagcctccgccctcttgaatgcggctaatcctaaccatggagcgcccgcccacagtccagtgggtagagcgtcgtaacgcgcaagtccgtggcggaaccgactactttagagtggcgtgtttccaatttatcctttataaagttgcttatggtgacaccacaagagatccacgatttcttgtttcttatcactgagacacaagtcatattcatcaatctttattgcggaattaacttggtgcgtccaaacacatcagc

SEQ ID NO: 23444 - DNA, 572 bp, synthetic construct
  source 1..572: mol_type = other DNA
attggcacaccgcagccacgattcaagccagaattgaaagcgggaagcacttctgtctccccggtgtggatcatacgctgtacccacggcgaaaagtgaagcatcgttacccgactcggtacttcgagaagcccagtacagttgtggatctctgcagggtatacgctcagcgtgacccctacgtagttccttgagatggctgagagaacaccccacgggcgaccgtgtctctcggcgcgtggctcaaggccgggccttcagtggctcggtgccttgcagagtgaagcctccgaacagcctattgagctaccgtttagcctccgccctcttgaatgcggctaatcctaaccatggagcgcccgcccacagtccagtgggtagagcgtcgtaacgcgcaagtccgtggcggaaccgactactttagagtggcgtgtttccaatttatcctttataaagttgcttatggtgacaccacaagagatccacgatttcttgtttcttatcactgagacacaagtcatattcatcaatctttattgcggaattaacttggtgcgtccaaacacatcagc

SEQ ID NO: 23445 - DNA, 522 bp, synthetic construct
  source 1..522: mol_type = other DNA
ttctgtctccccggtgtggatcatacgctgtacccacggcgaaaagtgaagcatcgttacccgactcggtacttcgagaagcccagtacagttgtggatctctgcagggtatacgctcagcgtgacccctacgtagttccttgagatggctgagagaacaccccacgggcgaccgtgtctctcggcgcgtggctcaaggccgggccttcagtggctcggtgccttgcagagtgaagcctccgaacagcctattgagctaccgtttagcctccgccctcttgaatgcggctaatcctaaccatggagcgcccgcccacagtccagtgggtagagcgtcgtaacgcgcaagtccgtggcggaaccgactactttagagtggcgtgtttccaatttatcctttataaagttgcttatggtgacaccacaagagatccacgatttcttgtttcttatcactgagacacaagtcatattcatcaatctttattgcggaattaacttggtgcgtccaaacacatcagc

SEQ ID NO: 23446 - DNA, 772 bp, synthetic construct
  source 1..772: mol_type = other DNA
gtactctggtacgccagtacctttgtacgcctgttttcccctcccttaaataaattaagattgccactactgaggggagtagtccgactccgctccagcaatgctgcaccagtgcactggtacgccagtaccttttcacggagtagatggcatccccaccccgaaacgtagaagcatgcaaacaaaccgaccaccaggcgcgcggcatccaaccgcgttacggtcaagcacttctgtttccccggtccgcaaggatcgttacccgcccgacccactacgagaagcccagtaactggccaagtggtcgcgaggttgcactcagccacaaccccagtggtagctctggaagatggggctcgcagttcccccgtggtaacacggttgcctgcccgcgcgtgcttccgggttcggctctcgccgttcacctcaaccccacgtaaccagccaagagcctattgtgctgggacggtattcctccggggccgtgaatgctgctaatcccaacctccgagcgtgtgcgcacaatccagtgttgctacgtcgtaatgcgtaagttggaggcggaacagactactttcggtaccccgtgtttcctttatttttccttcaaaaattttatggtgacaattgttgagatttgcgatttggccactttaccattgaatattgccttgtattacttggttgcttttcacagaacctctgacatacccagttcgtatattgatcttcttgtttatttaaacctaaaacacaaacttagaaagctaag

SEQ ID NO: 23447 - DNA, 722 bp, synthetic construct
  source 1..722: mol_type = other DNA
taaattaagattgccactactgaggggagtagtccgactccgctccagcaatgctgcaccagtgcactggtacgccagtaccttttcacggagtagatggcatccccaccccgaaacgtagaagcatgcaaacaaaccgaccaccaggcgcgcggcatccaaccgcgttacggtcaagcacttctgtttccccggtccgcaaggatcgttacccgcccgacccactacgagaagcccagtaactggccaagtggtcgcgaggttgcactcagccacaaccccagtggtagctctggaagatggggctcgcagttcccccgtggtaacacggttgcctgcccgcgcgtgcttccgggttcggctctcgccgttcacctcaaccccacgtaaccagccaagagcctattgtgctgggacggtattcctccggggccgtgaatgctgctaatcccaacctccgagcgtgtgcgcacaatccagtgttgctacgtcgtaatgcgtaagttggaggcggaacagactactttcggtaccccgtgtttcctttatttttccttcaaaaattttatggtgacaattgttgagatttgcgatttggccactttaccattgaatattgccttgtattacttggttgcttttcacagaacctctgacatacccagttcgtatattgatcttcttgtttatttaaacctaaaacacaaacttagaaagctaag

SEQ ID NO: 23448 - DNA, 672 bp, synthetic construct
  source 1..672: mol_type = other DNA
atgctgcaccagtgcactggtacgccagtaccttttcacggagtagatggcatccccaccccgaaacgtagaagcatgcaaacaaaccgaccaccaggcgcgcggcatccaaccgcgttacggtcaagcacttctgtttccccggtccgcaaggatcgttacccgcccgacccactacgagaagcccagtaactggccaagtggtcgcgaggttgcactcagccacaaccccagtggtagctctggaagatggggctcgcagttcccccgtggtaacacggttgcctgcccgcgcgtgcttccgggttcggctctcgccgttcacctcaaccccacgtaaccagccaagagcctattgtgctgggacggtattcctccggggccgtgaatgctgctaatcccaacctccgagcgtgtgcgcacaatccagtgttgctacgtcgtaatgcgtaagttggaggcggaacagactactttcggtaccccgtgtttcctttatttttccttcaaaaattttatggtgacaattgttgagatttgcgatttggccactttaccattgaatattgccttgtattacttggttgcttttcacagaacctctgacatacccagttcgtatattgatcttcttgtttatttaaacctaaaacacaaacttagaaagctaag

SEQ ID NO: 23449 - DNA, 622 bp, synthetic construct
  source 1..622: mol_type = other DNA
catccccaccccgaaacgtagaagcatgcaaacaaaccgaccaccaggcgcgcggcatccaaccgcgttacggtcaagcacttctgtttccccggtccgcaaggatcgttacccgcccgacccactacgagaagcccagtaactggccaagtggtcgcgaggttgcactcagccacaaccccagtggtagctctggaagatggggctcgcagttcccccgtggtaacacggttgcctgcccgcgcgtgcttccgggttcggctctcgccgttcacctcaaccccacgtaaccagccaagagcctattgtgctgggacggtattcctccggggccgtgaatgctgctaatcccaacctccgagcgtgtgcgcacaatccagtgttgctacgtcgtaatgcgtaagttggaggcggaacagactactttcggtaccccgtgtttcctttatttttccttcaaaaattttatggtgacaattgttgagatttgcgatttggccactttaccattgaatattgccttgtattacttggttgcttttcacagaacctctgacatacccagttcgtatattgatcttcttgtttatttaaacctaaaacacaaacttagaaagctaag

SEQ ID NO: 23450 - DNA, 572 bp, synthetic construct
  source 1..572: mol_type = other DNA
cgcggcatccaaccgcgttacggtcaagcacttctgtttccccggtccgcaaggatcgttacccgcccgacccactacgagaagcccagtaactggccaagtggtcgcgaggttgcactcagccacaaccccagtggtagctctggaagatggggctcgcagttcccccgtggtaacacggttgcctgcccgcgcgtgcttccgggttcggctctcgccgttcacctcaaccccacgtaaccagccaagagcctattgtgctgggacggtattcctccggggccgtgaatgctgctaatcccaacctccgagcgtgtgcgcacaatccagtgttgctacgtcgtaatgcgtaagttggaggcggaacagactactttcggtaccccgtgtttcctttatttttccttcaaaaattttatggtgacaattgttgagatttgcgatttggccactttaccattgaatattgccttgtattacttggttgcttttcacagaacctctgacatacccagttcgtatattgatcttcttgtttatttaaacctaaaacacaaacttagaaagctaag

SEQ ID NO: 23451 - DNA, 522 bp, synthetic construct
  source 1..522: mol_type = other DNA
aaggatcgttacccgcccgacccactacgagaagcccagtaactggccaagtggtcgcgaggttgcactcagccacaaccccagtggtagctctggaagatggggctcgcagttcccccgtggtaacacggttgcctgcccgcgcgtgcttccgggttcggctctcgccgttcacctcaaccccacgtaaccagccaagagcctattgtgctgggacggtattcctccggggccgtgaatgctgctaatcccaacctccgagcgtgtgcgcacaatccagtgttgctacgtcgtaatgcgtaagttggaggcggaacagactactttcggtaccccgtgtttcctttatttttccttcaaaaattttatggtgacaattgttgagatttgcgatttggccactttaccattgaatattgccttgtattacttggttgcttttcacagaacctctgacatacccagttcgtatattgatcttcttgtttatttaaacctaaaacacaaacttagaaagctaag

SEQ ID NO: 23452 - DNA, 772 bp, synthetic construct
  source 1..772: mol_type = other DNA
tactctggtacgctagtacctttgtacgcctgtttttcccctcccttaaataaatcaaggttgccactactgaggggagtagtccgactccgctccagcaatgctgcaccagtgcactggtacgctagtaccttttcacggagtagatggtatcccttaccccggaacctagaagattgcacacaaaccgaccaataggcgcaccgcatccagccgtgcagcggtcaagcacttctgtctccccggtctgtaaagatcgttatccgcccgacccactacgaaaagcctagtaactggccaagtgaacgcgaagttgcgctccgccacaaccccagtggtagctctggaagatggggctcgcaccacccccgtggtaacacggttgcctgcccgcgtgtgcttccgggttcggtctcgtgccgttcacttcaacttcacgcaaccagccaagagcctattgtgctgggacggttttcctccggggccgtgaatgctgctaatcccaacctccgagcgtgtgcgcacaatccagtgttgctacgtcgtaacgcgtaagttggaggcggaacagactactttcggtaccccgtgtttcctctcattttatttaatattttatggtgacaattgttgagatttgcgctcttgcaacgttgccattgaatattggcttatactatttggttgccttttacaaaacctctgatatacccagttcttacattgatctgcttgtttttctcaatttgaagtatagactacaaatagcaaa

SEQ ID NO: 23453 - DNA, 722 bp, synthetic construct
  source 1..722: mol_type = other DNA
taaatcaaggttgccactactgaggggagtagtccgactccgctccagcaatgctgcaccagtgcactggtacgctagtaccttttcacggagtagatggtatcccttaccccggaacctagaagattgcacacaaaccgaccaataggcgcaccgcatccagccgtgcagcggtcaagcacttctgtctccccggtctgtaaagatcgttatccgcccgacccactacgaaaagcctagtaactggccaagtgaacgcgaagttgcgctccgccacaaccccagtggtagctctggaagatggggctcgcaccacccccgtggtaacacggttgcctgcccgcgtgtgcttccgggttcggtctcgtgccgttcacttcaacttcacgcaaccagccaagagcctattgtgctgggacggttttcctccggggccgtgaatgctgctaatcccaacctccgagcgtgtgcgcacaatccagtgttgctacgtcgtaacgcgtaagttggaggcggaacagactactttcggtaccccgtgtttcctctcattttatttaatattttatggtgacaattgttgagatttgcgctcttgcaacgttgccattgaatattggcttatactatttggttgccttttacaaaacctctgatatacccagttcttacattgatctgcttgtttttctcaatttgaagtatagactacaaatagcaaa

SEQ ID NO: 23454 - DNA, 672 bp, synthetic construct
  source 1..672: mol_type = other DNA
atgctgcaccagtgcactggtacgctagtaccttttcacggagtagatggtatcccttaccccggaacctagaagattgcacacaaaccgaccaataggcgcaccgcatccagccgtgcagcggtcaagcacttctgtctccccggtctgtaaagatcgttatccgcccgacccactacgaaaagcctagtaactggccaagtgaacgcgaagttgcgctccgccacaaccccagtggtagctctggaagatggggctcgcaccacccccgtggtaacacggttgcctgcccgcgtgtgcttccgggttcggtctcgtgccgttcacttcaacttcacgcaaccagccaagagcctattgtgctgggacggttttcctccggggccgtgaatgctgctaatcccaacctccgagcgtgtgcgcacaatccagtgttgctacgtcgtaacgcgtaagttggaggcggaacagactactttcggtaccccgtgtttcctctcattttatttaatattttatggtgacaattgttgagatttgcgctcttgcaacgttgccattgaatattggcttatactatttggttgccttttacaaaacctctgatatacccagttcttacattgatctgcttgtttttctcaatttgaagtatagactacaaatagcaaa

SEQ ID NO: 23455 - DNA, 622 bp, synthetic construct
  source 1..622: mol_type = other DNA
tatcccttaccccggaacctagaagattgcacacaaaccgaccaataggcgcaccgcatccagccgtgcagcggtcaagcacttctgtctccccggtctgtaaagatcgttatccgcccgacccactacgaaaagcctagtaactggccaagtgaacgcgaagttgcgctccgccacaaccccagtggtagctctggaagatggggctcgcaccacccccgtggtaacacggttgcctgcccgcgtgtgcttccgggttcggtctcgtgccgttcacttcaacttcacgcaaccagccaagagcctattgtgctgggacggttttcctccggggccgtgaatgctgctaatcccaacctccgagcgtgtgcgcacaatccagtgttgctacgtcgtaacgcgtaagttggaggcggaacagactactttcggtaccccgtgtttcctctcattttatttaatattttatggtgacaattgttgagatttgcgctcttgcaacgttgccattgaatattggcttatactatttggttgccttttacaaaacctctgatatacccagttcttacattgatctgcttgtttttctcaatttgaagtatagactacaaatagcaaa

SEQ ID NO: 23456 - DNA, 572 bp, synthetic construct
  source 1..572: mol_type = other DNA
gcaccgcatccagccgtgcagcggtcaagcacttctgtctccccggtctgtaaagatcgttatccgcccgacccactacgaaaagcctagtaactggccaagtgaacgcgaagttgcgctccgccacaaccccagtggtagctctggaagatggggctcgcaccacccccgtggtaacacggttgcctgcccgcgtgtgcttccgggttcggtctcgtgccgttcacttcaacttcacgcaaccagccaagagcctattgtgctgggacggttttcctccggggccgtgaatgctgctaatcccaacctccgagcgtgtgcgcacaatccagtgttgctacgtcgtaacgcgtaagttggaggcggaacagactactttcggtaccccgtgtttcctctcattttatttaatattttatggtgacaattgttgagatttgcgctcttgcaacgttgccattgaatattggcttatactatttggttgccttttacaaaacctctgatatacccagttcttacattgatctgcttgtttttctcaatttgaagtatagactacaaatagcaaa

SEQ ID NO: 23457 - DNA, 522 bp, synthetic construct
  source 1..522: mol_type = other DNA
taaagatcgttatccgcccgacccactacgaaaagcctagtaactggccaagtgaacgcgaagttgcgctccgccacaaccccagtggtagctctggaagatggggctcgcaccacccccgtggtaacacggttgcctgcccgcgtgtgcttccgggttcggtctcgtgccgttcacttcaacttcacgcaaccagccaagagcctattgtgctgggacggttttcctccggggccgtgaatgctgctaatcccaacctccgagcgtgtgcgcacaatccagtgttgctacgtcgtaacgcgtaagttggaggcggaacagactactttcggtaccccgtgtttcctctcattttatttaatattttatggtgacaattgttgagatttgcgctcttgcaacgttgccattgaatattggcttatactatttggttgccttttacaaaacctctgatatacccagttcttacattgatctgcttgtttttctcaatttgaagtatagactacaaatagcaaa

SEQ ID NO: 23458 - DNA, 772 bp, synthetic construct
  source 1..772: mol_type = other DNA
gtactctggtacattagtacctttgtacgcctgttttcccctcccttaaataaatcaagattaccactactgaggggagtagtccgactccgctccagcaatgctgcaccagtgcactggtacgctagtaccttttcacggagtagatggtatccccaccccgaaacttagaagcatgtgatcaaatcgaccaataggcgcgcggttgccagccgcgtttcggtcaagcacttctgtttccccggtccgcaaggatcgttacccgcccgacccactgcgagaagcccagtaactggccaagcggtagcgaggttgcactcagccacaaccccagtggtagctctggaagatggggctcgcagttcccccgtggtaacacggatgcctgcccgcgtgtgcttccgggttcggtctcgtgccgttcacctcaataccgcgtaaccagtgaagagcctattgcgctgggacggttttcctccggggccgtgaatgctgctaatcctaacctctgagcgtgtgcgcacaatccagtgttgctacgtcgtaacgcgtaagtcaggggcggaacagactactttcggtaccccgtgtttccttttattttatatttatcattttatggtgacaattgctgagatttgcgatttagcggttttgccattgaacattgctttgtactacttggttgcatttcacaaaacctccgacatacccagctcctacatcgacttgcttgtttttcttaattaagacataaactagagaacacaaa

SEQ ID NO: 23459 - DNA, 722 bp, synthetic construct
  source 1..722: mol_type = other DNA
taaatcaagattaccactactgaggggagtagtccgactccgctccagcaatgctgcaccagtgcactggtacgctagtaccttttcacggagtagatggtatccccaccccgaaacttagaagcatgtgatcaaatcgaccaataggcgcgcggttgccagccgcgtttcggtcaagcacttctgtttccccggtccgcaaggatcgttacccgcccgacccactgcgagaagcccagtaactggccaagcggtagcgaggttgcactcagccacaaccccagtggtagctctggaagatggggctcgcagttcccccgtggtaacacggatgcctgcccgcgtgtgcttccgggttcggtctcgtgccgttcacctcaataccgcgtaaccagtgaagagcctattgcgctgggacggttttcctccggggccgtgaatgctgctaatcctaacctctgagcgtgtgcgcacaatccagtgttgctacgtcgtaacgcgtaagtcaggggcggaacagactactttcggtaccccgtgtttccttttattttatatttatcattttatggtgacaattgctgagatttgcgatttagcggttttgccattgaacattgctttgtactacttggttgcatttcacaaaacctccgacatacccagctcctacatcgacttgcttgtttttcttaattaagacataaactagagaacacaaa

SEQ ID NO: 23460 - DNA, 672 bp, synthetic construct
  source 1..672: mol_type = other DNA
atgctgcaccagtgcactggtacgctagtaccttttcacggagtagatggtatccccaccccgaaacttagaagcatgtgatcaaatcgaccaataggcgcgcggttgccagccgcgtttcggtcaagcacttctgtttccccggtccgcaaggatcgttacccgcccgacccactgcgagaagcccagtaactggccaagcggtagcgaggttgcactcagccacaaccccagtggtagctctggaagatggggctcgcagttcccccgtggtaacacggatgcctgcccgcgtgtgcttccgggttcggtctcgtgccgttcacctcaataccgcgtaaccagtgaagagcctattgcgctgggacggttttcctccggggccgtgaatgctgctaatcctaacctctgagcgtgtgcgcacaatccagtgttgctacgtcgtaacgcgtaagtcaggggcggaacagactactttcggtaccccgtgtttccttttattttatatttatcattttatggtgacaattgctgagatttgcgatttagcggttttgccattgaacattgctttgtactacttggttgcatttcacaaaacctccgacatacccagctcctacatcgacttgcttgtttttcttaattaagacataaactagagaacacaaa

SEQ ID NO: 23461 - DNA, 622 bp, synthetic construct
  source 1..622: mol_type = other DNA
tatccccaccccgaaacttagaagcatgtgatcaaatcgaccaataggcgcgcggttgccagccgcgtttcggtcaagcacttctgtttccccggtccgcaaggatcgttacccgcccgacccactgcgagaagcccagtaactggccaagcggtagcgaggttgcactcagccacaaccccagtggtagctctggaagatggggctcgcagttcccccgtggtaacacggatgcctgcccgcgtgtgcttccgggttcggtctcgtgccgttcacctcaataccgcgtaaccagtgaagagcctattgcgctgggacggttttcctccggggccgtgaatgctgctaatcctaacctctgagcgtgtgcgcacaatccagtgttgctacgtcgtaacgcgtaagtcaggggcggaacagactactttcggtaccccgtgtttccttttattttatatttatcattttatggtgacaattgctgagatttgcgatttagcggttttgccattgaacattgctttgtactacttggttgcatttcacaaaacctccgacatacccagctcctacatcgacttgcttgtttttcttaattaagacataaactagagaacacaaa

SEQ ID NO: 23462 - DNA, 572 bp, synthetic construct
  source 1..572: mol_type = other DNA
cgcggttgccagccgcgtttcggtcaagcacttctgtttccccggtccgcaaggatcgttacccgcccgacccactgcgagaagcccagtaactggccaagcggtagcgaggttgcactcagccacaaccccagtggtagctctggaagatggggctcgcagttcccccgtggtaacacggatgcctgcccgcgtgtgcttccgggttcggtctcgtgccgttcacctcaataccgcgtaaccagtgaagagcctattgcgctgggacggttttcctccggggccgtgaatgctgctaatcctaacctctgagcgtgtgcgcacaatccagtgttgctacgtcgtaacgcgtaagtcaggggcggaacagactactttcggtaccccgtgtttccttttattttatatttatcattttatggtgacaattgctgagatttgcgatttagcggttttgccattgaacattgctttgtactacttggttgcatttcacaaaacctccgacatacccagctcctacatcgacttgcttgtttttcttaattaagacataaactagagaacacaaa

SEQ ID NO: 23463 - DNA, 522 bp, synthetic construct
  source 1..522: mol_type = other DNA
aaggatcgttacccgcccgacccactgcgagaagcccagtaactggccaagcggtagcgaggttgcactcagccacaaccccagtggtagctctggaagatggggctcgcagttcccccgtggtaacacggatgcctgcccgcgtgtgcttccgggttcggtctcgtgccgttcacctcaataccgcgtaaccagtgaagagcctattgcgctgggacggttttcctccggggccgtgaatgctgctaatcctaacctctgagcgtgtgcgcacaatccagtgttgctacgtcgtaacgcgtaagtcaggggcggaacagactactttcggtaccccgtgtttccttttattttatatttatcattttatggtgacaattgctgagatttgcgatttagcggttttgccattgaacattgctttgtactacttggttgcatttcacaaaacctccgacatacccagctcctacatcgacttgcttgtttttcttaattaagacataaactagagaacacaaa

SEQ ID NO: 23464 - DNA, 773 bp, synthetic construct
  source 1..773: mol_type = other DNA
gtactctggtacgttagtacccttgtacgcctgtttttccctcccttaaataaattaagactaccactactgaggggagtagtccgactccgctccggcactgccgcaccagtacaccggtacgctagtacccttgtacggagtagatggtatccccacccccgaaacttagaagcaagcacacaaaccgaccattaggcgcgcggcatccagtcgcgtaacggtcaagcacttctgtttccccggtccgcaaggatcgttacccgcccgacccactacgagaagcctagtagttggccaagtgaacgcgaggttgcgctcagccacaaccccagtggtagctctggaagatggggctcgcacttcccccgtggtaacacggttgcttgcccgcgcgtgcttccgggttcggcttcgtgccgttcacctcaacttcacgtaaccagcaaagagcctattgtgctgggacggttttcctccggggccgtgaatgctgctaatcccaacctccgagcgtgtgcgcacaatccagtgttgctacgtcgtaacgcgtaagttggaggcggaacagactactttcggtaccccgtgtttccttttaattttattcattattttatggtgacaattgctgagatttgtgatttggcgactttaccattgaatattgcattctattaccttatagcatttcacaaaacttctgatattccaccctcctacatcgacctgcttgttttcctgaatctcaaatataaatttgaagagacaaa

SEQ ID NO: 23465 - DNA, 723 bp, synthetic construct
  source 1..723: mol_type = other DNA
taaattaagactaccactactgaggggagtagtccgactccgctccggcactgccgcaccagtacaccggtacgctagtacccttgtacggagtagatggtatccccacccccgaaacttagaagcaagcacacaaaccgaccattaggcgcgcggcatccagtcgcgtaacggtcaagcacttctgtttccccggtccgcaaggatcgttacccgcccgacccactacgagaagcctagtagttggccaagtgaacgcgaggttgcgctcagccacaaccccagtggtagctctggaagatggggctcgcacttcccccgtggtaacacggttgcttgcccgcgcgtgcttccgggttcggcttcgtgccgttcacctcaacttcacgtaaccagcaaagagcctattgtgctgggacggttttcctccggggccgtgaatgctgctaatcccaacctccgagcgtgtgcgcacaatccagtgttgctacgtcgtaacgcgtaagttggaggcggaacagactactttcggtaccccgtgtttccttttaattttattcattattttatggtgacaattgctgagatttgtgatttggcgactttaccattgaatattgcattctattaccttatagcatttcacaaaacttctgatattccaccctcctacatcgacctgcttgttttcctgaatctcaaatataaatttgaagagacaaa

SEQ ID NO: 23466 - DNA, 673 bp, synthetic construct
  source 1..673: mol_type = other DNA
ctgccgcaccagtacaccggtacgctagtacccttgtacggagtagatggtatccccacccccgaaacttagaagcaagcacacaaaccgaccattaggcgcgcggcatccagtcgcgtaacggtcaagcacttctgtttccccggtccgcaaggatcgttacccgcccgacccactacgagaagcctagtagttggccaagtgaacgcgaggttgcgctcagccacaaccccagtggtagctctggaagatggggctcgcacttcccccgtggtaacacggttgcttgcccgcgcgtgcttccgggttcggcttcgtgccgttcacctcaacttcacgtaaccagcaaagagcctattgtgctgggacggttttcctccggggccgtgaatgctgctaatcccaacctccgagcgtgtgcgcacaatccagtgttgctacgtcgtaacgcgtaagttggaggcggaacagactactttcggtaccccgtgtttccttttaattttattcattattttatggtgacaattgctgagatttgtgatttggcgactttaccattgaatattgcattctattaccttatagcatttcacaaaacttctgatattccaccctcctacatcgacctgcttgttttcctgaatctcaaatataaatttgaagagacaaa

SEQ ID NO: 23467 - DNA, 623 bp, synthetic construct
  source 1..623: mol_type = other DNA
tatccccacccccgaaacttagaagcaagcacacaaaccgaccattaggcgcgcggcatccagtcgcgtaacggtcaagcacttctgtttccccggtccgcaaggatcgttacccgcccgacccactacgagaagcctagtagttggccaagtgaacgcgaggttgcgctcagccacaaccccagtggtagctctggaagatggggctcgcacttcccccgtggtaacacggttgcttgcccgcgcgtgcttccgggttcggcttcgtgccgttcacctcaacttcacgtaaccagcaaagagcctattgtgctgggacggttttcctccggggccgtgaatgctgctaatcccaacctccgagcgtgtgcgcacaatccagtgttgctacgtcgtaacgcgtaagttggaggcggaacagactactttcggtaccccgtgtttccttttaattttattcattattttatggtgacaattgctgagatttgtgatttggcgactttaccattgaatattgcattctattaccttatagcatttcacaaaacttctgatattccaccctcctacatcgacctgcttgttttcctgaatctcaaatataaatttgaagagacaaa

SEQ ID NO: 23468 - DNA, 573 bp, synthetic construct
  source 1..573: mol_type = other DNA
gcgcggcatccagtcgcgtaacggtcaagcacttctgtttccccggtccgcaaggatcgttacccgcccgacccactacgagaagcctagtagttggccaagtgaacgcgaggttgcgctcagccacaaccccagtggtagctctggaagatggggctcgcacttcccccgtggtaacacggttgcttgcccgcgcgtgcttccgggttcggcttcgtgccgttcacctcaacttcacgtaaccagcaaagagcctattgtgctgggacggttttcctccggggccgtgaatgctgctaatcccaacctccgagcgtgtgcgcacaatccagtgttgctacgtcgtaacgcgtaagttggaggcggaacagactactttcggtaccccgtgtttccttttaattttattcattattttatggtgacaattgctgagatttgtgatttggcgactttaccattgaatattgcattctattaccttatagcatttcacaaaacttctgatattccaccctcctacatcgacctgcttgttttcctgaatctcaaatataaatttgaagagacaaa

SEQ ID NO: 23469 - DNA, 523 bp, synthetic construct
  source 1..523: mol_type = other DNA
caaggatcgttacccgcccgacccactacgagaagcctagtagttggccaagtgaacgcgaggttgcgctcagccacaaccccagtggtagctctggaagatggggctcgcacttcccccgtggtaacacggttgcttgcccgcgcgtgcttccgggttcggcttcgtgccgttcacctcaacttcacgtaaccagcaaagagcctattgtgctgggacggttttcctccggggccgtgaatgctgctaatcccaacctccgagcgtgtgcgcacaatccagtgttgctacgtcgtaacgcgtaagttggaggcggaacagactactttcggtaccccgtgtttccttttaattttattcattattttatggtgacaattgctgagatttgtgatttggcgactttaccattgaatattgcattctattaccttatagcatttcacaaaacttctgatattccaccctcctacatcgacctgcttgttttcctgaatctcaaatataaatttgaagagacaaa

SEQ ID NO: 23470 - DNA, 780 bp, synthetic construct
  source 1..780: mol_type = other DNA
ctcacctgtcaattgggaccaccactttcagtgaccccatgcgaagtgctgagagaaaggaagctttcttacccttcatttgtgaacccactggtctaagccgcttggaatacgatgagtggaaaagttcattcttaatggagtgaaacatgcttaaatttccagctcgtgctggtctttccagtacggggcggccctgtctggccgtaattcttcagagtgtcacgccacacttgtggatctcacgtgccacatgacagcgctacagctggaactgggtgcttggtgcccatggagtaacagcgaaaagtgttagatcaagccttgcttgggctatgagcctgcggaacaacaactggtaacagttgcctcaggggccgaaagccacggtgttaacagcaccctcatagtttgatccacctcagggtggtgatgtttagcagttagtagttgccaatctgtgttcactgaaatctcggcataccgtgtagtgtacaggggtgaaggatgcccagaaggtacccgtaggtaaccttaagagactatggatctgatctggggccttgtccggagtgctttacacacggctcaaggttaaaaaacgtctagccccacagagcccgagggattcgggttttccctttaaaaacccgactagagcttatggtgacaattattgctgttcagacgaacagtgtaattgttgtctattcacagcagttctatcagagcttttcccacaacggatcttcttggcaagcaaatacagcaggagtcaat

SEQ ID NO: 23471 - DNA, 730 bp, synthetic construct
  source 1..730: mol_type = other DNA
gagagaaaggaagctttcttacccttcatttgtgaacccactggtctaagccgcttggaatacgatgagtggaaaagttcattcttaatggagtgaaacatgcttaaatttccagctcgtgctggtctttccagtacggggcggccctgtctggccgtaattcttcagagtgtcacgccacacttgtggatctcacgtgccacatgacagcgctacagctggaactgggtgcttggtgcccatggagtaacagcgaaaagtgttagatcaagccttgcttgggctatgagcctgcggaacaacaactggtaacagttgcctcaggggccgaaagccacggtgttaacagcaccctcatagtttgatccacctcagggtggtgatgtttagcagttagtagttgccaatctgtgttcactgaaatctcggcataccgtgtagtgtacaggggtgaaggatgcccagaaggtacccgtaggtaaccttaagagactatggatctgatctggggccttgtccggagtgctttacacacggctcaaggttaaaaaacgtctagccccacagagcccgagggattcgggttttccctttaaaaacccgactagagcttatggtgacaattattgctgttcagacgaacagtgtaattgttgtctattcacagcagttctatcagagcttttcccacaacggatcttcttggcaagcaaatacagcaggagtcaat

SEQ ID NO: 23472 - DNA, 680 bp, synthetic construct
  source 1..680: mol_type = other DNA
ccgcttggaatacgatgagtggaaaagttcattcttaatggagtgaaacatgcttaaatttccagctcgtgctggtctttccagtacggggcggccctgtctggccgtaattcttcagagtgtcacgccacacttgtggatctcacgtgccacatgacagcgctacagctggaactgggtgcttggtgcccatggagtaacagcgaaaagtgttagatcaagccttgcttgggctatgagcctgcggaacaacaactggtaacagttgcctcaggggccgaaagccacggtgttaacagcaccctcatagtttgatccacctcagggtggtgatgtttagcagttagtagttgccaatctgtgttcactgaaatctcggcataccgtgtagtgtacaggggtgaaggatgcccagaaggtacccgtaggtaaccttaagagactatggatctgatctggggccttgtccggagtgctttacacacggctcaaggttaaaaaacgtctagccccacagagcccgagggattcgggttttccctttaaaaacccgactagagcttatggtgacaattattgctgttcagacgaacagtgtaattgttgtctattcacagcagttctatcagagcttttcccacaacggatcttcttggcaagcaaatacagcaggagtcaat

SEQ ID NO: 23473 - DNA, 630 bp, synthetic construct
  source 1..630: mol_type = other DNA
tgcttaaatttccagctcgtgctggtctttccagtacggggcggccctgtctggccgtaattcttcagagtgtcacgccacacttgtggatctcacgtgccacatgacagcgctacagctggaactgggtgcttggtgcccatggagtaacagcgaaaagtgttagatcaagccttgcttgggctatgagcctgcggaacaacaactggtaacagttgcctcaggggccgaaagccacggtgttaacagcaccctcatagtttgatccacctcagggtggtgatgtttagcagttagtagttgccaatctgtgttcactgaaatctcggcataccgtgtagtgtacaggggtgaaggatgcccagaaggtacccgtaggtaaccttaagagactatggatctgatctggggccttgtccggagtgctttacacacggctcaaggttaaaaaacgtctagccccacagagcccgagggattcgggttttccctttaaaaacccgactagagcttatggtgacaattattgctgttcagacgaacagtgtaattgttgtctattcacagcagttctatcagagcttttcccacaacggatcttcttggcaagcaaatacagcaggagtcaat

SEQ ID NO: 23474 - DNA, 580 bp, synthetic construct
  source 1..580: mol_type = other DNA
ctggccgtaattcttcagagtgtcacgccacacttgtggatctcacgtgccacatgacagcgctacagctggaactgggtgcttggtgcccatggagtaacagcgaaaagtgttagatcaagccttgcttgggctatgagcctgcggaacaacaactggtaacagttgcctcaggggccgaaagccacggtgttaacagcaccctcatagtttgatccacctcagggtggtgatgtttagcagttagtagttgccaatctgtgttcactgaaatctcggcataccgtgtagtgtacaggggtgaaggatgcccagaaggtacccgtaggtaaccttaagagactatggatctgatctggggccttgtccggagtgctttacacacggctcaaggttaaaaaacgtctagccccacagagcccgagggattcgggttttccctttaaaaacccgactagagcttatggtgacaattattgctgttcagacgaacagtgtaattgttgtctattcacagcagttctatcagagcttttcccacaacggatcttcttggcaagcaaatacagcaggagtcaat

SEQ ID NO: 23475 - DNA, 530 bp, synthetic construct
  source 1..530: mol_type = other DNA
cacatgacagcgctacagctggaactgggtgcttggtgcccatggagtaacagcgaaaagtgttagatcaagccttgcttgggctatgagcctgcggaacaacaactggtaacagttgcctcaggggccgaaagccacggtgttaacagcaccctcatagtttgatccacctcagggtggtgatgtttagcagttagtagttgccaatctgtgttcactgaaatctcggcataccgtgtagtgtacaggggtgaaggatgcccagaaggtacccgtaggtaaccttaagagactatggatctgatctggggccttgtccggagtgctttacacacggctcaaggttaaaaaacgtctagccccacagagcccgagggattcgggttttccctttaaaaacccgactagagcttatggtgacaattattgctgttcagacgaacagtgtaattgttgtctattcacagcagttctatcagagcttttcccacaacggatcttcttggcaagcaaatacagcaggagtcaat

SEQ ID NO: 23476 - DNA, 787 bp, synthetic construct
  source 1..787: mol_type = other DNA
cgtggcgctagtactctggtacgttagtacctttgtacgcctgttttcccctccttaaataaattaagattaccactactgaggggagtagtccgactccgctccagcaatgctgcaccagtgaattggtacgctagtacctctgcacggagtagatggtatccctttccccgaaacttagaagaaagcaaacaaaccgaccaataggagcgcggcaaccagccgtgttgcggtcaagcacttctgtttccccggtccgcaaggatcgttatccgcccgacccactacggaaagcctagtaactggccaaacagcaaagaagttgcgctcggccacaaccccagtggtagctctggaggatggggctcgcatctcccccgtggtaacacggttgcttgcccgcgtgtgcctccgggttcagtcatcgactgttcacttcaatgctgtgtaaccagccaagagcctactgtgctgggacggttttcctccggggccgtgaatgctgctaatcccaacctccgagcgtgtgcgcacaaaccagtgttgctacgtcgtaacgcgtaagtcggaggcggaacagactactttcggtaccccgtgtttcctttgatttttatttaatattttatggtgacaattactgagatttgtgatttggctgctttaccattgaatattgctctgtactatttagtcgcatttcacaaaacttctgagatccctgcgtcttttattgacttgcttgttttcctcaatttgaagtgcaaactagaaggcataaaaagag

SEQ ID NO: 23477 - DNA, 737 bp, synthetic construct
  source 1..737: mol_type = other DNA
ctccttaaataaattaagattaccactactgaggggagtagtccgactccgctccagcaatgctgcaccagtgaattggtacgctagtacctctgcacggagtagatggtatccctttccccgaaacttagaagaaagcaaacaaaccgaccaataggagcgcggcaaccagccgtgttgcggtcaagcacttctgtttccccggtccgcaaggatcgttatccgcccgacccactacggaaagcctagtaactggccaaacagcaaagaagttgcgctcggccacaaccccagtggtagctctggaggatggggctcgcatctcccccgtggtaacacggttgcttgcccgcgtgtgcctccgggttcagtcatcgactgttcacttcaatgctgtgtaaccagccaagagcctactgtgctgggacggttttcctccggggccgtgaatgctgctaatcccaacctccgagcgtgtgcgcacaaaccagtgttgctacgtcgtaacgcgtaagtcggaggcggaacagactactttcggtaccccgtgtttcctttgatttttatttaatattttatggtgacaattactgagatttgtgatttggctgctttaccattgaatattgctctgtactatttagtcgcatttcacaaaacttctgagatccctgcgtcttttattgacttgcttgttttcctcaatttgaagtgcaaactagaaggcataaaaagag

SEQ ID NO: 23478 - DNA, 687 bp, synthetic construct
  source 1..687: mol_type = other DNA
gctccagcaatgctgcaccagtgaattggtacgctagtacctctgcacggagtagatggtatccctttccccgaaacttagaagaaagcaaacaaaccgaccaataggagcgcggcaaccagccgtgttgcggtcaagcacttctgtttccccggtccgcaaggatcgttatccgcccgacccactacggaaagcctagtaactggccaaacagcaaagaagttgcgctcggccacaaccccagtggtagctctggaggatggggctcgcatctcccccgtggtaacacggttgcttgcccgcgtgtgcctccgggttcagtcatcgactgttcacttcaatgctgtgtaaccagccaagagcctactgtgctgggacggttttcctccggggccgtgaatgctgctaatcccaacctccgagcgtgtgcgcacaaaccagtgttgctacgtcgtaacgcgtaagtcggaggcggaacagactactttcggtaccccgtgtttcctttgatttttatttaatattttatggtgacaattactgagatttgtgatttggctgctttaccattgaatattgctctgtactatttagtcgcatttcacaaaacttctgagatccctgcgtcttttattgacttgcttgttttcctcaatttgaagtgcaaactagaaggcataaaaagag

SEQ ID NO: 23479 - DNA, 637 bp, synthetic construct
  source 1..637: mol_type = other DNA
agtagatggtatccctttccccgaaacttagaagaaagcaaacaaaccgaccaataggagcgcggcaaccagccgtgttgcggtcaagcacttctgtttccccggtccgcaaggatcgttatccgcccgacccactacggaaagcctagtaactggccaaacagcaaagaagttgcgctcggccacaaccccagtggtagctctggaggatggggctcgcatctcccccgtggtaacacggttgcttgcccgcgtgtgcctccgggttcagtcatcgactgttcacttcaatgctgtgtaaccagccaagagcctactgtgctgggacggttttcctccggggccgtgaatgctgctaatcccaacctccgagcgtgtgcgcacaaaccagtgttgctacgtcgtaacgcgtaagtcggaggcggaacagactactttcggtaccccgtgtttcctttgatttttatttaatattttatggtgacaattactgagatttgtgatttggctgctttaccattgaatattgctctgtactatttagtcgcatttcacaaaacttctgagatccctgcgtcttttattgacttgcttgttttcctcaatttgaagtgcaaactagaaggcataaaaagag

SEQ ID NO: 23480 - DNA, 587 bp, synthetic construct
  source 1..587: mol_type = other DNA
ccaataggagcgcggcaaccagccgtgttgcggtcaagcacttctgtttccccggtccgcaaggatcgttatccgcccgacccactacggaaagcctagtaactggccaaacagcaaagaagttgcgctcggccacaaccccagtggtagctctggaggatggggctcgcatctcccccgtggtaacacggttgcttgcccgcgtgtgcctccgggttcagtcatcgactgttcacttcaatgctgtgtaaccagccaagagcctactgtgctgggacggttttcctccggggccgtgaatgctgctaatcccaacctccgagcgtgtgcgcacaaaccagtgttgctacgtcgtaacgcgtaagtcggaggcggaacagactactttcggtaccccgtgtttcctttgatttttatttaatattttatggtgacaattactgagatttgtgatttggctgctttaccattgaatattgctctgtactatttagtcgcatttcacaaaacttctgagatccctgcgtcttttattgacttgcttgttttcctcaatttgaagtgcaaactagaaggcataaaaagag

SEQ ID NO: 23481 - DNA, 537 bp, synthetic construct
  source 1..537: mol_type = other DNA
cccggtccgcaaggatcgttatccgcccgacccactacggaaagcctagtaactggccaaacagcaaagaagttgcgctcggccacaaccccagtggtagctctggaggatggggctcgcatctcccccgtggtaacacggttgcttgcccgcgtgtgcctccgggttcagtcatcgactgttcacttcaatgctgtgtaaccagccaagagcctactgtgctgggacggttttcctccggggccgtgaatgctgctaatcccaacctccgagcgtgtgcgcacaaaccagtgttgctacgtcgtaacgcgtaagtcggaggcggaacagactactttcggtaccccgtgtttcctttgatttttatttaatattttatggtgacaattactgagatttgtgatttggctgctttaccattgaatattgctctgtactatttagtcgcatttcacaaaacttctgagatccctgcgtcttttattgacttgcttgttttcctcaatttgaagtgcaaactagaaggcataaaaagag

SEQ ID NO: 23482 - DNA, 797 bp, synthetic construct
  source 1..797: mol_type = other DNA
tactctgcttcgttagaagccttgtacgcctgttttcccctccttaaataaattaagattaccacttccgaggggagtagtccgactccgctccgatacgtcgctccagtgcgctagtacgcttagtactttctcacggggatagtggtacccctccctagtaatttagaagacttgaaaaaccgaccaataggcacctcgcatccagcggggtaaaggtcaagcacttctgtttccccgggtcgagtagcgatagactgtgcccacggtcgaaggtgaaacaacccgttatccgactttgtacttcgggaagcctagtaccaccaaagattatgcttggggtttcgctcagcacgaccctggtgtagatcaggctgatggatcaccgcgttcctcacaggcgactgtggcggtggtcgcgtggcagcctgccgatggggcaacccatcggacgccaagcatatgacagggtgtgaagagcctactgagctacaaagtattcctccggcccctgaatgcggctaatcccaaccacggagcatttgctaccaaaccaggtagtggaatgtcgtaacgggtaactctgtggcggaaccgactactttgggtgtccgtgtttccttttaatttatcattctgtgtatggtgacaactatagtgctatctcgatttgcattactattgttgagattgacactttattacattgttgcattttaccctttgagtgagttttcacctgaacagattaatttacttatcctgtttatatatcacaagcagaaatacttgcaaag

SEQ ID NO: 23483 - DNA, 747 bp, synthetic construct
  source 1..747: mol_type = other DNA
aattaagattaccacttccgaggggagtagtccgactccgctccgatacgtcgctccagtgcgctagtacgcttagtactttctcacggggatagtggtacccctccctagtaatttagaagacttgaaaaaccgaccaataggcacctcgcatccagcggggtaaaggtcaagcacttctgtttccccgggtcgagtagcgatagactgtgcccacggtcgaaggtgaaacaacccgttatccgactttgtacttcgggaagcctagtaccaccaaagattatgcttggggtttcgctcagcacgaccctggtgtagatcaggctgatggatcaccgcgttcctcacaggcgactgtggcggtggtcgcgtggcagcctgccgatggggcaacccatcggacgccaagcatatgacagggtgtgaagagcctactgagctacaaagtattcctccggcccctgaatgcggctaatcccaaccacggagcatttgctaccaaaccaggtagtggaatgtcgtaacgggtaactctgtggcggaaccgactactttgggtgtccgtgtttccttttaatttatcattctgtgtatggtgacaactatagtgctatctcgatttgcattactattgttgagattgacactttattacattgttgcattttaccctttgagtgagttttcacctgaacagattaatttacttatcctgtttatatatcacaagcagaaatacttgcaaag

SEQ ID NO: 23484 - DNA, 697 bp, synthetic construct
  source 1..697: mol_type = other DNA
tcgctccagtgcgctagtacgcttagtactttctcacggggatagtggtacccctccctagtaatttagaagacttgaaaaaccgaccaataggcacctcgcatccagcggggtaaaggtcaagcacttctgtttccccgggtcgagtagcgatagactgtgcccacggtcgaaggtgaaacaacccgttatccgactttgtacttcgggaagcctagtaccaccaaagattatgcttggggtttcgctcagcacgaccctggtgtagatcaggctgatggatcaccgcgttcctcacaggcgactgtggcggtggtcgcgtggcagcctgccgatggggcaacccatcggacgccaagcatatgacagggtgtgaagagcctactgagctacaaagtattcctccggcccctgaatgcggctaatcccaaccacggagcatttgctaccaaaccaggtagtggaatgtcgtaacgggtaactctgtggcggaaccgactactttgggtgtccgtgtttccttttaatttatcattctgtgtatggtgacaactatagtgctatctcgatttgcattactattgttgagattgacactttattacattgttgcattttaccctttgagtgagttttcacctgaacagattaatttacttatcctgtttatatatcacaagcagaaatacttgcaaag

SEQ ID NO: 23485 - DNA, 647 bp, synthetic construct
  source 1..647: mol_type = other DNA
cccctccctagtaatttagaagacttgaaaaaccgaccaataggcacctcgcatccagcggggtaaaggtcaagcacttctgtttccccgggtcgagtagcgatagactgtgcccacggtcgaaggtgaaacaacccgttatccgactttgtacttcgggaagcctagtaccaccaaagattatgcttggggtttcgctcagcacgaccctggtgtagatcaggctgatggatcaccgcgttcctcacaggcgactgtggcggtggtcgcgtggcagcctgccgatggggcaacccatcggacgccaagcatatgacagggtgtgaagagcctactgagctacaaagtattcctccggcccctgaatgcggctaatcccaaccacggagcatttgctaccaaaccaggtagtggaatgtcgtaacgggtaactctgtggcggaaccgactactttgggtgtccgtgtttccttttaatttatcattctgtgtatggtgacaactatagtgctatctcgatttgcattactattgttgagattgacactttattacattgttgcattttaccctttgagtgagttttcacctgaacagattaatttacttatcctgtttatatatcacaagcagaaatacttgcaaag

SEQ ID NO: 23486 - DNA, 597 bp, synthetic construct
  source 1..597: mol_type = other DNA
gcatccagcggggtaaaggtcaagcacttctgtttccccgggtcgagtagcgatagactgtgcccacggtcgaaggtgaaacaacccgttatccgactttgtacttcgggaagcctagtaccaccaaagattatgcttggggtttcgctcagcacgaccctggtgtagatcaggctgatggatcaccgcgttcctcacaggcgactgtggcggtggtcgcgtggcagcctgccgatggggcaacccatcggacgccaagcatatgacagggtgtgaagagcctactgagctacaaagtattcctccggcccctgaatgcggctaatcccaaccacggagcatttgctaccaaaccaggtagtggaatgtcgtaacgggtaactctgtggcggaaccgactactttgggtgtccgtgtttccttttaatttatcattctgtgtatggtgacaactatagtgctatctcgatttgcattactattgttgagattgacactttattacattgttgcattttaccctttgagtgagttttcacctgaacagattaatttacttatcctgtttatatatcacaagcagaaatacttgcaaag

SEQ ID NO: 23487 - DNA, 547 bp, synthetic construct
  source 1..547: mol_type = other DNA
cgatagactgtgcccacggtcgaaggtgaaacaacccgttatccgactttgtacttcgggaagcctagtaccaccaaagattatgcttggggtttcgctcagcacgaccctggtgtagatcaggctgatggatcaccgcgttcctcacaggcgactgtggcggtggtcgcgtggcagcctgccgatggggcaacccatcggacgccaagcatatgacagggtgtgaagagcctactgagctacaaagtattcctccggcccctgaatgcggctaatcccaaccacggagcatttgctaccaaaccaggtagtggaatgtcgtaacgggtaactctgtggcggaaccgactactttgggtgtccgtgtttccttttaatttatcattctgtgtatggtgacaactatagtgctatctcgatttgcattactattgttgagattgacactttattacattgttgcattttaccctttgagtgagttttcacctgaacagattaatttacttatcctgtttatatatcacaagcagaaatacttgcaaag

SEQ ID NO: 23488 - DNA, 817 bp, synthetic construct
  source 1..817: mol_type = other DNA
tttatgggtcgggcctagcccctttctgtaacggtctgtgtgagacctaaaaccacacataatatcgtgcctgatggttaacgcttgttagccgtctgtaaactaagaacctaccaacacactatgcacctcttggcgaagccgcttggaataagttgagaggaattatgcatgctagttgtgtttgtttacaactaattgttctaatccaagtgaagctcttcgcttggggcggcacgacacttgccgtaattcttctaccgtccctccacaccttgtggatgaagggccggatgtgtggcctctggctaacccctctctctggggtgatgctactggatgttttactcctagaccaaatcacatgaactcctcttgatccacttcggtggggctatgagcctgcggattaatagctggcgacagctaccccaggggccaaaagccacggtgttagcagcaccctcatagtctgatgcccaagggctgatgttgggagctagtagtgtgtgtctggcctatgtttaggacttctggccaagcgcagaggagtggggctgaaggatgcccagaaggtacccgtaggtaaccttaagagactatggatctgatctggggccccctcacgtggctttaccacgtgttgggggttaaaaaacgtctaggccccaccagcccacgggagtgggctttcccttaaaaagcccaacaatatttatggtgacaattcactgtttcttctttgcaatttttgtattcttggactccttattttttgtttgcttgattttagtggacattcagattcaaatacaaa

SEQ ID NO: 23489 - DNA, 767 bp, synthetic construct
  source 1..767: mol_type = other DNA
aaccacacataatatcgtgcctgatggttaacgcttgttagccgtctgtaaactaagaacctaccaacacactatgcacctcttggcgaagccgcttggaataagttgagaggaattatgcatgctagttgtgtttgtttacaactaattgttctaatccaagtgaagctcttcgcttggggcggcacgacacttgccgtaattcttctaccgtccctccacaccttgtggatgaagggccggatgtgtggcctctggctaacccctctctctggggtgatgctactggatgttttactcctagaccaaatcacatgaactcctcttgatccacttcggtggggctatgagcctgcggattaatagctggcgacagctaccccaggggccaaaagccacggtgttagcagcaccctcatagtctgatgcccaagggctgatgttgggagctagtagtgtgtgtctggcctatgtttaggacttctggccaagcgcagaggagtggggctgaaggatgcccagaaggtacccgtaggtaaccttaagagactatggatctgatctggggccccctcacgtggctttaccacgtgttgggggttaaaaaacgtctaggccccaccagcccacgggagtgggctttcccttaaaaagcccaacaatatttatggtgacaattcactgtttcttctttgcaatttttgtattcttggactccttattttttgtttgcttgattttagtggacattcagattcaaatacaaa

SEQ ID NO: 23490 - DNA, 717 bp, synthetic construct
  source 1..717: mol_type = other DNA
aactaagaacctaccaacacactatgcacctcttggcgaagccgcttggaataagttgagaggaattatgcatgctagttgtgtttgtttacaactaattgttctaatccaagtgaagctcttcgcttggggcggcacgacacttgccgtaattcttctaccgtccctccacaccttgtggatgaagggccggatgtgtggcctctggctaacccctctctctggggtgatgctactggatgttttactcctagaccaaatcacatgaactcctcttgatccacttcggtggggctatgagcctgcggattaatagctggcgacagctaccccaggggccaaaagccacggtgttagcagcaccctcatagtctgatgcccaagggctgatgttgggagctagtagtgtgtgtctggcctatgtttaggacttctggccaagcgcagaggagtggggctgaaggatgcccagaaggtacccgtaggtaaccttaagagactatggatctgatctggggccccctcacgtggctttaccacgtgttgggggttaaaaaacgtctaggccccaccagcccacgggagtgggctttcccttaaaaagcccaacaatatttatggtgacaattcactgtttcttctttgcaatttttgtattcttggactccttattttttgtttgcttgattttagtggacattcagattcaaatacaaa

SEQ ID NO: 23491 - DNA, 667 bp, synthetic construct
  source 1..667: mol_type = other DNA
ataagttgagaggaattatgcatgctagttgtgtttgtttacaactaattgttctaatccaagtgaagctcttcgcttggggcggcacgacacttgccgtaattcttctaccgtccctccacaccttgtggatgaagggccggatgtgtggcctctggctaacccctctctctggggtgatgctactggatgttttactcctagaccaaatcacatgaactcctcttgatccacttcggtggggctatgagcctgcggattaatagctggcgacagctaccccaggggccaaaagccacggtgttagcagcaccctcatagtctgatgcccaagggctgatgttgggagctagtagtgtgtgtctggcctatgtttaggacttctggccaagcgcagaggagtggggctgaaggatgcccagaaggtacccgtaggtaaccttaagagactatggatctgatctggggccccctcacgtggctttaccacgtgttgggggttaaaaaacgtctaggccccaccagcccacgggagtgggctttcccttaaaaagcccaacaatatttatggtgacaattcactgtttcttctttgcaatttttgtattcttggactccttattttttgtttgcttgattttagtggacattcagattcaaatacaaa

SEQ ID NO: 23492 - DNA, 617 bp, synthetic construct
  source 1..617: mol_type = other DNA
gttctaatccaagtgaagctcttcgcttggggcggcacgacacttgccgtaattcttctaccgtccctccacaccttgtggatgaagggccggatgtgtggcctctggctaacccctctctctggggtgatgctactggatgttttactcctagaccaaatcacatgaactcctcttgatccacttcggtggggctatgagcctgcggattaatagctggcgacagctaccccaggggccaaaagccacggtgttagcagcaccctcatagtctgatgcccaagggctgatgttgggagctagtagtgtgtgtctggcctatgtttaggacttctggccaagcgcagaggagtggggctgaaggatgcccagaaggtacccgtaggtaaccttaagagactatggatctgatctggggccccctcacgtggctttaccacgtgttgggggttaaaaaacgtctaggccccaccagcccacgggagtgggctttcccttaaaaagcccaacaatatttatggtgacaattcactgtttcttctttgcaatttttgtattcttggactccttattttttgtttgcttgattttagtggacattcagattcaaatacaaa

SEQ ID NO: 23493 - DNA, 567 bp, synthetic construct
  source 1..567: mol_type = other DNA
aattcttctaccgtccctccacaccttgtggatgaagggccggatgtgtggcctctggctaacccctctctctggggtgatgctactggatgttttactcctagaccaaatcacatgaactcctcttgatccacttcggtggggctatgagcctgcggattaatagctggcgacagctaccccaggggccaaaagccacggtgttagcagcaccctcatagtctgatgcccaagggctgatgttgggagctagtagtgtgtgtctggcctatgtttaggacttctggccaagcgcagaggagtggggctgaaggatgcccagaaggtacccgtaggtaaccttaagagactatggatctgatctggggccccctcacgtggctttaccacgtgttgggggttaaaaaacgtctaggccccaccagcccacgggagtgggctttcccttaaaaagcccaacaatatttatggtgacaattcactgtttcttctttgcaatttttgtattcttggactccttattttttgtttgcttgattttagtggacattcagattcaaatacaaa

SEQ ID NO: 23494 - DNA, 517 bp, synthetic construct
  source 1..517: mol_type = other DNA
gcctctggctaacccctctctctggggtgatgctactggatgttttactcctagaccaaatcacatgaactcctcttgatccacttcggtggggctatgagcctgcggattaatagctggcgacagctaccccaggggccaaaagccacggtgttagcagcaccctcatagtctgatgcccaagggctgatgttgggagctagtagtgtgtgtctggcctatgtttaggacttctggccaagcgcagaggagtggggctgaaggatgcccagaaggtacccgtaggtaaccttaagagactatggatctgatctggggccccctcacgtggctttaccacgtgttgggggttaaaaaacgtctaggccccaccagcccacgggagtgggctttcccttaaaaagcccaacaatatttatggtgacaattcactgtttcttctttgcaatttttgtattcttggactccttattttttgtttgcttgattttagtggacattcagattcaaatacaaa

SEQ ID NO: 23495 - DNA, 950 bp, synthetic construct
  source 1..950: mol_type = other DNA
ctctcctactcccgactcccgaccctaacccaggttcctcggtataggaacaccactttactcatcccctggatgctgactaatcagaggaacgtcagcattttccggcccaggctaagagaagtagataagttacaatccaaattgatttatcatccccttgacgaattcgcgttggaaaagcacctctcacttgccgctcttcacacccatcattttaattcggcctctgtgttgagccccttgttgaagtgtttctctccatcgcgacgtggttggagatctaagtcaaccgactccgacgaaactaccatcatgtctccccgattatgtgatgctttctgccctgctgggtggagcatcctcgggttgagaaatccttcttcctttcaccttggaccccggtcccccggtctaagccgcttggaataagacagggttattttcacctctttttcttctactccacagtgctctatactgtggaagggtatgtgttgccccttccttcttggagaacgtgcgcggcggtctttccgtctctcgacaagcgcgcgtgcaacatgcagagtaacgcgaagaaagcagttcttggactagctttagtatctgcaagaagacagctgtagcgaccacacaaaggcagcggaacccccctcctggtaacaggagcctctgcggccaaaagccacgtggataagatccacctttgtgtgcggtgcaaccccagcaccctggtttcttgaagatactctagtgaacccttgaatggcaatctcaagcgcctctgtaggaaagccaagaatgtccaggaggtacccctacctcgcggaagggatctgacctggagacacgtcgcaagtgctttacacctgtgctcgtgtttaaaaattgtcacagctttcccaaaccaagtggtcttggttttcctttttattactattgacact

SEQ ID NO: 23496 - DNA, 900 bp, synthetic construct
  source 1..900: mol_type = other DNA
caccactttactcatcccctggatgctgactaatcagaggaacgtcagcattttccggcccaggctaagagaagtagataagttacaatccaaattgatttatcatccccttgacgaattcgcgttggaaaagcacctctcacttgccgctcttcacacccatcattttaattcggcctctgtgttgagccccttgttgaagtgtttctctccatcgcgacgtggttggagatctaagtcaaccgactccgacgaaactaccatcatgtctccccgattatgtgatgctttctgccctgctgggtggagcatcctcgggttgagaaatccttcttcctttcaccttggaccccggtcccccggtctaagccgcttggaataagacagggttattttcacctctttttcttctactccacagtgctctatactgtggaagggtatgtgttgccccttccttcttggagaacgtgcgcggcggtctttccgtctctcgacaagcgcgcgtgcaacatgcagagtaacgcgaagaaagcagttcttggactagctttagtatctgcaagaagacagctgtagcgaccacacaaaggcagcggaacccccctcctggtaacaggagcctctgcggccaaaagccacgtggataagatccacctttgtgtgcggtgcaaccccagcaccctggtttcttgaagatactctagtgaacccttgaatggcaatctcaagcgcctctgtaggaaagccaagaatgtccaggaggtacccctacctcgcggaagggatctgacctggagacacgtcgcaagtgctttacacctgtgctcgtgtttaaaaattgtcacagctttcccaaaccaagtggtcttggttttcctttttattactattgacact

SEQ ID NO: 23497 - DNA, 850 bp, synthetic construct
  source 1..850: mol_type = other DNA
ttttccggcccaggctaagagaagtagataagttacaatccaaattgatttatcatccccttgacgaattcgcgttggaaaagcacctctcacttgccgctcttcacacccatcattttaattcggcctctgtgttgagccccttgttgaagtgtttctctccatcgcgacgtggttggagatctaagtcaaccgactccgacgaaactaccatcatgtctccccgattatgtgatgctttctgccctgctgggtggagcatcctcgggttgagaaatccttcttcctttcaccttggaccccggtcccccggtctaagccgcttggaataagacagggttattttcacctctttttcttctactccacagtgctctatactgtggaagggtatgtgttgccccttccttcttggagaacgtgcgcggcggtctttccgtctctcgacaagcgcgcgtgcaacatgcagagtaacgcgaagaaagcagttcttggactagctttagtatctgcaagaagacagctgtagcgaccacacaaaggcagcggaacccccctcctggtaacaggagcctctgcggccaaaagccacgtggataagatccacctttgtgtgcggtgcaaccccagcaccctggtttcttgaagatactctagtgaacccttgaatggcaatctcaagcgcctctgtaggaaagccaagaatgtccaggaggtacccctacctcgcggaagggatctgacctggagacacgtcgcaagtgctttacacctgtgctcgtgtttaaaaattgtcacagctttcccaaaccaagtggtcttggttttcctttttattactattgacact

SEQ ID NO: 23498 - DNA, 800 bp, synthetic construct
  source 1..800: mol_type = other DNA
tatcatccccttgacgaattcgcgttggaaaagcacctctcacttgccgctcttcacacccatcattttaattcggcctctgtgttgagccccttgttgaagtgtttctctccatcgcgacgtggttggagatctaagtcaaccgactccgacgaaactaccatcatgtctccccgattatgtgatgctttctgccctgctgggtggagcatcctcgggttgagaaatccttcttcctttcaccttggaccccggtcccccggtctaagccgcttggaataagacagggttattttcacctctttttcttctactccacagtgctctatactgtggaagggtatgtgttgccccttccttcttggagaacgtgcgcggcggtctttccgtctctcgacaagcgcgcgtgcaacatgcagagtaacgcgaagaaagcagttcttggactagctttagtatctgcaagaagacagctgtagcgaccacacaaaggcagcggaacccccctcctggtaacaggagcctctgcggccaaaagccacgtggataagatccacctttgtgtgcggtgcaaccccagcaccctggtttcttgaagatactctagtgaacccttgaatggcaatctcaagcgcctctgtaggaaagccaagaatgtccaggaggtacccctacctcgcggaagggatctgacctggagacacgtcgcaagtgctttacacctgtgctcgtgtttaaaaattgtcacagctttcccaaaccaagtggtcttggttttcctttttattactattgacact

SEQ ID NO: 23499 - DNA, 750 bp, synthetic construct
  source 1..750: mol_type = other DNA
tcttcacacccatcattttaattcggcctctgtgttgagccccttgttgaagtgtttctctccatcgcgacgtggttggagatctaagtcaaccgactccgacgaaactaccatcatgtctccccgattatgtgatgctttctgccctgctgggtggagcatcctcgggttgagaaatccttcttcctttcaccttggaccccggtcccccggtctaagccgcttggaataagacagggttattttcacctctttttcttctactccacagtgctctatactgtggaagggtatgtgttgccccttccttcttggagaacgtgcgcggcggtctttccgtctctcgacaagcgcgcgtgcaacatgcagagtaacgcgaagaaagcagttcttggactagctttagtatctgcaagaagacagctgtagcgaccacacaaaggcagcggaacccccctcctggtaacaggagcctctgcggccaaaagccacgtggataagatccacctttgtgtgcggtgcaaccccagcaccctggtttcttgaagatactctagtgaacccttgaatggcaatctcaagcgcctctgtaggaaagccaagaatgtccaggaggtacccctacctcgcggaagggatctgacctggagacacgtcgcaagtgctttacacctgtgctcgtgtttaaaaattgtcacagctttcccaaaccaagtggtcttggttttcctttttattactattgacact

SEQ ID NO: 23500 - DNA, 700 bp, synthetic construct
  source 1..700: mol_type = other DNA
agtgtttctctccatcgcgacgtggttggagatctaagtcaaccgactccgacgaaactaccatcatgtctccccgattatgtgatgctttctgccctgctgggtggagcatcctcgggttgagaaatccttcttcctttcaccttggaccccggtcccccggtctaagccgcttggaataagacagggttattttcacctctttttcttctactccacagtgctctatactgtggaagggtatgtgttgccccttccttcttggagaacgtgcgcggcggtctttccgtctctcgacaagcgcgcgtgcaacatgcagagtaacgcgaagaaagcagttcttggactagctttagtatctgcaagaagacagctgtagcgaccacacaaaggcagcggaacccccctcctggtaacaggagcctctgcggccaaaagccacgtggataagatccacctttgtgtgcggtgcaaccccagcaccctggtttcttgaagatactctagtgaacccttgaatggcaatctcaagcgcctctgtaggaaagccaagaatgtccaggaggtacccctacctcgcggaagggatctgacctggagacacgtcgcaagtgctttacacctgtgctcgtgtttaaaaattgtcacagctttcccaaaccaagtggtcttggttttcctttttattactattgacact

SEQ ID NO: 23501 - DNA, 650 bp, synthetic construct
  source 1..650: mol_type = other DNA
gacgaaactaccatcatgtctccccgattatgtgatgctttctgccctgctgggtggagcatcctcgggttgagaaatccttcttcctttcaccttggaccccggtcccccggtctaagccgcttggaataagacagggttattttcacctctttttcttctactccacagtgctctatactgtggaagggtatgtgttgccccttccttcttggagaacgtgcgcggcggtctttccgtctctcgacaagcgcgcgtgcaacatgcagagtaacgcgaagaaagcagttcttggactagctttagtatctgcaagaagacagctgtagcgaccacacaaaggcagcggaacccccctcctggtaacaggagcctctgcggccaaaagccacgtggataagatccacctttgtgtgcggtgcaaccccagcaccctggtttcttgaagatactctagtgaacccttgaatggcaatctcaagcgcctctgtaggaaagccaagaatgtccaggaggtacccctacctcgcggaagggatctgacctggagacacgtcgcaagtgctttacacctgtgctcgtgtttaaaaattgtcacagctttcccaaaccaagtggtcttggttttcctttttattactattgacact

SEQ ID NO: 23502 - DNA, 600 bp, synthetic construct
  source 1..600: mol_type = other DNA
tgggtggagcatcctcgggttgagaaatccttcttcctttcaccttggaccccggtcccccggtctaagccgcttggaataagacagggttattttcacctctttttcttctactccacagtgctctatactgtggaagggtatgtgttgccccttccttcttggagaacgtgcgcggcggtctttccgtctctcgacaagcgcgcgtgcaacatgcagagtaacgcgaagaaagcagttcttggactagctttagtatctgcaagaagacagctgtagcgaccacacaaaggcagcggaacccccctcctggtaacaggagcctctgcggccaaaagccacgtggataagatccacctttgtgtgcggtgcaaccccagcaccctggtttcttgaagatactctagtgaacccttgaatggcaatctcaagcgcctctgtaggaaagccaagaatgtccaggaggtacccctacctcgcggaagggatctgacctggagacacgtcgcaagtgctttacacctgtgctcgtgtttaaaaattgtcacagctttcccaaaccaagtggtcttggttttcctttttattactattgacact

SEQ ID NO: 23503 - DNA, 550 bp, synthetic construct
  source 1..550: mol_type = other DNA
cccggtcccccggtctaagccgcttggaataagacagggttattttcacctctttttcttctactccacagtgctctatactgtggaagggtatgtgttgccccttccttcttggagaacgtgcgcggcggtctttccgtctctcgacaagcgcgcgtgcaacatgcagagtaacgcgaagaaagcagttcttggactagctttagtatctgcaagaagacagctgtagcgaccacacaaaggcagcggaacccccctcctggtaacaggagcctctgcggccaaaagccacgtggataagatccacctttgtgtgcggtgcaaccccagcaccctggtttcttgaagatactctagtgaacccttgaatggcaatctcaagcgcctctgtaggaaagccaagaatgtccaggaggtacccctacctcgcggaagggatctgacctggagacacgtcgcaagtgctttacacctgtgctcgtgtttaaaaattgtcacagctttcccaaaccaagtggtcttggttttcctttttattactattgacact

SEQ ID NO: 23504 - DNA, 500 bp, synthetic construct
  source 1..500: mol_type = other DNA
tctttttcttctactccacagtgctctatactgtggaagggtatgtgttgccccttccttcttggagaacgtgcgcggcggtctttccgtctctcgacaagcgcgcgtgcaacatgcagagtaacgcgaagaaagcagttcttggactagctttagtatctgcaagaagacagctgtagcgaccacacaaaggcagcggaacccccctcctggtaacaggagcctctgcggccaaaagccacgtggataagatccacctttgtgtgcggtgcaaccccagcaccctggtttcttgaagatactctagtgaacccttgaatggcaatctcaagcgcctctgtaggaaagccaagaatgtccaggaggtacccctacctcgcggaagggatctgacctggagacacgtcgcaagtgctttacacctgtgctcgtgtttaaaaattgtcacagctttcccaaaccaagtggtcttggttttcctttttattactattgacact

SEQ ID NO: 23505 - DNA, 950 bp, synthetic construct
  source 1..950: mol_type = other DNA
acatggctgaaaagggtattgggtccccccggattgtgtccgttcgtagtgtgtgtaacgtggtttaccatctccactaacattggactaagcatttcatctttcctccccgattgtgtactcacttggctaacgctgggtggtcgcggttgggtccttgatttactttttctcgtctaagcattccgactgtcctccccgattatgtgctcattcagttaactgctgggtggtcatgactaacatcgaggaaccttctgtccacgcttactttgagctccggtcgcttgacgcttgtagggcgatagggttatcttcctgacaacatctttattctacctccataggctctatctatggagacggagtgtggcacccgtcccttctttgggagcttcggtagtgacgccctttgtcactctcgccagccgaggcatgcctggtgccaggtagcaaagaaagcatatgtttaaggacttgactgatttagcgcaagagtttgtagcgatgtccatagtgtctgcggattccccacacggcgacgtgtgccgcggaggccaaaagccacggtgttcacagcacccctatggatgcccacagaccccagtgggcactcttgttgccggactttcaggaaattaggcataggctcttctcaaactcctggcattggactaggtaagaatgccccggaggtaccccagtactccttcgggagtctgggatctgaccgggggccccacaaacatgctttacgtgtttcgtgcggtcaaaaattgtctaactagtcccaaccttgaacaagggattgttctttcctttttattactgagactggcctatggtgacaacagagattgactgtgaatacagttattttctggtgtttatcatttggtttttctccgtgctcttttacctttgtggtatttgttctttagataggcaaa

SEQ ID NO: 23506 - DNA, 900 bp, synthetic construct
  source 1..900: mol_type = other DNA
gtgtgtaacgtggtttaccatctccactaacattggactaagcatttcatctttcctccccgattgtgtactcacttggctaacgctgggtggtcgcggttgggtccttgatttactttttctcgtctaagcattccgactgtcctccccgattatgtgctcattcagttaactgctgggtggtcatgactaacatcgaggaaccttctgtccacgcttactttgagctccggtcgcttgacgcttgtagggcgatagggttatcttcctgacaacatctttattctacctccataggctctatctatggagacggagtgtggcacccgtcccttctttgggagcttcggtagtgacgccctttgtcactctcgccagccgaggcatgcctggtgccaggtagcaaagaaagcatatgtttaaggacttgactgatttagcgcaagagtttgtagcgatgtccatagtgtctgcggattccccacacggcgacgtgtgccgcggaggccaaaagccacggtgttcacagcacccctatggatgcccacagaccccagtgggcactcttgttgccggactttcaggaaattaggcataggctcttctcaaactcctggcattggactaggtaagaatgccccggaggtaccccagtactccttcgggagtctgggatctgaccgggggccccacaaacatgctttacgtgtttcgtgcggtcaaaaattgtctaactagtcccaaccttgaacaagggattgttctttcctttttattactgagactggcctatggtgacaacagagattgactgtgaatacagttattttctggtgtttatcatttggtttttctccgtgctcttttacctttgtggtatttgttctttagataggcaaa

SEQ ID NO: 23507 - DNA, 850 bp, synthetic construct
  source 1..850: mol_type = other DNA
ctttcctccccgattgtgtactcacttggctaacgctgggtggtcgcggttgggtccttgatttactttttctcgtctaagcattccgactgtcctccccgattatgtgctcattcagttaactgctgggtggtcatgactaacatcgaggaaccttctgtccacgcttactttgagctccggtcgcttgacgcttgtagggcgatagggttatcttcctgacaacatctttattctacctccataggctctatctatggagacggagtgtggcacccgtcccttctttgggagcttcggtagtgacgccctttgtcactctcgccagccgaggcatgcctggtgccaggtagcaaagaaagcatatgtttaaggacttgactgatttagcgcaagagtttgtagcgatgtccatagtgtctgcggattccccacacggcgacgtgtgccgcggaggccaaaagccacggtgttcacagcacccctatggatgcccacagaccccagtgggcactcttgttgccggactttcaggaaattaggcataggctcttctcaaactcctggcattggactaggtaagaatgccccggaggtaccccagtactccttcgggagtctgggatctgaccgggggccccacaaacatgctttacgtgtttcgtgcggtcaaaaattgtctaactagtcccaaccttgaacaagggattgttctttcctttttattactgagactggcctatggtgacaacagagattgactgtgaatacagttattttctggtgtttatcatttggtttttctccgtgctcttttacctttgtggtatttgttctttagataggcaaa

SEQ ID NO: 23508 - DNA, 800 bp, synthetic construct
  source 1..800: mol_type = other DNA
tgggtccttgatttactttttctcgtctaagcattccgactgtcctccccgattatgtgctcattcagttaactgctgggtggtcatgactaacatcgaggaaccttctgtccacgcttactttgagctccggtcgcttgacgcttgtagggcgatagggttatcttcctgacaacatctttattctacctccataggctctatctatggagacggagtgtggcacccgtcccttctttgggagcttcggtagtgacgccctttgtcactctcgccagccgaggcatgcctggtgccaggtagcaaagaaagcatatgtttaaggacttgactgatttagcgcaagagtttgtagcgatgtccatagtgtctgcggattccccacacggcgacgtgtgccgcggaggccaaaagccacggtgttcacagcacccctatggatgcccacagaccccagtgggcactcttgttgccggactttcaggaaattaggcataggctcttctcaaactcctggcattggactaggtaagaatgccccggaggtaccccagtactccttcgggagtctgggatctgaccgggggccccacaaacatgctttacgtgtttcgtgcggtcaaaaattgtctaactagtcccaaccttgaacaagggattgttctttcctttttattactgagactggcctatggtgacaacagagattgactgtgaatacagttattttctggtgtttatcatttggtttttctccgtgctcttttacctttgtggtatttgttctttagataggcaaa

SEQ ID NO: 23509 - DNA, 750 bp, synthetic construct
  source 1..750: mol_type = other DNA
gattatgtgctcattcagttaactgctgggtggtcatgactaacatcgaggaaccttctgtccacgcttactttgagctccggtcgcttgacgcttgtagggcgatagggttatcttcctgacaacatctttattctacctccataggctctatctatggagacggagtgtggcacccgtcccttctttgggagcttcggtagtgacgccctttgtcactctcgccagccgaggcatgcctggtgccaggtagcaaagaaagcatatgtttaaggacttgactgatttagcgcaagagtttgtagcgatgtccatagtgtctgcggattccccacacggcgacgtgtgccgcggaggccaaaagccacggtgttcacagcacccctatggatgcccacagaccccagtgggcactcttgttgccggactttcaggaaattaggcataggctcttctcaaactcctggcattggactaggtaagaatgccccggaggtaccccagtactccttcgggagtctgggatctgaccgggggccccacaaacatgctttacgtgtttcgtgcggtcaaaaattgtctaactagtcccaaccttgaacaagggattgttctttcctttttattactgagactggcctatggtgacaacagagattgactgtgaatacagttattttctggtgtttatcatttggtttttctccgtgctcttttacctttgtggtatttgttctttagataggcaaa

SEQ ID NO: 23510 - DNA, 700 bp, synthetic construct
  source 1..700: mol_type = other DNA
gaaccttctgtccacgcttactttgagctccggtcgcttgacgcttgtagggcgatagggttatcttcctgacaacatctttattctacctccataggctctatctatggagacggagtgtggcacccgtcccttctttgggagcttcggtagtgacgccctttgtcactctcgccagccgaggcatgcctggtgccaggtagcaaagaaagcatatgtttaaggacttgactgatttagcgcaagagtttgtagcgatgtccatagtgtctgcggattccccacacggcgacgtgtgccgcggaggccaaaagccacggtgttcacagcacccctatggatgcccacagaccccagtgggcactcttgttgccggactttcaggaaattaggcataggctcttctcaaactcctggcattggactaggtaagaatgccccggaggtaccccagtactccttcgggagtctgggatctgaccgggggccccacaaacatgctttacgtgtttcgtgcggtcaaaaattgtctaactagtcccaaccttgaacaagggattgttctttcctttttattactgagactggcctatggtgacaacagagattgactgtgaatacagttattttctggtgtttatcatttggtttttctccgtgctcttttacctttgtggtatttgttctttagataggcaaa

SEQ ID NO: 23511 - DNA, 650 bp, synthetic construct
  source 1..650: mol_type = other DNA
ggcgatagggttatcttcctgacaacatctttattctacctccataggctctatctatggagacggagtgtggcacccgtcccttctttgggagcttcggtagtgacgccctttgtcactctcgccagccgaggcatgcctggtgccaggtagcaaagaaagcatatgtttaaggacttgactgatttagcgcaagagtttgtagcgatgtccatagtgtctgcggattccccacacggcgacgtgtgccgcggaggccaaaagccacggtgttcacagcacccctatggatgcccacagaccccagtgggcactcttgttgccggactttcaggaaattaggcataggctcttctcaaactcctggcattggactaggtaagaatgccccggaggtaccccagtactccttcgggagtctgggatctgaccgggggccccacaaacatgctttacgtgtttcgtgcggtcaaaaattgtctaactagtcccaaccttgaacaagggattgttctttcctttttattactgagactggcctatggtgacaacagagattgactgtgaatacagttattttctggtgtttatcatttggtttttctccgtgctcttttacctttgtggtatttgttctttagataggcaaa

SEQ ID NO: 23512 - DNA, 600 bp, synthetic construct
  source 1..600: mol_type = other DNA
ctatctatggagacggagtgtggcacccgtcccttctttgggagcttcggtagtgacgccctttgtcactctcgccagccgaggcatgcctggtgccaggtagcaaagaaagcatatgtttaaggacttgactgatttagcgcaagagtttgtagcgatgtccatagtgtctgcggattccccacacggcgacgtgtgccgcggaggccaaaagccacggtgttcacagcacccctatggatgcccacagaccccagtgggcactcttgttgccggactttcaggaaattaggcataggctcttctcaaactcctggcattggactaggtaagaatgccccggaggtaccccagtactccttcgggagtctgggatctgaccgggggccccacaaacatgctttacgtgtttcgtgcggtcaaaaattgtctaactagtcccaaccttgaacaagggattgttctttcctttttattactgagactggcctatggtgacaacagagattgactgtgaatacagttattttctggtgtttatcatttggtttttctccgtgctcttttacctttgtggtatttgttctttagataggcaaa

SEQ ID NO: 23513 - DNA, 550 bp, synthetic construct
  source 1..550: mol_type = other DNA
tagtgacgccctttgtcactctcgccagccgaggcatgcctggtgccaggtagcaaagaaagcatatgtttaaggacttgactgatttagcgcaagagtttgtagcgatgtccatagtgtctgcggattccccacacggcgacgtgtgccgcggaggccaaaagccacggtgttcacagcacccctatggatgcccacagaccccagtgggcactcttgttgccggactttcaggaaattaggcataggctcttctcaaactcctggcattggactaggtaagaatgccccggaggtaccccagtactccttcgggagtctgggatctgaccgggggccccacaaacatgctttacgtgtttcgtgcggtcaaaaattgtctaactagtcccaaccttgaacaagggattgttctttcctttttattactgagactggcctatggtgacaacagagattgactgtgaatacagttattttctggtgtttatcatttggtttttctccgtgctcttttacctttgtggtatttgttctttagataggcaaa

SEQ ID NO: 23514 - DNA, 500 bp, synthetic construct
  source 1..500: mol_type = other DNA
tagcaaagaaagcatatgtttaaggacttgactgatttagcgcaagagtttgtagcgatgtccatagtgtctgcggattccccacacggcgacgtgtgccgcggaggccaaaagccacggtgttcacagcacccctatggatgcccacagaccccagtgggcactcttgttgccggactttcaggaaattaggcataggctcttctcaaactcctggcattggactaggtaagaatgccccggaggtaccccagtactccttcgggagtctgggatctgaccgggggccccacaaacatgctttacgtgtttcgtgcggtcaaaaattgtctaactagtcccaaccttgaacaagggattgttctttcctttttattactgagactggcctatggtgacaacagagattgactgtgaatacagttattttctggtgtttatcatttggtttttctccgtgctcttttacctttgtggtatttgttctttagataggcaaa

SEQ ID NO: 23515 - DNA, 628 bp, synthetic construct
  source 1..628: mol_type = other DNA
caaaaggctacaccacttgggctacggcccgcgccaccttgtggcgcaaagacattagaagaatagcataccgcccactagggccctgcagccagcagggtaacgggcaagcacttctgtctccccggtagaacggtataggctgtacccacggccgaaaactgaactatcgttacccgactccgtacttcgcaaagcttagtaggaaactggaaagttcgagttattgacccggagtgttccccccactccagaaacgcgtgatgagggttgccaccccgaccatggcgacatggtgggcatccctgcgctggcacgcggcctctaagaggataactcgctcctactggtaaccgaagagccccgtgagctacggtttattcctccgcctccctgaatgcggctaatcctaacccatgagcagttgccatagatccatatggtggactgtcgtaacgcgtaagttgtgggcggaaccgactactttgggatggcgtgtttccttgttttctccatttgttgttgtatggtgacaagttatagatctcgatctatagcgtttcttgagagatttccaaacatttattcaagtcgtacaattcttgtgtttaagcagtacagtgtaagg

SEQ ID NO: 23516 - DNA, 578 bp, synthetic construct
  source 1..578: mol_type = other DNA
gacattagaagaatagcataccgcccactagggccctgcagccagcagggtaacgggcaagcacttctgtctccccggtagaacggtataggctgtacccacggccgaaaactgaactatcgttacccgactccgtacttcgcaaagcttagtaggaaactggaaagttcgagttattgacccggagtgttccccccactccagaaacgcgtgatgagggttgccaccccgaccatggcgacatggtgggcatccctgcgctggcacgcggcctctaagaggataactcgctcctactggtaaccgaagagccccgtgagctacggtttattcctccgcctccctgaatgcggctaatcctaacccatgagcagttgccatagatccatatggtggactgtcgtaacgcgtaagttgtgggcggaaccgactactttgggatggcgtgtttccttgttttctccatttgttgttgtatggtgacaagttatagatctcgatctatagcgtttcttgagagatttccaaacatttattcaagtcgtacaattcttgtgtttaagcagtacagtgtaagg

SEQ ID NO: 23517 - DNA, 528 bp, synthetic construct
  source 1..528: mol_type = other DNA
taacgggcaagcacttctgtctccccggtagaacggtataggctgtacccacggccgaaaactgaactatcgttacccgactccgtacttcgcaaagcttagtaggaaactggaaagttcgagttattgacccggagtgttccccccactccagaaacgcgtgatgagggttgccaccccgaccatggcgacatggtgggcatccctgcgctggcacgcggcctctaagaggataactcgctcctactggtaaccgaagagccccgtgagctacggtttattcctccgcctccctgaatgcggctaatcctaacccatgagcagttgccatagatccatatggtggactgtcgtaacgcgtaagttgtgggcggaaccgactactttgggatggcgtgtttccttgttttctccatttgttgttgtatggtgacaagttatagatctcgatctatagcgtttcttgagagatttccaaacatttattcaagtcgtacaattcttgtgtttaagcagtacagtgtaagg

SEQ ID NO: 23518 - DNA, 678 bp, synthetic construct
  source 1..678: mol_type = other DNA
caaccctttcataaccccccccttttaacccaacccttcgtaaccgtacgcttcactcgcctttgggtatagcggcccaatgtgctgaagaaaaggatacgctataaggggccaacgggtggtggcccttaagaccacccaacctagaagcttgtacactcgggcaatagtgaggcccacatccagtgggtcaagcccaaagcattcttgttccccggtatgatctcataagctgtacccacggctgaaagagtgattatcgttatcccactcagtacttcggagagcctagtacaccacttggaaatggaagtctgtgatccggggttgaccctgaaccccagaaactcatgatgaggctaaccttcccgaacacggcgacgtgtggttagcctgcgctggcatgaggcctctttgtaggcagactgaaatggaagggtgacgaagagccgactgagctactgttttattcctccggccccctgaatgcggctaatcctaactcctggtccagtacttgtaacccaacaggtggctggtcgtaatgcgtaagccgggagcggaaccgactactttggggcgtccgtgtttctcaatattattcatttctagcttatggtgacaatttatgattgcagagattgtgctgtatttgtgtctgagagaagaagtaacaat

SEQ ID NO: 23519 - DNA, 628 bp, synthetic construct
  source 1..628: mol_type = other DNA
cttcactcgcctttgggtatagcggcccaatgtgctgaagaaaaggatacgctataaggggccaacgggtggtggcccttaagaccacccaacctagaagcttgtacactcgggcaatagtgaggcccacatccagtgggtcaagcccaaagcattcttgttccccggtatgatctcataagctgtacccacggctgaaagagtgattatcgttatcccactcagtacttcggagagcctagtacaccacttggaaatggaagtctgtgatccggggttgaccctgaaccccagaaactcatgatgaggctaaccttcccgaacacggcgacgtgtggttagcctgcgctggcatgaggcctctttgtaggcagactgaaatggaagggtgacgaagagccgactgagctactgttttattcctccggccccctgaatgcggctaatcctaactcctggtccagtacttgtaacccaacaggtggctggtcgtaatgcgtaagccgggagcggaaccgactactttggggcgtccgtgtttctcaatattattcatttctagcttatggtgacaatttatgattgcagagattgtgctgtatttgtgtctgagagaagaagtaacaat

SEQ ID NO: 23520 - DNA, 578 bp, synthetic construct
  source 1..578: mol_type = other DNA
gctataaggggccaacgggtggtggcccttaagaccacccaacctagaagcttgtacactcgggcaatagtgaggcccacatccagtgggtcaagcccaaagcattcttgttccccggtatgatctcataagctgtacccacggctgaaagagtgattatcgttatcccactcagtacttcggagagcctagtacaccacttggaaatggaagtctgtgatccggggttgaccctgaaccccagaaactcatgatgaggctaaccttcccgaacacggcgacgtgtggttagcctgcgctggcatgaggcctctttgtaggcagactgaaatggaagggtgacgaagagccgactgagctactgttttattcctccggccccctgaatgcggctaatcctaactcctggtccagtacttgtaacccaacaggtggctggtcgtaatgcgtaagccgggagcggaaccgactactttggggcgtccgtgtttctcaatattattcatttctagcttatggtgacaatttatgattgcagagattgtgctgtatttgtgtctgagagaagaagtaacaat

SEQ ID NO: 23521 - DNA, 528 bp, synthetic construct
  source 1..528: mol_type = other DNA
cttgtacactcgggcaatagtgaggcccacatccagtgggtcaagcccaaagcattcttgttccccggtatgatctcataagctgtacccacggctgaaagagtgattatcgttatcccactcagtacttcggagagcctagtacaccacttggaaatggaagtctgtgatccggggttgaccctgaaccccagaaactcatgatgaggctaaccttcccgaacacggcgacgtgtggttagcctgcgctggcatgaggcctctttgtaggcagactgaaatggaagggtgacgaagagccgactgagctactgttttattcctccggccccctgaatgcggctaatcctaactcctggtccagtacttgtaacccaacaggtggctggtcgtaatgcgtaagccgggagcggaaccgactactttggggcgtccgtgtttctcaatattattcatttctagcttatggtgacaatttatgattgcagagattgtgctgtatttgtgtctgagagaagaagtaacaat

SEQ ID NO: 23522 - DNA, 681 bp, synthetic construct
  source 1..681: mol_type = other DNA
tacgggagtgagcccacgaccgttggggtttttaccccaccgttcgtggacctcatttctgcttattacttcccccactttcatcggggacgttccttttgccgcacacccagtgcggcaggaggtaacgagtttattttgtatagttgttattagtcacaccggagggcgtgctttacgctcttaagggcttaacccactccgttgtgcctgtcacttgtcgcttgacggcggctggtctagtacgggtctagttagtaccactcagtggtcagggtgtgccgcccgttgaaggctggtattcccgcgtgagggggctaccgtggtaacacggtccttgcgtgtgtgtgagccagtatgctctctggagctgccattgtttgggaaagctcttccccgaacaactaagtgcctgatggcctcatttggctgattggtgctctcaagacatgtgccggaggcaagcttgttggaaccaccagcaagccctgaccggtagctaattagtcccttgacggcatcgaatttttcctttttccttttctttttgtgaactgaatatagtgatttgtgtttagtgcttttgtgcctttgtcacttttactttgtcaaatattagtgtttgtgcatttgttttaaactgcaacttgttgttaatttttggacaatttgaacttagac

SEQ ID NO: 23523 - DNA, 631 bp, synthetic construct
  source 1..631: mol_type = other DNA
cctcatttctgcttattacttcccccactttcatcggggacgttccttttgccgcacacccagtgcggcaggaggtaacgagtttattttgtatagttgttattagtcacaccggagggcgtgctttacgctcttaagggcttaacccactccgttgtgcctgtcacttgtcgcttgacggcggctggtctagtacgggtctagttagtaccactcagtggtcagggtgtgccgcccgttgaaggctggtattcccgcgtgagggggctaccgtggtaacacggtccttgcgtgtgtgtgagccagtatgctctctggagctgccattgtttgggaaagctcttccccgaacaactaagtgcctgatggcctcatttggctgattggtgctctcaagacatgtgccggaggcaagcttgttggaaccaccagcaagccctgaccggtagctaattagtcccttgacggcatcgaatttttcctttttccttttctttttgtgaactgaatatagtgatttgtgtttagtgcttttgtgcctttgtcacttttactttgtcaaatattagtgtttgtgcatttgttttaaactgcaacttgttgttaatttttggacaatttgaacttagac

SEQ ID NO: 23524 - DNA, 581 bp, synthetic construct
  source 1..581: mol_type = other DNA
gccgcacacccagtgcggcaggaggtaacgagtttattttgtatagttgttattagtcacaccggagggcgtgctttacgctcttaagggcttaacccactccgttgtgcctgtcacttgtcgcttgacggcggctggtctagtacgggtctagttagtaccactcagtggtcagggtgtgccgcccgttgaaggctggtattcccgcgtgagggggctaccgtggtaacacggtccttgcgtgtgtgtgagccagtatgctctctggagctgccattgtttgggaaagctcttccccgaacaactaagtgcctgatggcctcatttggctgattggtgctctcaagacatgtgccggaggcaagcttgttggaaccaccagcaagccctgaccggtagctaattagtcccttgacggcatcgaatttttcctttttccttttctttttgtgaactgaatatagtgatttgtgtttagtgcttttgtgcctttgtcacttttactttgtcaaatattagtgtttgtgcatttgttttaaactgcaacttgttgttaatttttggacaatttgaacttagac

SEQ ID NO: 23525 - DNA, 531 bp, synthetic construct
  source 1..531: mol_type = other DNA
tattagtcacaccggagggcgtgctttacgctcttaagggcttaacccactccgttgtgcctgtcacttgtcgcttgacggcggctggtctagtacgggtctagttagtaccactcagtggtcagggtgtgccgcccgttgaaggctggtattcccgcgtgagggggctaccgtggtaacacggtccttgcgtgtgtgtgagccagtatgctctctggagctgccattgtttgggaaagctcttccccgaacaactaagtgcctgatggcctcatttggctgattggtgctctcaagacatgtgccggaggcaagcttgttggaaccaccagcaagccctgaccggtagctaattagtcccttgacggcatcgaatttttcctttttccttttctttttgtgaactgaatatagtgatttgtgtttagtgcttttgtgcctttgtcacttttactttgtcaaatattagtgtttgtgcatttgttttaaactgcaacttgttgttaatttttggacaatttgaacttagac

SEQ ID NO: 23526 - DNA, 739 bp, synthetic construct
  source 1..739: mol_type = other DNA
tacgcctgttttccctcccctaaataaattaagatcaccactactgtggggagtagtccgactccgcaccgatacgtcgcaccagtgaactggttcgcttaggacctttacacggagtagatggtgttcccttcccccgtaacttagaagcatgaaccaaccgaccaatagtggcgttgcatccagcagcgcagcggtcaagcacttctgtttccccggcgcgaagcgtcgttacccgcccagcctactgcgggaagcctagtagcaccccaattgatcgcgcggttgcgttcagccacaaccccagtggtagctctgaggaatggagctcgccgtccccccacagcaatgtggtggcttgctcgcgcgtgtcctcgggttcactcaaagagtgttcaccgcaacatcaagtaaggtgtgaagagcctactgcgctaggctggttttcctccggagccgtgaatgctgctaatcccaacctccgagcgtgtgcgcacaatccagtgttgctacgtcgtaacgcgtaagtcggaggcggaacagactactttcggtactccgtgtttccttattttgtttcaatattttatggtgacattgactgatatctgtgaatttgctcgctgcccctgaatattgccttatattacttaatagcatttcacgaaaacgacccagctttcaattgagcttattaactttgctgtatctttaaaccagatccacaagtcggtgtaca

SEQ ID NO: 23527 - DNA, 689 bp, synthetic construct
  source 1..689: mol_type = other DNA
gagtagtccgactccgcaccgatacgtcgcaccagtgaactggttcgcttaggacctttacacggagtagatggtgttcccttcccccgtaacttagaagcatgaaccaaccgaccaatagtggcgttgcatccagcagcgcagcggtcaagcacttctgtttccccggcgcgaagcgtcgttacccgcccagcctactgcgggaagcctagtagcaccccaattgatcgcgcggttgcgttcagccacaaccccagtggtagctctgaggaatggagctcgccgtccccccacagcaatgtggtggcttgctcgcgcgtgtcctcgggttcactcaaagagtgttcaccgcaacatcaagtaaggtgtgaagagcctactgcgctaggctggttttcctccggagccgtgaatgctgctaatcccaacctccgagcgtgtgcgcacaatccagtgttgctacgtcgtaacgcgtaagtcggaggcggaacagactactttcggtactccgtgtttccttattttgtttcaatattttatggtgacattgactgatatctgtgaatttgctcgctgcccctgaatattgccttatattacttaatagcatttcacgaaaacgacccagctttcaattgagcttattaactttgctgtatctttaaaccagatccacaagtcggtgtaca

SEQ ID NO: 23528 - DNA, 639 bp, synthetic construct
  source 1..639: mol_type = other DNA
aggacctttacacggagtagatggtgttcccttcccccgtaacttagaagcatgaaccaaccgaccaatagtggcgttgcatccagcagcgcagcggtcaagcacttctgtttccccggcgcgaagcgtcgttacccgcccagcctactgcgggaagcctagtagcaccccaattgatcgcgcggttgcgttcagccacaaccccagtggtagctctgaggaatggagctcgccgtccccccacagcaatgtggtggcttgctcgcgcgtgtcctcgggttcactcaaagagtgttcaccgcaacatcaagtaaggtgtgaagagcctactgcgctaggctggttttcctccggagccgtgaatgctgctaatcccaacctccgagcgtgtgcgcacaatccagtgttgctacgtcgtaacgcgtaagtcggaggcggaacagactactttcggtactccgtgtttccttattttgtttcaatattttatggtgacattgactgatatctgtgaatttgctcgctgcccctgaatattgccttatattacttaatagcatttcacgaaaacgacccagctttcaattgagcttattaactttgctgtatctttaaaccagatccacaagtcggtgtaca

SEQ ID NO: 23529 - DNA, 589 bp, synthetic construct
  source 1..589: mol_type = other DNA
catgaaccaaccgaccaatagtggcgttgcatccagcagcgcagcggtcaagcacttctgtttccccggcgcgaagcgtcgttacccgcccagcctactgcgggaagcctagtagcaccccaattgatcgcgcggttgcgttcagccacaaccccagtggtagctctgaggaatggagctcgccgtccccccacagcaatgtggtggcttgctcgcgcgtgtcctcgggttcactcaaagagtgttcaccgcaacatcaagtaaggtgtgaagagcctactgcgctaggctggttttcctccggagccgtgaatgctgctaatcccaacctccgagcgtgtgcgcacaatccagtgttgctacgtcgtaacgcgtaagtcggaggcggaacagactactttcggtactccgtgtttccttattttgtttcaatattttatggtgacattgactgatatctgtgaatttgctcgctgcccctgaatattgccttatattacttaatagcatttcacgaaaacgacccagctttcaattgagcttattaactttgctgtatctttaaaccagatccacaagtcggtgtaca

SEQ ID NO: 23530 - DNA, 539 bp, synthetic construct
  source 1..539: mol_type = other DNA
agcacttctgtttccccggcgcgaagcgtcgttacccgcccagcctactgcgggaagcctagtagcaccccaattgatcgcgcggttgcgttcagccacaaccccagtggtagctctgaggaatggagctcgccgtccccccacagcaatgtggtggcttgctcgcgcgtgtcctcgggttcactcaaagagtgttcaccgcaacatcaagtaaggtgtgaagagcctactgcgctaggctggttttcctccggagccgtgaatgctgctaatcccaacctccgagcgtgtgcgcacaatccagtgttgctacgtcgtaacgcgtaagtcggaggcggaacagactactttcggtactccgtgtttccttattttgtttcaatattttatggtgacattgactgatatctgtgaatttgctcgctgcccctgaatattgccttatattacttaatagcatttcacgaaaacgacccagctttcaattgagcttattaactttgctgtatctttaaaccagatccacaagtcggtgtaca

SEQ ID NO: 23531 - DNA, 751 bp, synthetic construct
  source 1..751: mol_type = other DNA
ccctttcataacccctcccctaattcccaccttgcaaccatacgctttactccgcttcgggttttgcggcccgatgtcgtgaagaaacggttacgcaaacttagtggcgaacggggcctgccaccataagtggccccattagaagaatgtacgatccgcccagtaggcggccaccatccaggtggtttacgggcaagcacttctgtttccccggtgacgttacataggatgtccccacgtctgaaagtgactgatccgttacccgcctcaccactgcgagacggttagtacgatgtaatagctgatcaccgttgatccgggcgttttccccccgcccagaaacatgtgatgaggagcggcatccctcctatggcaacatagggcctctcctgcgttggcacgtgggctccttgagcacggtgtgatgtgaaagtcatccgaagaccttattgcgctggtgttgagtcctccgcccccctgaatgcggctaatcctaactccggatcatccgccggcaagcccgccggtagggtgtcgtaacgcgtaagtctggagcggaaccgactactttgggtgtggcgtgtttccttatttgtttggttgattgcatatggtgacaattcgttgtattgacgtttgccacttcccctgcaaatattaccaaaccaggtgctgtttttgtgctaactcctgccttactattaccaagaaattttcagagtcacttattccctcggttgtttggagcata

SEQ ID NO: 23532 - DNA, 701 bp, synthetic construct
  source 1..701: mol_type = other DNA
tccgcttcgggttttgcggcccgatgtcgtgaagaaacggttacgcaaacttagtggcgaacggggcctgccaccataagtggccccattagaagaatgtacgatccgcccagtaggcggccaccatccaggtggtttacgggcaagcacttctgtttccccggtgacgttacataggatgtccccacgtctgaaagtgactgatccgttacccgcctcaccactgcgagacggttagtacgatgtaatagctgatcaccgttgatccgggcgttttccccccgcccagaaacatgtgatgaggagcggcatccctcctatggcaacatagggcctctcctgcgttggcacgtgggctccttgagcacggtgtgatgtgaaagtcatccgaagaccttattgcgctggtgttgagtcctccgcccccctgaatgcggctaatcctaactccggatcatccgccggcaagcccgccggtagggtgtcgtaacgcgtaagtctggagcggaaccgactactttgggtgtggcgtgtttccttatttgtttggttgattgcatatggtgacaattcgttgtattgacgtttgccacttcccctgcaaatattaccaaaccaggtgctgtttttgtgctaactcctgccttactattaccaagaaattttcagagtcacttattccctcggttgtttggagcata

SEQ ID NO: 23533 - DNA, 651 bp, synthetic construct
  source 1..651: mol_type = other DNA
ttagtggcgaacggggcctgccaccataagtggccccattagaagaatgtacgatccgcccagtaggcggccaccatccaggtggtttacgggcaagcacttctgtttccccggtgacgttacataggatgtccccacgtctgaaagtgactgatccgttacccgcctcaccactgcgagacggttagtacgatgtaatagctgatcaccgttgatccgggcgttttccccccgcccagaaacatgtgatgaggagcggcatccctcctatggcaacatagggcctctcctgcgttggcacgtgggctccttgagcacggtgtgatgtgaaagtcatccgaagaccttattgcgctggtgttgagtcctccgcccccctgaatgcggctaatcctaactccggatcatccgccggcaagcccgccggtagggtgtcgtaacgcgtaagtctggagcggaaccgactactttgggtgtggcgtgtttccttatttgtttggttgattgcatatggtgacaattcgttgtattgacgtttgccacttcccctgcaaatattaccaaaccaggtgctgtttttgtgctaactcctgccttactattaccaagaaattttcagagtcacttattccctcggttgtttggagcata

SEQ ID NO: 23534 - DNA, 601 bp, synthetic construct
  source 1..601: mol_type = other DNA
acgatccgcccagtaggcggccaccatccaggtggtttacgggcaagcacttctgtttccccggtgacgttacataggatgtccccacgtctgaaagtgactgatccgttacccgcctcaccactgcgagacggttagtacgatgtaatagctgatcaccgttgatccgggcgttttccccccgcccagaaacatgtgatgaggagcggcatccctcctatggcaacatagggcctctcctgcgttggcacgtgggctccttgagcacggtgtgatgtgaaagtcatccgaagaccttattgcgctggtgttgagtcctccgcccccctgaatgcggctaatcctaactccggatcatccgccggcaagcccgccggtagggtgtcgtaacgcgtaagtctggagcggaaccgactactttgggtgtggcgtgtttccttatttgtttggttgattgcatatggtgacaattcgttgtattgacgtttgccacttcccctgcaaatattaccaaaccaggtgctgtttttgtgctaactcctgccttactattaccaagaaattttcagagtcacttattccctcggttgtttggagcata

SEQ ID NO: 23535 - DNA, 551 bp, synthetic construct
  source 1..551: mol_type = other DNA
ttctgtttccccggtgacgttacataggatgtccccacgtctgaaagtgactgatccgttacccgcctcaccactgcgagacggttagtacgatgtaatagctgatcaccgttgatccgggcgttttccccccgcccagaaacatgtgatgaggagcggcatccctcctatggcaacatagggcctctcctgcgttggcacgtgggctccttgagcacggtgtgatgtgaaagtcatccgaagaccttattgcgctggtgttgagtcctccgcccccctgaatgcggctaatcctaactccggatcatccgccggcaagcccgccggtagggtgtcgtaacgcgtaagtctggagcggaaccgactactttgggtgtggcgtgtttccttatttgtttggttgattgcatatggtgacaattcgttgtattgacgtttgccacttcccctgcaaatattaccaaaccaggtgctgtttttgtgctaactcctgccttactattaccaagaaattttcagagtcacttattccctcggttgtttggagcata

SEQ ID NO: 23536 - DNA, 501 bp, synthetic construct
  source 1..501: mol_type = other DNA
ctgatccgttacccgcctcaccactgcgagacggttagtacgatgtaatagctgatcaccgttgatccgggcgttttccccccgcccagaaacatgtgatgaggagcggcatccctcctatggcaacatagggcctctcctgcgttggcacgtgggctccttgagcacggtgtgatgtgaaagtcatccgaagaccttattgcgctggtgttgagtcctccgcccccctgaatgcggctaatcctaactccggatcatccgccggcaagcccgccggtagggtgtcgtaacgcgtaagtctggagcggaaccgactactttgggtgtggcgtgtttccttatttgtttggttgattgcatatggtgacaattcgttgtattgacgtttgccacttcccctgcaaatattaccaaaccaggtgctgtttttgtgctaactcctgccttactattaccaagaaattttcagagtcacttattccctcggttgtttggagcata

SEQ ID NO: 23537 - DNA, 782 bp, synthetic construct
  source 1..782: mol_type = other DNA
gccttgccgctatacacacccaaccaatcgattcggccccacgtgtatagccccttggtcaagtgacctcttacgtctggacgcggatttaagacctgaatatccgctgaaagttaacaccatgtttgccccgattatgtgatgtttctgctcttgctgggcggaacatccgtcgggatgccaaagcaatttgtgtccccttctttctttggacttcggtcccccggtcgaagccgcttggaataagacagggttattttccctccttcctctcttctactttgttaagctctatttaacaaaagggtatgtctggcccctcccttcttggggaatgtgcgcggcggtctttccgtctctcgaaaagcgtgcatgccagatgcaagagaaggtgaagaaagtaagttgtgtctaacgttaagacaggaacgaatgtgtctgtagcgacctctcaaaggctgcggtctccccacctggtaacaggtgccgcagcggccaaaagccacgtggttaacagccacctttgagagcggtgcaaccccagcaccacactttcgttgttgttttctcactaaccacaactcgcttctctgaagccctcttgtagagttgccaagaatgtccagaaggtaccccggtccacgggatctgatctggagctccatgcgtgtgctctacacacgttcgggagttaaaaactgtcacagcaactccaaactaggtggtcctagttttcacttttatttgtcaagtcatatggtgatggttaaaggagaacgaca

SEQ ID NO: 23538 - DNA, 732 bp, synthetic construct
  source 1..732: mol_type = other DNA
ccccttggtcaagtgacctcttacgtctggacgcggatttaagacctgaatatccgctgaaagttaacaccatgtttgccccgattatgtgatgtttctgctcttgctgggcggaacatccgtcgggatgccaaagcaatttgtgtccccttctttctttggacttcggtcccccggtcgaagccgcttggaataagacagggttattttccctccttcctctcttctactttgttaagctctatttaacaaaagggtatgtctggcccctcccttcttggggaatgtgcgcggcggtctttccgtctctcgaaaagcgtgcatgccagatgcaagagaaggtgaagaaagtaagttgtgtctaacgttaagacaggaacgaatgtgtctgtagcgacctctcaaaggctgcggtctccccacctggtaacaggtgccgcagcggccaaaagccacgtggttaacagccacctttgagagcggtgcaaccccagcaccacactttcgttgttgttttctcactaaccacaactcgcttctctgaagccctcttgtagagttgccaagaatgtccagaaggtaccccggtccacgggatctgatctggagctccatgcgtgtgctctacacacgttcgggagttaaaaactgtcacagcaactccaaactaggtggtcctagttttcacttttatttgtcaagtcatatggtgatggttaaaggagaacgaca

SEQ ID NO: 23539 - DNA, 682 bp, synthetic construct
  source 1..682: mol_type = other DNA
tatccgctgaaagttaacaccatgtttgccccgattatgtgatgtttctgctcttgctgggcggaacatccgtcgggatgccaaagcaatttgtgtccccttctttctttggacttcggtcccccggtcgaagccgcttggaataagacagggttattttccctccttcctctcttctactttgttaagctctatttaacaaaagggtatgtctggcccctcccttcttggggaatgtgcgcggcggtctttccgtctctcgaaaagcgtgcatgccagatgcaagagaaggtgaagaaagtaagttgtgtctaacgttaagacaggaacgaatgtgtctgtagcgacctctcaaaggctgcggtctccccacctggtaacaggtgccgcagcggccaaaagccacgtggttaacagccacctttgagagcggtgcaaccccagcaccacactttcgttgttgttttctcactaaccacaactcgcttctctgaagccctcttgtagagttgccaagaatgtccagaaggtaccccggtccacgggatctgatctggagctccatgcgtgtgctctacacacgttcgggagttaaaaactgtcacagcaactccaaactaggtggtcctagttttcacttttatttgtcaagtcatatggtgatggttaaaggagaacgaca

SEQ ID NO: 23540 - DNA, 632 bp, synthetic construct
  source 1..632: mol_type = other DNA
ctcttgctgggcggaacatccgtcgggatgccaaagcaatttgtgtccccttctttctttggacttcggtcccccggtcgaagccgcttggaataagacagggttattttccctccttcctctcttctactttgttaagctctatttaacaaaagggtatgtctggcccctcccttcttggggaatgtgcgcggcggtctttccgtctctcgaaaagcgtgcatgccagatgcaagagaaggtgaagaaagtaagttgtgtctaacgttaagacaggaacgaatgtgtctgtagcgacctctcaaaggctgcggtctccccacctggtaacaggtgccgcagcggccaaaagccacgtggttaacagccacctttgagagcggtgcaaccccagcaccacactttcgttgttgttttctcactaaccacaactcgcttctctgaagccctcttgtagagttgccaagaatgtccagaaggtaccccggtccacgggatctgatctggagctccatgcgtgtgctctacacacgttcgggagttaaaaactgtcacagcaactccaaactaggtggtcctagttttcacttttatttgtcaagtcatatggtgatggttaaaggagaacgaca

SEQ ID NO: 23541 - DNA, 582 bp, synthetic construct
  source 1..582: mol_type = other DNA
ttctttctttggacttcggtcccccggtcgaagccgcttggaataagacagggttattttccctccttcctctcttctactttgttaagctctatttaacaaaagggtatgtctggcccctcccttcttggggaatgtgcgcggcggtctttccgtctctcgaaaagcgtgcatgccagatgcaagagaaggtgaagaaagtaagttgtgtctaacgttaagacaggaacgaatgtgtctgtagcgacctctcaaaggctgcggtctccccacctggtaacaggtgccgcagcggccaaaagccacgtggttaacagccacctttgagagcggtgcaaccccagcaccacactttcgttgttgttttctcactaaccacaactcgcttctctgaagccctcttgtagagttgccaagaatgtccagaaggtaccccggtccacgggatctgatctggagctccatgcgtgtgctctacacacgttcgggagttaaaaactgtcacagcaactccaaactaggtggtcctagttttcacttttatttgtcaagtcatatggtgatggttaaaggagaacgaca

SEQ ID NO: 23542 - DNA, 532 bp, synthetic construct
  source 1..532: mol_type = other DNA
gggttattttccctccttcctctcttctactttgttaagctctatttaacaaaagggtatgtctggcccctcccttcttggggaatgtgcgcggcggtctttccgtctctcgaaaagcgtgcatgccagatgcaagagaaggtgaagaaagtaagttgtgtctaacgttaagacaggaacgaatgtgtctgtagcgacctctcaaaggctgcggtctccccacctggtaacaggtgccgcagcggccaaaagccacgtggttaacagccacctttgagagcggtgcaaccccagcaccacactttcgttgttgttttctcactaaccacaactcgcttctctgaagccctcttgtagagttgccaagaatgtccagaaggtaccccggtccacgggatctgatctggagctccatgcgtgtgctctacacacgttcgggagttaaaaactgtcacagcaactccaaactaggtggtcctagttttcacttttatttgtcaagtcatatggtgatggttaaaggagaacgaca

SEQ ID NO: 23543 - DNA, 673 bp, synthetic construct
  source 1..673: mol_type = other DNA
actccattcagcttcttcggaacctgttcggaggaattaaacgggcacccatactccccccaccccccttttgtaactaagtatgtgtgctcgtgatcttgactcccacggaacggaccgatccgttggtgaacaaacagctaggtccacatcctcccttcccctgggagggcccccgccctcccacatcctccccccagcctgacgtatcacaggctgtgtgaagcccccgcgaaagctgctcacgtggcaattgtgggtccccccttcatcaagacaccaggtctttcctccttaaggctagccccggcgtgtgaattcacgttgggcaactagtggtgtcactgtgcgctcccaatctcggccgcggagtgctgttccccaagccaaacccctggcccttcactatgtgcctggcaagcatatctgagaaggtgttccgctgtggctgccaacctggtgacaggtgccccagtgtgcgtaaccttcttccgtctccggacggtagtgattggttaagatttggtgtaaggttcatgtgccaacgccctgtgcgggatgaaacctctactgccctaggaatgccaggcaggtaccccacctccgggtgggatctgagcctgggctaattgtctacgggtagtttcatttccaatccttttatgtcggagtc

SEQ ID NO: 23544 - DNA, 623 bp, synthetic construct
  source 1..623: mol_type = other DNA
atactccccccaccccccttttgtaactaagtatgtgtgctcgtgatcttgactcccacggaacggaccgatccgttggtgaacaaacagctaggtccacatcctcccttcccctgggagggcccccgccctcccacatcctccccccagcctgacgtatcacaggctgtgtgaagcccccgcgaaagctgctcacgtggcaattgtgggtccccccttcatcaagacaccaggtctttcctccttaaggctagccccggcgtgtgaattcacgttgggcaactagtggtgtcactgtgcgctcccaatctcggccgcggagtgctgttccccaagccaaacccctggcccttcactatgtgcctggcaagcatatctgagaaggtgttccgctgtggctgccaacctggtgacaggtgccccagtgtgcgtaaccttcttccgtctccggacggtagtgattggttaagatttggtgtaaggttcatgtgccaacgccctgtgcgggatgaaacctctactgccctaggaatgccaggcaggtaccccacctccgggtgggatctgagcctgggctaattgtctacgggtagtttcatttccaatccttttatgtcggagtc

SEQ ID NO: 23545 - DNA, 573 bp, synthetic construct
  source 1..573: mol_type = other DNA
gactcccacggaacggaccgatccgttggtgaacaaacagctaggtccacatcctcccttcccctgggagggcccccgccctcccacatcctccccccagcctgacgtatcacaggctgtgtgaagcccccgcgaaagctgctcacgtggcaattgtgggtccccccttcatcaagacaccaggtctttcctccttaaggctagccccggcgtgtgaattcacgttgggcaactagtggtgtcactgtgcgctcccaatctcggccgcggagtgctgttccccaagccaaacccctggcccttcactatgtgcctggcaagcatatctgagaaggtgttccgctgtggctgccaacctggtgacaggtgccccagtgtgcgtaaccttcttccgtctccggacggtagtgattggttaagatttggtgtaaggttcatgtgccaacgccctgtgcgggatgaaacctctactgccctaggaatgccaggcaggtaccccacctccgggtgggatctgagcctgggctaattgtctacgggtagtttcatttccaatccttttatgtcggagtc

SEQ ID NO: 23546 - DNA, 523 bp, synthetic construct
  source 1..523: mol_type = other DNA
atcctcccttcccctgggagggcccccgccctcccacatcctccccccagcctgacgtatcacaggctgtgtgaagcccccgcgaaagctgctcacgtggcaattgtgggtccccccttcatcaagacaccaggtctttcctccttaaggctagccccggcgtgtgaattcacgttgggcaactagtggtgtcactgtgcgctcccaatctcggccgcggagtgctgttccccaagccaaacccctggcccttcactatgtgcctggcaagcatatctgagaaggtgttccgctgtggctgccaacctggtgacaggtgccccagtgtgcgtaaccttcttccgtctccggacggtagtgattggttaagatttggtgtaaggttcatgtgccaacgccctgtgcgggatgaaacctctactgccctaggaatgccaggcaggtaccccacctccgggtgggatctgagcctgggctaattgtctacgggtagtttcatttccaatccttttatgtcggagtc

SEQ ID NO: 23547 - DNA, 662 bp, synthetic construct
  source 1..662: mol_type = other DNA
cttcttcggaacctgttcggaggaattaaacgggcacccatactccccccacccccctttggtaactaagtatgtgtgctcgtgatcttggctcccacggagcggaccgatccgttggtgaacaaacagctaggtccacatcctcccttcccctgggagggcccccgccctcccacatcctccccccagcctgacgtatcacaggctgtgtgaagcccccgcgaaagctgctcacgtggcaattgtgggtccccccttcatcaagacaccaggtctttcctccttaaggctagccccggcgtgtgaattcacgttgggcaactagtggtgtcactgtgcgctcccaatctcggccgcggagtgctgttccccaagccaaacccctggcccttcactatgtgcctggcaagcatatctgagaaggtgttccgctgtggctgccaacctggtaacaggtgccccagtgtgcgtaaccttcttccgtctccggacggtagtgattggttaagatttggtgtaaggttcatgtgccaacgccctgtgcgggatgaaacctctactgccctaggaatgccaggcaggtaccccacctccgggtgggatctgagcctgggctaattgtctacgggtagtttcatttccaatccttttatgtcggagtc

SEQ ID NO: 23548 - DNA, 612 bp, synthetic construct
  source 1..612: mol_type = other DNA
acccccctttggtaactaagtatgtgtgctcgtgatcttggctcccacggagcggaccgatccgttggtgaacaaacagctaggtccacatcctcccttcccctgggagggcccccgccctcccacatcctccccccagcctgacgtatcacaggctgtgtgaagcccccgcgaaagctgctcacgtggcaattgtgggtccccccttcatcaagacaccaggtctttcctccttaaggctagccccggcgtgtgaattcacgttgggcaactagtggtgtcactgtgcgctcccaatctcggccgcggagtgctgttccccaagccaaacccctggcccttcactatgtgcctggcaagcatatctgagaaggtgttccgctgtggctgccaacctggtaacaggtgccccagtgtgcgtaaccttcttccgtctccggacggtagtgattggttaagatttggtgtaaggttcatgtgccaacgccctgtgcgggatgaaacctctactgccctaggaatgccaggcaggtaccccacctccgggtgggatctgagcctgggctaattgtctacgggtagtttcatttccaatccttttatgtcggagtc

SEQ ID NO: 23549 - DNA, 562 bp, synthetic construct
  source 1..562: mol_type = other DNA
agcggaccgatccgttggtgaacaaacagctaggtccacatcctcccttcccctgggagggcccccgccctcccacatcctccccccagcctgacgtatcacaggctgtgtgaagcccccgcgaaagctgctcacgtggcaattgtgggtccccccttcatcaagacaccaggtctttcctccttaaggctagccccggcgtgtgaattcacgttgggcaactagtggtgtcactgtgcgctcccaatctcggccgcggagtgctgttccccaagccaaacccctggcccttcactatgtgcctggcaagcatatctgagaaggtgttccgctgtggctgccaacctggtaacaggtgccccagtgtgcgtaaccttcttccgtctccggacggtagtgattggttaagatttggtgtaaggttcatgtgccaacgccctgtgcgggatgaaacctctactgccctaggaatgccaggcaggtaccccacctccgggtgggatctgagcctgggctaattgtctacgggtagtttcatttccaatccttttatgtcggagtc

SEQ ID NO: 23550 - DNA, 512 bp, synthetic construct
  source 1..512: mol_type = other DNA
ccctgggagggcccccgccctcccacatcctccccccagcctgacgtatcacaggctgtgtgaagcccccgcgaaagctgctcacgtggcaattgtgggtccccccttcatcaagacaccaggtctttcctccttaaggctagccccggcgtgtgaattcacgttgggcaactagtggtgtcactgtgcgctcccaatctcggccgcggagtgctgttccccaagccaaacccctggcccttcactatgtgcctggcaagcatatctgagaaggtgttccgctgtggctgccaacctggtaacaggtgccccagtgtgcgtaaccttcttccgtctccggacggtagtgattggttaagatttggtgtaaggttcatgtgccaacgccctgtgcgggatgaaacctctactgccctaggaatgccaggcaggtaccccacctccgggtgggatctgagcctgggctaattgtctacgggtagtttcatttccaatccttttatgtcggagtc

SEQ ID NO: 23551 - DNA, 627 bp, synthetic construct
  source 1..627: mol_type = other DNA
cccatacacccccacccccttttctgcaacttaagtatgtgtgctcgtaatcttgactcccacggaacggatcgatccgctggagaacaaactgctagatccacatcctcccttcccctgggaggaccccggtcctcccacatcctccccccagcctgacgtaacacaggctgtgtgaagtccccgcgaaagctgctcacgtggcaattgtgggtccccccttcaccaagacaccaggtctttcctccttaaggctagccccgatgtgtgaattcacattgggcaactagtggtgtcactgtgcgctcccaatctcggccgcggagtgctgttccccaagccaaacccctggcccttcactatgtgcctggcaagcatatctgagaaggtgttccgctgtggctgccagcctggtaacaggtgccccagtgtgcgtaaccttcttccgtctccggacggtagtgattggttaagatttggtgtaaggttcatgtgccaacgccctgtgcgggatgaaacctctactgccctaggaatgccaggcaggtaccccaccttcgggtgggatctgagcctgggctaattgtctacgggtagtttcatttccaattcttttatgtcggagtc

SEQ ID NO: 23552 - DNA, 577 bp, synthetic construct
  source 1..577: mol_type = other DNA
tcttgactcccacggaacggatcgatccgctggagaacaaactgctagatccacatcctcccttcccctgggaggaccccggtcctcccacatcctccccccagcctgacgtaacacaggctgtgtgaagtccccgcgaaagctgctcacgtggcaattgtgggtccccccttcaccaagacaccaggtctttcctccttaaggctagccccgatgtgtgaattcacattgggcaactagtggtgtcactgtgcgctcccaatctcggccgcggagtgctgttccccaagccaaacccctggcccttcactatgtgcctggcaagcatatctgagaaggtgttccgctgtggctgccagcctggtaacaggtgccccagtgtgcgtaaccttcttccgtctccggacggtagtgattggttaagatttggtgtaaggttcatgtgccaacgccctgtgcgggatgaaacctctactgccctaggaatgccaggcaggtaccccaccttcgggtgggatctgagcctgggctaattgtctacgggtagtttcatttccaattcttttatgtcggagtc

SEQ ID NO: 23553 - DNA, 527 bp, synthetic construct
  source 1..527: mol_type = other DNA
ccacatcctcccttcccctgggaggaccccggtcctcccacatcctccccccagcctgacgtaacacaggctgtgtgaagtccccgcgaaagctgctcacgtggcaattgtgggtccccccttcaccaagacaccaggtctttcctccttaaggctagccccgatgtgtgaattcacattgggcaactagtggtgtcactgtgcgctcccaatctcggccgcggagtgctgttccccaagccaaacccctggcccttcactatgtgcctggcaagcatatctgagaaggtgttccgctgtggctgccagcctggtaacaggtgccccagtgtgcgtaaccttcttccgtctccggacggtagtgattggttaagatttggtgtaaggttcatgtgccaacgccctgtgcgggatgaaacctctactgccctaggaatgccaggcaggtaccccaccttcgggtgggatctgagcctgggctaattgtctacgggtagtttcatttccaattcttttatgtcggagtc

SEQ ID NO: 23554 - DNA, 579 bp, synthetic construct
  source 1..579: mol_type = other DNA
aatcttgactcccacggaatggatcgatccgctggagaacaaactgctagatccacatcctccctccccttgggaggacctcggtcctcccacatcctccctccagcctgacgtatcacaggctgtgtgaagcccccgcgaaagctgctcacgtggcaattgtgggtccccccttcatcaagacaccaggtctttcctccttaaggctagccccgatgtgtgaattcacattgggcaactagtggtgtcactgtgcgctcccaatctcggccgcggagtgctgttccccaagccaaacccctggcccttcactatgtgcctggcaagcatatctgagaaggtgttccgctgtggctgccagcctggtaacaggtgccccagtgtgcgtaaccttcttccgtctccggacggtagtgattggttaagatttggtgtaaggttcatgtgccaacgccctgtgcgggatgaaacctctactgccctaggaatgccaggcaggtaccccaccttcgggtgggatctgagcctgggctaattgtctacgggtagtttcatttccaattcttttatgctggagtc

SEQ ID NO: 23555 - DNA, 529 bp, synthetic construct
  source 1..529: mol_type = other DNA
atccacatcctccctccccttgggaggacctcggtcctcccacatcctccctccagcctgacgtatcacaggctgtgtgaagcccccgcgaaagctgctcacgtggcaattgtgggtccccccttcatcaagacaccaggtctttcctccttaaggctagccccgatgtgtgaattcacattgggcaactagtggtgtcactgtgcgctcccaatctcggccgcggagtgctgttccccaagccaaacccctggcccttcactatgtgcctggcaagcatatctgagaaggtgttccgctgtggctgccagcctggtaacaggtgccccagtgtgcgtaaccttcttccgtctccggacggtagtgattggttaagatttggtgtaaggttcatgtgccaacgccctgtgcgggatgaaacctctactgccctaggaatgccaggcaggtaccccaccttcgggtgggatctgagcctgggctaattgtctacgggtagtttcatttccaattcttttatgctggagtc

SEQ ID NO: 23556 - DNA, 675 bp, synthetic construct
  source 1..675: mol_type = other DNA
actccattcagcttcttcggaacctgttcggaggaattaaacgggcacccactttcctgtcctctccccctttctgcaactcaagtgtgtgctcgtaatcctgactcccacgggttgaccgccccgttggtgaacaaacagctaggtcattccctccctacccctgggcgccatttcagtggcgttcatatcctccccccagcctgacgtgtcacaggctgtgcaaagtccccgcgaaagctgctcacgtggcaattgtgggtcccccctttgtgaaggaaccgagtctttctcccttaaggctagacccctgtgtgaactcacaggtggcaactagtggttccactgcatgctcccgacctcggccgcggagtgctgttccccaagtcgtgacactgacctccacttatgtgcctggcaagcatatctgagaagatgttccgctgtggctgccaaacctggtaacaggtgccccagtgcgtgtagtcttcttccgtctccggacggtaagtgtgtggtaaagatgcggcgtaaggttcaagtgccaacgccctggaagggatgacccttctactgccctaggaatgccgcgcaggtaccccaggttcgcctgggatctgagcgcgggctaattgtctacgggtagtttcatttccctctcttttcactggcatc

SEQ ID NO: 23557 - DNA, 625 bp, synthetic construct
  source 1..625: mol_type = other DNA
actttcctgtcctctccccctttctgcaactcaagtgtgtgctcgtaatcctgactcccacgggttgaccgccccgttggtgaacaaacagctaggtcattccctccctacccctgggcgccatttcagtggcgttcatatcctccccccagcctgacgtgtcacaggctgtgcaaagtccccgcgaaagctgctcacgtggcaattgtgggtcccccctttgtgaaggaaccgagtctttctcccttaaggctagacccctgtgtgaactcacaggtggcaactagtggttccactgcatgctcccgacctcggccgcggagtgctgttccccaagtcgtgacactgacctccacttatgtgcctggcaagcatatctgagaagatgttccgctgtggctgccaaacctggtaacaggtgccccagtgcgtgtagtcttcttccgtctccggacggtaagtgtgtggtaaagatgcggcgtaaggttcaagtgccaacgccctggaagggatgacccttctactgccctaggaatgccgcgcaggtaccccaggttcgcctgggatctgagcgcgggctaattgtctacgggtagtttcatttccctctcttttcactggcatc

SEQ ID NO: 23558 - DNA, 575 bp, synthetic construct
  source 1..575: mol_type = other DNA
ctgactcccacgggttgaccgccccgttggtgaacaaacagctaggtcattccctccctacccctgggcgccatttcagtggcgttcatatcctccccccagcctgacgtgtcacaggctgtgcaaagtccccgcgaaagctgctcacgtggcaattgtgggtcccccctttgtgaaggaaccgagtctttctcccttaaggctagacccctgtgtgaactcacaggtggcaactagtggttccactgcatgctcccgacctcggccgcggagtgctgttccccaagtcgtgacactgacctccacttatgtgcctggcaagcatatctgagaagatgttccgctgtggctgccaaacctggtaacaggtgccccagtgcgtgtagtcttcttccgtctccggacggtaagtgtgtggtaaagatgcggcgtaaggttcaagtgccaacgccctggaagggatgacccttctactgccctaggaatgccgcgcaggtaccccaggttcgcctgggatctgagcgcgggctaattgtctacgggtagtttcatttccctctcttttcactggcatc

SEQ ID NO: 23559 - DNA, 525 bp, synthetic construct
  source 1..525: mol_type = other DNA
tccctccctacccctgggcgccatttcagtggcgttcatatcctccccccagcctgacgtgtcacaggctgtgcaaagtccccgcgaaagctgctcacgtggcaattgtgggtcccccctttgtgaaggaaccgagtctttctcccttaaggctagacccctgtgtgaactcacaggtggcaactagtggttccactgcatgctcccgacctcggccgcggagtgctgttccccaagtcgtgacactgacctccacttatgtgcctggcaagcatatctgagaagatgttccgctgtggctgccaaacctggtaacaggtgccccagtgcgtgtagtcttcttccgtctccggacggtaagtgtgtggtaaagatgcggcgtaaggttcaagtgccaacgccctggaagggatgacccttctactgccctaggaatgccgcgcaggtaccccaggttcgcctgggatctgagcgcgggctaattgtctacgggtagtttcatttccctctcttttcactggcatc

SEQ ID NO: 23560 - DNA, 560 bp, synthetic construct; identical to SEQ ID NO: 21872
  source 1..560: mol_type = other DNA

SEQ ID NO: 23561 - DNA, 510 bp, synthetic construct; identical to SEQ ID NO: 21873
  source 1..510: mol_type = other DNA

SEQ ID NO: 23562 - DNA, 661 bp, synthetic construct
  source 1..661: mol_type = other DNA
cttcttcggaacctgttcggaggaattaaacgggcacccactcaccccctctccctcctcgtaactaagtgtgtgcccagtctctttactcctgctggcttcaccgaccagtagtggccaaaatgctaggtgaacctcctccctcccccactgggctcccgcccagtttcctccccccagcctgacgtgtcacaggctgtgcaaagaccccgcgaaagctgccaaaagtggcaattgtgggtcccccctttgtcaaggcgtcgagtctttctcccttaaggctagccccgtcagtgaattctgtcgggcaactagtgacgccactgcatgcctccgacctcggccgcggagtgctgccccccaagtcatgcccctgaccacaagttgtgctgtctggcaaacattgtctgtgagaatgttccgctgtggctgccaagcctggtaacaggctgccccagtgtgtgtagttctcatccggacttcggtctggcaacttgctgttaagacatggcgtaaggggcgtgtgccaacgccctggaacgagtgtccactctaataccccgaggaatgctacgcaggtacccctggcctgccagggatctgagcgtaggctaattgtctaagggtattttcatttcccactctttctttcttgttcata

SEQ ID NO: 23563 - DNA, 611 bp, synthetic construct
  source 1..611: mol_type = other DNA
ctccctcctcgtaactaagtgtgtgcccagtctctttactcctgctggcttcaccgaccagtagtggccaaaatgctaggtgaacctcctccctcccccactgggctcccgcccagtttcctccccccagcctgacgtgtcacaggctgtgcaaagaccccgcgaaagctgccaaaagtggcaattgtgggtcccccctttgtcaaggcgtcgagtctttctcccttaaggctagccccgtcagtgaattctgtcgggcaactagtgacgccactgcatgcctccgacctcggccgcggagtgctgccccccaagtcatgcccctgaccacaagttgtgctgtctggcaaacattgtctgtgagaatgttccgctgtggctgccaagcctggtaacaggctgccccagtgtgtgtagttctcatccggacttcggtctggcaacttgctgttaagacatggcgtaaggggcgtgtgccaacgccctggaacgagtgtccactctaataccccgaggaatgctacgcaggtacccctggcctgccagggatctgagcgtaggctaattgtctaagggtattttcatttcccactctttctttcttgttcata

SEQ ID NO: 23564 - DNA, 561 bp, synthetic construct
  source 1..561: mol_type = other DNA
tcaccgaccagtagtggccaaaatgctaggtgaacctcctccctcccccactgggctcccgcccagtttcctccccccagcctgacgtgtcacaggctgtgcaaagaccccgcgaaagctgccaaaagtggcaattgtgggtcccccctttgtcaaggcgtcgagtctttctcccttaaggctagccccgtcagtgaattctgtcgggcaactagtgacgccactgcatgcctccgacctcggccgcggagtgctgccccccaagtcatgcccctgaccacaagttgtgctgtctggcaaacattgtctgtgagaatgttccgctgtggctgccaagcctggtaacaggctgccccagtgtgtgtagttctcatccggacttcggtctggcaacttgctgttaagacatggcgtaaggggcgtgtgccaacgccctggaacgagtgtccactctaataccccgaggaatgctacgcaggtacccctggcctgccagggatctgagcgtaggctaattgtctaagggtattttcatttcccactctttctttcttgttcata

SEQ ID NO: 23565 - DNA, 511 bp, synthetic construct
  source 1..511: mol_type = other DNA
ctgggctcccgcccagtttcctccccccagcctgacgtgtcacaggctgtgcaaagaccccgcgaaagctgccaaaagtggcaattgtgggtcccccctttgtcaaggcgtcgagtctttctcccttaaggctagccccgtcagtgaattctgtcgggcaactagtgacgccactgcatgcctccgacctcggccgcggagtgctgccccccaagtcatgcccctgaccacaagttgtgctgtctggcaaacattgtctgtgagaatgttccgctgtggctgccaagcctggtaacaggctgccccagtgtgtgtagttctcatccggacttcggtctggcaacttgctgttaagacatggcgtaaggggcgtgtgccaacgccctggaacgagtgtccactctaataccccgaggaatgctacgcaggtacccctggcctgccagggatctgagcgtaggctaattgtctaagggtattttcatttcccactctttctttcttgttcata

SEQ ID NO: 23566 - DNA, 663 bp, synthetic construct; identical to SEQ ID NO: 22132
  source 1..663: mol_type = other DNA

SEQ ID NO: 23567 - DNA, 613 bp, synthetic construct; identical to SEQ ID NO: 22133
  source 1..613: mol_type = other DNA

SEQ ID NO: 23568 - DNA, 563 bp, synthetic construct; identical to SEQ ID NO: 22134
  source 1..563: mol_type = other DNA

SEQ ID NO: 23569 - DNA, 513 bp, synthetic construct; identical to SEQ ID NO: 22135
  source 1..513: mol_type = other DNA

SEQ ID NO: 23570 - DNA, 662 bp, synthetic construct; identical to SEQ ID NO: 22120
  source 1..662: mol_type = other DNA

SEQ ID NO: 23571 - DNA, 612 bp, synthetic construct; identical to SEQ ID NO: 22121
  source 1..612: mol_type = other DNA

SEQ ID NO: 23572 - DNA, 562 bp, synthetic construct; identical to SEQ ID NO: 22122
  source 1..562: mol_type = other DNA

SEQ ID NO: 23573 - DNA, 512 bp, synthetic construct; identical to SEQ ID NO: 22123
  source 1..512: mol_type = other DNA

SEQ ID NO: 23574 - DNA, 661 bp, synthetic construct
  source 1..661: mol_type = other DNA
cttcttcggaacctgtttggaggaattaaacgggcacccacccaccttcacccccttttcgtaactaagtgtgtgcccaatctcatgactcctgctgacttcaccgaccagcagtgtccaaaacgctaggtgaatttccttcctccccctctgggcttctgcccagctccctccctccagcctgacgtgccacaggctgtgcaaagaccccgcgaaagctgccaaaagtggcaattgtgggtcccccctttgtaaaggcgtcgagtctttctcccttaaggctagacccgtcagtgaattctgtcgggcaactagtgacgccactgcatgcctccgacctcggccgcggagtgctgccccccaagtcgtgcccctgactacaagttgtgctgtctggcaaacattgtctgtgagaatgttccgctgtggctgccaagcctggtaacaggctgccccagtgtgcgtagttctcatccagacttcggtctggcaacttgctgttaagacacggcgtaaggggcgtgtgccaacgccctggaacgagtgtccactctaataccccgaggaatgctacgcaggtacccctggctccccagggatctgagcgtaggctaattgtctaagggtattttcatttcccactctttctttcttgttcata

SEQ ID NO: 23575 - DNA, 611 bp, synthetic construct
  source 1..611: mol_type = other DNA
cccccttttcgtaactaagtgtgtgcccaatctcatgactcctgctgacttcaccgaccagcagtgtccaaaacgctaggtgaatttccttcctccccctctgggcttctgcccagctccctccctccagcctgacgtgccacaggctgtgcaaagaccccgcgaaagctgccaaaagtggcaattgtgggtcccccctttgtaaaggcgtcgagtctttctcccttaaggctagacccgtcagtgaattctgtcgggcaactagtgacgccactgcatgcctccgacctcggccgcggagtgctgccccccaagtcgtgcccctgactacaagttgtgctgtctggcaaacattgtctgtgagaatgttccgctgtggctgccaagcctggtaacaggctgccccagtgtgcgtagttctcatccagacttcggtctggcaacttgctgttaagacacggcgtaaggggcgtgtgccaacgccctggaacgagtgtccactctaataccccgaggaatgctacgcaggtacccctggctccccagggatctgagcgtaggctaattgtctaagggtattttcatttcccactctttctttcttgttcata

SEQ ID NO: 23576 - DNA, 561 bp, synthetic construct
  source 1..561: mol_type = other DNA
tcaccgaccagcagtgtccaaaacgctaggtgaatttccttcctccccctctgggcttctgcccagctccctccctccagcctgacgtgccacaggctgtgcaaagaccccgcgaaagctgccaaaagtggcaattgtgggtcccccctttgtaaaggcgtcgagtctttctcccttaaggctagacccgtcagtgaattctgtcgggcaactagtgacgccactgcatgcctccgacctcggccgcggagtgctgccccccaagtcgtgcccctgactacaagttgtgctgtctggcaaacattgtctgtgagaatgttccgctgtggctgccaagcctggtaacaggctgccccagtgtgcgtagttctcatccagacttcggtctggcaacttgctgttaagacacggcgtaaggggcgtgtgccaacgccctggaacgagtgtccactctaataccccgaggaatgctacgcaggtacccctggctccccagggatctgagcgtaggctaattgtctaagggtattttcatttcccactctttctttcttgttcata

SEQ ID NO: 23577 - DNA, 511 bp, synthetic construct
  source 1..511: mol_type = other DNA
ctgggcttctgcccagctccctccctccagcctgacgtgccacaggctgtgcaaagaccccgcgaaagctgccaaaagtggcaattgtgggtcccccctttgtaaaggcgtcgagtctttctcccttaaggctagacccgtcagtgaattctgtcgggcaactagtgacgccactgcatgcctccgacctcggccgcggagtgctgccccccaagtcgtgcccctgactacaagttgtgctgtctggcaaacattgtctgtgagaatgttccgctgtggctgccaagcctggtaacaggctgccccagtgtgcgtagttctcatccagacttcggtctggcaacttgctgttaagacacggcgtaaggggcgtgtgccaacgccctggaacgagtgtccactctaataccccgaggaatgctacgcaggtacccctggctccccagggatctgagcgtaggctaattgtctaagggtattttcatttcccactctttctttcttgttcata

SEQ ID NO: 23578 - DNA, 596 bp, synthetic construct
  source 1..596: mol_type = other DNA
gtgtgctcgtgaccttgactcctgcgggcttcaccgacccgtccagtgaacaaactgctaggtgactccttccccccccctggcctggatggcccacatccaggtcttcttcccccagcccgacatgtcatgggctgtttggaatccccgcgaaagctgctaacgtggcaattgtgggtcccccttccaacaagacaccgagtctttctcccttaaggctagccccgtgtggtgaattccaccgggcaactagtggtgtcaatgcatgcctccgacctcggccgcggagtgctgccccccaagttgcgaaactgaccaagactgtgctgcctggcaagcatagtctgaggagatgttccgctgtggttgccaaacctggtaacaggtgccccagtgtgcgtagtctccttccggttcgtccggctgtcctttggtaaagacacaatgtaaggggcgtgtgccaacgccctggaaagagtgaacttctactgccctaggaatgccacgcaggtacccctggtttcccaccagggatctgagcgtgggctaattgtctaacgggtagtttcatttccctcctctcttttgttgacatc

SEQ ID NO: 23579 - DNA, 546 bp, synthetic construct
  source 1..546: mol_type = other DNA
caaactgctaggtgactccttccccccccctggcctggatggcccacatccaggtcttcttcccccagcccgacatgtcatgggctgtttggaatccccgcgaaagctgctaacgtggcaattgtgggtcccccttccaacaagacaccgagtctttctcccttaaggctagccccgtgtggtgaattccaccgggcaactagtggtgtcaatgcatgcctccgacctcggccgcggagtgctgccccccaagttgcgaaactgaccaagactgtgctgcctggcaagcatagtctgaggagatgttccgctgtggttgccaaacctggtaacaggtgccccagtgtgcgtagtctccttccggttcgtccggctgtcctttggtaaagacacaatgtaaggggcgtgtgccaacgccctggaaagagtgaacttctactgccctaggaatgccacgcaggtacccctggtttcccaccagggatctgagcgtgggctaattgtctaacgggtagtttcatttccctcctctcttttgttgacatc

SEQ ID NO: 23580 - DNA, 551 bp, synthetic construct
  source 1..551: mol_type = other DNA
agtgtccaaaatgctaggtggaaaatcctcccttcccctctgggctccatgcccagcatcctccccccagcctgacgtgtcacaggctgtgcaaagaccccgcgaaagctgccaaaagtggcaattgtgggtcccccctttgtcaaggcgtcgagtctttctcccttaaggctagccccgtcagtgaattctgacgggcaactagtgacgccactgcatgcctccgacctcggccgcggagtgctgccccccaagtcatgcccctgaccacaagttgtgctgtctggcaaacactgtctgtgagaatgttccgctgtggctgccaagcctggtaacaggctgccccagtgtgcgtagttctcatccagacctcggtctggcaacttgctgttaagacatggcgtaaggggcgtgtgccaacgccctggaacgagtgtccactctaataccccgaggaatgctacgcaggtacccctggttcgccagggatctgagcgtaggctaattgtctaagggtattttcatttcccactctctctttcttgttcata

SEQ ID NO: 23581 - DNA, 501 bp, synthetic construct
  source 1..501: mol_type = other DNA
gcccagcatcctccccccagcctgacgtgtcacaggctgtgcaaagaccccgcgaaagctgccaaaagtggcaattgtgggtcccccctttgtcaaggcgtcgagtctttctcccttaaggctagccccgtcagtgaattctgacgggcaactagtgacgccactgcatgcctccgacctcggccgcggagtgctgccccccaagtcatgcccctgaccacaagttgtgctgtctggcaaacactgtctgtgagaatgttccgctgtggctgccaagcctggtaacaggctgccccagtgtgcgtagttctcatccagacctcggtctggcaacttgctgttaagacatggcgtaaggggcgtgtgccaacgccctggaacgagtgtccactctaataccccgaggaatgctacgcaggtacccctggttcgccagggatctgagcgtaggctaattgtctaagggtattttcatttcccactctctctttcttgttcata

SEQ ID NO: 23582 - DNA, 551 bp, synthetic construct
  source 1..551: mol_type = other DNA
agtgtccaaaatgccaggtggaaaatcctcccttcccctctgggcttcatgcccggcatcctccccccagcctgacgtgccacaggctgtgcaaagaccccgcgaaagctgccaaaagtggcaattgtgggtcccccctttgtcaaggcgtcgagtctttctcccttaaggctagtcctgtcagtgaactctgtcgggcaactagtgacgccactgcatgcctccgacctcggccgcggagtgctgccccccaagtcatgcccctgaccacaagttgtgctgtctggcaaacattgtctgtgagaatgttccgctgtggctgccaagcctggtaacaggctgccccagtgtgcgtaattctcatccagacttcggtctggcaacttgctgttaagacatggcgtaaggggcgtgtgccaacgccctggaacgagtgtccactctaataccccgaggaatgctacgcaggtacccctggctcgccagggatctgagcgtaggctaattgtctaagggtattttcatttcccaccctcttcttcttgttcata

SEQ ID NO: 23583 - DNA, 501 bp, synthetic construct
  source 1..501: mol_type = other DNA
gcccggcatcctccccccagcctgacgtgccacaggctgtgcaaagaccccgcgaaagctgccaaaagtggcaattgtgggtcccccctttgtcaaggcgtcgagtctttctcccttaaggctagtcctgtcagtgaactctgtcgggcaactagtgacgccactgcatgcctccgacctcggccgcggagtgctgccccccaagtcatgcccctgaccacaagttgtgctgtctggcaaacattgtctgtgagaatgttccgctgtggctgccaagcctggtaacaggctgccccagtgtgcgtaattctcatccagacttcggtctggcaacttgctgttaagacatggcgtaaggggcgtgtgccaacgccctggaacgagtgtccactctaataccccgaggaatgctacgcaggtacccctggctcgccagggatctgagcgtaggctaattgtctaagggtattttcatttcccaccctcttcttcttgttcata

SEQ ID NO: 23584 - DNA, 562 bp, synthetic construct; identical to SEQ ID NO: 21874
  source 1..562: mol_type = other DNA

SEQ ID NO: 23585 - DNA, 512 bp, synthetic construct; identical to SEQ ID NO: 21875
  source 1..512: mol_type = other DNA

SEQ ID NO: 23586 - DNA, 716 bp, synthetic construct; identical to SEQ ID NO: 23232
  source 1..716: mol_type = other DNA

SEQ ID NO: 23587 - DNA, 666 bp, synthetic construct; identical to SEQ ID NO: 23233
  source 1..666: mol_type = other DNA

SEQ ID NO: 23588 - DNA, 616 bp, synthetic construct; identical to SEQ ID NO: 23234
  source 1..616: mol_type = other DNA

SEQ ID NO: 23589 - DNA, 566 bp, synthetic construct; identical to SEQ ID NO: 23235
  source 1..566: mol_type = other DNA

SEQ ID NO: 23590 - DNA, 516 bp, synthetic construct; identical to SEQ ID NO: 23236
  source 1..516: mol_type = other DNA

SEQ ID NO: 23591 - DNA, 659 bp, synthetic construct
  source 1..659: mol_type = other DNA
catcatctgtcctcacccccaattttcccttttcttcccctgcaaccattacgcttactcgcatgtgcattgagtggtgcatgtgttgaacaaacagctacactcacatgggggcgggttttcccgccctacggcctctcgcgaggcccaccccttccctccccttataactacagtgctttggtaggtaagcatcctgatcccccgcggaagctgctcacgtggcaactgtggggacccagacaggttatcaaaggcacccggtctttccgccttcaggagtatccctactagtgaattctagcggggctctgcttggtgccaacctcccccaaatgcgcgctgcgggagtgctcttccccaactcaccctagtatcctctcatgtgtgtgcttggtcagcatatctgagacgatgttccgctgtcccagaccagtccagtaatggacgggccagtgcgtgtagtcgtcttccggcttgtccggggcatgtttggtgaaccggtggggtaaggttggtgtgcccaacgcccgtactttggtgacacctcaagaccacccaggaatgccagggaggtaccccacctcacggtgggatctgaccctgggctaattgtctacggtggttcttcttgcttccacttctttcttctgttcacg

SEQ ID NO: 23592 - DNA, 609 bp, synthetic construct
  source 1..609: mol_type = other DNA
acgcttactcgcatgtgcattgagtggtgcatgtgttgaacaaacagctacactcacatgggggcgggttttcccgccctacggcctctcgcgaggcccaccccttccctccccttataactacagtgctttggtaggtaagcatcctgatcccccgcggaagctgctcacgtggcaactgtggggacccagacaggttatcaaaggcacccggtctttccgccttcaggagtatccctactagtgaattctagcggggctctgcttggtgccaacctcccccaaatgcgcgctgcgggagtgctcttccccaactcaccctagtatcctctcatgtgtgtgcttggtcagcatatctgagacgatgttccgctgtcccagaccagtccagtaatggacgggccagtgcgtgtagtcgtcttccggcttgtccggggcatgtttggtgaaccggtggggtaaggttggtgtgcccaacgcccgtactttggtgacacctcaagaccacccaggaatgccagggaggtaccccacctcacggtgggatctgaccctgggctaattgtctacggtggttcttcttgcttccacttctttcttctgttcacg

SEQ ID NO: 23593 - DNA, 559 bp, synthetic construct
  source 1..559: mol_type = other DNA
cactcacatgggggcgggttttcccgccctacggcctctcgcgaggcccaccccttccctccccttataactacagtgctttggtaggtaagcatcctgatcccccgcggaagctgctcacgtggcaactgtggggacccagacaggttatcaaaggcacccggtctttccgccttcaggagtatccctactagtgaattctagcggggctctgcttggtgccaacctcccccaaatgcgcgctgcgggagtgctcttccccaactcaccctagtatcctctcatgtgtgtgcttggtcagcatatctgagacgatgttccgctgtcccagaccagtccagtaatggacgggccagtgcgtgtagtcgtcttccggcttgtccggggcatgtttggtgaaccggtggggtaaggttggtgtgcccaacgcccgtactttggtgacacctcaagaccacccaggaatgccagggaggtaccccacctcacggtgggatctgaccctgggctaattgtctacggtggttcttcttgcttccacttctttcttctgttcacg

SEQ ID NO: 23594 - DNA, 509 bp, synthetic construct
  source 1..509: mol_type = other DNA
ccccttccctccccttataactacagtgctttggtaggtaagcatcctgatcccccgcggaagctgctcacgtggcaactgtggggacccagacaggttatcaaaggcacccggtctttccgccttcaggagtatccctactagtgaattctagcggggctctgcttggtgccaacctcccccaaatgcgcgctgcgggagtgctcttccccaactcaccctagtatcctctcatgtgtgtgcttggtcagcatatctgagacgatgttccgctgtcccagaccagtccagtaatggacgggccagtgcgtgtagtcgtcttccggcttgtccggggcatgtttggtgaaccggtggggtaaggttggtgtgcccaacgcccgtactttggtgacacctcaagaccacccaggaatgccagggaggtaccccacctcacggtgggatctgaccctgggctaattgtctacggtggttcttcttgcttccacttctttcttctgttcacg

SEQ ID NO: 23595 - DNA, 600 bp, synthetic construct
  source 1..600: mol_type = other DNA
catgtgcattgagtggtgcacgtgcttgaacaaacagctacactcacatgggggcgggttttcccgccctgcggcctctcgcgaggcccacccctccccttcctcccataactacagtgctttggtaggtaagcatcctgatcccccgcggaagctgctcacgtggcaactgtggggacccagacaggttatcaaaggcacccggtctttccgccttcaggagtatccctgctagtgaattctagtagggctctgcttggtgccaacctcccccaaatgcgcgctgcgggagtgctcttccccaactcaccctagtatcctctcatgtgtgtgcttggtcagcatatctgagacgatgttccgctgtcccagaccagtccagtaatggacgggccagtgtgcgtagtcgtcttccggcttgtccggcgcatgtttggtgaaccggtggggtaaggttggtgtgcccaacgcccgtactttggtgatacctcaagaccacccaggaatgccagggaggtaccccgcttcacagcgggatctgaccctgggctaattgtctacggtggttcttcttgcttccacttctttctactgttcatg

SEQ ID NO: 23596 - DNA, 550 bp, synthetic construct
  source 1..550: mol_type = other DNA
ggggcgggttttcccgccctgcggcctctcgcgaggcccacccctccccttcctcccataactacagtgctttggtaggtaagcatcctgatcccccgcggaagctgctcacgtggcaactgtggggacccagacaggttatcaaaggcacccggtctttccgccttcaggagtatccctgctagtgaattctagtagggctctgcttggtgccaacctcccccaaatgcgcgctgcgggagtgctcttccccaactcaccctagtatcctctcatgtgtgtgcttggtcagcatatctgagacgatgttccgctgtcccagaccagtccagtaatggacgggccagtgtgcgtagtcgtcttccggcttgtccggcgcatgtttggtgaaccggtggggtaaggttggtgtgcccaacgcccgtactttggtgatacctcaagaccacccaggaatgccagggaggtaccccgcttcacagcgggatctgaccctgggctaattgtctacggtggttcttcttgcttccacttctttctactgttcatg

SEQ ID NO: 23597 - DNA, 500 bp, synthetic construct
  source 1..500: mol_type = other DNA
tcctcccataactacagtgctttggtaggtaagcatcctgatcccccgcggaagctgctcacgtggcaactgtggggacccagacaggttatcaaaggcacccggtctttccgccttcaggagtatccctgctagtgaattctagtagggctctgcttggtgccaacctcccccaaatgcgcgctgcgggagtgctcttccccaactcaccctagtatcctctcatgtgtgtgcttggtcagcatatctgagacgatgttccgctgtcccagaccagtccagtaatggacgggccagtgtgcgtagtcgtcttccggcttgtccggcgcatgtttggtgaaccggtggggtaaggttggtgtgcccaacgcccgtactttggtgatacctcaagaccacccaggaatgccagggaggtaccccgcttcacagcgggatctgaccctgggctaattgtctacggtggttcttcttgcttccacttctttctactgttcatg

SEQ ID NO: 23598 - DNA, 680 bp, synthetic construct
  source 1..680: mol_type = other DNA
catctgtcctcattacccgtattccttcccttcccccgcaaccaccacgcttactcgcgcacgtgttgagtggcacgtgcgttgtccaaacagctacacccacacccttcggggcgggtttgtcccgccctcgggttcctcgcggaacccccccctccctctctctctttctatccgccctcacttcccataactacagtgctttggtaggtgagcaccctgaccccccgcggaagctgctaacgtggcaactgtggggatccaggcaggttatcaaaggcacccggtctttccgccttcaggagtatctctgccggtgaattccggtagggctctgcttggtgccaacctcccccaaatgcgcgctgcgggagtgctcttccccaactcatcttagtaacctctcatgtgtgtgcttggtcagcatatctgaggcgacgttccgctgtcccagaccagtccagcaatggacgggccagtgtgcgtagtcgctttccggttttccggcgcatgtttggcgaaacgctgaggtaaggttggtgtgcccaacgcccgtaatttggtgatacctcaagaccacccaggaatgccagggaggtaccccacttcggtgggatctgaccctgggctaattgtctacggtggttcttcttgcttccacttctcttttttctggcatg
